United States Patent Application Publication US 2021/0254056 A1 - sequence listing, part 35

SEQ ID NO: 68045 - DNA, 1931 bp, Homo sapiens
gctgttagagccgtgcctgattgacagcaacctgcccgaccacccacactcaccatctggccttgcttggccatcttcttaatgtctgcaatgattttcttctcctgggtctctagtttctgtcgctcgcggtccagctcccgcatggcacggttcagggccctctggttctgccgcagtagctcctctggcgtcttccggcgcccgaacaataggtccatgatggtagaagctcactggcaggcctgagacagatgtgagtgaggcccagttgtagggcatggggcccaggagggcaagaagcagaacagggtcacgggagccttgccaaatgggaaggggctaacggagactggaggcaggaatgaggagccaaaagggagcagctgagaacactgggattgtcccggggacacataaagggggacaggtagacctgaaaattatccaagtgctggcccgagcccctccttcatcgccatgccccaaaagaagttatggcttgcaagttcagcttccctctccagaactatgggtgaggccctggagtccttgatacgactgagagcgggggatgacgcgggccggtgcactggtgttttggagactgtgggcaccgaggacagagcaattgtgggggttctgatagaggaggacaggatgggcggaaacgctaagtaccaagaacaggtgaatgtggggctgtgaagctcaggacaaggcattaggatttggggaccctgaatgctgagggagacggttgggggcgctggggcatcctgtacactgaggacgggatgatggagattcggtcgcactatacaccgaggacagtcagtgggcccggcaccaaagcaaggtggtgttggagacctcgatgttgacgacagggtcccagggagaagcgaggcaccggacacccgggcgagtagaaggcctcgtacgctgccgcccgcacgcccgcccgggatccacggtccagcaggggccactcaccggagctgggacggacacccgtttccgcttccgggtcacgcttctctttctgggatccccgacttgcccaccaactaaggcccctcggtcctgtcgccgccgccgccgtttccggattaaacgacgtgacgtaacatgccccgcccgcacccggaaggttgggaaactccaggagcgcgcgtgcgcccgtgccccggaacgggccagcgtccgagcgcatgcgcaacagctcccgtttcctctgcgcgtccgagtgtttcatgttttgagtcccgcccgagtgacccaagccagtaccggggtgggcgctttccacccaacctccacttgaggacccagcttattcgtgagaccttgacttctgcctgaggcctcagatagaaggagcctcagaaggctcctcctcctcggtgggcccacccacacaagaaaggggcaaagctagagatggcttgtttcttccactttgctggcctcttggccaggaagccacaggtcactggatcctgcctacgcttctcatcctagagtaggcttcatcccaaccaaccccaggcacagtcatggtatccccaccaactttagagctgccccaggcactgggcagcctgttgtagggtgctccaatgccacctgtgaccacaccttccaccaccccagctttgcaggccctaatggacctcagctgcccctcccaccccatagaagtaagaagcagaggccatgcagtaacattcccctttaatagcctggtgggacctccagaggtggaggggtgggttgcctgggcccagctacccaggcccgttgcccacccactccacagcccagagtgggggctgaacaagcacccagcaggggggctagacaagccaattcatttcccatcgctgagtgggtcgggggaggcagcgccgaccttaatcacatggtgt

SEQ ID NO: 68046 - DNA, 2864 bp, Homo sapiens
aacttttctgtatccacagctcccaaatgcccccactcccaaacatcctctgaccgccctaaaccccaggctccccatccatgacctccactctacagtatctacctgttcacccaaactcaaagatcctgcccacccccaccaaccctcagtcctcactgtccttcctcttctctgtctctcagacccagctttccatgtgacccccacactctcaagtccccaacccccgccaccctaccccaccccctctgactctgaggttcacagcacaatagcctaaatttcccctcacccctgtctccaatccctggtactcattaaccttccctcctccacctgtcaccccaaaccccaaattgctgtgactcaggcaggcccatgagtccctggtcctccaacctacttcacccgtttgactcagagattcccagagaccccagcataataaactaaatcctcttccactcatatccccaacccctggcctctactatccctctcttctccgcctgtcaccccaaacccaagttcccgtctaacccccagactctcgagtcgtcagttcctccactccactgcctgactctgagattccgagtccctagtagcagacaccaggccttcctaatatcctaaaccaccacataccgggcccctatctctgaccccctccccgtgactgcatgatcccaaccctcaagacttgacctccgaccccccccacgctcggggcccttcacctctgaccctcagcaaccgcattaccccttcctgactcccacatcaccctgcctcaggccctgacctccgacctccggctccaaccccatcccctgaccccctacccttctggatccgcagctgcgccgccgacgccttcttgctgctgcccttggtgccgcccgccgactcctcctccttcttctgctgcttcagcgagaacagcttgatcatcctgccgccgccgccgccgctgccgccgccgcggggcccgggaccccggccacccggccccccgccgccgcccgcgtcgcctccgctcctcggacccgcagctgcggcctcctccgctgctgccgccacccgcccggcctgccgcgccgctccgctcctctccgcgcccaccgcgcggcccgcctcggctcccgtagtccggctccggcctggcccagcgcctcggactcgctcggcagcgctcggccaaattcggctgttctcgggcccgcccggccccgcccccactgcccggggccgctccttccttgccctcgccaactctggtctcaggccccgctgcagctgcggactcggggctcccccgaccgtgccgtttggccgctcagctgatccctccgcgagggggtgcggctaggggtgggaggaggacacggcagctgcggtgacggcgggcgggtactggaggatcgtcttccgcggcagcagcggctttagcgcggaggtcggcaacggcctcgggcgccccgccgcttcggatatttccgccgcctgcccgctttggctcttcccgcccggcctgcgttgtgcgcctgcgcagccgccgcaaacccgcgttgctcagcgatggagtttggggttcggcctccttcggctggactcgggcatttccgttcatggagatgacgcttcggcggccttgcaggtcacttccggcgactttcgcggggccgggcaggaagcggagttagtcgccatctttgagtggggcagacgtgggccgcttttgctcgcggtcacttcatcttaagttgtatatatgtgcagagcgcggcgcgggtggtcacctccgctgctgccgccacccgcccggcctgcctttgaccctatgggtcacagacaaggcagggtgatcgcggcaagaccctgagtgagactagatgcgttacccagagggtgcgaggtcgagtaccttccctgtcccatcgcaaacccaaagatccccgttcctggagattctgattgaggtaaactaacaaaacatgtattgtgccagagagtggtaagcactgtggagggttacagtggtgtaggggaagacctgtcggggtggacacttggggaacgcgacgtgggggcggaatcgggccgctattggcgtgggcctcaagttccagcggacacgcactgcagcctctgcgcttcccccactatctggaaaaggggatggaggcgggggtcagcttcccatccaatcacagctcagcgtgcctcggagggcgggaggaaacggaactctgccggtcagcgacttccggccgtcaccacggaaactgccagccccgtgagcgcatggtgtggcacttgcctgcggaggggcccaggcgccactcctctgattctgcagatgctcccccaggagtggcttctggccaaggccaagccccttctttgaaactgcctttcagcctgtgttacctgcacccaagtcacccactggagggttgggggagaggggctgtgtgaaggacctggacaatgggatggaaggggaagatggctagggcaaaacaggcaatggcactgggtcctggagacgctgccctgaagcctgcagtatgctgaacttatgctctcagcatctgtccactttcacctaagctgcgtttccactggtttgctgctgaatctactcctgactgaaaccttccaatgtgcatggggccagggtgggagaagccttcagctctagcgatgggaatgatcaccacagggcagggaaactggcccagggcctgcagcctttgcttctcagactggctggggttccatctgcagggtcctacaccctcatcacctgctgcttgtgaacacgagaacaggaaagtcttgaaaaatctgaattt

SEQ ID NO: 68047 - DNA, 585 bp, Homo sapiens
ggtgctgggtgaggttggcgtgctgccgaaagctctggccgcactcggggcaggcgaagggccgttcgcccgtgtggatgcgctggtgctcggtgagccgcgagacctgcgtgaagcccaggccgcactcaccgcagtggtagggcttttcgccggtgtgtgtcctctgatgacgcgtgagcttgaggcgctggctgaagcgctggccacactcggggcaggcaaagggtttctcgcccgtgtgtacgcggagatgctgcgtgagcgtaggccgctggcggaaggccttgccacactcggcgcaggcgaagggccgctccccggtgtggatgcgccggtgctgcgtcaggttggagcgctgccggaagctctggccgcactcggcacaggcgaagggccgctcgccactgtgcacgcgccggtgctgcagcagcactgagcggcggccgaagcgctcgccgcactcgacgcagccaaaggacttgtcgcccgtgtgtaccgcctggtgctccagcagcacggcgcgccgcgcgaagctctcgcggcactcgctgcacggaaaggggccgggaggctcgggcgcac

SEQ ID NO: 68048 - DNA, 1533 bp, Homo sapiens
caggagcctgcaaggaagtcccgagactctgattccgcccatcttcagatcactgtgccttcgagaacttgtttccccatttgcaagtggggctgacctccctcctcgcgctgttccttctgcagctgcggctttaggaaggaatctgcgtttatgaaggggatggcaccgcagaatcattcccccgtgggtggcatcgatttcgagggccgcctcatcctgggggccaagcctccactcttcaaggtgccaagtcaacctgaaaccctgggagagacttgggtcatagccaagatggcaggtacctacggagggtcccgaaatacacttcccagaagtccaggcggcaacttccgctccagggtgccaaggtaggtccagacgacgcctaggcaaccgggggcggggctcccaaagcctgtcgtcgtggcaacgagtagtgattgacaagcctctcgctctagccctgggcgctcccgcaaggactgcccggattcgttccccgcgcttccggtctcactggggagccggaatccccgagtctgcagccaccgcccccgtccacacgatagccctcccggttaagaggaccccgccctcacctctgcgctcagcgggccgctccgcgctcctgagcacgcgcagtcttcgacttccccctcccgctggactacgtctcccaggatgctccgcgcaccagctcgagcgcctccttgcccttcccccaccctcgtccccgtttctacaccctctcctcccttcccctagcggtggtcgcaatgatcaggtcatactcctggccgcttcttcccatgctccccgcctcgaatccgtgcgtcggcatgcgcaagcctctcaggtacaacagacggcagcaccgcctaccagatcgcgcatgccccccaccacgttttcctcacttctctacgggccttcctgagattagcaggatcctgcaccaatcacggccgtcattagaactccgtcggtgccccaccgcgtctccatggcaactccctacaggaaggggcctctgctacttcctagaccgcaaaatggagaaaggcttggcccgatgctttccggcagatgtagtcagcaggcccttcgtgtgtacgtgcgcgcgcggcgcgatgacgttcctctgtgatcatgggcgaggggcgggccctgaacgtctccatggtaacctggggacacgactcgacatcgcctgggtaacccggagacgcggcgggcgttgaaaatgcaatggggcatgtgggatgaagaggtggggaagggtactggggcagagagatgccgatcgatagaaacagcgaggagagacggagagagaccagagactcaagggcaaagagagacgaaggaccggcgggaggaagagagagagagacagagagacagactcacagactgggaggaccggagactcgacgcgaggagagacagtgaaaataagtgaacaaacatagagacacgggtccaagttataagagggctgagtggatcagagggtcagggccgggcaaa

SEQ ID NO: 68049 - DNA, 1261 bp, Homo sapiens
cgtgaacccgggaggcggagcttgcagtgagccgagatcccgccactgcactccagcctgggcgacagagcgagactccgtctcaaaaaaaaaaaaaaaaaaaaaaaaaaagaaaatagtgacacatacccaggaaaggaaggaggaagggagggtgatgtaagacaaagacattaggcggcgagaaagccagcctttggtcagaagcagcttctggcgcccctggctggactctgtgcggtgcggcctcgttgccaaactacattttccggcagtacccgggacgccgggcgcagagcggagagcgtcgcaaggggcgggcctgacgcagcctcctccctgcccggccgtcgccaggcaaccttcccccttcgcggccgagatggaccctgggctcggcgtcctccggaaaactgcactgtgaggcggggcgatggggaagggccgaagccccgccagcccagctaaagcagacggctcgcactgcgacccgaaggtgaggttgatcggccgcgctggggccccggcttcggggcaggagctgcagcccctcctcttggttcggtcggggaactgggatatgaggccactgtgtccgcagctggcacgcacccgagtgggccaatcggagccttcggcggccccacggctctctgggaaatgtagacccgctacacgggacggtacccgcctaagaccatactgcgcaggtgctgatctgagtctgggtccctcctgggtcgaggagttctttggcccagatctgcgtggaggcgtgttcgcccggccctaaggtcccttgcgggccttctcggcctcacagcgcgtgtccgctgttcgttccccttccctcctctgtcttggaaatgtagtctcgagggaggagcttggtcatccacccagacttcgtgaggcccccgggcttggggctgcctgttgagagtgggagggagagaatgtgtgaatgtgtggatgaattaatttgcaattatgggagcgcaggcgaaggtgtgaatgtgggagagagaaggatgggcccaagagtggttcagatttcggggctttccccgatttcaaagcttgagtttgagccttccccatgtccacccgcctttccctgtcactctagctgagggccctgtgtgctgtgcctccttgtttcaaggcaggtgcatggtccatggaggtactcatcataggtgtagtcattccacaaagaacggtcaggcggcatttgttccttttttccttccttcctccc

SEQ ID NO: 68050 - DNA, 662 bp, Homo sapiens
attattcccattaaacaaaagcccaaggtacaaagtttctgagtaaaaaaataggcacattttaaggcttctgatatatattgccaaattgtgctacaaaagaaaaactgtaccaattaacactcccagcaacaacgccaagagaatgctagtttccccacatctcaccaacactgtctagaacgcatagttttagagatgaacgctgggaaccgacgcactgtttgctctacctctccccctcctaacagtctagaacacaggcgctcaataaatcaatccaggctccagtccagtagacattctgatctaatctgactgctctgggtaacagaaaagtctcccttggttcactgcccagtatcctggcatcatgtggatcctataaaggcagtagctccaagcacattacagagggacccaactccattaaaccaccaccagctccccaagccaccccttcagccatgaagttcctgctcctggtcttggcagccctcggattcctgacccaggtgatcccaggtaaactggataaataggaggaaaggaaaactgggaacgaggaacactagcatatctggttgctctggtgatagatgagccaggttgggtggaggcagggctcaccccactgagttccagtctaaggtagagatctc

SEQ ID NO: 68051 - DNA, 933 bp, Homo sapiens
tatacccttacattctgataagacagtgagaggagaaaaatgaggttctgaggcttgctctgggtcccacagcaaagtgtgacccggctgggactggaattcgggtctccagcctatatccgcggagcagtcacgaccgtgagagtggagagcaggtggactgcagggccagcgagcctcccaccccagccctagtcccccaagactcaccggaacctggaactcctggactatggagtgagtcccagagtgcttgggtctggaaagagttgggaagggaaagaacttccattatccccagcccaaggggcagcaagcagcaattcgaaacaggattggagtctcgaaccagaaactgcagtttaccggggacaatagccccgcgggagtggggcggggccaaggagatgtgggcggggagaggacgggggtcagaagaccgagggcgacctcgaggcgagggcgggacagcggcggggtgtgaagtacgcatgcgtattccgcctttcttccaatttttttttttttttttttttacctacttttgtaagacatgcgccattggggaaaatggaagagaagttgcgagtctgtgagaccctgatcttctggtataactactcggcttttccaacttccttgtctcagtgtagatcgcgcggtaacccaggccactcagaagtcccgagacccgatgctttcgccagcgtctcggtctccaaggaaacgcgacgccgcctaccgagcgcctaaagggactaacctctcaaggcaaaatctagttcggcccgcttttcaattttcaaattcccttcagtttgctctgcccataatcctaaaatatgatatcatatttctccactctcatcaaacttccaccatttccttcgccatcttcactcttggctaatgagtttgcttccaattttacta

SEQ ID NO: 68052 - DNA, 2591 bp, Homo sapiens
gagtaaaattttaatgataaaaagttaatggtaaaatgttcactgtaaaactttcaacttttcttcttgaaaacgtgcataatccgacgtgggaaaaaaaataacgcattgcagtcagttctggggaaacggaaagctaagttttaattttgctattgcttttgcttttttaacagaaaaggtacaaaaaagaaaaaatgggagagatgttgccgaactccgtcccgcctgtgggctgtgggccgttagcaaagctgctagcatgaaatcgtcgagcaccgcttgcgaaacgccaaatcctcgagagcgaggccggaggctgccaaacccgcgctggggaaagggccgcctccgggcgccccatcccgctgcggacggaggtgaggttggagcgagcgctggcggaagagaggctcagcgcagggggcgcagagccggcgctggccaatatgcgccgcatgtgatacctttgagggcgcggcgggggagggtagcgtcaaatttcaaaaaaaaaaaaaaaccaaacccacacagccccggcgggcgggcgcgcgcgatgggcgccctttggctgcgggagcgagtggaggatgctgggaaggaggtaaaatggccaccggcggcggcgcggaggaagagaggaaacgggggcggccgcagcttctgccccccgcgcggcccgcggcccggggcgaggaggccgacggcggccgcgagaagatgggctgggcccaggtggtgaagaatctagccgagaagaagggcgaattccgcgagccgcggccgccgcggcgggaggaggaaagcggcggcggtggagggagcgccgggctcggcggccccgcgggcctggcggcgccggacctcggcgacttcccaccggctggccgcggggatccgaagggccgtcggagagatccggccggcgaggcggtggacccccgcaaaaagaagggcgctgcggaggcgggcaggaggaagaaggccgaggcggcggcggccgccatggcgaccccggccaggcccggcgaggccgaggacgcggccgagcggcccctccaggatgagccggcggcggcggcggcaggcccgggcaagggtcgcttcctcgtccgcatctgtttccagggagacgagggcgcctgcccgacccgggacttcgtggtaggagcgcttatcctgcgctccatcggcatggacccgagcgacatctacgcggtcatccagatcccgggcagccgcgaattcgacgtgagcttccgctcagcggagaagctggccctgttcctacgcgtctacgaggagaagcgggagcaggaggactgctgggagaactttgtggtgctggggcggagcaagtccagcttgaagacgctcttcatcctcttccggaacgagacggtggacgtggaggacattgtgacttggctcaagcgccactgcgacgtgctggccgtgccggtgaaagtgaccgacaggtttgggatctggaccggggagtacaaatgcgagatcgagctgcgccagggggagggcggggtcaggcacttgccaggggccttcttcctgggggccgagaggggctacagctggtacaaggggcagcccaagacatgctttaaatgtggttcccggacccacatgagcggcagctgcacgcaggacaggtgcttcaggtgcggggaggaggggcacctgagcccttactgccggaagggcatcgtgtgcaacctctgtggcaagcgaggacacgcctttgcccagtgtcccaaagcagtgcacaattccgtggcagctcagctaaccggcgtggccgggcactaaacacccgcctgcctgccagggtgaacacacagccagcttatccctcttaagtgccaaaacttttttttaaaccattttttatcgtttttgaaggagatctttttaaaacctacaagagacatctctctatgccttcttaaaccgagtttactccatttcagcctgttctgaattggtgactctgtcaccaataacgactgcggagaactgtagcgtgcagatgtgttgcccctcccttttaaaattttattttcgtttttctattgggtatttgttttgtttcttgtactttttctctctctccttgcccccctcccgccctccccgccccataccttttcttcccctggattttcaccctttgggctgccttgctcatctttatgccccagcactaggtacggggcccaacacgtggtaggcactccatcagtgtttgctgaattgaaaacattgttgactgtggcttctatcagagtgtctaccttttgcagctcttcccctccctcatttaatttgctgcttttaatctacgtggtctgagaatttgtgaaaccagtgttgttagaagtgtatataatctgaatcaataagctctgaatggtggccaagggcctctcttatggcacaaagatgcatggacttcatgacagctcttttggtggctcagaagccattttttatagaatcatggaatctagaatattcctgctggaaagaacctgagagttggtttggaccaattccctggttttccagcagatgaa

SEQ ID NO: 68053 - DNA, 2928 bp, Homo sapiens
aggcggatctcgaacttctgacctcaaatgatccgcccgccttggcttcccaaagtgctgggattacaggtgtgagccaccgcgtcccgtctatcataagttttattgaacattgcctaggtatcaggatgtgtttacatgcattatctcatttaatctgtaaaaccaccatgtgagggagaaactgaattatccccattttcaggataaggaaaaggagggactgggaatgtgaactcaggaagtgtgactccatcgggtagactgctcaggctgcagatgtaaaggttttacacgtaggcttttccagatctcagcttctgaaaggcggagggaccgtttggacgggagcagggcctcctcttccaagcaccctgtgcctttaagagtcgccccctccctccagggatgctccaatttctttctccccaccacccccaccccgccccccgcgccgcggagccgcacctcggtccttcctccccgccccacaccctcaagctcggctcttggccttcgctcgtccagaagtgggtgagctgtaccgccagaggcgcattctcctagccccaaaccatgcccgctacgccccagcggaatgccaccttaaagaccctaatccgggcacctcccagctcctgcttcccaagggcgaggcctcagcgccccctcccatcgcccatgctcacgacgccgtgaaggtgacctcccccaggggcggcacacgcccagtggtgcccgaactggctcacacgtggtgagccgggagcgcgcggcccctccccgccacgcgcctcgtgccggccacccggccacgcccccaggactggctccgccccgtgcccctgcacgcttctccaggcttgggtggggcgacgcgcccaagtcgggcaccgggcaggctacggggtggggtaggacctgggaatggcgcacccacgcatcctcgaatgtcgcctgcggtttgtgaaaagcgggaagtccgcccagctcaggacctttggctggcaggcgaggtgccccgcggcccttggtgctgagcaggggagagacagctgggaccgcgagcctgggaatcgaatcctagtctgcgtgtcctcggtgcttcctatttggaaactgggcatcatattatcatattcccttctccctccggattcttatggagcttcgaacgagattaaatatacatatatatgagaaagggatttgttcactaggtccaaaagcatttgctggtcccatatgtggtcggaccctgtgtgtagtaggcggggggcaacatctacgacaacctgagttcgtccccttaagaagctttcctgagtcttgggccccccaaattctcttctgggatggtccgaaaagacgtccctgaaagaggaaagggcggaaatcctacctgacggcaggtgtctcggaatgagctaaaatttaaaaggcaacgcggggcagggacaagcgtccagcgtcagatggaagcaggctcgcgtcccctacccttcctccaacccctaacctaagaaaagaaaccgatctcgccggtctcccccaatcctagccgcgagaccgcccagccccgcagcccgagccccgccccgctccggcggccagcgattgggagatgcaaataccggcttctctgcccagcaacgggtgacgcggcgcccgagcgcgaggcggggcccggccgcagcccaagcgggcacctcggtgtttacacggggcggccccgcgcgcgccgcagcggcccgcagacggcgagggggaggggtggtgcgcgcgccggcggggccgcgcggggagaaagacactgaaaggcgtcggcggccgggcggggagcggcgcgcgcgggccgcggcggagccagaggctgcaggaagagcccgcgggggcccggagggtgcgattcctcggcccccgcaaaacaatgtgtgttgtgagccaggacgcaacttgccggaggcggcgggggcgcgccgagcccgcctgagaccgcgctgaccttctccccccgccgtccgttgggcccgagcgcccagctcctcgctccccagttcgcgggggccgggccgagccgcggggcggggccgcccctccgtcgccgctgcctcctcccccacccccagccgcggaggatgcggacggcccccggcggcgtctagcggccccgggcccaggcgcgatggtgcagcagcggggcgcgagggccaagcgggacggcgggccgccgcccccgggacccgggccggccgaggagggggcgcgcgagcccggctggtgcaagaccccgagcggccacatcaagaggccgatgaacgcattcatggtgtggtcgcagcacgaacggcggaagatcatggaccagtggcccgacatgcacaacgccgagatctccaagcgcctgggccgccgctggcagctgctgcaggactcggagaagatcccgttcgtgcgggaggcggagcggctgcggctcaagcacatggcggattacccggactacaagtaccggccgcgcaaaaagagcaagggggcgcccgccaaggcgcggccccgcccccccggtggtagcggtggcggcagccggctcaagcccgggccgcagctgcctggccgcgggggccgccgagcagcgggagggcctttggggggcggggcggcggcgcccgaggacgacgatgaagacgacgacgaggagctgctggaagtgcgcctggtcgagaccccggggcgggagctgtggaggatggtcccggcgggacgggccgctcggggacaagcggagcgcgcccaagggccgtcgggcgagggggcggccgccgccgccgccgcctccccgacaccgtcggaggacgaggagccggaggaagaggaggaggaggcggcagcggctgaggaaggtgaagaggagacggtggcgtcggg

SEQ ID NO: 68054 - DNA, 944 bp, Homo sapiens
cctcgggcacgtcgcacttcgagttcccggactactgcacccccgaggttaccgagatgatcgcgggggactggcgcccgtctagcatcgcagacctggttttcacctactgagcccaccgtcagcggggcgcgcacgcccccaaaccagctgtttacatacaggaatcaggtattggggcccctcggaggccgaggctggcaccccatctcccgcgcagcctgccccctcctggacgtgcccatcccccctcagatccagacatgcccctcccccgcagacacaccccaaggcagcccaacccccaccccttccccgacacccaagcccctccccacgtcgccccctcctgcacagccaccagcagccagccccctccgatacacctcccgtcctctcctacagacctgcacccctccccccttttgcacacgcccctcctcgtggccggaggacccgccccctcctttgctccggaatctctcctccctcgcccggcccgccttctctgggttaggggggcgatgcggccgggtggcaacgcacgcgcctcctgcgcccctcccttccctggggggaggggcgcaccccttttatccccggagcgctagggcccgcccctccgctggggcccacccccttcgtgcgcatgcttaatgcttctggggaggagggggctggtcccagcggagccgcactcttcgcccgctccgggcaaaagcgggggcgagtgtagagcgatcctgggaaatcctttgatccgggagccctaggtttcctctccagccaacggggcgtcgctgccttaatgggaggagcactcggaagggttggtttgggcctgaaactctcccaagtggcatagccccttttccggtatggggtctcctacacccacgcgcaccacctctccggtcgcgtggctgcctctacagcctacctat

SEQ ID NO: 68055 - DNA, 1591 bp, Homo sapiens
ttagccctgccccacgcgcggccaggccccagccccagcccctggagaacccccgcgctctgcccgcatcctcagcccgggccgtgtcccgccagggccgggacctttgcgcctgagcctcggctttgggaggtgggggtcccagggaagcagcaggggcgggagacagaaacagccccatcgcccctcgacgcctcagggttgataggctgggtagaggcttcaaaggacacccccacccccgccaacacttcaaaaacccattcctacccctctctgcctcagtttctctctagggaaaaggacgcagttggtgtggagcagggcatcggtggtcctgtcaggaagagtggcgcgggtgccggtggggaagggaggcgggaaatggcctgatttccccggccgacaccccctacccatcccccccgggagggcgccccttctcccccgcccgggcagcgctggacgctgtagtgggcgagtctgagggtctgggaaggacacaactgaatgaggctgtgcagaggcgacagattccgtccatcttcgggccctggcttccgtcacttccgcccgtgcctgccgcccctcgcctcctccctccgccgcagtctccccacgtcggacagcgcagccccctccgcctcccgctcccctcccaccgagctcctcccggctcccgggctggggacgcctccctagcggttcccatggcaaccctcgtcccgggtgcctgcgccccgccccccgcccgccagacctactccgtgcagccctgaaacgccaggcggaggggccaggccgagcgggaggcagcgtcaaggtcaccttccctctccagtagcagcaggactgagtgattccatctatttggagtcgcggaagcggtgaattggaggggaggagctgacccaggtcaacagccccgaagccccctccacacctcctcacctgtggccttgaacagtggtctccgcacggaggctcctaccgtcccccaggccccatttcttctccccacccgggcctccccagcgcctcgccggggcgggtaccgcgctggccgcaccctccgcacagcccgccccgcccgcctcctccggcgagccctcctctccagacctctcgccctcctcctccgacggtccttcgctttcagtctctgccttttcccgttctctgtcgtggcttttgttgttgttgtttttcctcctttccttccccgctcttcttttccctgaattgtaagtgaggagggtgtacagccactatttatggacaggctttcttgacagcaatcttgtgtgccgtgtgactccaagcagaacctccaaccgtgtgtgtgtgtgtgtgtgtgtgtgtgtgtgtgtgtgtgtgtgtcgtacctatctgggtatgtctctgtatgctttgtgagtatgtctgtgtgtttctctgtgctgtttcggtgagtttctctatgcagggatttgaggaccacatctgattggaagtgaggggcagctgtcaggacctttatcttaccctttggaacaagcacattgtttcattttgcaggaggctgctaattaaggctgagggccatcatgga

SEQ ID NO: 68056 - DNA, 2559 bp, Homo sapiens
gtggatcacctgagctcaggagaccagcctggccaacatggtaaaaccttgtctctactaaaaataatacaaaaattagctgagtgtggtggcatgcacctgtaatcccagctactcaggaggctgaggcaggagaatcgcttgaacccaggaggtggaggttgcagtgagccaagatcacgccattgcactccagcctgggtgacagaatgaaactctgtctcaaagaaaaaaaaaaaaaaaagtaaaaaagataaagctcagagaagtgaagtggcttgcccaaagtcaaatggctgagattcaaaccctggccctataatattaggcaacggtgtctccctccaccactgtgcagatgcatccatgagtgaagagatgtgctatggctggattccctcattgacattccctgtgaccttggacatggcatggccttgtctggcccacattctcatgttgagtccattcacaggtgtgctccatggatgtgcatggatgggaccggcaaccctggccttgctctgagtctcagcttggcttggtgtcaccagggctgtgagcttccaatcccagccttgccatgtcccagagcacatggctcaaaaccaagctctgggcatcaggccagcagggcccctgtgatggaagaactgacaggatttcataagcatccggcccgggacacgtggtcagggcagggagaagggagataaacaggatgtccaccagggtgtgcacctgggcagggtccatggaccaggtgtggcaggggaagagctgtcaggacttggcatctgatgggcactcagcagatataggctgtgtgaggggaggagtttgtggggaggcagggctgcagctttgcttccatcctggaggccaggaatgagggagtaagtgagccattgactcaatgaatgaatgaatgagcgagtgagtgaaggaaggaaggggtaagtaaataagtgaagaatggaatgggggagggagtgaatttatttatttatttatttatttattttgagacagggtcttgctctgttgcccaggctggagtgcagtctcagctcactgcaacctctacctctcaggctcaagggattctcccacctcagcccccagcatagctgggactacaggcgcatgccgccacatcccgctaatttttgtattttctgtagagatggggtttcgctatgtcggccaggctggtctcaaactcctgggctcaagcgatctgcctgcctcagcctctgcagtgctgagattacaggtgtgagccaccgtgctgagctgtgaatttattttttacacaaatctgagtgctcactctgtgctggccctggacgggtctctgtggatgtctggtgagcaggatggacacagcccggtcattgcaacgctaaaagcttgaatgacaccagtcaggctggggaactgggagggcccttgacatgcagagtgactcagccagtgtgagcaggggttgtcagcatgcctaggggagcaagagactgtgagagatgtgtgtgtatacttgtgtgcctgtgtgtgtccgtgtgtacacatgtgtgcgccgacacagccaggtgttggccaatgcaggtgtggtgtcctcaagagcacagtgcatcctgattcttcaccctcccaggcctcccctgcccctgttgtgtgccagctgggcctgccccatgttatgcctgacgcccacgcaaaagctgcttcttccagtcacaggacaaaggcatcctcagcccagaccctgtaccccaggggtaaagacctctcagacccctagtgctcctcagcatggacctctccaccaggagcctcagagttgtgagaagcacaggcacccaaagcccaccgccctgtgtccatgtgcatggagtgtgcccaggtacacgcaagggctggagatgccccagggcggtccagacagacgtgcagatgacacattggccactgagtttccacagacactgagctaagtgctttcgagacacactgggtgaccttaggcgtatcaccctctctgagcctcagtttctaatctaaaagtagggtaattatactcacttccagtcttgttagaataactcaatgcatgatcagctcaacacatcatgattatttttcctgagttcctgccttcccagctatattgtctattcctcaacagtacccactgagtcttatatccccgtttctcctatgatactccattacacaggactcaaataactacctgctctaagaattgctgagtgacatgtagtcctcataaatagcaataatagtcactaacatttatataacaacaagagccagcaattttgattttttattgtgtcaggcattgtgctgaacactttacattccttcattcatttgacaaacattcactgaacacctggtaggtgctgggctctgtgctagacctgcagatgcagcatctctgccctcaaggttcttacattctgatggggaagaagagacagacaaaagacagtttggcggggcacagtggctcacgcctgtaatcccagcact

SEQ ID NO: 68057 - DNA, 4513 bp, Homo sapiens
tggaggttgcagtgagccaagatcgcgccactgcactccagcctgcatgacaggagcgagactccatctcaaaaaaaaaaaaaaaaaaaaaaaggtaagtgagatcacttccctcctctccttaaaccctcccctgcctccccatgactcctcagcgtcctttcaaaggcctccaaagctccagattatctgaaccccctttacctctctgacctcatctcccaccgcctccctgtcactggctgcactccagccacattgaccttctccgatggcacaccagtcagctagtcagcttccttttggagcttttgcatgagctgttcctcttcctgaagaatttgcccttcggatagtctcagggcatccactgaacactccactcaatacagccactgcctgcccacccaacactcctcatctctgtacttactctttttttcccttgcattcgtcaccccctaacatgtgctacaatgtacttattatggtaattatttcttgcatgtttctttctttttttttttgagacagggtctcactctgttgcccagtctggagtgcagcagcatgatctcagctcactgaaatcttggcctacctggctcaggccatcctccctcctctgcctcctgagtagctgggactacaggcactcaccaccatgcctggctagttgttgtacttttttgtagagatgaggtttcaccatgttgcctaagctagtctaaaactcctaggctcaagtgatcctcccgcctcagcctcccgaagtactgggattgcgggtgtgagccgctgtgcctggctgcacttttccttctaatggaatgtaagcgccacttttgtctgttattttcactgtagtatccctagcctttggaatgttgcctggcaagtagtaggtactcagtaaatatttgttgaagaaacggatgattctataaatagcatggattgatatgggaaagctatgtaggtggatggatggatgcttgtcggatggagggtagatgaaagaacagcgagaaattcgaatggctagatggtggggatgcattataaaataataattcatagatggaaaaggaatgaatagatgggtggagggatttaatctcttcaactactatttactgaccacttgccgtgtgccaggcactgtatgaggtgctagagacactggtgagccacacaggcaaggtgcctgtcctaagggagcctgtagttcagtgggtgaggcagacactaaacaaataacaaatacatacataattccaattatagttaagtgttctggtggaaaagaacaggatgctctgggagagaataatatggataagtgatggaaaaatggacaataaatgggtagatggagatggataggatcggggttatttgccttaaagggcctggcttcaggactggagctgctttaccttaaagggcctgtcggaccacatgtaccatcccacatcccagaccagctctgcactcagagactgtccctctctccctgccctgactcagcacctgcctggcctatccccagtggtcctgcctgactctacctccagctcccaccctgctgagtcacagtcaggctggtcagggggctgtcccatgttcagtccagcccctcagccttcctcgacctgggggggtatggggagcagcccagaggggaggggagcaggtgccaagctcttgattcctgtgcctgagcactgccctgttgagaccagagagagaatctatggctagggtatctggggctacagttggggtttatctggggcctggggtcacacatgatggattagagctaaatctatctccagggttataactcaatcaggagctagaattcaaattcagtttatggatcatgtggggaaaaagtgaccaagacaccgttcagtttgggacctgtgtcggcgttagctgtggctacggcccagggcttagtgatcacaggtcagaccatgttcaaggtttcaggccagagtgcagttgaagtgcaaagtcaggcaatagggttcaccctaggaccacagtcaaggatctgggtcagttagtgtccagggcactggccttgtctcctcttctttgggagagaagccaggtggatgagttggatctaaatgtcctgaggagcaacttccagctcaagttccttcacccaggcggcctaagccctctcagcactggccccaaagccttccttcatccctcaacttcctccatcactccctgacagcctggccttgctcagtgtccctcgcaaggctgaacagtcctcattctggcacctcaggggacagggtaggggtggggactatgggacagggctcagtgctggacccaggagggcgccttgcgcaaggttttctgatgcaactggctgagtgcttcagcattccacccccaccccccaagcttttctcagaaaggcaaggcctgggcagttatccagactgaacatataatccccttccttctctggcctttgatggcttcaggacctgcaggcaaaaggaaggcaggaaggcaggcaggaaggaaggaaggtcaggtgactcagcaatgcgtccagcactgggagctggcagatctggggctccctcatcctccagctgagaggcgagaaagagaatcaggatccctggaagtttggagatcctaaccccttatacatacaaagcagcaattatgtgcctaagcccagggagagacctgtagctgcccaaggtcagaggcaaggtcagaaccagaccagctgtcttcagcccatggctatgatctagctatttccactacacagaaagagagaacccttcacccttgaggaggacacgggacttccccaggaacctcccgtcaatcctgttgaggctcctgaaatggtggaatgacgtggactttggaaccacgcagacctgggtttaaatcccaggccaggcacggtggctcatgactgtaatcccaacactttgggaggctgaggcaggcagatcacttgtggtcaggagtttgagaccagcctggccaacatggtaaaaccccatctctactaaaaatacaaaaactagccaggcgtggtggcacacgcctgtaatcccagctactcaggaggcagaagcgtgagaatcgcttgaacccgggaggcggaggttgcagtgggctgagatcatgccaccgcactcctaggtgagagtgagactccgtctcaaaaagccacactggctagctgtgtaacgctgggcaggttactttcactctttgacactggatttgctcacttgcaaagtgggcgtaaatgcatccttagctcacagggctgtggtgaggctgacatgaggaagcactggaaggcacagcttaggctccacatgggccactctcaggaagtgtgtccccacctccccctttatcctcagctctcactgggtgtgtttgctggggaaggaggtgcagcagccctggggccttggaaataataatagccactcaccctccagtgcttaccatgtgctgggaactctcctaagcgtgaacttaacctgtattagcccatttaaccctccatttaatccaataacagttcccaggccaggcatggtggtgcatgcccatagtcccagctactcaggaagctgaggcgggagtatcgcttgagcctgggaggttgaggctacagtgagtcatgatcaccctactgcactgcagcctgggcaacagagtgagatcttctctcaaaagaaaagaaaagaaaagagggaaggaaggaaggaagggagggagggaaatcccaatgacaataagcagttcaataaccctacaggaaaacactgtcatcaatcccactttatagatagggctgtgggtctgagtagctaagtgactttgtccaagacagtggacaagagaccacacggattttgagccaggccagctggctctgaatcccactgtctcctccctccttaaactagtgatgtcactgctctgagccctggtttcctcatctgtctccagggataaaaatagcagcttcatggggaagtttgaggatgacacaagatgacgtaagggaggtccccacacagggctccacccacaggcatgagaagagcctttctcaggaagaatcccaggccgcccctggggcaaccgccgggctggccttcctgcctctccttaggcccagcctagcgtgatctggatggtgagagatttctgcaaagcccccaggggcctccagagaagggaggtgcccggtctcctagataagggctcccagagaggatcacagccctggagttgccattcttgaatcacccactgtcttccccaagttgattggtctgaatccatgtacttattttttatattagttccataatgtcttccttccaaccagctcatcttttacttatttatttatttatttattttatttatttttttatacagagtcttgctctgtcacccaggctgaagtgcagtggta

SEQ ID NO: 68058 - DNA, 4217 bp, Homo sapiens
tctgaggtcaggagttcgagaccagcctgaccaacatggagaaaccctgtctctactaaaaatacaaaattagccaggcatagtagcgcatgcctgtaatcccagctacttgggaggctgaggcaggagaatcgcttgaacccgggaggtggaggttgcagtgagccgagatcgtgccatcgcactcaatcctgggcaacgagtgaaactctgcctcaaaaaaagaaaaaaaaagaaaggtgctggacgcctaggacgcagaggggtgtttcaccccaaatcaagtagcaccaagccctcccaggccttgggtgcaagcatattaaaggcctctttccctctctgtctccattgtttacactccactgagcatccgcaatgtgccacacactgttctaagcgtcttacacatattaaattatttaatcctcacaacaactttatgaagtgagcgcaattatgagcccattttatggagcaggaagttgaggcagggttttaggtagcttttctggggtagcactgtgggttggagcggaggtggagtgcactcttaggccagctggctctaggggctcttcaccactaggccgcactgcctctagcaaagggacgcggggaagctcagcagaccttaggcctcccaagggcgccacggtggttcctttgagcccagagtcagctcttaagtccataggccttcctgaagcttctgaaccacttgcccatagctgggcctcaggctggctctcagtagaatgtggagaatggagattcccgcatgtccacttctcctaaaggttttataaggcagtgctgggaatgtgctttataaaaaaggggaagcaccccgacaacagtcactgtttgctcttttaagcaccatcctgagaaggaggaatgttcttcccatttcataggtggggaaaccgaggctcagaagagcaaatttttggccgggcgcggtggctcacgcctgtaatcccagcactttgggaggccgaggcgggtggatcacgaggtcaggagatcgagaccatcctggctaacaaggtgaaaccccgtctctactaaaaatacaaaaaattagccgggcgtggtgcgggcgcctgtagtcccagctactcgggaggctgaggcaggagaatggcgtgaacccgggaggcggagcttgcagtgagccgagatcgcgccaccgccctccagcctgggcgacagagcaagactctgtctcaaaaaaaaaaaaaaaaagagcaaattttttttccaaggtgatagggagagtccgtggctgatgtctgcactgaccagacgcccctagggggccagcgagggcgggtcccaggtgcagcggatgcagaggagagaggcccgggcgcggcgcgggggatggtgcgatcccgggcccgagggcatcagacggcggctgattagctccggtttgcatcacccggaccgggggattagctccggtttgcatcacccggaccgggggattagctccggtttgcatcacccggaccgggggccgggcgcgcacgagactcgcagcggaagtggaggcggctccgcgcgcgtccgctgctaggacccgggcagggctggagctgggctgggatcccgagctcggcagcagcgcagcgggccggcccacctgctggtgccctggaggctctgagccccggcggcgcccgggcccacgcggaacgacggggcgaggtactcggcggggtgcggcctgcggactcgcccggaggccggggggcgggagggggcggccggggaagggggcgccggaagcctctgggcgtctgcgtgttgccgcgtgttacacgcacgcacgccccttacacaccttttcacagaccccgccgtcggggcgcggccaggtcagatcccttttgatccgggcctgggctgagtgctccccccgggcttcaggtgacgcggccccgcggagcgtggggtcgcccgagttgggctggggaagccagggacggaggtgtccggccgtcacccctagaggagggcgtgcgggggtctgttttgcgtgagtgcgggataggggagtcgtgtggtgcggtgaggggcttgtggggggcactggaggactctgggggtggcgggggatccgagggggtcctcgtgaacccgcaggggagagtcctgggtgagggtgggtcccgagcacctgtgtctcaggagatggtgagagctgtctggagggctgggcacttggtggcaggggttggcggtgcaggggacaccgccgggacagggctggggtgccctggagcgggggagccgagggagtgggagcgggggcgcagcgcgcgatctctggcccggcagggccgctggttctccccagtgcgcggctccgggtttgcaggtggacggtgcgcgcgtgtctgcggtgtgtgctgtgcctgcagaccggggagggcgggggacgacagccacctccttccctctgcctcacccccctcctgtcccagggccgcgcttcaatttccgctgaaacttctgactcggacacccgccgcctttcgcttgggctcccacgggaggggcctggctgcggggggcggggcggggtgggggtgcggccttgctcgggtagaccatgggtgtgacagctgggagggctgtgtgtgtgtgtgtgtgtgtgtgtgtgcgtgcgcgcgcgcgcttgcgcttgatgtaacccgccctcatttccctgggtcccgagtgtggcagggaacagcaagaggtagatattaggggctgctttcattccacatcacagattctattctgcagtgtggtctgcaaaatgccttgcccaagatgtatagactcagttaccgcatctgtccccatctgggtggagcttatcccaggccccaacaggctctgagggatggccggggccaaggcagcctggactactgatgtggcacaggccagagggactccaggcagtctcctgctgcacagggcacaaagcatgtgcacagccaggtatcatcctgcgtgactcagaacagccttgagatgtaaggagtgtcatcccagcctcgaacctggggagctttctaagactcccaaggatggtacttatgcatcttgctgtgaagaataacaggatgagtgctaataatgaccatttcctgacacctacctggcaacaggtccataagctctacatgcttcatttgtgttttcatttcatcatcacgaaaaacctgtaagctttgcatcctgttcccactttacaggaactgaggctcagaaagcttgaggaacttgaccaggggtaccccccagctagaaagggtttgagacaggattagaacccaggaatatctgactacagccactccttactgcattcttaccaagccaaagtcatgacctttcactcatgtggggaggccttcccttccaaggcagctcttccatttgggagcagcgtacttggagaggtgggcctctgtctggtaactgactcatgttgccttgttaatcctgccttgaactgttgggaaggtctttaaccaggctgaggtctctcgcaccaatgcccatacctgggcatgcacctccttggaatggagtttaagtgggtgggcagatgggttctagagagaacccgtctgccctgaccatgccctactgccctctccttcagccaccacacacacagtcacacagctgcgtgaatggtggctttcctttcacttaacagttcactctggagatccttccaattaccctataaagagcatcctcaaccttttaaatggctgcacattgttccgttgtgtggatgaagtataatttatgtaaccagccctgtaattatagacagccaattatttctgtcaaaagggctgcaggaataactgtgtatttgcatgcttacacacacacacctctacagaataaattcttagcaatgggattaattgctgaatcaaagctcacacgcttttcatcgttgtttttgttttgttttgttttgctttgttttgagacagtctcactttgttgcacaggctagagttcctgaccatggctcactgaagcctttaccttctgggctcaagtgattcccctacttcaacctcctgcatggctgggactacagctgtgtgccatcatgaccagataattttttttttcttagggacagggtctcgctacgttgcctaggctggtcttgaactcct

SEQ ID NO: 68059 - DNA, 491 bp, Homo sapiens
ggcatggtggcaggggcctgtaatcccagctactcgagaggctgaggcaggagaatctcttgaacctgggaggtggaggttgcagtgagccgagatcacaccactgcactccagcctgggcaacaagagcaaaactccgtctcaaaaaaacaaaaaacaaacaggaaaacccttattccagcatctttcttggttcctttgcaatgcttatcagcatttgtcaatatttggtttctgggcatgtttgcatggcctcccagtgggcaccggagagcagagcccatggctgtcagtctagctggacatgtggctggcccgtgcaggcccagggccagcatactgaatgaatgaaagcgtgggtgggcaaagaggacgggagctgtgacggtgatgagcatcaggtgccttctgcatcatccgcccttccggattcctcctgctttgtgggttatttttctgtttgggtgacctgttacttttcagttatccga

SEQ ID NO: 68060 - DNA, 1988 bp, Homo sapiens
accggcatgagccaccgcgcccagccttacacacttttttttttgccctgcttacctgtttgtgttttttatataaactggttgccaatattttttaaatggggaccttttcattaaaatacaattcctggcttctcttggggaaaacaatgggaatgtggggccatcttgggaactgcgagggtgggtcacagcactggctctgagtatctgccagccagcgttcccatcccaggcccatgctctacagctgtaaaatggtgtcttccttgcaggctgtagcctagatagaatgaggtgagccaggtaatgagctgggtcaagggccaggaacacagcaggcacttggtaaaccctagaatgcgttgtgtaccctttttaggtagcgcttgtgctgagatgtcaggcacacttcctgtttctctcatcttattacctgcctggaccctaagtttgtagctggtttaagagaggcttaaccctctcagccccatcagccccctccccaagggactctgttgaaaaatgtattcctttcagaattttagtttaaatttaattgctctgtggccttaaatgacttaacctctctgagcctgggcttgggtatctgtaaaacaggatcagacatcacaggactggcttgtgtctgtcaaaggccagcaggcacttggaaagtgggtgccacaagggtgatagcatggggtggtggcatgggggttctgggtaggacctgacccttctgtttctccccatgtcccaggaagaagctggtgctggagaacctggaggactcctgcgtgctgactgggccagatgattccctgtgggacaagcacgcgtgcccagcctacgtgggacctgagatactcagctcacgggcctcatactcgggcaaggcagccgatgtctggagcctgggcgtggcgctcttcaccatgctggccggccactaccccttccaggactcggagcctgtcctgctcttcggcaagatccgccgcggggcctacgccttgcctgcaggcctctcggcccctgcccgctgtctggttcgctgcctccttcgtcgggagccagctgaacggctcacagccacaggcatcctcctgcacccctggctgcgacaggacccgatgcccttagccccaacccgatcccatctctgggaggctgcccaggtggtccctgatggactggggctggacgaagccagggaagaggagggagacagagaagtggttctgtatggctaggaccaccctactacacgctcagctgccaacagtggattgagtttgggggtagctccaagccttctcctgcctctgaactgagccaaaccttcagtgccttccagaagggagaaaggcagaagcctgtgtggagtgtgctgtgtacacatctgctttgttccacacacatgcagttcctgcttgggtgcttatcaggtgccaagccctgttctcggtgctgggagtacagcagtgagcaaaggagacaatattccctgctcacagagatgacaaactggcatccttgagctgacaacacttttccatgaccataggtcactgtctacactgggtacactttgtaccagtgtcggcctccactgatgctggtgctcaggcacctctgtccaaggacaatccctttcacaaacaaaccagctgcctttgtatcttgtaccttttcagagaaagggaggtatccctgtgccaaaggctccaggcctctcccctgcaactcaggacccaagcccagctcactctgggaactgtgttcccagcatctctgtcctcttgattaagagattctccttccaggcctaagcctgggatttgggccagagataagaatccaaactatgaggctagttcttgtctaactcaagactgttctggaatgagggtccaggcctgtcaaccatggggcttctgacctgagcaccaaggttgagggacaggattaggcagggtctgtcc

SEQ ID NO: 68061 - DNA, 4308 bp, Homo sapiens
acaaaaaatagccaggcgtggtggcatgggcctgtaatcccagctactcgggaggctgaggcaggagaatcacttgaacccaggaggcagagattgcagtgagtcaagattgcaccactgcactccagcctgagcgacagagcaagactctgtctcaaaataataataaaatgtaatattcactcttatcaaataatggatgtcaccacaccccgaccctaattagtgaggactttcatgttctacttgtcttcatttaatcatcattgtataagagttttacaatatcaaattagtagatgtatattactgaaagggaaggactgttagaaatttacttgaggaatgtctgccactgggggctgaacacaaaagatcctattgtgacctgccagattattcattcacttagcaattcaacaaccatcgctgaatgcctactataggccaggtgccatgcaagacagatgtgctcccaccctcaagggttcacagtctaatagaggagagagatgttaaacagataactgtacagatggcatagctaattatattcgtggaagttcgttgtggcaaagacaggcatctcaatatttcaggagctcccctatattttctagcctcccttacagtcacatgactagttctgaccagtggggtgtgtgtaggagtggcaggctgaagcaatggagagctggtgagcctcatccctctcttcccctgccacagccaccttgcgcccacaagttcccttagctacaagctggaggagagccaccagatccaccttagatttcactgagcaagaaataaagcttcttgtgttaagtctttcagatttggagtttgtctggtagatagtgttaattaccatgactaaggaaaatttgccattagtgaagggaggaaaaatattctccaccagtaacaaggccatgtcagtctgctgcattataaaccccaaacagtagtttatgatcctctgggctggcaatttgggctgaattcagctgggtcactcctgcagctgcaggcagcaagcagctcgaatgtctaccttgccaggaaggctcttctctgctccacatggcctcgtcctccaataggcatagcctactccttcctatggtggtctcagggtttcagaaagcaacaagagaggacaaattccagtgttcaagctgcactagtgtcaaagcatatcaaatagcatgtcaaattccacatcaaattcaggatgcaggcaaattgattctttctcttgatgggaagagctgaaaataatgtgtggtcttgtttttcaatgtacagtggtcccatttatccaggggggatacattccaagacccccagtggatgcctgaaaccacagatagtacagaattctgtatataccatgttttttactatacatacatacctacgataaggtttaatttgtaaattaaactcttacaaattaagagttaacaacagctgggcacagtggctcacgcctgtaatcccagcactttgggaggccgaggtgggcggatcacgaggtcaagagatcgagaccatcatgaccaacatggtgaaactccgtctctactaaaaatacaaaaattatctgggtgtagtggcgcatgcctgtaatcccagctacttgggaggctgaggcaggagaatcatttgaacccgggaggcggaggttgcagtgagctgagatcgcgccactgcactccagcctggtgacagagcgagactccacctcaaaaaaaaaaaaaaaacaaaaaaaacaaacagttaacaataaatagaacagttataacagtatgttgtaataaaagttatgcgaatgtggtctctccctcaaaatgtcctattgtactgtactcacccttcttgtgatgatgggagataataaaatgcctacatgatgagatgaaggtaaatgaatgacatgggcattgtgatctagcgttagactactactcacctgatgatacgtcagaaggagaatcatctcctttgggtgatccaggatcatgaagccgtgacaatgtccatgattggatgtcaggagcagatgatgttaatgattaaccgtgggtaatgtctacaatatggatacagtgcaaaagggatgattcacatcctacgtggaatagtgcaggattgcatgagatttcatcatgtggttggctgcaggtaactgacattgcagaaagcaaaaccacagatcatgggggtgggggtggggaactactgtacaacatgagatatatttgatcaaataagatgaggtgcacctaaaactttccctacaggttgtatgcccctgagtaaattgcttggtgtctctggatctccagctgttccccttctctctgcatggctaagccctgtccgtcacttggggctggacctagagccctgcctggccactaagccctcagaacagggtttcttttttaaaaaagacagggtcgggaggtggaggttgcaatgagccaaggtcgcaccattgcactccagcctgggtgacaagagtgaaactccatctcaaaaaaaaaaaaaaaaaaaaaaaaaaaaaaaaaaaaagacagggtctcactctgtcacccaggctggagtacagtggtgtgatcatggctcgctgcagccttgaacacctgggctcaagctgtcccccaacctcagcttcctgagtagctgggagtgccaccacgcctagctagttttttaaaaaattgttttgtagagacaggggcctcactattttgcccaggctggtcttgaatgcctggcctcaaatgatcctcctgccttggcctcccaaagcactggggttacaggtatgaccactacccacaaccagaacatttctcaaatgtgattggttgatctcctgcatccatccctggggtgcttgtttaaaatgcagagccctggatcctcccccaacctagagagtcagaacatctgggcttctgcatcttaacaagctccctgggtgatgctgctgggcctccaagttggagaacctctgtatttgaagaaatccggactccttggggactcaaatcttatttcagctcttctctggactagtttgactttagccttggtgtaaaatgggtatacattttacacgcctgtgacgccaggatgcgctcacaggggagggagggctttatcagaggtcagaatctaagccaccactacagttgtactagatccaaggagaaagactcccaggcctcatttcctcatcgttctctcttctcttacctggctttatggttcttcatagcactgagcaccaccaggcagtgtattttatgttttttttgagctttataatgccagggactatgttttgtttataactgttcacccagttcctagaacagtgcctggtacacaggagtgctcaataaatgtttgtggaatgactgaataaaagttgttcctgtacagattccacctgcctagagcaaagccaggacactgattgggatgaacacatagcacatgccagacatggctttgagtgctttacctggatcatctcactttatatgtgacagccaaatggtccccagtgaccttcaccagctgctattcacgcctttgtacagtttcctcccatcctaagctgggctgaccagtgtaatgaatacaatattgtgaaatgagaaagtatgacttttaagattaggtcataaaatatgttatggcttctgccttgctcttctggatcatctgctctggggacagccagctgccatgttgcgaggacactcaattacccctgtggaaacttacatgtggtgaggatcgtaggcattctgcaaataaccagcaccacccaggcacataaaagagctttcttgagtcaatcctccagccccagtcaagccttcagatgactgcagccccagccgacatcttaactacaacctcatgagtgaccctgagccagaaccatctatgtagctgctccccagttcctaacccacagaaactatgtgatagcatacatgttgattgcttttttaagcaattaattttgggaaatttgccacatatcaataattaataacttgtacagattctcacaacagcctatgtgggaggagccatcataattaccattgaacagagaaagaaactgaggcccagatagggggaatctttgtccagggtcacacagatagtgaactgtagcactgagattggaacccaagtttgaatgactagagtctacccactgaggtgaaggtgttcaagttgaatgccagctcttcccctgaagggccaagg

SEQ ID NO: 68062 - DNA, 4337 bp, Homo sapiens
ataaaaagaacagcagttagattgacaggtgatgatatctcaataaagctgtttataaaaagaacagcagttagattgacaggtgatgatatctcaacagcaaccatttcccagcattttgggaggccgaggtgggcagatcatttgagcccaggagttcaagaccagcctgggcaacatgaccaaaccctgtctctacaaaaattagccagctgtggtggcacgtgcccgtggtttgcagctactcgggaagctgagcccaggagttggaggctgtagtgagccatgatcacgccactgcactccagcctgggcaacaagagtgaaactccatctcaaaaaaaaaaaaaaaaaaaaaaaaggcttccccaggccattcaaatgtacagccaaagttaagaaacattgtctaaagggatgtgtttccggcaaaagaaaaattatcccagatgaaggtctgaggttcattccttcattcaacatatggagcctccattatgtgtttggaactgttctagacaccaggaacacagcagtgagcaaaacaaaccaaagtccctgccctctaggagaggaaaacagacccagaataacataaataagtaaaacatgctccgttagacagtaatagatgctgagaagaaaaaatgaagccaggaaagcggatgtgaaatgctggatacgtgtgtctgtgaaatttcagatggagtaactagggaagatttttgggtaaagaccaaaataaagggaaggagggagccatgcagacgtttgggttatggcaggtgcaaaggccttagggcgggagtgtgtctgacttactccaggacccagcaggtcaatgggacttgagtggaatgaggcaggggcagggcagtcagctacgaagacagagatcgggaggcaatttgcgagccctgggacagatctcggattttgctttaagtgagatgggagtacttgggtcggggagtggcatgggtttgatttacattttaacaggactctccggcagctaggtggaaatggacggtagggggcaaaaagagaagcaaggaggcccaggaggaggctggttcaagacccctgagatgatggagcactgatggagctggagcgggatggggccggaggaggtgagggatgagattctgcaagtggagcccgcaggatctgctgatcgatgggacgaggaacgggagaaaaattaaagcggcgcatgaggcagacgaatgcaaacttcaccaatagctcaacgaaaagacagacggtgaccgctgagaggcagcgtcggatctgggtaagggcgggttcctgagcctgccaggcctggattcaaacctcggctgagtggccttggacaggtcatcaacaaacagagccttcgtttattcatgtgcaaacggggccaaggaccgggcctgccccgaggtatgcctgaggcttgggtgagcaggcgccgggctcgcagggcgcgctcctaacccgtccccagcggctcgacgctgtggatcccgccgccctccagccccggctccggcgccgactcctgctcaggctcctgctcctgcccccggccccgcccccggccccggccccggcccccggcccaccccggccccgcccccagcccccggcccccccggccccgcccccggccccgccccggccccgcccaccccgcctgcggcccagctccttcccgcggctctgcgatgcggcccgcagggtgacccgggcgggagtccggggacccgcgatcagccccggaggacggggtggggtcgccccaaacaggagcgccgggaccgctgggaccccgcactcggcgtccgccgccgccgggtagccgggcagtggaggtcccggatgaggcgacaatttttccggccccccctcccagtcccgccccacttccggggccgccactttcactttctcttccgccgaagccgctccccttgcgaagaactggggcctcccgggaggagagagggctttgccttgaaacccgggacgccaggggcgctcccgcaagtgggggtcctccgggacttggaacgccccggctgggtggtgtccgggcgtcctttccccgcttcttcccacctcggctggtcccgtttcctcctgcgcccagtgcggacctgtctcggcgcccgctgccctctcaccgccccacgcaggatcccggcctggtcaccgggcagtgtgatgcttcccgactgccgcggggacagcgaggcacacacagggcttgggccgcgccggaggccacacggcctggctgagttgctcctggtctcccgcctctcccaggcgacccggaggtagcatttcccaggaggcacggtcccccccagggggatgggcacagccacgccagatggacgagaagaccaagaaaggtgggcacaggctggaggtggctggggaacttccggtgggaagtgggccccgcaggacctggccttgcccctggccagaagggccttggagagggggctttagcctgccctccctctaccctcctccccatcagtttcctcctttggtacctgctggcttccagagccatcttggggccctgagaactccttgggctggctctgtgctgagatggggctaggggactcgcagaggacacagggcattgaacttggagacctcctgggctggtgggagacagacgtcagttgacctgagaagcaggggtacttgcctcttctcttgtcccctgcacctagggttgtagaacggaagtcagtcactgccttgctggaaaccctcccatgcccctctgtgttctccaaacaaaacccagaggccctgggtggcccacaggatatctgtcctcagtcaccccgccatgctcactctactggagccccactggcttccttcggttctcatccaaccattttttggccaaggcccttactcttccttccacctggaccactcttccccactggagcttgacacgtgcagcttctcctccttcaggtcttagcttcagtgttaccccctcccagaggcctcccctggtctccttaacctgtttatttccctgccagcaaggatcgcaatctgactttttttttttttcttgttaaacttgttcattgtctccccactgggcagggagatccataaggagaggggccctgtttataaatctctgtgggattccagttcctgggacagtgggtggcacacagtagaagctcaataactgcttgttggataaatgaatagaaatatgagggaccctgggaatgggaaggacaaacaaccaaatgagcctagtgtgaggaggagtggggaatattagagaacccctcccggagaaagggacttttagtctgggtgctgaaggatacgtaggagttcaccaggaagacagagaaagcagcacacacaaaggatcgcctcctttcctaccccattactctcagctcctgaaaataaaccctgtgctaactggctcctgctgtactggctttcagcagaggaaatggccctgagcctcacccgagcagtggcgggcggggatgaacaggtggcaatgaagtgtgccatctggctggcagagcaacgggtgcccctgagtgtgcaactgaagcctgaggtctccccaacgcaggacatcaggtgaggagtgcatggctggcctgaacccaagggacagcaggacaggatattcttgcctgtagaacagttcttcctaatggcacgttctggcttcaggaggcctggcttctaaccctagttatgtcattaatcaactgtgaaatacagagcaggtcacttcacctctcagtgtgtcctcattttaaaaatcagaccgtaacagtagctatctcatagggttgttaggaggtgtactgtattaggatgttaggccttatacaacagaagaaaacggaacagtgacgtaaacaaatttgatggcagggagtccagatagggaggttctgctcccgacagtcctcagaggctcatattgtttctctcaccattctgccattcattcccagattcctcatggtgcaaaatggccattccagctccatccagccatcacatcacaggaggaagggaagaaagacacccctccacactcttctaaagagcatagctcaaaaattgtacacacttcttccgttaattcctgtggaccagaactgattcccacagctacagttcagcttgaggggagactgtatagccaagatattcagctagaattcaggggttcgcttggtaagggaagggaagagaatggatactgtcggtctgtgctccaggagacttaaactcaatgctgaaacact

SEQ ID NO: 68063 - DNA, 980 bp, Homo sapiens
gaccctgtctcaaaaaaaacaaaaacaaacaaaacccctcaatactattatcacaccttagaaaaggaataagaattccttaaaatccgctaatgccctgtttatattcacattttcctatttcattagtgctttttacaattggtttcttcaaatcaggagccaaacaagatctacatgtagcatttcttactatgtcttaagtcccttttactctcctctatttttatgccactagttttttttttaagaaacctggtcttttgacctctagaattttccccatattctggatctatccattacctcttcatggtatgtattagaccactctagcattgctacaaagaaatatctgagactgggtaatttgtaaagaaaagaggtttaattgactcagttctgcaggtggtgtaggaagcatggtcctgacatttgcttggcttctggggaggcctcagtgaacttttactgaagcgggagcaggcacttcacatggtgagagagggagcaagagagagagttggtggggaggtgccacactttacaacagccagatctcacgaggactcactatggcgagaagtcactacagtgagcgcagcaccaggctgtgagggagctgcccctatgacccaaacacctcccaccaggcctcaccttcaacactgaggattacagttcaaggtaagatttgggcagggacaaatacccagactatcatggtgtcatttactatctcccgtttttcctgtaactggtagttagagataaagtttcaattagtcagcagtcactttttttttttttttttttgagacagagtttcactctgttgcccaggctggagtgcggtggcgcaatcttggctcactgcacggtccgcctcccgggttcacaccattctcctgcctcaatctcctgagtagctgggactacaggcgcccgccaccgtgcctggctaatttttttttttgtat

SEQ ID NO: 68064 - DNA, 1360 bp, Homo sapiens
gcagtgcctgagcccccaccggtaagctgtccttggcctcagtatcctcttctgtgcccctcccttgcctcaccctgcccagtcgggctcacagcaccctctgctcccaggtgggctggcagtgccccgggtgcaccttcatcaacaagcccacgcggcctggctgtgagatgtgctgccgggcgcgccccgaggcctaccaggtccccgcctcataccagcccgacgaggaggagcgagcgcgcctggcgggcgaggaggaggcgctgcgtcagtaccagcaggtgggcgggaaagtccctggacagacacctgcagaccgcacgggggaggtgtaggccaggaagggagacacctgcgcactgccgcgcctctccgttactgccttgcccctcccaaccatgctgctggcagtgaccctgcacctggctgtgaccctgcacctggctgtgacctgccctctctcaaaggtcaccctgtggctgagacccgctccctggctgtggcgcacatccaggttcacatgccccactcccacgtgggctgtggctccatccccagctttgacacaccacacgagtatggctggccatgaccccagcaccctagccatgaccccagcaccctagccatgaccacacctcagctcggacctcacccccacccgtctgtgacctaagcctgctccacctcgccgtgacctcaccctggactctcctactcctgacctcttccctctcgggctgggcccacccctgacttcctgagagcctggcctggaccctcgctgcgccctagggggatgacccccgaccccggtcctacgccttagccctaccccgcccccatcgtgacacacgcactaatgacacagacattgatccccgagtgctccccattctgatctcacccctggccccacctgcattccccttggacccggtgctgcccctggccaccccactcctgttcccgtctcagctcctcggcttcgtcacttccccacccctgacgttgagtggctccaccagccctggcccgggccctgccctgctacctgactcaccactcagaccccggcccccttccttaccttgctgccattgctgtctcacctggcgccttccgtggctacctggccggcctcccctcccttggcttccccacctccacctggcctcactcccagccccgcccctcccaacctgcctgctcctgcccatcccccaccccccaccccccatcccccagccccacccccatcccccacccccgtcccccatcccccatccctactggctcccagctttgcctgtggctggtctgacccagccctgaccacgccccctggcccttcccc

SEQ ID NO: 68065 - DNA, 618 bp, Homo sapiens
attagcatgaactcaaatgggctggaaaggggttatgaataacaaaagacactcaccactcacgaaattccaagggttgtaggagacccgtgttaggaacccaggagaaagaccaaatatttcttagtatcccacacatacccttcctttagttctccaattatcataattctattcatccttcacattccaccctcaccttctatgaaagtgccctgaatttgctgcaggatagattgctcctggagtgcagctctggtgtgagctttcagaggcagcgcagtgccctgggcagcctgcgtaatccacgactgtcagatcaaagggcagtgtgaccctggcccacagtggcaggagctgagtgccactggcttggccccgggaacctgcgcatctcccctctgagccaaggaaacaaacaacacagacaacagtgtctccccgatggccccatccccagggtggaggccctgcaccgggcactgctctgcgcgcgcgctccccagcagccagcagtgtctggaggatactggaaagcttggcaagagtaggctgagcagctcctctgtggacagaaagggcatgtggagaagcggcacatcaagctctggttaggat

SEQ ID NO: 68066 - DNA, 1705 bp, Homo sapiens
caattatttacttattattattattgagatagggtctccatctgtcacccaggccggagtgcagtggcgcaatcatagagtagcctctaagtcctgggctcaagcgatcctcctgcctcagcctccagagtcgttgggatcacaggctcgagcctccacacccgactaacttttaaaaactttttgtagagatgaggcctcgctgtgtttcccagcctgatctcgaaatcctggcctcaatcgatcctccaaccatggcctcccaaagcgctgggattacaggcgcgagccatggtgcccggccgcttttacacaattgaataacattaaaataggtggcagaagacagacagaaagtcgattcgtggttgccaggcgtcgtgaataccggggaacgcggagtgcctattaatgggtaagggtttcgttttggaatcagacagcggcgatggctgcacaactttgtgaattttctaagaatcactgaactgtgcaccttaaaggaagaactgtgtggtaattacatcggcggtacgcgggcagcgcgtcaatcaagccggcgacggtgaatgcagttcgggagagctgatacccctcggggaggcggctccgggagcctgcggacgtggcggacgcctgggacggggtgggcctggcctccgcgctcgaggagtcccagtcctctccagatggaagaaagccggggcgcgaagccgccgcccgctcttctgcctggggacgcgactctgccgccaggctccctcgggtcagctcggcacccgcccgagcccccccagttccaggccctctcctcatcagacgtgccctgggccctcagcctgttcctctcgccgcccggaaccccgcagcagccccgggtccccagcccgcgcccctccggcgccgcctccgccagctgcccctgccccccgggccgccctcgcaggccgctcccggcgccccggtcggcttccgtacctgccttctccgcgccgccgtcccagtggccggaggtggggccgtcgccctgcgcactccggagggccatgccccggggccccgggcccccacccgagccccggctggtggcggagccgggagaagacgcggctccgaccgcgggacgtagcacccgctcggcatcggcaggctcccctccgtcggccagcggcgcgcaggcgcgcaggcgccccgctggccccgccccgcgccggcacgtgaccctgcgctacgcccggccggcggcgggggaggctgcggaaagagcgcggtgagcgctctgaggagttggcttcgtctgcgctgtagactctacggtgtagagtgtggcgctcttgagcgagtgtgctcgagaccagctgtcgtttcctttgcttctttcatctgtaaaatagtattgatgataataaaaatattgaactcacaaggttattgagagtgtttagaacatcaccaagcatatagtaaatactccacaattatgaccaatttttgcttaccaaggattatttttttacctcctgtctcgtctccccacacgaactcctgtcatcagttcttgggtacttggggatctagcaggttcatgtcatacgggtccgcaggttatgcactgcacaaggcctgggagcgccatttacgtagacgttcacgtgaaccgtgcccccttaagttgtgcgaaatagtggccactcatctaaagcag

SEQ ID NO: 68067 - DNA, 2215 bp, Homo sapiens
gaaagaataagtacactagaaccactacaacctacatctgatgttggatatgttatttaacctacctgattaaagtgagaaaactgcagaatataaggattatcacccttcccccactcccttctttactgccatggtggcaggttacatagcagacaaccatcatctccgcaggtgatcaataaccaacagctaataaggtaggttgtcctaaaactgacaaaaatagaataggctggaagtaagggcagtaaaaactggttgcctttcaattctgaagatattatgtgaatgcctatgtcagtcactgattcttgggatttatcatttttgtgtgtgtaacagggtcttgctctgtcacccagggtgggtgactgcagccttgacctcccaggctcaagcaatcctcctccttcagcttccttagtagctgggaccataggcatacactactgtcccctgctaattaaattttttcttttttttctttctttcttttgtttttttttctgagatgtcttttgtttttgttctgaggtcttgttatgttacccaggctggtctggaagtcctaagctcaagcaatcctcctaccttggcctcccaacgtgctgggattataggcatgagccaccatgcccagccagatttatcactgttaaaccagcaagtccatgacctaagtaatgtctttctcattttacagaaggcaaaactgcataaccttcccaatgtcagaggtagtgattggaaaacattcgtctagattcacagcctattcttctgttctacagcaagggactgtaaactggtgaccacaaacacagccaacccccatacccatggtttcagttacccgcagtcaactgcagtctgaaaatattaaatggaaaattccagaaataaataagtcataagttttattttccatgtttgtttttagagacgaggattcactcagtcacccaggctggagtgcagtggtgcaaccgtagctcactgtagcagcctctacctcccatctcagcctcccttgtagctgggaccacgggcatgcaccaccactcctggctattttttttttttttttgtaaagaaggtttctcactatgttgcccgggctagtcttgaactcctgggctcaagcaatcctcccgccttaccctcccaaagtgctgggattacaggcatgagccattgcacccagccatgttttaaattgtacatggttctgagtaatgtgatgaaatcttgcaccatctagtaccatccagccctggatgtgaatcatccctttgtccagctgtatatgccacctgctcattagtcacttggtagccttcttggttacttgaatgttgcagtattgcagtgcttgtcttcaagttacccttattttacttaagaaatgccccaaagtgcaagagtagcgatgctgagaatctggaaatgccaatgtgaagctgtaaagtgcttcctttaagtaaaaaggtaaaagttcttgacttaatatggaaaaaaaaatcatatgtggaaattgctaagatctatggtaagaacaaatcttctatcagtgataatgtgaagagggaaaaataaattcacatttgttttgctgttgtacctcaaactgcaaaagttatgaccgcagtatgtgataaatgcttagttaaaatggaaaaggcattaaatttgtgggtagaagacatcaacagaaaactgtgttccaactgatgataatcaggtttggtattatctgtggtttcaggcatccactggggatcttggaatatatttcccacagatggctgggaacaggactactctgtgtgtatatctcctatttggctcacatattacttttaaaaattgagataaaatccatgtaacataaaactcatcattttagggtacaatcagtaccctaaaatggtgtgttttcgtatattcacaatgctgtggaaccatcaccactatctgattccagaacacttcatcgccccaaaaagaaacccagtacctcagaggattaactcccaatagcctcttcctacaatcctctggcaaccaataatctgctttctgtcttcatgtatttgcctattatggacatttcacataaatggaatcatgcaatatgtggcctcttccacttagcaaaatgtctacaagtttatccacgttgttgcaagtatcagtaattcatttcctttta

SEQ ID NO: 68068 - DNA, 2167 bp, Homo sapiens
acaggcgcgcgccaccaagcccggctgatatttgcatttttagtacagacggggtttcaccgtgttggtcaggctggtctcgaactcctgacctcgtgatccacccgcctcggcctcccagagtgctgggattacaggcgtgagccacacgcccggcctctcttcttagttttcatttcctctccccatgtcccattctcgtagaattaaacagctgaaaagtaatcaagtcttcccaaataatttgccaccttcttttcaaaactctttcctccacacaaagcaatagccaagatgcaacttctcctgaccctgactctgcttccccaaaacaaactacagaagctccacccatcacctgcttaatctagcaatgttccaacactgcaaaaaacacacaacgaaaaacaaaattgaaaagtcctactctttcaaaaggtcaccaacatatgtatacccttagccaagctttctctccatacctctttttctatccaggctcctaactagtccttaactccaactccagacgttctgccccacgtcttggtcccttccccctttcgccccagcaaccccgcctggggttctctccacctcgcacccactctgcaggtgggaagctcagccccgcccagagggaccctaagaaggcccctactccagctgcccagtttcgcgggagggttcactgcacactacccagcaggcaccactccctccgcaccctcccccagcacccccctgcggccccacccctcaagttcccttccccctctgacgaccccctcctccaagttgtcccctagtccccacccagttcagtcctctcctctgcaataagctggactccggcagccggttcccaccctcacatcggcctctgcccccaaacctcgccctccgccctgaggggtggcccctgggcctccccgatgggctgcaggggcctcgcttggtttatgtgtgaaggtgggggcaggggaaggcgacgggccgctcaggagtctgctggaagcgtgagggtcggccgcgctccgctgccctatcctgggcccaccccacccgccaacgacctcgcctggctgctccctaggtacctgtggtggaagcggcagcggcggcggccgctctcccctctgctcacacagacaatatggcggcgatggaggaggagacacacggctcggccgccagccgcagggaccagagcgaggctgcagccgctgctgccggaagcggaaaccccctcctaccaggaggcggggcgagacagcttccgactccgcccccagaggaatctctctgaatgcggccatgctgggatgtcctattgtaaccttagggattcagttctggcctagggtgcaaaatggaaggaatccccaacgcaaagcagaataaggagacttgcaatagttaagcgcattttatttcaatagtgttaacaagtgacaacagagagaacacgaacctcccattaggtgaacagttggtttgacccaagttaagatggcggtacccaggtttcccacacttcacccagctggcccccctttcttgaaaagaaccatgcgcgacctgcagagctgtagagccaagcattctgggagctgaagtctcttttgctctgacccctcgttttaaattagggtttcagcaacactttctattcaaacttggagttcggaagaagtgaatgaaagttggaccctaggaagggcatggcgcaggagtctgagaagtgaggatactagctctcaagagaccaaggcccaattccttcctcctacaggagtcctgccaagagctgtgcgtccaaaatacagtgtttttttttccttctatctgcctcccacccctgctctccttgcccgagctacctccccaaaacagccacaaagcactttctaccatgcagagctcatcatggtctccctatggtcaaaaatctcccatggacctctttatgcaccaaagatagcccaaactcttcacttgacattcagagtcctccataatttggccaaaccctcctttccagcctcctattctgccactctcttctcaaattccggaagattccacccacaagactgcaaacaattcctggaacttagctgtgttgcctccctccctttacactggcagttacttctcttactgt

SEQ ID NO: 68069 - DNA, 854 bp, Homo sapiens
tagactcattccactggggatggaagtggggaagtcaccgtatttgaaaataactgacgcagttattagcagctcttagcatgtggtccctgaacagcagcatcagcaacatctgggaacttgttagaaaagcaaattatcaggccctgccccaactcgcctcaatcagaaactctggggggccgggggcagtggccatgtctgtaatcccagcactttgggaagctgaggcgggagaatcgcttgtgcccaggagtttaggaccagcccagagaacacagcaaaaccctgtctctacaaaaaaatgagaagggcgcacctgtagtcccagctactcaggaggttgacgtgggaggatcacttaagccccgggaggtcaaggctgcagtgagtcatgatcgtgccactgcactccagcctgggtgacagggcatgaccctgtctcaaaaaaaaaagaaagtgggggtggggcccagcaatctggtatttagcaaacaagcttgagaccctgaaccattggtctaaaggaattgcacaccccccctttttttttttaaattaaataaacttttattttggaatgatactagatttacagagaagttgcagagatagtacaaagagttcctgtatacccttcacccagcctaccccaaggtcaacatcttacatcaccatggtacatctgtcaaaaccaagagactgaaattggtatattaactaaaattcagacttttttcagatttccaattttcccactaatgtcctgtttttgttccaagacccaatccaggatgccacattgcactgaagacactctcccttttcaattctattactggtcacctcagtca

SEQ ID NO: 68070 - DNA, 3048 bp, Homo sapiens
ggtgacagacccagacaacgtcttaaaaaaaaaaaaaaaaagccagtgagatcagagctatgcaggtgggcacacaggtggctgcaggcccacagaagctcctaacccggtagggatggtcagggaagatcctgacactgagacaggaagaccgagaaagagtgagaaacgacaaggcagagatagaagaggttctcaacgggagaaaaagcccagtggtgggacagggcatgcatggcagatcccttcccatctcagccaggcgccgtgctactattgtggcaacagataagatgggacgaggtcctcgcccttgtggagtgcacgtgaggtcaggaagacagaaaataaaatgcaacacaaatagatgtataatataatttctggtggacataagtggtatcctgaaaaacatctcgggctaaggggagagctagagaggccagtgactctgaccaagggtgatcaaggaggcagagagctgaaccaggcaggggagcaggccctgtggttgtctggggaagtggctccaggcagtgaggacactagtgtaaatactaggactgaaagttatcgggggtggctgtagaggtgctgggtggggcttagggatctcatgtgctcaccttccaagggtcgggggaaggggacacaacgttatgtaggcctaacctgacacctgttcttgcggggcccccaagttcctgccagaatcactccggtattcttaacacccttcctcagtggtggagctgacccttgacctctcccacttcccattcagacaagggcctcccagcagatatgacacacctagtcccactgtcactgactgtcacagccatgagagcccacggcttatctccgggtagtgcggtggccatgtgctgggcagtggggcccaggctgcctgggtgtgaattccagccgtgtcactttttaagcgcctgatcttagtcaagccgctgaaatcttccctgcctcagttctcgtctgcaaaagagccactatctacctcctagggttggcataggaaactgagggacttcctgcagttcctggaccactgcaagcactagcgttataagcgttatcatcactactttaattatctcgcccaattccctccttgctcaagtgaggaaacagaggcccagagaggcccagctacttgctcaaggtcacacagcagaggctgagctccggctgggcccggaaccagtccgtctcgcgtccatcgcagcgacctccctcctccggcaacctccctcctccgaagccctccctccggttggctggactccccgaggcctcacccggatcgtgtccacgaggctctgcaccttggcggggtccaacacggacggcagcggccggatgagcacgctcagcggcacgttgtgcaccgcggcgatgcggcccgagtggatgctgccgccctgcgcgccgccgctcggcccgggcccctcgggcgccccccgacccgcgccggccctgcccagcgttcctcctgcacgcagccccatcgtcgccgccgccgcgggactcgccgcctccccccggccttaactccggccgggccataccattccgcgcggccgggggggggggcccgtgccagggcagcgcgcgtttctcccccgaccccgccgcggtccggcctcgaccccgcggtccccagcccgactccggctccgctcgccaggtgccgccagactcgcgcggggctcaggctctccaccggggggcgcctctcgcctcccctgcgccgcgcggcgtccggggagtggaaacgcccgggcgggctgactcagggtgagtttgcaggtcgcggggcgggaggggcgcgggtgacgcaccggccgggccgacttaggccgcgggggcgggggcgggggagagcgcggcggacctgcccagccagggtgagtcggcaaagcccgcggtgcgctgctgccccgctgctggggttcctagccagcgaggttatgatccccaccagcggttccacttccagtctggcgccggctgtgtctggagtcgttccgaacattttgcacgtgtattaacgtatctgaacctcaaaacaaccctgcaaggaaggtatgactgttattcccattttacagaagaggagactgagacacaggtttaagtgatgtacccaagatcacggaactagtaagtggccgaatccgcgttcaaatccagacggtctggctccagagtccgccttctaccccaccgttggctgccttggttcagcaacagtgactgtcacacggagccctcaggagtcgcgctgacaatgggtgggccctgccttcaagttccacactgtctgtttgtgtcattacaacactactggaagtaggtgcagttatagacccgctgttcaaggtcagctgaaatgaaagtcaggtcacacgagtccaaactgtggggccacttaaccaccaactccaagcaggaaggtggacgatcccagactcggtcgaagacaagcatgtctggtttgcttgtcttccttctcaacctgaatggcacgaacatggagaaatgcatacttaccctgccagctggagaaaactggagacgaaggagggagccaggagtttctactttgccttccaccagttgctgacactttctgaaccccgtctgtaaaatgaagtcatgctgcccatcactcaaagttgtgtgaattgagagagtgctcatagtgctctgtgaattgcataacatccattttgctgttgaagatcatttattttgggttcttagtctctcacaaaaccttagaacactgacaccaagactccagcctttccctttcgaaacataattcccgtgcgcacctaaatgatactttatttcaagaagtagaactgacacccacacctcagccccagaattattcagaattagagaatttcatcaagagggaagttatcccttctaaaacatcttcctcattacaggaagtaagaatggcaggataacagtttctagagtggaaaagtggagctctggcctgattctatcatc

SEQ ID NO: 68071 - DNA, 451 bp, Homo sapiens
catcagctgagcagagatgcaggagaggaggggcctgcagccctgtcctgccaggggcacaggaagtggccgatgggcccagtctgcctggctgagggaacagtggcacagaaggttctctgggcacgcggccggccccgacagcctgcctgtccaccctcccagacgctcgccaacatcagctgggagttggctctgcccccaggcctgggagaaaggtcagaggccggtgccagcaagggactaagcaaggccaaagcactcctgtgacagggtgcaactgcgtgtcacccggtctcagccccacaaaattgtaaattgttttagccaagaaaacggaggctcagaggggcttagccattagctcaaggtgatccagcttatcatccatgccccatgagcctcccaggaacacccgggatactcacacaccctggatgccatctatact

SEQ ID NO: 68072 - DNA, 941 bp, Homo sapiens
acatagggagttagcgtcaaagtcaggactaggaaccagccagggccctctaactggagctcttccagctggggtcctagaggaagtcccagctggccgcgggagggaggaggaggaagggaaagaaccaggcgccggggctgaagcggcggcaggaagaaggtggggccggctgggaggagcgggcggagctgctgagcagcgcctctccttcgggcgggggaagctaagcggtcgcctggcaaccctggcggcgcgccgttcgaacggaagcgaggaaccaatcaggaagtccggggcgaaccattctggtgtgaaggggggcggcgtgctcacttccccttccacggcgccccagggactttccctgcggtgggggccttcgacagtgagggccacccgctcagctcgaccgcggagggcagctccaaaggggaccccaaaggtgcccacgcggggctggggcctcctgggcgtcgttgggagcggccactaccggcccgggtccgagctgtcagcctctccaaagcctgcgcgagaggagccgggacacgcctagcgcgggctccaggtgagggcgcgggtgggtccgggtgcgaccccgggtctgggggccccgttccccgagcgtctgctgtctgctttctccccgcgtcgtacctgcgtgtcatttcacagatgaggactctgaggctcagagaggcaagtgtcccggcccggcgagctctggcggagaatccagttcaagtctttctgccccacctcgcagccccctagtctagtcacatctggacttgccttgagaggcccagacgggcaactggtagtcattttcccagcgttttatcggcagggacctgtagacccctggctggatcacatatccccgcgccccacactgtcctcgggataccccctttgggcgtctgtctttccttctc

SEQ ID NO: 68073 - DNA, 988 bp, Homo sapiens
cttgcctgccagagccacggggaccccgcgcgccaggtgtgcggtgggcgggtctcggctcccggaagaacttccctgggtggtcctggagcgggtcggacccagttcctgagccaggccagctgccggcggccggggctcgggttctggcccctgcctggctttccttacccttttcgggtagtacctggaccagcgggttcacttgcccgcggccgccggaagttgcgcaaactcagcttgccggagccccaggtgggccgggccggaggagcgcaggccagcggcgcgggcgcagccgggtacgtgcggaccgcggcggggggcgcccagccggggtagggggcggcccgagcacccctccaccccaggacggcgggaacggggcagggatctacctttcggcttcaagaggaccgcggggatggtgccgctctctccctcatttgagagccaggaggggcggcgaggggcaagggtcacacagcgccctgctagccgaccccccatcccccgccaccgggagtcctcaagcttttccggaattgagggagagcaaaagccagcctggggatctgagttccccccagccctgccccgcggcctctggaggctgacgctggggagctagtggggagggggccaggtggggatgcgcgcccccgggatgcaagccagaagggccggcggttgggggcatccgtgggaggcatttgaatccgtgggtggggcattgggcggtgagaggaggcctcagaggggacattgagtcgcgcttggggacttgggaccctggcttcacctggcgggagccgctgcacctccgtttgcccacccgtgacgtggggctgttgaggtcagctcaccgatcagcctctgtcttgggcctgctttgtccgcggtgtgggctgggacagaccctcgtggggcttgcttagagacccctgcgtgggggtggtctgtggacttggttagtcgaaatcttctt

SEQ ID NO: 68074 - DNA, 830 bp, Homo sapiens
cctttgcaaactaagcattcctatgaattatagccctcaatgaagacccaatagctgaacctccaaaggcaagggctcctcctctgaccccatcaaaggttttggcatggagctgggtgcatcggaggcccggacccaaagcaggacaacttgtcttgcttcggcaattggcacagggatgctctaagatgacagctctgtgcaggaggacagctgggccacagacaaggcggggagaagacacagattcagatgaagctggactctgccctgtccttctcatcctggccaacttaagacctgacccagcagttgggaaacatcttttccttttctcttgctaaagtccagctggggccagcctttttccaccaggccatgtgagcaagatggaaactatgacagttctggatgggctggaggctggactttatccctgccacatccctgccagccagtcaccctgacctaccacatccatgccacctgcctgccaggccattcccagagttgctctgtcctggacagcttggcagctgtgaagtgcctcacacagtgcagggaataggagatgatgtcactcaggagttcggctgaccgagcactcctggaaagatgggcagactgaggccccaccaggagaggaggtgctcaacaaaatctcgtgttcaacaaaatcatatggcttgcgacaccagagaggcctgggttttaacccagtttgtgctgattttcgaagtggtcagaactattcttacaaggtgtcaacgcacactgagtgagggcatgggtcagggttgtttgtgtgtgttgcccatttcatcctcctc

SEQ ID NO: 68075 - DNA, 2166 bp, Homo sapiens
tgaggctgatgccaggcatccaagtgaaagatgacaggagcttgaaccaggttagtgactgggatggggaaactaaatttatttgggtaaaaacaataagtggatttcatgaaacttgttgaagtaacgggtggtaaaaatcataaagggggtaggcaaataaatgattgaaatttgatagtgggtcaggagcttcagctctgcgggcagcagttgtgtctccttggagaagtggtttcaactctgagccgttttgtcatctgcaaaatggggataataacggtccatacttcatagagttgttgagagggtgatgtaaaggttttagcgcacgatgtagcacacaataaacacttaataaatgttatcttagaagccagactgccaggttcccataaccatttcagccgttcaccggctggctgttgtcatcttggtcaaattatccctctgcgcctcagtttcctcatctgtgcaatgaggcacattaatcgttaatatcaactgcatagagttgggttgtgaagattaaataaatgaatacaagtaaagcgtttagaataatgtggacggtagcaagcacggcgaacgtgttaacgattattaagaatgtattttagccacatttcccagccccttccccggcctagcataccccattttgtggatgggaagtctgcctctcagcaaggtggcctcttggaggacgctgtgcccgcgtcaggcgatcctgtcgactgccgccaagacccggcttccggctttgaggggccacgccccgctcgcactccctggcggaacctttcagtgctgcgctcgcgttgccaacccggcgcgcctcacgcagttgcgcccgctgttgggactacttccggcttccccgccccgccccgtccccgggcgtctccattttggtctcaggtgtggactcggcaagaaccagcgcaagagggaagcagagttatagctaccccggccgcggagccggctcactgcactacccccgcccccttctttcctccagacgccgaagtcgcgggcgctcatggcgggcctggaggtactgttcgcatcggcagcgccggccatcacctgcaggcaggacgcgctcgtctgcttcttgcattgggaagtggtgacacacggttacttcggcttgggtgtcggtgaccaggtacgccacggagccggccagggtggaggagggaactgtcttctgcccaaactcagagtaccggaggcctggtccagagcgcccgatttccccgcttctcccagtgcagggtctggggcagatggcagcgttggtaaaacctgcgggtcggaggttgctcacctgccccatcccagcccagagtccctcacggcacagctggcacaacatgatttgtaaactcaagggcggacactcgcttcaacacagcctggcagcctctcaggccaggactgtgtggatctagcattccatagaatggcaaagaatctagacaggagtttagctccccagagcacttctcacccacctgatcccgtctgaactccttaccacccagcctcggggtgaggggactgactcagttccgccctcataccacagtagagcctccaccaaacatctggatccaagcacaggtacaggagtgagctttgacctactcagccccaggccagggcccttttttcacccgttagcatgggcccagagagttcacacgcctttcaccctttactgaagggcccagcatagtccactcgctactgccatccccaactcaagctctaggaagcaatcacccccagagtcgtacacacatacaccctgggtgtgagggtcatataagattttctcctcatagttgtccccatagggccagcccctcttctcccatccccaggctccacctcttacagctagggacgtcgttgtcatccccacagagttctaggactgctggacccaacccacctcactaattctttgctctggcattcttctttctttcctgtctcttccctgtgaccctcatccccaacatccacatcatcctagacatctgcttcctgggagaagtgggcctgcctccatgcctgcccctcactgtcactgttctctcactctcagaaccaagactagccatgggaaacagaccaccccacctattgcat

SEQ ID NO: 68076 - DNA, 938 bp, Homo sapiens
tcgaactcctgaatgcaagtgatctgcctgcctctgcctcccaaagggctgggattacaggcaagagccaccgcgctcagcctcaggcctttgatttttcatcagaggaagttaaaccacgtgactgtgtacttaggctactttccaactgtggctttctgggactcttgatatttgatgtcagggtttacagggcagttgcagaccatgtttggcctgatatcgccagggtctgtcctctgtttactggggaacatcaattgcactgcagttagagatatcagtttcacctgacttcagggattttctgtaactctggaagccaaaggtgatggggtggtgagcagaccaaattgtttatattccaagagagaactctggtggattgaatgctgtacatggaggatataatataaatttaaaggcgtttgccagagcaaagatgaggatgtcatcaaattcctggcttccaaagtaaacaaatccacgacactaaacactaaacatattcgggaaatttacccagtttggggtgaggggatagtttctttttcgcagaagaatggtttgattagttttacttttgtttttcctcactctcatttctatgcttcaggcctatgaatttcattgtcatccagccaggttttaaaccatgacagttgcgacatcctgaattttatttgggatctctttccccagaggatttctgagcaccaggggtgacgaaacaggagaggccagcaattctcaatgtgtggtctccccttgtccttggtgtgtgaagttttgctttgctggacctttgtcttttccattttcttcatctccggtcccactccctcccgctgtattctcatgactacagatcttcccagtccacctgccccatggtgagcaatataaatatacatccatgaaaaaagattatagcattt

SEQ ID NO: 68077 - DNA, 1198 bp, Homo sapiens
cgcagaatattaaaaagacatattcaaagattgaaattttacaaaacttgacaatctatacctcttcatcaagtacattctaaagtgaagctggatgtgggtgagtgagtggtaagggagggtgcaataacggccaggttagtgctgctgctttgagtcatactatggcatcagcagttccacccactgttgcttttgcaccgtcagtgcaaatgtcaacacagcaaaaaaaaagcaaatagcttctgagatagaatagttttgacctcatgggacaggagtccatgagccacattaaaattttttttttctcgaagtttactagccatttggatttcatcttttgtgaagaggtaatcaaatctcttgttcatttttctattggcttgtctttttatgacttgttggcattgtttatataatatattctgaatttaagtccttcattaaatatatgtattacaaatgtcttcctcccctctgtagcttgcccttttaccctattaatggttttttttaattattgttaaagcattcctaatttttatgtaatctagcttatcagtgcttttccctttatgtttggtgctcttttgatttttgtttaagaagtctttgccttatgccaaggtcatggagaaatcctcatatattttctcctagaagctttaatggtttaccttttatgtttagatctataatccatctaaaatattttttatgtgtggtgtgagatttatatttttccacattgatatccagttggtctagcaccatattttgaaaagattatcctctacctatgttactttaataatttaattttcatttttcattacttgtgcaactattctctattcttaaaatttgttttcattcctttcgccttggagtcacataatatccctttggttttttcctgtggatagcaaagttcaataacatttatacagctactgtttattcagtgccattgattctagacaaatgctgggcatttaatccatgtgctcttatttaatcccctcaacaattccatgagattggtaagggctatccccattttgcaggtaaggaagctgaagttcatgtacagtaagtaacttcacaacagtaagaagcaaaagttgtgttataatagtaaattattgaattctacttatgggactcaggcactacacttttgtaagcattctca

SEQ ID NO: 68078 - DNA, 1594 bp, Homo sapiens
cacacacacacacacacacacacacacacacacaaagtgcccctgggagtgagacccaagccagatccaccaagacccgcaggggcccaataccccacccgccgcgcgcactgacacccggagagagggacgcacagcggctgtgggtgaagcttcacaaaacccagtcgatagacacacgcacgagttgtacacaaagccttggggcgcgcagatacgcacacgcaggtccacgctgttgtacccaaagttgcgcgcagaaagccccagcacgccggctgcccaccgcgcccgctcccgccggcccagtccacaccccctgctcctgcccttgcccacagacgcgggacccggaaggccgaaccggaccaggcggaggcccggggaggccgggtcccctggtcgcatgtccttcggcgggccgcgaggtcaggctcgccgtccttcgccgccactccccgcccccggccctcggcctcctgccgcccccagcggtcccctctccgcgtgcgtacctgtgccgggcctccctccccgcctcaccacgctggggcgaagggcgcccggccgccggcgggcgagggtgcgtcctctccggtgcccgtccgccttcctgcagccggcgtacgcctgcgggggtctcgcctgcgggggtctctctcctgcggcgcagcccggagggcgcgggcccggccgccaccgcctcgccctcccggtctcccgcccccttcccggcccggcccggagccactgccgaggcgcacgtacctactcgcgccgcgcggagctgtacggcggcggtggcggccgctggggaggcgggggggggatccggggacggagggacgggagaaggggcgggggccggggctcgccgagcgccgcggagggagctccgcccgcggccggcgagggcgcccggagagttagcaaggagagggacaggaaggcgggtgatgggctggggcgagggtgcgggggctccgatccaccgtcctcccctcccctccaggcagatctggatcgccggcgcctgggcttagggaactggggcttggagcccgcggtccacgggcgcaggggcggggcgggcgggggctgctgaagaagatccctccccaccaccggagagcccctattgcgccaagcgcaggtgcctccccactcctcacccccactctgccacttccccttccccccacccccaccccgcacgcagcccccaggtaggaccccgggtcctctccgaggtccttaggtcgggacggtctcctcgggcgcttgcggctccgtggctcaagggcgccacctgaaggctgcaagaaagaatccgacgatccccctcccccttttctctgcaatttttttctccgtgggacagtggagtgctccgcccaagaggggtgttctcctgggggcattgccaatggccaaacacaccctcaccctccaaggcccagctgtggggcctcttctcctggaacccctccctgggcacacacccacttaccccacgggcccctccatctgggctctccttttgcccgcactgtttgctcttgtctctgacggtcgtgattttgtttaagggtca

SEQ ID NO: 68079 - DNA, 5125 bp, Homo sapiens
atgtcagatataaactgttggcaaaattcagctgaatattgtcttctagtaaacctaagctgattcctaagttgggtacaagcgtgatcgggtgtaagccagcctcagcttttacaaagtgaaatgcatattcttttattagaaattactttcatgtccctgccttctccttataaacaaagggcatcatattgattttttacccggggaaccatcacctgggctgcagcctcaggacgaacctgtgccttccctctgtctcaatttcctgctttgggaaataggagccacaagccacaaactccatccaccgcgccacaggagcgaggtccaacgcaacggtccctagggcctgcctccaacccagcctcagtttcctatctgtcacatcgttctatgatctcgaaatgactataacccctttcttagccccaaaccagccggaagcgacatcttccggttgctacaggttacggcggttgctatgggctacggcgcctgcgcagaaacaccgccaagcgactcagcaacttctagagcgcatgcgtttcgcccacccaggcccgggcgcggttaggggtgactcccacgatccctagcggctgcagagtggaacatggcggcctccttgccgcttgcgttaccagagtccacccggcctcgtgctttctccgggcgcccgtagctggcgccggcatccacaaaaatagatcaggtaaagcagcagagtaaggcataggaagacttggtcgggctccgcggcccctctttaccggattggaggctgcgcgggtgaaatcgagctttaaactcccctggcctcggaacaccatttgtagcctctgaaggaggaggacttataagattctgtactaaggcagccgtgggaagggaggagaaccaggtcggcccgcgcgctcccggctgcttttgctctccctttggtttcgaaagcgtcaagtcccaaggtatttcctaccaattgtgacgtcacccttcctcccccgtttctcacccgtttcttgtctggccgtgacttctgacccagtgttgagctaaaaatgccccgccccaccctacgcagattcaccccgcgtcccacccaccagtgactgagtgactgggcttctgctgcctagggaagggttcttggcttggccgggcaaatcaattcccacagcaaaatcagaccgaaagcctgttatgagggactcaggcagttggatgtggcgtataggaggaaggctagggcaatcaggaaggtctcctggaggaaggaagaagaccctgactgggccgtgtaggatggatgttcaagtgggaagagagtgtgctattccagggacagggaggcccaggcctgagagtccagttgccttctggatcccgtttacctcgcagattatccaaactggactcgtgattttccccagctgtgccgcgcctccccagcggtctcactgaatccacccatgggctatgtcagaaatctgggagttatcctcagctcctccctttcccttctgaagccatacctacttcttgccctcaaatctctgtgacctgacttctggtaatgtttccattctcaccatctcattcttctccacacttatcatgaagttcatttattccagactactttaggttgagtcctaaaagtcagcctgctagttcatgcctccatgcttttgcaggtgctattccctctgtcttaagagtcattcatgccttctctcttttccttgttgtgaactctttttcctccaatttaaagctttcccccacctgtacgcatggagattggcaagcctcccttctctagacgacagcatttcttgtatttgcctcttcatcatatattccacaagtgtttgttaatcacctactatgagcaaggccttctgcatttcctaggttggatttccactgtgctgtgtttgtttgctcatctccctcactggtcaggaaatgtcactcatttgttaacccccagtgctgagcacagtgcctggcacacaacaggcatcccattactatttctgaaaggagtggaaaagcaggcacagagagaagagaaagcctgatatcctaaatatacagtctttcttcccatgcctgtctgtgtttgcagtcaataagtagaaagtctttcgaagaataacctgggcctggaaaaggagagaaaccatggccctaacgagttaggttgaaaggctgcctggctcctataatctgacagtggaagtttgctcagttctgtgctgatggcttcccacaagtaattggttcctccgaaaggaaaagaacccacctaacccctctctctcagaggaattttcctctcccacagccctttccagatttccatccctgagcttctgtactttttgatataagcaataacaacacccacaacaaaccaatagctgggcttcggagatcagcagggctgacaaggggacttcagcccccatctttgaacttagagtgagaacactctttggaacactttgttccaaagagctgaagtgatggaactcccactcgttcctgtggacagctcatccgtcctttacaagacagtgcgcgggagggaagcgtgggttagagtgtcagaggaatagctcctggaaggccaaattagcccagggatgtggtgagtcggaatagaagaagctgttgctaggccaccagcatgtacccccactcctcctctcagtgctgcactgcctgctggggaaaagctgtgacttcctcaagcagacacgcctgaacccaggcccaggcagggcagggttcagactgactgcttctgacttgtgagagcacagcataggcaaatcccctttgaatgtcatttcttcctttgtaatctggataacaatagttgcatcacagttgtctggagactgaaagatttttaaaaagagttaaggtgtatatggaaagcatttagcacagcacctagcacataataggcattcagtaaaagttagctgtttattcattgtttcagcgcttacttactcagcacctgctaagtctgagtactgttctaggtatcagcagtgaaggaaagaagacttggtccccaaatgtactttctttgggggaagagctggataaataggctttgtgactctgtgtgctgtgttagatggtgggaggcactggagagaaagagcaggacggagggtcatgtcaggaggttcagaagccttgctggctgggtggggtgacattttaggaaaggcctaatggggtgggcacggccattgcagagcctctcaggtgggagttggtgttgtgtttagaggacatctgccagtgagaagccagttgtgcagagagggagtaaggaggagtagtggggaggaagctggagaagtgagaggggccagatcctggagggcctggaggtcatggtgaggactttggcatttactgtagtgagatgggagccactgggggatttgtagcagcagagtgccaaggtccaagggttattttgacaggcctcctctggctgatgtttggaggatgggctacagggcaggagtgggagcaggagcccaggtgggaagtgatggtggtggaattgtcatgagcttgggccactgtacgtgaagctgcctgtccagtgctcgcccagcccataccaggctcgttttctgccccattttctgagaccctgctgaggagggcatgcactggctcctgtgtccagtatgtccttccattctcctgactttgtgggctattttcagtctccagatgaagaaaccagttcttagaaaggtgaagcccctggcgcagttccccagcaggtgtttcagtgctgtggcaggaaggttttttgatagaaacagcctcaggccagagaagtcggcctgagctgtggattccttgggagaaatgggctttttgcctgcctgcagcctctggtttcggctggaattggcctttcaaggagcaaagtgtggatctcatctccttgagcacagtcatgggcagtcagaaggcatcgggggccctcatgatgtctgggtgaagaaaatcactcagcccttaatcaaacttggtccagggctgggatcagaagaagaaaccccacttcacacttgactgcttggagtgaagcacttcgaaaggaagctgcctgggaagtcccagaagggaaggggcagggagggaaggggacagggtgagagcaggtctcactcatcccaatcccagccaggattgggtcagggcccccagcgcttacctgcaggcaaggtgctgctccacgaccttctccagctgctgccgctgctgaatctgtttccctccctgaaacgtagccctgtctctcagctggcttcctgatctgggaagggtggtgcctgtcccctgttcagctgactcaccttggactgggatgggcacaggtgagggctgtggctgggtaaacaaggcaggttgccagcccagaggaggcctttggccttagtctggatttggaggtgggattaaggccctcacagctgctgttcagacggttatgaaccaagacttcttggccttttcttaaatagctctaaatttgggttggacacctagtcctgctgatcgaggcagttggctagagggcggtttgtgataggtatctaggggtctaggccaggatattaaaaagtggtcatatcctgtgacccagcatttcttctaggaatttgttacagtggagtcacagggcccatccatcactgctgcttctagtaaggaaaatgtagaaatcccaaatgcccatctctgtggtctgcttgaataaatcattgtctgtggaagatcacagagctattaaagtcacttaaggaagaaggtatgaggaaacatttctgagattctagtgagatgttgaaaaatcaatattgtgaatctcttcttgcattttgttttcattttttgtaaagtggatgtgcgttgaaagcagtctaggaggacatacgctaaaatgctgagtatctctgaatggcagcattgagggtgaggttttcagtttgtacttttgtgtgttccaaggtggtttttttttttttaagttagcttttgctctgaatgctcatgacttttgtaaggg

SEQ ID NO: 68080 - DNA, 2149 bp, Homo sapiens
actgtggctacaccaatcactgccacccttgtgggacccacagccactgagtctccgccaactcagctctccccctcccccgcccccatacaaaccaggacaagcttgtaaggagaaggagtaagacagccccaaggcacacgactctgatgtctgaattctggctggggagggggaggtgtctaaaatttcctttggcttgtattatcactatgtattagcctccagatgcttatctttaaaatgaggacgagaaaagtctctacttctagaagagctgggggactaaattacacgtgcagctttcggtcagcctgagccagcgctgtcactgagccttggatttgtaagtggctcaaaagtaaaaagacggaagaaggccgtgcagctctacttcccccaaggccaggaagggccaaagcaatgacttaggaagtgggatgtttccccaccctaggcaaaggggcgaattccgagttccccggaggaagcagcagctctgcagactcggaattacctcgtcctcatctccagtgaagggagggatggaagtgggggcaggggcacagaaatggtacaaatccttcctaatggtccctggccagagctctgcccattcctgaaagtgtgaccttgggaaagtgagaccttgggaaagtgacttcgcctcgccaagcctcagtttcctcatctgtgcagcgggcataagggcagcatctaaggtgcagaaatgcttctgacgggtcagataacacctagcccgcagccgacgctcacagccgccgattcagacccgcccgggttccgcaagccccaggctgcccctgagccaccgcccaggcctcagcctcgggccatgcggacctcgccgccgccacgccccggaccccaggccccgggcccccaggcctcgacggccagccgcacccgggctgcggactgcggcccgggccccctccccgctgggcccccgactcaccggtgtagtgcaccacgcaggtctggccgcgcttggggaaggtgcgccctgaggagacagagacgggcatgctgagccgatgcgcgcggcggcagaggtactccgagccgccgcgcgccactactcaccgtctcctggggagatggtttccacctgcactcccatggcggcggcggacgctgagcgggcgggcggcgcgacgggcggcgtggaccaacagcgacctggcggcggttccacggctctgcctagtacctcggcgcgtcgcctgcgcacgcgcacgccccctcacgcccagccctgcgtgcgcgccccacacggcgcgcgacgtcccggaaacccaggcctccggaagagggaccggaagcccagaagccccgagacctccggaagcccggaggcctccggatacagctgtgtttgccgggtgacttgcttcgttctcctgcccttcctctgtgcttccagccggttaagcatctccctgcccaaagaatgggagtaataatagggggtccgccagtcactgactgggtgactgtcatcaggtttccacttagaagcacacagttactcatcctgggaagagcatggttctgagaagacagcgcacaggtggtggtagtatgttagtattttataagtggctcaaggttgtaagttctgcttttcttcactggaggaggagttgtccaaattcattcactcacccatagcttacatgcatacattcttattgagcatgtgaaagttgataatacgaattgggtcactcttcttatgcccaacggaatcagaatccaggggccaggggaaaagcactggaggcacgcagcgcctgctccaagaaccaatatttccactaactgctgcggaaatggcctgctgtccccctgagaccagattcagctagtaactgctgaaacaacccgccataacctaatactagttttacttaccactgtcagtcaccaatcagagcttgccagctccctgaaactttactagtgccaatgcatttccctttctaataaaacgcccagccttctctttgtttttcggacataccaaagaccaccagatctgtgtgtatgctccgagttgcgattctcgcttccccaaataaaacattacatttagagattcatctccatattttattttgacttt

SEQ ID NO: 68081 - DNA, 730 bp, Homo sapiens
tttatgggcttatggacacaagagctgatgtgtcagtaatatccagtaaggactggcccccagcatggcctctcagaataactgccacatccctagtgggagtaggagcagctaaaagtgttcaacagagtgctgagatttttatcttgtcttggtctggatggacaatcatgtacttttcagccttatgttgaaaatatagctatcaatttatggctataaattgatagccatatcagtttatcgagatttacagcatgggatatgagacttacatatgaaaactttgataacccaggatttaaaatgttgaaggacatgggatatcagagtgggaaaggtttagggaaatccctacaaggaaaccctaacccgatatcagtaactggaaaggcaggttaaaccccgcagggagattcttctttagattccccgcggcaattaaccagaggcagaagttgagttcggcaatggcatgcctcccagctacagctacagaaacctttgatttcattatccctcagacaaaattttgcagttttataaagtccattctttcattcttcctgtgattactcatcacaagcttattccaggtggccagacttattttactgatggctcttccaaaggtcatgcagctatttatggacctaaacatactcaaacaataatgacctctggggtttcagctcaacactcagagttgattgcagtcattcaggtttta

SEQ ID NO: 68082 - DNA, 722 bp, Homo sapiens
gtgagccactgcgcccagcacggtttgtgtttttaatccttatgtctttctggcagctaaaaagcaccagctccaggtaaacaacacccaattgacctgtaaatcttgtcagttatatcactgcattaatcacagcacattgcaaacacagaatacctctactttgatcattctgggtcgcatccctggactgtggattcctgttcatccatccaagccttgggctgccacccctgctttacgctttgtgaaacatcttctaactcagcttactcactgtgtccgtagagccttaggcatgatcatttttactattgtttccttagtcacactgataacttctgttgtgatgtcctctgtagctttgcataattctgctcaaatggctcagtacacagagaactggacacagccaaccaagtacagccaaccaagtgtggctacttcagaataaaattaacactgagttacaaactgaagtgacagtgttgaaatccccatggttaggggaacaagtgcaaaggttacaattgcaacagcaattgtgctgtcattttaatcacactcatatttgtgtagccaacttagattataaccaaagtgagtatccgtgggaccttgtgaaagctcatttgcagggagctttcacatccaacatcacctttgatattggtgaattataaaacaaaattcttgatttacataggcaaactcaagagttt

SEQ ID NO: 68083 - DNA, 1920 bp, Homo sapiens
tgatccagtaaatctgcttctagaaatatattgaatggaaatatttgcatgagacagggcaatggaggtggggggaagggttagattccaatcagtgttgaagctggagccaccaggacttgccaaggaattgagagtatccccgtgtctctgacccagtctcctcacggtttcccggcttcactctgccacatctaatccatttgccatcgtgtagctgagatgatcttctacaaattcaccctgaccatgcacctccctgtagagccttctatggtcccccactgccctcaaaagccagcattcttttccctggcataggagatactttgatctggcctctctgactcatgctcagtcctgtcctgcagctcccctgactcattgcattccctcttgacacgaagcctgtgcagatgctgttccctcagcctggaagacctcagtctgggtgactcatgctcacgctttaagtccctggtcagacagcacttcttccgggaagccagcctgaccttctcagcagggttctaagacccatatttcctgcctaatcacagccttttgcaaaagtgggtggtagttgtctcctcactggctaggcacacagtaggggctcagagtgtgattcctccaagtagaggggctccctgttgcctcaggactaagtccagattctgcaccatgttcaggagatcctgtagcgtctggcctctcctgacctcccagccctggatctagcccccatctctccacaactttctttattcagcctgttggcttttaatagttcttctaactctcctcatggtcttctctcaaggcctttgttgatgctgtcttctctgcccagacatgcctccttcttcccattttcacctgggtacctccaactcatccttcccacttcagttaaaacatcacctcctccaggaggtttccctgactgctggggccaggtgaaggcctctgttatgacctttcccatggtactctgtgcctcctcccttccaatgcacatcgtactttcatttattattttttgcctgtaattacaccggaatgtgaaccccatgagggcagagcaatttatgtcttgctcactgctgaatagtgcctggcacctagtaggagctcaggacatgtttgttgaataaatgattaatatccctcctgagagacaaatgcaggcatgtggcttgcccagttgaccaggggcctttgtgaagggaacagcaattctgggcaccaactgcatgacaggtactctcgagaccccacttattcctcaccatagccccttgtgataagtttatcatccttattctacagatgggtaaactgagctccaagaggtgaaataacatctgtagaatcactgctggtaagtggggagtcaggatttgaacccaactctctggcctttgaaattggtttcttactacaaaaaagcactgcctcttggtggtaagaaaccaactggtttttccagatgaccctgggagctaagaaaaccaatgcttcttgcatgcccgttctgcgccagacactgacatgctcatcttgctcaggctcaccacagcgctgtgcggtgggaattagaggaggagcctgaagccctgagaagcaaagccacttaccgagatcacatagctgagaagagctgagccaggatttaccccagggtgttctgactccaaggctggtgggctcaggcagggtggctacacattggtgccacctcccacttcctggacataccagaatgatgacaagaggcactggaagctcccacctaggcctgcagggttactacagaaaaagacaaagatcctttgagtcatctgggtgagaaaaggcagggaatgacaggcacagtgtggtgtgctagtgatggcctgtgcacagatggggctttgc

SEQ ID NO: 68084 - DNA, 2165 bp, Homo sapiens
ggatgagataatccattaagatttatgcatactcgcatcttaggtttacacatacagaaggaatatgggaatcctttggtcatttgtgacatctctgtcaccaactcaacggacaggcattcactaatcacttgctttgcacaaacacaagaaagcattgaggtcacagagatgaaatagacatggcctctgtcctcagggtcaccaacttcacaggagacagtgagctgtcaagggataaaagtaatctgctgggaggcagtgtgctgtctcaggccatgtagtgaactggcattctcagggagcctacattcaagtcctgttcctgccaggcaagtcacatgcatgatcctcagtttccccactacaatgtgaggggaacgagacagaagatctgttggtcacaacactgtgtgcttttaggtctttcaggtagaaactttttatttctgcccagcataggggcttcccattgtgtctaggtgtgatctaggtgtgatgctttaccgaattcttatgtttggggagtaatttacgtttggcagcagactcagttcaaattccaaccccgctacttactggctatgtgaccctgagcaaattctttgccctctgtgcttccaattcctcatccataaaatgggtctagtctttacctcatagtgttgctaggatccaacgaatcatattatgtaaagtgcttggcacatggtggtttaaagcttgggctctgtctgcttgcaatcagacagaactgggttccacttctacctcttctgcctggtagctagtgaggccttgagcaagttacttaacctctttaatctcagctgcaaaatgcgaaggttaaatgacaaaagacatgtaaagcagtcagaacagcgcttggctcatggtaggtactcaataaatattagtcatcaccgtcatcatctacctaagacgaagctggccaagaatatttatgcaattctttctacagttaattaccgaatgcttattatgtgccaggcattgttccaggcactgggaattcatcagtgtacaaaaatccctgcctcgtgaagcttaagtcttcttagcaagtatttagtgaatactcagtacgtgccaatgaactacacagcaatttccacgagactcccattttacagataagttaactacgcaaggtgaagaagctccaaccttgcgccaccaccccagaggtattctcccagcaattaggaaggctgggcggcggtcaactcccgggctggacttcggaagtggaaatgagcggccacctagtcccgagtggggcttcacccaagagctgctcactcggaccagcccggcctccagcagatactcggcgcggcagccacgcccccaggcgctccctctcctcgccggctgccgcagcgcccgaagtctcgctgacgccgcaagcgggcgaggcagggtgaaactggcacggcagaactggctggggctggcccgcgttcccccactcccaagccgagcaggcgacgcgtgacaagcggtcccgggaccatgaggcctgggtcgggccgcggtagagcggggatgactgtgcgcttcggccgccgcgggcttaaggcaccaggcgcccgctcccagcagtccccggcccacccgacacagcccgccgcgcggcgctacctgcaagtcccagccggccgactcgagaaagaagcgggcccggtcctcctcggcgcccgtcaccgccacgaactccctcagcgcctcctgtcgctccgccgccatcttcgccccgtgcgccttccaaagcgctccggcggccgccgcacaggcccagccccgctgccgcgttccgcttgccggtcgacgaggcccagccgatgagggcccagcagctgggagcccgcccgcagccccgccccacgcggtgcctcacgcaaagccctccgtgcgggaagccccgccgctccgcgccctctggcgaccgcggcgcgaaccgcagcctaacggcgggggtgggagcccgaaggatgagaggcggggcgggtcttacatacacctgtgggctgaaggctccctgcaggagtcagattcccagttattcattgacgcagccctcatttcattaattgtgcattcgttcattcacttacttgtcaagcatttactgagagctatca

SEQ ID NO: 68085 - DNA, 1498 bp, Homo sapiens
gactgcaggactgtgctggtcacttcctatggctggtttctggaagcagctccagatgacccaactggagtttaaggcaggggatgtgagggcatgaacttgaaactacatttacataacacttatctaagtgtccttaacaaaactagagaaggaggtgctgcaggctcagctttagctccactctcctatgtccaaccacaccagcccccaacctccagccccatcccacccaagccccatccccaaattctaccaccacgaccacctccagcctcacctctacctcacagatccgccaccagcacctgacccaccccgccccactttcccttctaactccaccctcagtactaaatgcaccccaccctccaaagcccactttcactccatttcacccccagccccctccgggctcatctccatcttccttcccactccagtctcaccccagcccctccctttaatcctatcttccaccacctcccgccccaccccagccttcctttggcaccccctctgccgtgtcctcactggtggtgacttcactttgggcaggagctgtgtgtacccaggactggtgtctcctctgaccccctactccagtcccctaagcgctaaaccctctatagcttagggggccaggggagctgctaggtggagcaaatgattgatttctcagctgacattcagaccttccagaggcccctatacatggaagctgccggtaccactcacccttctctactacctcagcctcagcactgccttcttctaccactcttcttcacaaaaggtgacagagcgagactctgtctcaaaaaaaaataataataataataacaacactaccactgcctcagcaaagttgggactatttgtctctcttttcacaacatcttcaactaatgacaataataataaaataacagtactgccagccggtgactaatgcttggttgcattagtcagcagtgagaaccaatgaaaactgcaatgagattcccttttgccttatccaactggtaaaacatttacaagtctgactgttagagtaggcagatagccagaaataagcaggcaagggagcgtttgggaaaagaagtcctggagactccattcactgacagtcagcgccacccactggcggccagcaaagagacaatggctacactggcaacttctggccttgtggttgggctcctctggccctaaaggggacttatgaggccttacccagagataaccatggtagggactttcccactgacgagcatgtgcactcctccagtaactcgccctacagtagccttttgctcattataataacaagccgggcacagtggctcatgcctgtaatcccagcactttgagtggccgaggtgggcggatgacgaagtcaggaatttgagatcagcctggccaatatggtgaaaccccgtctctactaaaaaaatacaaaaattagccaggcatggtggtgcgtgcctgtagtccc

SEQ ID NO: 68086 - DNA, 1174 bp, Homo sapiens
gctgcaatgctttgttaacaccaaatagaaaggggcctaaatgccagaaaaggaaggggctgcccttccccctgcagaccacggggccccacaaagctgcatagcggagccatataatcaaaaggatgctcccagggggttaatgttgcagcagtgggccagatataccgcatgcaggcaaaagagaaaaataaaagaagaaaaaaccagcatgagtcaataaagaagtatcgtaacttgcttctgatcagaaaggaccagttttgagtttttcagccagacctgtatatcctgctgggtgagtgtttttcttctctctgctggacaacagacaaaaaggcacggggagactgaaagctgagtgggatcattcctcttaagaattcttacagcagccagataagaggccaattccgtcagggagagagagaatgcgaggtggagggccctggtgggaagatgggctgttgttgccggtccggcacccttaccctggcagcggcctgcgctgtaatactccgaggcatccaccctcactgcccccaggggactgtcctttttgacttcacgtggttctggagggctgtgggtccataggctggcttacccctagctcacaaggcccggccgatcctaatgacctccacccaccctctcggacactgagcgcccccaccgcccagccggcccactctgggccagtaattcattctcccgagctcatcccagcctctgggccggtagttcattctcccgagctcatcccagcctctgggccggtagttcattctcccgagctcatcccagcctctgggccggtagttcattctcccgagctcatcccagccgggcggaaggagcgccgcccgcgctctctgggtctgaactgccggccgacagctccctcttgtggagaaaacggtttgaggccgcaaagagtgagcgagagacggaggcagagattccaggcggcaaggcgggccagagaaacgatcagcacggccaacagacgacccacaaaatgggagaaaatattcgcaaagcgcgcatccgacaaaggtcgaagatccacaatctataaggaacttaaataaactaacaagtaaaaaaataacaccattaaaaagtgggcgaaggatgtgaacagctacttttcaaaagaagacacacccgc

SEQ ID NO: 68087 - DNA, 5796 bp, Homo sapiens
ttctatatgccccgctggggggacacagtgagaccaccggttctgaaaccagataaacctgtgtttgagtgtcccagcttcatctcgtactagctgaaggacctttggataagtcatatcacttctgcctccagtttcacagctataagttggggctgaaaaaagaacctgtctcattgggattttataaggaatcaaatgagaatgtgcgcctttaaagcacctcatttagcacagaagaactgttcaaccaatagtcatggtaagagtgactggtgttttttgagccctgattaaattatatgccataagagtcttcttgattagtttatatactcctcaccacaatgctaagatgtagttaacattattatttcccacttgtagatgtagagatggggatgcagttaggctgaacgagctgcccaaggtcatagtaagtggtagaagctgggcttgaaccggaacccagtctgtctgatgcagtcttccttaatcaatagccatgctgttactattactgttgacattactattattgaccttgaattctttacccaatatctccacacttccacaacacctggtgggggcaggaagagccacctgacccaaagactgccaaaatataggctgagcagcctgtgatacagcctgggacagaagctccacccagcagggctgagcccaattaactaaactcatcagcagtgatggtggctgccagtttgaattggaccacaaagagttgggatgatgcctacaagctgaaagaccctaaaagatgacataattcaaacaaatgtgaaggcacaggggcaatgagtaagccaaacttccaagacagacaagggggaggagaaatttgacaaacgtctgctcctgagatgactatgaactgactcagtcccagagcactgggtcctgaatgatgttccagtggctaagttgtattctgtgatgtgtggtcaaaattcctgccttccagtccctgcatgtagctttacaacaacccccatggctcaagttaggagagaggctctgctcttttcaaccaaaattaggctagctcagctctcccgtttatctttagggtaaatgctaagatttggaagtggtgaatggagagggaggtaggatcaggacatccctccatcaatcccaggtgacgaggcccagaagacatggcctggcccagttcctgttatatcagaaccttagtccatgtctcaccatctacaatcatatcctaagtgatctcactcaccatctggggtgactccgggccaggcgtctcccctgcactccagcctcatgcccagctactaactccacagctccgtccgtgttacacaggcatgtcaaatctcacctgtccaaaatggaactcctgattgtgcctccaaaacccaccccttctgcaggattttcatatcaggaaatgccaactctataattcgagctgcttaggtcaaataccttggagtcagccctggctgtcctgagtcatattccaacattcttgcagtccacaaattctattggctcttccttctaaacgtatccgtgccctccatgatcaccctagtctgacccactatcgtctgtcacctggggtgacacaacagcctcctcttgcctctggcctgccttctacaacttgttctgaactcagcagccagagatgtcctgttaaaacctaggctggagcttgtagtcctcttgctcaaaacccacccatcactgcccttctcactcagaggaaaaacaaaggcctcctaagtcacacagtctgacctcctcagtttcccctacagacctgcctccctgacctcacctcccagagctctccccagcccttcctctattccagccactcaaggtgatcaccactcctggaaggagaactcccacccatgggcctttgcatctgctgtgccctctgcctggggtgcccctccagcacggctccctatctcacttgtgtgggtctgcagagatgccttccctgggtacctcattaaaaattaccacccactccagcagtccctcccccgtctccttccctgctttaactttctctgtagcatttaacaccatctattgacacgcggtagattttacttactgtttcgtgtcatctcccacactgggatgttagctacgtctagggaaggaccttcttccatcaggtgtatcccccttgcctagaacacagcgtctgatgcatagtaggtgctcagcaaatccttgtcaaatgaacaaagaagcacacataagaggacttcctggaggcacccctacccagttctcacgcccccagcagccaccctctgggtgttccaggccctaggctagtcccctcacttctttgatcctattcaggggaaatcggcctcaggccctgtccgaaaacaggagaactaaggagaagctagtcatggaggaattagtccaaataggtggggatttctttttaattagaactatttttttttttcccttcacacaaaaggacttgtgtcccagtagctggctctcctgtcaaagcttgtcccgggctgagagctggagctctgtgttcccaccaaggatctactgtcagaatcactggagagcagcgtgggctttacagaaggaaggttctggggcagcaggggcacgtggcctccctgggacaggcacacacctggaaaccccacaaatgggaaggactccatgtgggtgacaggtgaggctggtaacaagcgtgtagggtcactgtactgttctctccacttcctgtagtttgagaattttctttagagagagaaaaaaaaaaaagagtgtttttcccctgaagttctcttttcccgacacatgcccagaggatttcctgtagccctccctccccaccataccccacccacaacttctcttttctcctcccctctgattcgaggagagagccattctgctctgcttactagctgcctgtctgcatctggggacacttacaaacctttgatgcctgtttactcccctactcgccaagatttgggtccagatggcctggtgaggtggtgctgggcactgatggttgctaaatgctccctgggtgatcctggcactttctagagttgagcaactaccttgttaccccagacccagccctgactctgccacactcagggatctcctgttaatagggtccagcctccttagaagacagtttaacaacatattttgttacctgagcccatctttggggtccaccatagctgcctaagtgacttgaggagatatttcttccaaacccagacaaagagcctcattcaccaccagcactcctggtggatgacatcctccctgttaccttatgcgacacgggttccctgtgaccatttggaaagtgcagagaagcacacaggagctggccacagcccacttcaagcccaggaatttgtgaacagaaaggagccattgtctccagtcacttgaagggaacagctcaaaaacacattcaaagggccctgatgataatgaatatgctaatatgatttccactgggcgcctgtgctacctccaaaaaaccctttctgaccttcctcatggattcaaagctttcattgaagtcgacaggggattttggttaaaataacatgaaagttttcatttaaatggacaaagctgggagttgtgaattaagcatgagtttcacattggtcctgacacccctgaccttgatggggaaatgcatagattgtgactggaccttctggaccttctagctattgcctttgggtgggcagagctagcaagcattaagggtcccttttgcatgacaagtgaactctggagacctaggtttaaatcccagctctgacacttactagctgggtgaccttgagaaaggcaaatcatttctctgattgagcctcaatttccccatctgtaaaatggtttggataatacttcccttgcagcattgcttccaagagtgaataagaagtctgtatgtgggaggggttggggaagtggaaaacatcttggagctccccaccgtctcacccagtcagagacccagcaagggtgtgaacacctccagcctcccatatcccagaccttctttccttcattcagcgtatatttataaagcatttcctgggtgccaggtactgttttggggctggggattcagctgtgaacagaacagatgaactctgccctcagtggagctgccattgtagtgggaaggacagacattaaacacatgaatagataaataataagtaagtgggctgggcgtggtggctcacgcctgtaatcctgacacttcgggaggccgaggggtgggggggggggtgttggatcacctgaggtcaggagttcgagaccagcctaaccaacatggtgaaaccccatctctactaaaaatacaagggcgtggtggcacatgcctgtaatcccagctactcgggaggctgaggcatgataatcacttgaacctgggaggcggaggttgcagtgagccgagatcatgccactgcactccagcctgggcaacagagcaagacttcgtctcaaaaataataataataatatgtaagtggtaataagttctttggagaagaaaaacaaagtccttaatgaaaagagcagagctttagaattagacagagctgaattcaaatctcagcttgctctttgctggctgtgtaatgcctgggaaagagattttatctccctaacactcttctgcacattttttaatgagacccactgatgaatcacccacccattgaacaaatatttatagaactctgggccaggcacggtggctcatgcctgtaatcccagcacttcaggaggccgatgcaggcgggtcactgaggtcaggagttggataccagcccggccaatatgatgaaatcacatctctactaaaaatacccccccaaaaaagaaaaaaaaatagctggacatggtggcgtgcacttgtaatcccagctattccagaggctgtgacaggagaatcgcttgaacccaggagacagaggttatagtgagccaagatcgtgccactgcacttcagcctgggcaagtgagccagactccatctcaaaaaagaaaaaagaactctgtcctgtgtcaagcattgttttgagtgctggggaggccacagtgaatgaaacaaaaatccttgcccttgggagcttaaaatctaaaagggagaaatagacaattaacaaatatacgtatatcaggtgatgaaagaaaaagcaagggaaggaggtcaagaatgtggaggacattatttcagggagtggtggtcagggaaggcctctctggggagctgacatttaagtggagctttgaaagatgtaggggagttagccatgtgggtgtctgaaggaagaaccttcccagtcggaggagacatcaagggcaaaggccctgaggtagggccatgcgtggctgttgggaggattagggaattggaggcaatgtctaagacacacccagcacagcccctggctctgagtgggggttcaatcaatagcagttattatttgtactcattttatgaaaaatgcaagagaagtcattttccattattataaaagttcttgaaggctttgtggattgatgactttattcccttttcttcttttgtttttctgaatcagaaccagcaagtccaacccccaagcccacctgccagcccgcctctgtgcccccagtcccaatccggcaggaatgtttgacatgcagtggtgctggagggagggagtgtgtaattaatgatggttatta

SEQ ID NO: 68088 - DNA, 1269 bp, Homo sapiens
caagccatcccttccctgggtgctcactcctcctctccatcaactaaagatccttcatgaatgggcttgtctggaactgccgcaattaaactatcagagcaacattggaccatttgtttactatggcacttagagctggaatggcttgttgttttgactgtttctattttcagctccatttcctaggggtagtggggagagggtaggcaatgaatcctggtctgttcaagcaaaaagatgcatcagtgaagcctagaatttcagagtcacagaattctagcatcattgtcatggaatatgagagcagtgaaaatctataattttggttataggttcctagattcacgagattctagaatcttactcaatgaaattagaatcttaaagtcagacaaatttagactcaaagtcctagagtgatgggctctgaggagactgtcactttgtctactccatatctctttcccagaagatcttctctgggtaccttatccacaacgttcccccctaccgacccacagcctgtcactctctattgttttaatttttctttatggctctgatcaccacctgacatttgatctgtttctctgttcatttgcttattgcctgtctccctcacatgtgagattgaggtcaggaactttgttttgttcaacgtttagaacaatgcctggcatgttctaaacagtactcagaacaatgcctggcatgaagtaagggctaaaaaaagcagtgcccattcatccaaaaaatatttattgcatccccacttcatattggtgcctcagagatgatcttctctcaggacaggaagcaggtctcactttgcatgccaaatgcaattggcagtagatacccagagcacggtgttgaaaagacttcttggggcttatccaagctccgtggggaagggcaattgatgagcaatgtctggcatagactcagccatgggaaaaagtggccatctctgctctggcctccaaccctgcactgaaaaaaactgaggtccagaagaagatgcactgggcatgcatggggtgcatagccagagttagaaccccatcttcagtctcccctcagtgttggttcctgagcccaagcctctcacaagcacctgtgtgtgccctcccctccccatcagcccttaggctctccctcccccgaggccttcctgggatgaaggggctgctggagtccctggccctgaaccacagcctgggaacccaattctggaacaccgcctgaatgcgcaagccagttattttt

SEQ ID NO: 68089 - DNA, 2124 bp, Homo sapiens
aaaaattttaaacacagaagatttccaatgaaaagtgaatttcctcctttcctaggctaagttgtcttaaaaagccaaccagcattaacctgcgggtggggaggggaggaaaagggtattctctgcagagggcacagccagtgcaacgacctgggggtatgaccctacttcagtctctgaccctctcaagtttttacaccttggagattctccctcttaccgccttcctcaggatctatcagcctgggccacacataaccttaccaggtgcccttccagaatgcccacatccccagaaattcagattctctaaattttcttcaagcctcagtttcttcttcattctatgggggtgattattcctgcctccacgggtaggggtagtgttctgagcacctaatgagatagtagctatgaagtggtaaactgtaaagagctgtgaacttgacagttgtgtgccctctctgtgccaggcatgtgccttgttccttagagatgccatgtcattgaacctgtaccacggctggaggtgaactattattgtactgttttgcagactgggaaacagaggctcagagaagtggggtgacttgcccaaggtcacccaacctggaaccaaagccaagttttttcatctccaaaggccacggaaatcgtagatttaaggactttcagcccccaagtaccaggtctgttaggtttgaggatccccagccccgagagcactggtggccaggacagggcagacagtctggtttcacaatttatttcacccccacccagttgtttgccaaagggaggggtggggcggccggtggctgggagcctgggccgcccagtcacagggtagacttgtctgcctgccagccaatccaggctgccggagctggcgttggaaaggccctggccccatcttgccgggacactctatctttgtccctgaacacaaaaggggccttgtcttggcccagcagtgctgattccacatgctcccgactgccccagcccctctgccacgagaaaggcccactttgtcgagtcaaaagactaacttgtttctttttcaccaaaacgtgttgactgacctggttgatttatcttgggaaagtggtgaatgagggaggggagagaggtgacagagacaggcacagtccagaaggccatgtatcctggcctgacttgggggtgggcacccagcccttacctgggacagagggatagccacataatgtaatttcaggggattaggacagtcgtccaacctcactagtagcagagattccaccattaggtattcatttctttggctttaccctttgaagacagctaaaaataaaaactccctttgaatgggaatgccctattgtcacaagtgagtgagaattagttttcctgagaagagaggtgagtcagaagagaacaagcagcaggtgaggcggggcagcaggcaccaggagcccagagggaagctgggagaatgaggagggactactcacagaggaagtgagattacgtgagggaggaaacaaaagcagacttttctttggtaatttttcctcaatatcaggccttctccctccacaaccagcaacaccattgcttagtcttcttccttcctttcttccttcccttcttccttcccttccttcccttcctttccttcctcccttccttccttccctccctccttccttcccctctccctcttcccccatctctctttcctccctctttccccccttcctccctctcttcctccctccctttctcctttctttcctttctttcttccttctttctcctttactccattcaagaaatatttatggccaggcacagtggctcgtgcctgtaatctcagcactttgggaggccaaggcaagaggatcacttgagcccaggagttcaagaccagcctgagcaacattgtgagaccctgtcccaacaaaaaaaaaataataatttttaaaaagccaggggcagtgggctgcacctgttgtcccagctacttaggaggctgaagcataaggatcctttgagcccaggagttcgaggctgcagtgagctatgattgcgccactgcactccaggctggctgacaatgcaagaccttgtctaaaataa

SEQ ID NO: 68090 - DNA, 507 bp, Homo sapiens
gagtgggaggccaggagtgatggagctggagcaggagaatctattattaattaccatgtaacattgattaagagcccacaaggcaccacagctgcgaggagctcaggagagcctccgctcctgcctggaggggaaaatgattagcaacattatgaaaggaaatattcatcctgtagcggccctgagcaaacacctccagggatggggaattttcctctcccagtgatctttgctcctggagcgggggcagctgcctccgtggcctgggacagacttgtcgagctaggaaggtggagaagctgacctctgacccatctgcaggtgtcaggttgacaggtcagagagtgcagctctagggggccagagatgcccaacttgggctcctgaaaaagcagtttaaggtggcaggatctttctgaattttggaaagaaagaggcaatctggatttggttttcaattctccaaatttttaaatatggttaagacagattctgggttggcaactt

SEQ ID NO: 68091 - DNA, 1270 bp, Homo sapiens
ttgagaagcactgcatttgccctcagtttcctcatctgtcaatttggagtaaacagaaactacctcccaaggttgtaaagatgaaatgaaataatttgtctggaaagcaaacaccttttctctgtcttggcttttgtaaaatttattttgtctctgactttcccattctctgtttctggtgtttttcctatttcattctctgtcctctctctccctaccctctacctggaagtggacccaactccagagctgaaatggaaaacactgaacaggtgtggcccttctgtaaaggctggaggccccaagatcatccaaatggcctgtccagctccttcctactggcaccccagcagtccccaagaccaagcatccccacccctgcagcccccacagcagcaaagctggggaaagatggggatccattgtgcaggaacggccttgctgctatggaaaccagcactcagaaaatgctcagagatgatccattctggggagcggcctggccttgggggagggggaaaggccaaactctgcaccttggactttgccctcccattaccggccatgtgatgctgggcaagtcacttaacctctctgaaccctcctctccctcaccgggccccgagcagcagcctccattatcggtgggtgataaccgccgctgatgactgaacactgctctgcggctttcaagcctgaagacacgccaaattgccatttgctttcattactgcgagcttgaaatattctagtgccagcttgctgcatgaccctgtgcctccgagggccaccaaactatttccatgatagaattccctctcgcagaggtgcagagtccactctgagtcactctacaacacacacacacacacacaccacacaagcacacacacaccgcacacacagacactagctactgagctaagttgcccatacacttgcctcaccccggttgcgctgcgattcctcttctaggaagggaagaagtgagcacaatgtctcctgattactccatcagcagcgcccaatgctctgcagctgcagaacttatctcatggtgcattttccttcctcaatgtctcccagggcacctcccctccaagatccctcccacggttccccatgcctccaggcctaagtctaagctcaacagcctgaccttcgaggccctcagagccaactgcgcccttgctccacaatgtcacccctctatttgcgacagcagtccctgtgaaggcagggattctgtttgccattgtagctgatggaa

SEQ ID NO: 68092 - DNA, 1239 bp, Homo sapiens
ctgggttttaaagatactgtcacaggatctgaggatgatgagcaggagagggaaagggaagggacaaggatggcacaggtgattgagaccatgtatgttagcagagggtttattgagcgtggccccttgcatacagtaagtgctggtaaacactgcccattgggaaagcatagtgttctacactaagcaccaccttctacaggaaccagccctgttgatcaacagagcggcatttctggtctcagattcctggattgcaccaaatgacctctgaggggataacagaggactccacgcaggaagggttcaggcagtcatgttgcccaacatgtgcggtgacagcataaacaccagggtgacttgtcccaggtcactgggcttgttaggggcagagtgggatctcttgaccctgtaaaatgtcctctgggatctaaagtctgagattcccaggtgtgagtccttctctggacctcgggcttcggtagcagagtccagcctcagagcctttgtgcttgctgttccccttcctggagcctcccatgacctttggatgtcacttggcctctctgcgccctctcaccccagcagttctgcagaggtcagcctttagaactgacccacgcctccctgggcctgcagggtttcacagagctcggcagcagcttgggttacccctagggtcaggtcatcaccatttgcctcatctccttccacagccaacttggaaggattccccagccttgtgccaggagaggctggcacggctgccagagccccactccgtggcgccataggccctcacagggactgccctggctcctggtggccaaaccacacaggatagaaccacctttcctgctgggacacagcccaggcggaatccccctttctttctcctggaccaatcagatgtgagtcagggaccctctcattaacaaatttcctcccttcctcctcccctgttatgaggccaggagcgggcgtcgacctacatggaaggggaggagaggtggaaccagttggagcaaatacccaacctgcctcttgcctggtaaggtcacccagaagccttgagccagcagccgttccttcctccatctccaacggtctggccttatgctagcccccaactcaggacacagactttacacttaaccccaaagcagtccctgcctcacttggggccaagttcagacaagaggcaatcagggacttaactggctgccagagaaggccacc

SEQ ID NO: 68093 - DNA, 642 bp, Homo sapiens
tgaaccttggagattacccttactctgtaagggccggaggacatagcaggggctcggtaaggtcactcccatctcccatccccccaaccccacttgccttccagcctggtgagcagcaactcttggggcagttggttccctggtccaggctgcccaggagtccgtgctgtttttatttttattgttctggcttcacagctgagacctctaactccaaatggctcttcttgcccagaaaaataggtcgttggcagctccagcctcctggcaggcctgcctgctgacgccagcccagggttacgggaagtggggagcagagcgcgggcagggctggaaccaggtgaagctgggctgtgcaggtgccagcgtgccccacagggtggccctggtcaagtcgtgttctgtctctcagtgtgtttcctcacctctgggaacaccgcggagttgctgaggcttcagtgagataatgtatctcaaaggacctagaacacacaagggtgtcatctacccccctgcaaaggccaaactccagataggccctgccatgccatcgtggctgctttcacatccttgtcactactgacccctcgtatcagagtttgttatccctatttcacagatgaaaagactgaggctcaattt

SEQ ID NO: 68094 - DNA, 2728 bp, Homo sapiens
gttccctccgggaaaaccggggttctgtcctctccaactccaggcctctggccccggctccccttcccctcatcttcctcagggcttgtccttctcccggaacccaggccttcagggccccgctctcccacacacgccccggcctgggcctcccacccgcccagtccgccctccaccaccgagacacctggccagggggcctccacctccctgggaaggccccgacccttcccctctggttgcgcgccacagcccccttctcgctccctctcctccccgcgcctcttttccaggcggcaccgaagtccttcctacacacacgctatttttgtaccatcatctcttcttcctctccccttccccctgcgttcacttacttccttcttttccttcacctcggcccggctctgaaaggatcgggcccctccggcccgcacccacccccaagaggggccttcagctttggggctcagaggcacgacctcctggggagggttaaaaggcagacgcccccccgccccccgcgcccccgcgccccgactccttcgccgcctccagcctctcgccagtgggaagcggggagcagccgcgcggccggagtccggaggcgaggggaggtcggccgcaacttccccggtccaccttaagaggacgatgtagccagctcgcagcgctgaccttagaaaaacaagtttgcgcaaagtggagcggggacccggcctctgggcagccccggcggcgcttccagtgccttccagccctcgcgggcggcgcaggtccgggcccggcagggacggggaggggcagagcgggaccggtcggggctggggaccagccgcgcgggcttctgaacgggcacgctgtcggagccggaggctcgtctagtcccgagccccagcgggccgcggcggctcgcggggccgccttcccgggacagcagccggggcccgggcgccggcgcgggggaggacgctgccctccccggccgggcgcgcagctcgcagccctcgctccctcccccggggcgcgcaggcgggcgctcgctcgcagagaaggtgccggcggggccggagccccgaagcctccccgggcggcgggaagacgggaggaggggaaagggaaggagggagggggtcgggctgccgggagggcgggggcagcggccgggactgcgggccgggagcgagcccagccgcccgcgccgtgtggagcccgggcggggcaggtgggcagcggcgggggcggctccgcgcggccgggctcggccgtgctgcccctcgcccctgctcgcgcggtcctctctcccgcgcggtctgtcggtctgcgcgccgcctcgctcctcgctcctcgctctccccctctttctccccctctcgcctctccgtgtctctggctctctgcctggctcccttgggtctgtttctctctcctgccgcctctctctggccgcccctggctttatttctcgcgcgcttggggtctctcccagtctccgtctctccatttctcctggggggcggggagggggggtctccaaaaaccgcggcggcggcggcggccgctccaggcgcccgttccggagtcggggggaggcccagccgggaggggggaagggggggagccttagtcatttccccgctccagcctgctcccgcccgagcgcgcactcacggccgctctccctcctcgctccgcagccgcggcccatggagcccgccggcccggcccccggccgcctcgggccgctgctctgcctgctgctcgccgcgtcctgcgcctggtcaggtaagcacccccccgctccccaccgctgcactccccaaactgcgggctcaggcctctcagactggcactgggaccccttcggctaatgccgagcagtaatagggggagagacgcctgtaaccagggttatagatgcagaaactgaggcccagagagggccagcgacatgcccaaggtcacacagccaagggtagaacccaagtctcttctatgagagtttgtctctgtggactctgactctgtgcactgtgctgggcactgagacaaaagagccgagttgcttcactcagcccctgcccggtccaatggggaaggctgactgacagtggctttcagagcagggccgtccggcttccccagaatctgtccccatggacatacgactttccacatgtttgacttcagggtgtgaggggaggaggtgagggcagaggtcctcccgatgctgcctggaatggaacagagacaagctgttgcaattagggaagagtgagccctccctctggtgcgcagagtaaaccggtgttagtgtgtgcctgggagagagggagccgggaggccgcggtaaccccagagcgagctgctgcgagcaacagatccttatgtaaaaacacggtggattgtccctgtggttgccaaagcctctccctggtggtcttgctccttgaggcgctcccagctcccccttcctcctgccttccccgagcttccaggcagctccctgcagttcaggtgctccgcggggatgttacctgtggctctgaccatgtctttctgttggcctacatcaaacacctggctgtcgccggcaggcgggctctgaaggctactgtgcatgttcaccaaagggtgaggtcaccattcaggagtcttgcttcttaaatgggttttgcaaaaccatgggtctcctgggagggcaccgggtggggggcggggggagcag

SEQ ID NO: 68095 - DNA, 1014 bp, Homo sapiens
aaaaggggctcacacgaggatcccctcacagagatggagtgaggattaaagagctgacgggcatggagggagcagccagtgtccagctccagagaagccctggataaatgggaactgattgcagcccctcagccctgtggggacatccaggccgctggcctcaatgacttgacttcttcaagtgacaccctccttactgtgccctcaaaatgtttgatgggtgtgagggagaagttaatatttacaaatgcaagtatgtgtgatatgtgcttcctggtgactgcgataggaggtatggggtaatgattagcaatttggagacacgtttacgacccatctgcagggagaaacagcccgcgttctgattcagccatgtgtgtgctttcaggacccaggaagtgcttctgcctgcttgggcgccctgtgtctgtgtaattaattgataattaaccactttggctttctccacacttggtgatctttagtgtctatctaaaactgacaccaaagaagaccgcagattcagaaaagtatcccttcctttcaaatttagcacttggcacagattagaccctgctggaatatttgtggagaaaatgaaaaatatgaagtaaattcataaatacctgaagagagagctttggatatgaataaagtctgggttaaagttagatctgtttttgcttatttttgtgaagcatcttctgtgtttatccaaagcaaaactgcttctgttgcctcatttaatcctcgctgcatcccagaaaggagaaatgctgctgttccattttacagacaaggagctgggtgtgccaggccgcccctctcatgggctgagcggcctggttccagctctcatggtgatgccacgttgctgcttactccctgcactgacctctataaacgctctctctgaggttggcactgttgccaggggaggcagggtagaaacagttaataccaaggatgagatggatcgttaattttgatcctgtgcccaaattgctggaagtc

SEQ ID NO: 68096 - DNA, 927 bp, Homo sapiens
gacatgagctcgagttgtaattaagaaaaaacaatttccagtcatgagcgagggagatcttctcccccatcattttacttctggacttcctcctggaatcttctgggggaaaaaaatgatggtgagaagaatgggtcatggaaacctctacgaaattcacagcagagacttactgggcacccactgtgtgccacgcactggacagtgagccagacagtcacagcccagctggcagagtgcctgcgattccagtgccaggtgccagccctggccagggagggagttgcacgctgtcaacacggatttcccagacagaagcaaatgagagcacgcagggctcaggacagaggagctgtgtgctaagagcacagtcgtagagtccaacacactttggttctttgccagccggacaactttgtccactttattgaacctcccttggtctcagtgtcttcagccgtaaagtggaatagataatccttcccaagcagggttgtggtaagagtggatggggtgatctatgtgattgtgtgctgcttgtaagccctgagaactgaaatcagccattaccgtgcaccaactaggaggtgtgccggttggtggtagctttattctgttctatcacgcaggggccagtcacagagggagcaaagtttatcattcatgatgggcgcttttgaggcggcagtggcaggttgataggattagcacatgggaggtatccaagtttgctaagtggttaatgattgcgaacatttattgaagacagatgctcaataggtaccaggctctgttctaaacgctttacctggataatctcattccatcctcacagcaaccctggcagtagacactattatcatcccctctttacagatggagaaactgaggcccagagaggttaagtgaattgctcaaaatccctga

SEQ ID NO: 68097 - DNA, 855 bp, Homo sapiens
caccacctctcataagcactttaggaacacacagagggtagggatagtggccctggccgtctatcctacccctttagtgaccgcccccatcccggctttctgagctgatccttgaagaagaaatcttccatttctgctctcaaaccctactgggatcaaactggaataaattgaagacagccagggggatggtgcagctgtgaagctcgggctgattccccctctgtcccagaaggttggccagagggtgtgacccagttaccctttaacccccacccttccagtcgggtgtgagggcctgaccgggcccagggcaagcagatgtcgcaagccctatttattcagtcttcactataactcttagagttgagacgctaatgttcatgactcctggccttgggatgcccaagggatttctggctcaggctgtaaaagtagctgagccatcctgcccattcctggaggtcctacaggtgaaactgcaggagctcagcatagacccagctctctgggggatggtcacctggtgatttcaatgatggcatccaggaattagctgagccaacagaccatgtggacagctttggccagagctcccgtgtggcatctgggagccacagtgacccagccacctggctcaggctagttccaaattccaaaagattggcttgtaaaccttcgtctccctctcttttacccagagacagcacatacgtgtgcacacgcatgcacacacacattcagtattttaaaagaatgttttcttggtgccattttcattttattttattttttaattcttggagggggaaataagggaataaggccaaggaagatgtatagctttagctttag

SEQ ID NO: 68098 - DNA, 2888 bp, Homo sapiens
tattagagcatcgctgcaatggtgggtcttctgacgaataattttatcaagtccctctctttctcattagcctgagataggtctctcttaccaacctttcgggtatggggtgcaacaccccagcttggttttcggagtcctctgccttataccaccacctgacctgtttaagaacatttcctgctcctccccagcccctgctggactccttggccaggttgattttcctctcccaagaaatactatatagcaactcctttgacttccctagccccaccatgagtcattcctccagtgacttggtgtcctcttgaccagacatgagctcccaaaccagaacttcacgctctacctttgggattcagcccctaggataagggagactaaagcctaccatgtgccacgctggactctggacactcgaattctttacttcatggaaccttcacattctttacaaatggaatgtcaatttcacagggaagaaaattgaggctcagagaggtggagaggtaataagttcaagatctttcaactagtaattatttctcaagctcctactggaacctggccctgtgcaaagttctgaggacacaatgtggacaaaaaatggaccacacccatatgagctcatatatgagggaaccagagccactggcaatcccagtgcagggatgagcgctgctgagaagggcgtgacaaacatgacgtacaagtgcagaattaacacactaatgagtgagccagcagtggggcaagagctggttccaagagtaaatgggcacttagaggctttgaaaaaggaaggtgagaataacattttcaagttagagatcaatccggttaatgtcccacaaggcaataaggccatatctttggagatattttttttctgccagacagaagccatttgcacccaccagacaaaagtctacaaattagccccaatctgggccttaatcaaataggaaagacaaactcaggtatattcttctacagaactaactaatccttcagtggggcttttaaaccgtgccccagtatggcaacgagatgaagcactgccttcttttgccttatttccaaatttgagatactttgtcttattaaaggaaagtatactggcttcattcagcctgcacagggcagaaaaagacttcttgaagaggaaatccctgaactgagatctaaaaaataagtaacaagaagccaggtaagtgcaaaagagccagtgcaaaggagttccaaggagccagtgcctggcagaggccagccgtccctgtgtgcactggcccctactgagctctgcagcccgattcacaccactctctccatcactccctgcactggcaacaccagcctcctgccagtttctaaaatgaaccacaggaccccggcatgagctactccctctgcctgcaacactccctggatctttcctgcttgtcctccaatccagaggctgggctaagttcccttgtcaaacacttccatagtaaccatgtccagcccttctttgtagccctcatctcaatttgtaattatacattggcactgtgattacatgattaccatcctctcctctactgccccagttgctgcctcagggcaaggagggtgttgattcactcatcagtgtaactcctatgctaagcccataggaggcacccagcaaatattagagggatgggaggatggacggagtgatgagaaggaggatgagaggatagatggatggaagaagggaggctgaatggatggctggattgatgcaggagagcacggatgggtggatgggtgggaaggaagaaaggaagggggagagggagggaagagagcaaagggggagaaggaagagcataaaagtcggagtctgcttggcattttaggagaactgagagtccctggctggcaggtttggaactagaagcaaacctcagtacatctgacttttcccactgagtttctctgcctttcatcatgatcctgggttcagggcaatcacttttttaaaaaaatgacgcatgatccccaacaggcaaggagccaatgacctttgtctgagcctttggttcctcttctagagaaactggggctatacttagaaaacaggataaaagattgcaaaaatttgtctactctcaaattgcacaaccctagcgtggctggtcaatggctcaactttgggagctggcggggctcagcctctcaacagacttgtcctcctggctctgcttcaatgacaacaggccaagccctcatggtagaaggtgccgttcccaccaacctgggccttctgcccccgcaggccctctctgggcaaggtcagctggtgcggcagccggtcgcatggatctgggccacagacctgtctccagaatgaggccgggtgagagtttaatggcaagaaggctgcagcctgactaaggctgtcggcttgattctgccatggctcccccccatgccagtaaatggaccctgtgcacatgcagattaatgcattatcgctaatgttttgtgccagatgcaaaggcactcgggcagcccggccgagagctgccattaccacaggaccttttgctggaaaatttttcttggggcaattaaatcttcagctgtctcctccaagggagtgccagcttgcattttaattatcctcaaaagagggaagtaggggaaaggacacaaggcaaagaatgaaaaaataacaacctgctttataaacacagtggtttctcccccatcaactccacagtgcccttgacctttagattcctgcctcccgatacccttggaaggacccctttaacgggaagaagggagaggaggtaggagagagcgtttcttgagtgtggaataagtgttagtgcaatgcattatgcctggtt

SEQ ID NO: 68099 - DNA, 896 bp, Homo sapiens
ccaatctgtgacataggcactcagtaccccgttgcccaaatgaggaaattgaaacacagagaagtttggcaactttctaaagtgacgcagctagtaagaggcagggcctgggttcaaatggaggcagattttaagcctatagctgaacagcgaagtccaagattacccaactggttattactagaggcaggattaaaccccggtgcctttccaacgtgatgaaaccggtggaagaggaaaacgcattcattcactagggaaacatttactcatcctccgctgcaggtcgaactgtagacacagagagcaacagacaaatcccaggccctcgtcggggaagaaagggatcatgaaataaacagaaaaataaatgcgaaatgcggccagcgatgaaagctcagaaggcgagcttaccccggacccaaacgcgcaatactaaccgggagtgtaaggaggccacgccctcctcgcgtatttgtgcccaaatgagctgcctccccagcgtgcaccaaattcctgagccacctgctccgagctcgatttccctttcaagctgtgtgttctgcgggggcagggagagctgcaagggctcatctttcaggacgtgctgcaaaggccctttgaagtcatccgccctgctcttggcaccttgcgcctggagctgagctcttccaaaaatgacccctgcgcattccgtggtgcggccgcccagcccaggcagtcgcggtccagagcaggggaagctgcagcgcggccgacagctgggagagccgaggccctgagggaggaccctgcctcaagccaagcaaccaggccctgcggccctctccccacccctgtgcggccctggcgcagggaaccgggacggggctttcaggccttgaagggcagactta

SEQ ID NO: 68100 - DNA, 559 bp, Homo sapiens
tgtttttatcttcgtttttaattttaaatggagaaaacatgggatgggtggaggaagcaaaagtgctttctactcgagtgaggtttaaatttctgaacgccactatccaagctcactctccactggttccgatgagagctggggcaaacaggatttccctttctttgcagtgaggaaattgcctaatcatttgcaggctaagaggaaagaccgcactgcagaacaacttattttaataggaagcaccaagacttcttatcttaatgctgacgaccgcccgtttatattagatgatcccctgagcgtctctccttttgtctccttgagtttgaacccttaagaccacgtggacggtggggaaatcctccctcaacgtgcatggctcatctcgccacgagggggcgctcccagatcagagacacgcggctgccgcccacccacctcgcggccgccacctcctgtgcgtgcatcatcttcgcgcacctgcccagagggcggggccggggggtctcctgccccattaagactccctgaagtccaggtgcagccctgaaggcta

SEQ ID NO: 68101 - DNA, 470 bp, Homo sapiens
gtgcaagcatttgccaaaaaagacattgttcttgagagatgtgtattctctcaagtttgggtattataaactaagaatgattccactgggaaaatgttaaccagagaaatattctgcaggatatccctgaatactgtggaggtttttccttacctccagctccaccttatctttggtgagttgcatagtaaacattccactgtgtggataactaatgtaccttgtcccctactgttgaacatttagaatgtttccaatatttcacaattataaacaaggctgcattgaacatctttatacaaacacccttgaccatttgtccaattacttctttgggatccttgaaatgaaatgctaaactgaaagttctgcaaattttacattttgatacatattgccaaattgccttctgaaaggttgtaccaactccattacttctccattgctgcaataatgaacatgcatcacaa

SEQ ID NO: 68102 - DNA, 912 bp, Homo sapiens
gaataaagccagggagagagcttagagactcagacaataagtggatcatcagttcttaggggatctgagacccccttgaagaatctgattaattctaccccaaaattgagcccatatacctgcatatacagaaactggcacactgccaagggatgcagggatccaagattaagaatccattatgtccccaacccttcatctgcagatgcacaacagccccagagagggctaaagtggaagtcacagcaaagcattgtttctgcaacaagatttggtttggtctctctttcaggctggaaacttacctcaagggactgatgatctttatctcaaagggaggcgagtaaaagctgatggaaagcttagtaagcacggagagggtttcacaactgatgtatttccttataggcaattgagtgtccagccagatttttcactgaaaagttccaaaggtcacgattgcaggtccattctctggggcagttcaatttcttcatagaaagaagctccagtccattgcctgttaggggatgggggacattgcccaatgagcctagatgtaatgttctaatgctgggctaggaacaggttggaggtgtcatcattcgggaggcagctttttagttaacccctatgttgttcagccccctcccacctctcccctatatcgcagccagagtcaatgctctctttgtggctgctaaatctggaacctgattcaaatttcccagagatcaaatccccggtggcctctggggacagacgtgcatggctgcataaggtcaaaatgcccccacaaagactttcagtcaatcctcgtgttttcagcatcctgctttccctccacctcctcaatgtctggttctgccaattcctgaggctttctggcattctggggtgaattggatgttc

SEQ ID NO: 68103 - DNA, 2492 bp, Homo sapiens
aacccagtccctgaggttcccaggacagagctatgaatcaaacgaccaagacaatcacccagtcagtatttattaggcgcctactgcggacggttggtcttcacgcagatcaggcgagaagggatagtgatgcgcgggccgctgcggagacccggagcccgccgcggatcacgggaatttcgcgcctattttttgttggctgggtgttctcgccagtgattgggtcccggcaaggcgtgccggtgcgctcggctgcggctgctccgtcgacctttgcaggaccgggcggtgcagggctcactcggctggcgtcccgggggatgggccaccaggagtctccgctggcccgggcgccggcgggaggtgcagcttatgtaaagaggttatgtaaagggctcagctggcgcgaacacgtggaaagccacgggagcctaggagcccaggcttccccagcgagcgccgcggcagcagaaggatccgctacacgccgggctcgggccgccacctcccgcgctgctcggtcccggaggcagcccgggcccggagcggaccatccccaggcaggggctccaggggggaaacgggccgcccggaagtggaggtgcgcgggccaggtaagggcgccgttggaggactgaaggccagcgccgaggctggagttactgccactgcctccgcgcttgggaagggaaatcgggtcctcggccagtcgcactccgagaagccgaacttttcagccaatcccttctacccgtcgccctcggggacttgggtcggtccgctgggctccgctagggcttaattcaatggactgtttacacccgggcgaacacaaggcggggcgcggggaggagcgtcacagagggggccaagcaaagaaaaatatttccgccggccaaatcgcgtctctaagcggttttcagaaggcgtgaagcttgctggctcttctttttcctatcgctacatgacaagctaacagagagagcggagagtttgtgcttttctttccggttccccctctgagctgctgcccagtggttcggtctttcccgctttcccctcccctcccccgttcaatcagcggcggtggcttccgtcttaaaggggccgcggcggccgggggaggaggaggtgggacgccccgcggcctacgctcctggcctccccgccttggcctggccgtttaaccgattctttcgcccgcaggtcacaatccaaggtccggctcctccgcgtcccagggccggacggagggatgaggcagggggggcccgggcagcgccgttgctgctccccccgccgcccgcagccatggaaacggggaaggacggcgcccgcagaggtacacaaagcccggagcggaaaaggcgaagcccagtgccgcgggcgcccagcacgaagctgaggccggcggcggcggcccgggccatggatccggtggcggccgaggccccgggcgaggccttcctggcgcggcgacggcctgagggcggtggcgggtccgcgcggccgcgttacagcctgttggcggagatcgggcgcggcagctacggcgtggtttatgaggcagtggccgggcgcagcggggcccgggtggcggtcaagaagatccgctgcgacgcccccgagaacgtggagctggcgctggctgaattctgggccctcaccagcctcaagcggcgccaccagaacgtcgtgcagtttgaggagtgcgtcctgcagcgcaatgggttagcccagcgcatgagtcacggcaacaagagctcgcagctttacctgcgcctggtggagacctcgctgaaaggtaggagcaccgcgggcctttccacccacgcagggcctggaccccctgctctccggacggcttggcccacactgttcctggccttcctaggcctcagacctggtccctgtcaccctgtgccctgacacaccctcctttcctgggcccaggcattcggccctctcttctcaggtcctaagatcagtccctgggcctaaagttggctggtgtttccataacaagagctcgtttaagtgctaaccattaacttaataagtgctcaagaattgcgagctatggttattaaacgtcttctatttttaagatcggttgggggagtggaggaggggtcgggttcagttagtagcagaactgcggagcctcctcacccccgagggcctctctctttccctcccaaaacaaacaaaaagaaaaaacttgactggacccacccacaccctctccctgtctggttccaagtttcctgacaccctccagctccaacccccaaactcctgtggcttcctcgtctgccttttcctctgaggcccccggcccttcatcccaggcagccgagcaaactgactgtcttctggcttggtcctctgaggggtgcaggctgacaaccctcacaggtggcctgagagctgtcacataacaaagcatccggcatcttttccctccgttttacattcttaatctttttctt

SEQ ID NO: 68104 - DNA, 1433 bp, Homo sapiens
tatagttgttgataaattgcacgaacttagctccattctctcttccagctgatttgcctagagcctgggagtgtcactgacgtgccatttcctgccctgacagcatctccgcttccgtcctgaaacctttatcaagaaacaactgtgcagcccacgaatccattcagtcaagatgtattgagtttctgctatgtgtactgactgcggggaaaacaggattcttgtcctcgaggaactagctggggactcgggacagagtcaaacacatgcaacatgaggcctggtatgttagatgggcagagagccgggacactgctggctgcgcagggagatgggggccggaacgtttttgaggaggatgaggctttgatttctctggtccaatcctctcagtgtcaaggtgggtaggtggggagattaaagtctagagagtggtaggtgttttgttttgttttgtgagctcaaacaggtagtcaggggcagactgggaacaatattgtattttcccattgcatcacctgcctctgaggctcaagtatcaaaatcagagaatccgttcacacaaaaagacgaaaccagggaacacttccttccttgtagctgcctgtgggtccctgaacttgttgaaggccattctgggttggatatcttttccgcttccattttcctatcaatgactcaagaccatgtcttatttttatacacatttgttttctcatagcttccttctctaatcatttcttggcgaagatgtttgtggcttacaacatgctgcagtcaaagcagggcacgctttggaagccagagggcgaggttcggctggctgcggtttgccagtctggtaattgccagtgggaggaaagtgacacagcgagagcagggccttcagaatgccaaagagtttgcggtactgcggtccctggtgttctgtgcagatactaagctaacaggaatgtaatacaagcacagcagattggaatgaaataggccacccactctcactccaggctcctcagtagctgccctgcctgctcatccgggggcccaaggctcactcggtgccaaggaactagcgtcaactccccaagaacagcactgctcacttcccccagcaattcttccctgctttcagaatgaaatccacatccatcctctgagcctccctggtcttctgtccctatcacaacgtctcttctgacctccctatctgctccgcctgctttgtcaagaacatgcccccagctttccctgtcttgagcgtttcctgacactgtcttctgcctctgtttgttgaaatcccaagactttttcaaggcccatgagccattcacaattgtgttcagctgcatataagagaagtgctgctatttggctgaaccaaagagggattcttttatttcatgcaacaagaagtgtggggacaggcagtctag

SEQ ID NO: 68105 - DNA, 1074 bp, Homo sapiens
agatgggggaagactctgtgaaagccatacttcgtgagatagagccctctcctctttttatttatttatcttttttttttgagacagggtctcactctgtcacccaggccggcatgcagtgatgcaatctcagctcactgcaacctccatatctcaggctcaagcaatcctcctgcctcagccccctgggtagctgggagtacaggcacatgctgccttgaccagctaaattgttttgtatttttagtagagctttgtcatgttgccagggctagtctcgaactcctgggctgaaacaatctgtctgcctcagcctcccaaagtactaggattacaagcattagccaccacgcccggccttacagccttctgctcctaacaataccttcaaggccatcagtatctgtcaacaagcacttactgcatgcccaccctgtgccagaaaccacaccccgccacaggatgccaacaggaaagacgcagactttgccctttagcctccagaccagaggaggcggcagatgagcaaacatgccatcacagtgtcgtgtgagaggctctgggagcccagacggtcctgaaaactgaggctgggcactccaggaaggcttcctgggggaggtagcactgagttatgaaggacaggtttgaattacccaggaagaaaggggtgtgtggatgtgaaaggagggaggtggcgatgtcattacactgttttatatggtccaacacccttatccatccattatttcatctggtgttactatgatgctggctagaaagttcatagattattttcattcaatggactgagtgtcaaggggctaggatggaaaacttcctcatcattacagcaagagaatcagaggccctcatttgacaagcacagtggttattgaaggaatcttctctatggctgatatctctatctgtgatctctctcagtctcccagaaacttgggaaatagaaggaactttctccattttataaaagaggaagccaaggtttagagagatggacttcatcgacacccatgcacttgatggctagcaaggactcagcattttagaata

SEQ ID NO: 68106 - DNA, 2466 bp, Homo sapiens
gcctttgctagttttgtctccttgggcaagttacttaacccctctgaagcttagttttctcatgtgtaggatgaggaagataatttctactcagagagtagttgcagggaccgaatgagttattgctagtgaattccagagtgtggcacgtgtaacccagacacgggggcagacattttaaattctaatagtcaatgtttagtttcataggcattagaaaaataattgacaaaccaaatcattttatgaatgttattgattagtgcaagactaaagtagttaggtaagttaattaattaatgtatttatttattttgagacagagtttcgctctttcacccaggctggagtaaagtggggcaatcttggctcattgcaacctccattccctggattcaagcgattctcctgcctcagcctcccaagtagctgggattataggcacgcaccacctcgcctagctaatttttgtatttttagtaaagatggggttttgccatgttggcccagctagtctcgaactcctgaccccaggtgatccacccgcctcaacctcccaaagtgctaggattacaggtgtgagctaccgcgcccagctggtaagttaaagaaaaaagggaaagggagttaatttaaagaaaaactttaagttaattatgatgtagctggtgggcagatgtggcaaaactcaagaaggtgctgtgtgaatgactaaagtacaggaaactgaattaatacccactcaatcatggtggctggttcgtggcaggcactgaaggtcatttccaagaaagtaaagaggtttagaaaaggaagggagggaataagggaggaaacagaccttcttagttgtctacctacttagcctgtaggtccacttcagccatactcttcttccagaggttccctttttgttttttctttttaaaaatattttttaattttattttatttttctctactaggttagccaggcatgatgtcatgcacttgtagtcccagctacttgggagcctgaggtgggaggattgcttaagcccaggaggtgcagattccagtgagctgagatcataccactgcactccaacctgtgtgacagagccaggccctctcccaaaaaaaataaataaataaaaataaaataaaataaaataaaataaaataaaataaaataaaataaaataaaataaaataaaataaataaaataaaataaaataaaataaaataaaataaaataaaataaagggtatacggtgaagagtcagtctctttttttccttaacaattaggcccctaggttcctttcccagagaaaacaactgttaacatcttcttttaaatctttctttctaagtatatgcaagcataattgtgtaggagcctgtttttttcaaagctcttttgatgagaatttatatctagaatcctaagacttaaaagtgcaaggagggggatgcgtgaaacacactaagatcatcttgttcagagatctcagtgagaatcagaaaatgcgtggaggtggccacactcattgacaatctatgtctaatgaaagatgtttttgttttgttttgttttagagacagggtctcattctgttgcccaagctggagtacagtggcatgatcatagctcactgcagcctcaaactcctgggctcaagtgatgctcccacctaggcctcccaaagcattaggattacaggcatgagccacagcacctggcctgagaggtgtttctggtgagcacatatagaacatgagataatgtgaaggttgaagcaaaggctgagacctactgacttaggccaaaccatttcccaaggtctccaaatgagttagtgacagacccaagaatctagtctagctagactctaagttctcaggtatctaacttgctgccacagttttaccaagatgtaaacattcaggacagagactctgagccagaggaagtcctcccagccactttgctacagtgtagaaggtcaggagagaccaagtgtttggggcctgttgaaagtagagagtggctaggaacttatctggtctcatattgtaaggaacataaaggaataattccatttcctttcatgtttcctgtgtacaagtcctataaatattgccatatctctaagagcaaaccttgtttggactttccagacttttgctttccaaagaggtgaccagagacgtttcccagacatcctccacttcctgttgttgtccacactgtcttccagtagagagggtggtagcatcatttgaagtcacccttccagtttcaagttatttatttacttgttgtgaaggcccatgttatgctgggacaagccttgggcctctgaaatttatagctgtctttatggatgcatgaaacgaagatctaaatttactgcatgggaaattccaactttgtccttgagacttaaagagcctttagtgttggatccatctggtgaagac

SEQ ID NO: 68107 - DNA, 3469 bp, Homo sapiens
gaggaccagctgcctcctgtctgcccggctccatggccttcttccacctgggacagcggctactccctgttccttagagacagcccatgagcagcttcattccaccgggaatgacagctgcccgtatttcagcgtttgttcctgtaggattccttacaggatagctgatgggttaagagtgcaggttcagaggtgctctctggatcaaggctccactctgccccttacgagaagagtggtcttgggcaggtcacttaacttgtgtgtctcagtttcctcatctccaaaatggggttattgcagtatccacctcatgggtgcttacgattacctggaaattttttcatgagcctgttttctccttgtcttggggggacttaagaaaaaccctatgagaggaattacattttctaatcaggggcgattcccaggggaccctctccattaagcgcctcagcacaagtcctccccactcccgcttcatccattcccaagtccaaagtcctcatgcctgagcactccccttgttcacctcaagtaacttcatgcggctccaccccgcagggctgtctctgcagatggagcaatcattctcctccccagggcccacgtgccaggctggggtgtgtgctgaagttaggaaatctcgcttagcagtggagggcacaaggccctaggatcttggtaggagctgagagatgggagtcagaaggagtcagccttcccctccctcagcctgattttccttatttgtaaaaagaggacagcgactcctcccctgcctccttcctatagctgccgggtggctctggtcaggtaatttatgtgaaggagcttttataagtgtagatgataaacgggcctaaggtagtgaggtctcagtccctgctgcacattagaatcaccaggaaagctttaaagaaaatgctggccgggtgcaatggctcacgcctgtaatcccagcacattgggaggtcaaggcgggtagattatctgaggtcaggagttcgagaccagcctggccaatacgacaaaatctcatctactaaaaatacaaaaattagtgggacatgctggcacgcacttgtagtcccagctacttgggaggctgaggttacagtgaggcaagagaactgcttgaacccaggaggcaggggttgcagtgagctgagatcacaccactacactccagcttgggcaacagagagagactccatttaaaaaaaaaataaagaaagaaaggaagaaagaaaggaatggagggagggagggaaggaaggaaggaaaagaaagagaaagagaaagaaatagaaagagaaagaaagaaagagaagaaagaaagaaagaaaaaaagaaagaaagaaagaaaagagaggagaagagaagagaagaaaagaaagaaaatgccagtgtcatccctaaccaaagattctaattgaatttgcctgggatgggtctcagaccaatagaacattccaggtgattcttctgggcagctggggttgagagcctctggtctcagagattctaaactctctcttaggaagagaagtccttctgtcctctccttttgccctgaccatagggtgtctaggcagggagtaggctgtggatggcccctccaggacctgtgtctaagtcattgctgccttggttggctacagggcggcagcttggggtcatatctggtcaggcaaaattgactttcagtctgggcttgagtccagcctctgcctgagtgtttgatattgagtaagtgacttcacctgactggacttccaaagccctcatctgtgaaatggggacagcaacaccattttgatagtcagtatttcgtgactattaaaaaacataacgcaggtgaaatgcttagctcagtgtctgacacataagaggtcctcaatagcagcccattaaaagctcaaagcctcttctgctcttgggttgtttttgccattacatatgggatcccaacagtattagtttcccccaatctctgggggccccggtgctagtgatgggtatatgttgaatcccaacaataaccctaagagagaagatgttccaggtctcactgtccctcttctacaggtgagaaaagtacaattcagagacattgagacccttgctcagggcctctcaccggttcaggcaccaatctggggctcatttctcttcatcctcaccagccccttactctccctgaatgccaagaaattgtgccacctgtgctgcacagagcttgaaaatgtcatgatatgtgggggaagttaaaaggaaatgacacaggctagaaagagagaaaggagagagagatgggtgctgagcaggaaagcacgtgtgtccttggagccagaggaggggccagccaggagctaaagatgttcccagtgtctaggggtgggaagtgggatgactcacagcctgtcggtgaccaggatctgagacccggcttctgggctaagatctgcttcaactccgtgacttcccctttcatgaaggggagatggcttcccatttcagggcctcagctttctgacctgtcatgtgggcatactagattacatcactgtttttcaagctgccagttgccatccattagcaggttgtgaaatcagtttagtggactgtgaccagccattaagaaaaaaaaaaaaagcagaagagaaaatatcagagtatattgatacatagtaagcattagccgtgtgaaaccttgtgtcagttccagatccatgtatgtaaagactattagatagatttcttgatttggcttctctcaatagagcttaaaaaccactcagctagatactttttagcatttttttttttgagacggagtctccctctgtcgcccaggcaggagtgcagtggtgagatctcagcccactgcaacctccacctccccagttcaagccattctcctgcctcagcctaccaagtagctggaactacaggcatgtgtcaccacgtccggctaatttttgtatttttagtagagacagggttttgccatgttggccaggctggtcttgaactcctgacctcaggtgatcttcctgcctcggcctcccaaagtgttgggattacaggtgtgagccaccgtgcccagccactttttagcatttctgtcagccctcattaactctagacttctgtaaaataaaaatgcatctatgtctagagaaaaggtgtgggaagtagagtctggttgggggctagggatagtcccagccactagagtagcatcactccatgttgggccccctgtcagcccctctgtggtgtggtcctccctggaacaggagatgggagccccatcacacacccagcgaccaagtcattctcacccgtgtgctgcaggtgattcaattatacagccaggctgacaaggattgagacggctgactagcaacttccctttcacagtctggagtctttctctgtgcttttcatgtgaaagagggac

SEQ ID NO: 68108 - DNA, 665 bp, Homo sapiens
tggggttggcaggggctggggataggcggaaatggggagttcctgctaatggagttgggggattctttgaggagtgatgaaaaagctctgccactagatagtggagataattgcatattgtgagtgtactaaatgcccctgaattgtacattttaaaatggtttaaatggcaatttttatgttgtgaattttacctcgattttttaaaagagagagttcctggaagttaatacctgtaacttctgccaaaagcttttggcctaaatttaccccatggccaccgagccagagtggagcctgggaaagtagtgcctgcacatatgggggatttcattaccaggaaagaaggaacgagtgaacgttgggatagatatttatctggcagtccaccacattagaattgctgctggcactgatgttctcaggaaaaaaaatctgggaaattgccccaggcctgacactggagttaagcattaactcagggaggtggcacggaatcagagtttggagatgtcacactgtgggcaaaccacctctctggcctccatgtgctcacatctggaataaaggttaggagtatgtgattgttctctaaggtttttcccgctgatgtcttttaagtgtgtacgttgatgagtcagttataagaatcatgcgactcctgt

SEQ ID NO: 68109 - DNA, 743 bp, Homo sapiens
ctctgtcaaagtggttccttactgccgccccacagcaccaggatttgagagtacaattcattctgactggaggtaattgagaggacttttgaaagaggtgagatttggatttctctttagtcagaagtggtctaatcagggctgagtctgtgacatcagggagatgcctacattgagggatctgaggatctgcctagagcacagcagaggcccccttttctggagaatcacaggggtaggcttggatagctgtggctggaatgttaagactcaaggatgctgagggctggggacagcctgctgaaatcttaattatgaccagcagagggagccctagttactacagccagcctccagaatttaacaactagtcaacgccagactcaggaacctagtgatttcaacgtgcaacccgggaggcggagcttgcagtgagccgagatcgcgccactgcactccagcctgggcgacagagcgagactccgtctcaaaaaaaaaaaaaaaaaaaaaaaaaaaaggagtgagataagcgccctccagagtacattgagagcagctgggaagcttgttataaatgcagatcctaatccaacatgggaggcggggacaaggagctggggtaacatacagatgtgtatcaggccttccaatctcttggcctcacctgtcacttgtgccagtcgctgctgcaggaactggtgttgtcacctgactgcatctccctttgcacccgtaagcagcca

SEQ ID NO: 68110 - DNA, 1923 bp, Homo sapiens
caaggtgggtggattaactgaggtcaggagttcgagaccagtctggccaacatggtgaaaccccgtctctactaaaaatacaaaaaattagccaagtgtggtggcgggtacctacaatcccagctacttgggaggctgaggcaggagaatcgcttgaacccgggaggtggagtttgcagtgaaccctgatcgatccaccgcactccagcctgggcaacaaaagcaaaactccgtctcaaaaaaataaaaataaattaaattaaatccttcaatgacatgcctcaccaccactgaggtaaaattaacatgcaaggcctttagtaactagcctcctgccaattcttcccgtcttcccttctttcttcctttctcctccagcaactttttctcagtcaacaaacgcagaaaaatccagtaactttttaaatcttgttacccttcagcctttgttccttcagttctccgggtctgtaatattccccccattttcgccgggaacattcttgctaatcttttaggaatctgctcaggaaccatctatttgagaaaacattcttaccccgccccgctgccgttacttttaccgaatgaccacactgaattatattatgtgtccccagctacctctgtgaaggaagcaaacatatttcagagagtagccccagcgcctgagaagtcaggcacaggcaaacacggaaacgtgatgagcaactgagtggagctcttcctccattcgccatcaccctcctccgccctcctctccatccagcagacctagcgagactctagcgtggtccacgagccccttccacccacttccgccaactctttctcagactcacaaacttccgcaagtctgagccttttaccgggtccccctgcggctccagtgcctgctccgaagcccgggacatatatttattcggcaaaagttaacttagtgcctactgggtcccaggaattatggctacagcggtgtcgagagccgcggttctaccctcgcccctgccgagcgacctcggcctccgacaccggttccaaccttttcctcgaccccatgcctagccgaaccgccaaggtcctggtctttcccgcccagaccgagcggcctcggcccaggccttcaccgccctaagtggctccaacccacggcttcctccccgatcagtcgcggttcccactccacaacagactcggaagctcccgcgccgccagcctgtgccctccttaccatggtggcggttctgatggctctgatacccgccggattcgcctcctcagaggcctagcctctctcccacagccgatttcccgccgccgctaccggaaatgcagcaccacgtaaaatgcggtcgggtagaaacctacttccggtccagctcactagccctggagttccggccccggagcggagcttctgccgagcagaggcggggcctggggactgggcgttaacatccggctttgacgtaaggagagccttaagttcctgtttggacaccttcctagcttaaatccgtactgagagctgctctgtgtcacactcatttctcttcaccccgcctttcccattaacctctcggtcctcatttcccatcaccctccccggctctctcctctacagtcactattcttgcttttccctccactggctggacgtgctcctttttcagcccctctgcatttgctttcgcctctgcctggaatggtagtccccaaggtataccagaaggctgctgccctcacctctttcaaggtttaagcttaaataacattttcccagtgaggatttccctagccatcctgtaaccttcccacccacctcatcctcatctctcctgtatttccctcttgctatctaacacgctgtatatttttgttagttattttattatcccctccccattagaatgtaagatccat

SEQ ID NO: 68111 - DNA, 1927 bp, Homo sapiens
cacagccccaaaccagatgtttggccctaacatgtgagggaaaagcagtccaggaaaggagtcagccagacgggccacccagatgacgaccaaacccaggaactttgccacaaagcacagggggcacctcccacatgacacaccttgagacaacaggtcccagagaaaagacctgcccccattcaaaagagctgcctagatgcctgtcagagtgatacagcccaccactatcagaggacgaaacctccctcacctccctaaaaaccccagggactcctgacccaagacactcgcccaggccctctcaggatattttgaccacgtcaagctcacctccacttccaaccccccaacccctaataaaccaaggtccatcaagcatcaaggcctgagacggcctccccctaaccaccccggtcaccactcgggacatatccagccccacccaaaaaacagaaaaactcggtgatgcaggactcaagacgctccccagccaaaaaccacccagggatgtgcggacctagccacgtccccaccccagccgcggggatgttggtccatttggccctggcagaactcaaccccacagcccaaataaaccccaggacgcacgactggggccgccctccgtattcgaaaactggttgacccagaataatcccgcctggttcaagacaggcattagagttctaggtcactctcgtccccccggggggaaaaaaggtccgcggaggtccgggcaagcaggggctcaccccatcgcctcgccccaatgagcaccgcgagctgcgccctctcctccaaaaaccaaatatctccaacccgcactccccattggccacactctaccccgcgtcctaacctacgctcggcctttcccgaccctcctttccccacgagagagggcatcctggggccaaggagccgcggaggccgcgctcaccagagccagcgtgcccgggatctcggccaccgaccgacgccagaactacaattcccaacatcctcgcaggcttcggctcccattggccgccacagagccacttctgggccgtgcaacggttacttttccaggacagtgaccactgcagtgacagcctctccgtctcttcttaaaatacccatgttgaaaacaggttctggctcccgagtgaagtctctgtccccttggcccattctgcaaaaaaaagactacactccccacaagcctctgcggcagcttccgcaggcgcttccggaagctggggtcaacgagagaagtcatttccgattggcgaatctagcgggagcaatgcgctgtctgtcaggcgtgtgttgggtacagagtttactgcaccggaccacctgaattccctgggctgaggctccatagcacgcgaactaccttgcgtgagcactatgtagattcgacttcgtgttgcctgtgacacacaggcagggcaaagccgcctcccagcgtctcagttgaacccttaccctcaacaccagtgcactcctgtgggtggcctgtagtcacctttcttgtcgaagtcctcaaagttagggacagactctcatccagtttctggagggtggaagcttcactcaggctggagtctggctctctggcctcttatctaagatcccggttcagatctgggctactagagccgggcgtggtggcgcgcgcctgggattcctgtaaccccgagggaggctgaggctgaggctggaggatggcttgagcccaggagttaaatgtatatattttaaaactaataatatttttaaaactgggctacgctggtaccttctgcaacacggcaattaggggtttgcagatcagaccttcagctcataggaggcgcgtttaaatcttaatggcaaatacaaattgaattaaattttacttgttactgaaggggaaataaacctgacctcacgccct

SEQ ID NO: 68112 - DNA, 1272 bp, Homo sapiens
ctcaagtcgctctaactcacaacaaatgcttaccctggcagagaacgtgtgattttgaggttgctttcacacatacctgctagtgtccactaggtctccacttcttaccgtgaggctgggtttcgcgttctggttccaggctgtccccccactgcctgcccctgccccgaatcgcaggttttgccgcaatggcaagtcccaacttggccaacagggggcgcccgcccgaaccgccaggaccgagactcgcgagcttccgggcccagttcctcagattcagcgcgggggagagctgcgggccccgccgggggagcccagggggccttcgcagaggatctggaggcctttcagaaaggaagccaggtgcagggacgacccgaagcccggaccccagccccggcgctgcaacaggcccgccctccctgccttggcccttccctcttactatttttattttgagcgagagtctcgctgtgtcacccaggctggtctcgaactccccctcccaaagtgctgggatcacaggcgtgagccaccgcgcccgctggctcccgatcttccgcggggcccagacgccaaggtcccggctctccattcgaaagcggagtccccctctccggagtcgaatggaatccccgcttcccggcttcccgctcctgaggcttagtccccgcctctccccgaggggctcagccccgctgtttcctccagaggcggatcccgcagttttccccccagaaaaggaattcagcattttttatcctaggtctaacccggccttccgctccaagactaagtgatggtctacgccgccggcggccgaatccccacccgccctaccagaggctaagcccccacctcgcgcttaagggaacgagtcccgatctgtcgccgtagtgccgccccaggctgccggccgccgagtccccgttccctccgcacccgccaccccgcgtaggctgactccccgcttgccgccccaaaccgaagtcccaatttttagcttcagtggcctcagagacctgacttttccaagcttccataggaaggtgaggatggagagcatctggcatccggagcccctgtccctcggcacagccccgaggcctccggggggtcgggggaaagggttcggggaccgcaggggcgatgaagccccaaaccctgagccattctccgtgcttctggccttagagggacttgcgcacacatggctgagaatattaaccagaaaggtgttactgataccagaaaggggtcccgatccagacc

SEQ ID NO: 68113 - DNA, 2464 bp, Homo sapiens
agtattttccattacattttggaatcgtctattttgatgtattcacgacggttaaaataatttaacatgctaatgtatggattaacttggcaattccattttaaaatattaaatggaataacgattctgactcgtaagtagacatgtgtaacagaattcaaccacatctgtaaaccatattgaaattatgagagtaagatttaccaaccacatttaggtttgacatattagatttgtgagtgaactatgtacttggattttgtcaagtaactcaatcgcttaacaaaataacaattaaatgtataaatgcagtttatagctatacattatttttaaaaatccccttcgaatgactctttaaaacataccaggggatacgctacttaagtataactaggttttggatttataacgttaatattaattattaaagcaaaactcatttctaaagagtcgcctgagtgcccaaaagacgccctcaaggacagggaagcagctgcgattcactcagcgatcaccagcgcccagaattcagggccgcccaagcggaggagcaacacgtggcccagcaaaaggagctgggtcccgtgcagcacagcaacaagaaactggcctaggaagacgctggagcgtctttctttcgcacgttactgcctgctacagtcatttaaaaaaaaaaaaccaaaaacaaaaaaaagaaataaattaatagtacgaagaaaactgcgcgagctacattcccagcagggtctgcgccagagcgcgccaggcaccgctcccgttacgggtgggaggaaaggatgcaccgcccacccggcgccggggaggctcgtccccgagtaggggacgggaacgcctgggtcccggggacgtggggcgcagggtctggggcccgaggccacggacgaagcgggaagccggctaggcagcggtctctgtctgggatggacgccgcgccccacgcggacctcccgccccgacttcacccagctctgctgcccgtaactcatatgacaagaacatcaggaaccggactattaccccgaaagggccttcccaagtcgtttcgccgcctgcagtgcccgaccgggggccgcgcgtccccggcaaccacgcccgcccgcgcagctgcagaggccggaaaaggcccgctcgcccgcgctcggcaccacccagcccgcgctccgggcgataccaccctgggcggcccctccaaaggccggagatggtgtcgtccccggcctccgattggtcgggggggcgggggcgtggcctctggagcctggttccgcgcgccggagcgcgctagccgcattgcgagccgaacccgggagctggcgccatggtgaggagtggttgcggggcgcgggcgacgcgacggtgggggtttcggcctgcgttcgggccgcagacagggcctgggcctgggcctgggcctgcgcctgcgcctgcgcctgccctgggaacgggttccggcagacgctgaggttgcgttgacgctcgcgccccggctcccgttccaggtgctgttgcacgtgctgtttgagcacgcggtcggctacgcgctgctggcgctgaaggaagtggaggagatcagtctgctgcagccgcaggtgggtgagatccgtgggctcctttggcggccccgcagaccctcatcgcgcgggtcccagcatgcacagcgcgctcccacgtggccggccgagcggttcggggcggggggacgggcctggaaagctctagatccgggggtctttaccttgacccatgggtagaatcgctctagcaattagaaataagcctcccggacgccgcccccgaacgattaaagcagaagctgggatgtggggcccaggtatcagcatattttaagagcttccaaggctgagaaccgctgcttgactgcgccgcagaggcaggagggagggaaggaaaccacttagcctctttctccccccaggtggaggagtctgtgctcaacctgggcaaattccacagcatcgttcgtctggtggccttttgtccctttgcctcatcccaggttgccttggaaaatgccaacgccgtgtctgaaggtaagtcggccaccgccaagtgtcacagagagatgtggttcctttcggtatcctctcgggcagcttgtgatagtatttgccgtccttggctggctctgagtctgataggcgtgaggcagtatttgagccatacaatgtgtaatttgaaataattgtcttcacagagctcaaggtctgggaactgtgctagaccaaactgtttaagcagacgatgtggaatgtgtgttaacgtttccttgtgggcactgtagtgacaaactattttttatttttattttttttgagatggagtctgtcccccaggctggagtgcagtggcaagatctgggctcactgcaacctctgcctccctggttcaggcgattctcctgcctcagcctcccgagtaa

SEQ ID NO: 68114 - DNA, 1707 bp, Homo sapiens
aattgcatagcatgtggggagaagggcttaataaacatttggtcatttgattttaaatggcacatggacaagtggcaagagggcacacataccaatgatggccactttgttctccttcatggaactcagcacctgctccagcttctcctcagatgccatattctgcacctcactcaggtggtgctcctggaactccactgggacagcggcagccttcagagacaggttcccaaaacatcacagtcaaggccaagtcctttccaacacactactgtcctctactgtctgatccccgaggccactcaccttgaacacctccttgacggcgtgcatcagctcaggccccacaccgtctcccggaagcatggtcacgggaaaggagccctccaccctcacgtcctcggcctcaattgggggaagaggggagaagtaaagatagagctggggcgggagcacggatcctgggagtagagaagtagggagacccgggaggggtggggaaaagccaggggagggagcagcgaggaagggacagggtcgtaagagagaccccagccagattcgtgcatacctggctccgcgatgcagcgtgcgccgcggccgaggtactcagacctctccatgccccagggttcccggcggagaccagcgcctgcaacagggacacacaagcctgtaaggtcagctttgagacatccagaccccgaacactacagttgactttgccctgtttaggaaaccctaggacaaactctccgctccttcgcccgcccctgcccgacatgtcccggggcctcactcgggtcagccagcggactccgctcaatgccgccatgtttcccgcaggaagtcgcgtgggaagtgacgcctgaagctggcgcggccccgtaccccgacttccggcctgtactgagttcctggtatttctctctctgcgccaaccagcactgcttgctcacgcctgtttctccttttccttgccggtggggaggtcatgggatgcgcaagcactttgtctcttgctttgttttcagtcgccatatttaatctacgtcgaaacttcaaaataacattagggggaaaaatgtagcgtcatgtttatcagacgaggacctgagcttaacaagcgattgagagaaaatccttgggaagctgttaaaatttgtgtgtcaatgcgtttgttattcttttaaccagtactcactgaatacctgtatgtcaggctctcgaggaatacagtacagacatgggaggtgtgtgtcgggtttctccgccagtctccgagagtgcccaggacctctgtattacccgtcgcctcgtagttttttcttacagggttttgttctttgctctgacagttatttccctaatagtgtgtcccggacttgaactccccaggacaggcccataactagtgtcagaaatgagttcaagcgtgtaagtgtgactaaagggaatttcagactgatccttaaagtaacaatcataaaaactaaaaaaagcctggacaacatagggagacctcgactctacaaaaaatttaaaaattagccaggcgtggtgacacacctgtagtcccagctacttaggaggctgaggtgggaggatcacttaagcccgggaggtggaagccgtagtgagccgtgatggcaccactgcactccagcctgggagacggggcgagacccgtctcaaaacaattacagt

SEQ ID NO: 68115 - DNA, 1211 bp, Homo sapiens
tggggagctgggtcagacgcgcatacacacacacaccccttgcacaacgccagggtaagcagtgaacacaacacacgtggagatgcaatgtagaatctggccgctggccggatcttctctacttccatcctcccgccccagcccaagccacccacttctccagttgcttccctggggtgcatgcaaacctctagccttcagatgctgcagagagtccacttgagccgtgataaatggagattgttaagttttttcttttttataataaactcctgatttgaccagatgaaaagagaaaactctccatcgagtcctgcccttaggactataactcatatgtgtatacggtttcccttttttctaatcacaaatgggtgcatgtgtgttcataccaagcgcctagggccgaggacagaggctggctcagtaaatatttgttgagtaaacaaacgaaagaactgaaacttccctgaatctcgctgccgggggtgcctggagttttccgggggacttgggctgggcctggtggagggggctgcagcgaggctctcggactgggcgctggcctgcttttggcgccctgcgtctcaccctgggagtggggggctgcgggggagacgtcctccaaacgccgcccccttccccagctctgaacgagcccaccattgactacggattccagaggctacagaaagtcattcccagacaccccggagaccccgagaggctgcccaaggtactcagaggggcggggcggggcggggctgagggtgtcctgtgggcaagggggtgaggaggggctcccgagggccccttggtcgcccccaggggctgcccctccgtcccgctgtctctccccctgtccccaggaagtgctgctgaagcgggcggccgacttggcagaagccctgtacggagtgcccggcagtaaccaggtatggcgcctccgccctcccagcgccgccgggaccggggccccccagcacgcggcgcccgcggctgccccggccgtgccccgctcttgtcttcgcaggagctgctcctgaagcgcgcggcggacgtggccgaggctctgtacagcaccccccgcgcacccgggccgctcgcacccctggccccgagccacccacaccccgccgtcgtgggcatcaacgccttcagcagcccgctggccatcgccgtcggggacgccaccccggggcccgagccgg

SEQ ID NO: 68116 - DNA, 2004 bp, Homo sapiens
agacagacaagagatgtgagatggaaacaaatggtccagacacactgaacgggctgcaaggtgtgggactggaagcgtcaccctagaagaggcactcactggagtcccccaagatgaccacgaacttgttgtgtagcagctgctggacttccgaggcctggaagtggaccatgtcgcttcgcagcgggcggcgcggctcctcgctcgacagacagaagaccatgccgccaccagcaacgacaggctgcagggagaggccactaagcagcgcgatggtggggactctgggcaggtcagcctcagggctagcccctccggggctgctcaatgctaaagggaggaggtgacggcagcagagccatggtggcgccagccttggtcacacttggtaccagaggcagggggtcgtccagccagcaggcctccagggcactggggagcttcccgcgcggcgccgccctgcgcctcgccacgtgcccgccgccgtcccgcgcatgcgcgcacccgctcgcgccaattaccaagtcccggggctccgcggtgttcacccgcgacccgggtatgcctgcgcaccgcgcgcctggcccgcagcgggctcctagccaagcctcatgttcccgcgccccagtcggccagtcggttctgcaaagctcccgccccgcagagaccgtgggtccaggttagccgtcggtgcacagcccagcgcccagcgctctccatgcgagcgtcgctgtggccccgacggcgcctcaggcctcggcgcctcgggctgcgacgctcacagcttccacttccgttcacccatgtcccgccctgagcgacccccagtgcccgaagggaaagcaaggcgatggaggtggccgccacagggcgcaggagccagggctgggcccacttggcgggcgcgaagcccaggtacgggctggggtctcggggcggcagccaagtgaggctgcccacagtggtgatggccgcggcggcggcctcgccacgtgacccggacgggcggaagcggaagtgccggcctggagcccgctctaggtgggtgtcccctcggtgcttcccagctgccgtctgcaccagccatggactgctacacggcgaactggaacccactcggggactctgccttttaccggtgagctgccccgccctcccgcccacggcctggcttaccctgctcgcccgccggctggagtctcccggcggcgttcgcccctgtcactactggcgctggggtccgccccgcgccggctctccccgagcgtctgccacttagcgcacagccgcctttgggcagggagccgggccttcccctgctccagaaaaggaaactgaggcaagcacagtggtcaccccgaagcccaggtctgttagcctccggaaagatgctcagatctcgctgagggaggcagctcgcgggtgacagcgagtgcccagtctcctgccggaaagtgctgctgaagtcagaccacaggggcgctccgaggggggcgggatcgcacggcgggcggggtaacagtgctgaccaaggctgggaaaagggggcgagtcgtccgtgaatcccggaacagcggaagtgggaacccctgggttagggcagcccgcccatgggagttgtagagtcctaaaccacggatttttctaaagtgtaaacccgttacatcgttacccagattaggattttcccatagcttccctaataggaaaaactacgaacttctcgtggaacgtctatctgtaaggcagcccgtttgtctctccaacctcatctaccgctctcctacccaaatcttgcgttccagctgcgcagaattacaaggccctaaccagtctgcagtttctgtggatactgccatttctctctttatctcactgaagaattttgcgcatccttcaggacttagtagttcaagggttctttctggaactgtgcctgattctcccccaatagaatcctgtgggcctcactgggcccagtgctagggtcttttaggtatggtc

SEQ ID NO: 68117 - DNA, 1850 bp, Homo sapiens
gtccctactggggatcacaacccggcgaaatgtcgcatttgccaccacctatctcgactgcgtaatcggctttcagccgcagacgctcaggtcctgcagcacccgcggggatccgtgtaggaacctgctgccgctggatggactgagcgattgcttcgcgggtgtcacgcaccagacgccgtgccgggagcgccgggaagggggtacgcgccccaaccccggccgggggagggcgcactctggctcctctctgcgttttgagcctcccctcccccgccaggcgtatcgcaaaaggcacctccatcgcagagcaccatgtgttgtgcttctactcagctcggtggcgagcggggccccagcatgcgcatctggaaagcgggggagattaccctggagctcgggtggggacggcgtgggctgacttgatataagacgacacccacggagccagatccgttctagggacttggcaggttcctctccctccccagtgagatccgtcgttctttgcagcaattaggggagggaaaaaaaagacccacagtatcacgtttggagagggttaggaagatggctctcgagttgcaggccgccctggtggctagacattggtgtagtttgtgcctggcctcggtttcctgatctgtaaactgggaagaaggcccaagtcatgaggcctgtgactgtagaatggctgaaggcactggtgcactcgcagccggtccttccggggtccagcttcccgaaggactgggcagccccggggcgaacccctctggagctaccaggagaacgtgcgaccgggttcggcgccccagccggcaagtgagcgcccagcggagcgcaagggcggggcccgcgcgggccggagacgcccgttcgctgtcggccaaccagcgcctgtctctgaacagccaatgaacacgcgtcttacagccaaggccgggtcgggagcgaggctgcggcgagtgcggcgctgacagagacgcgcgcgcgcgcgatcgcgctcggaccccggccgctgccgccatcactgtcgcccgcccagtcgcccctcagccgcttcccctcgccatggaggcgaggccgccgccgccgccgcggggctcggagccgcgggccgggcggcggccctgagggctagtggcggcccgaaacgccgccgcggagccgaggcggagccgctgtcctcgtccccagcggtcccgcccaacgcccgactctgtgagtgttcgcggccgctgcgcccgggtgggctccggaagggggagcggctcccgggggcggtgggaggggtcccgggccacagcccagagcccggagcccgaagccctaagccatcttttccgggtagaagcctgcgggcgcctgcaggttgattgtgcatccttgcgggtccgtcgcggggagggggtccccggaaacgtgccggcccgagtgccgacccctcgcgactgcccaggaactttgcatgcgtccttctgggaccaggccagggcactgccagagttgattctcagagaagaaacttagaacggcgagaacagaatttgctcaggtccatttaatgggaggaaagaggaaaactcttggcatgagaaaatttgcttttgcagtgaccaacttttctttcccttcaagtccacctccctcggtcccccggcccgtctcccaggcccctctccttgccgccctctcccaactgttgaggctgtttaagaagggaaataagggctgagagctgcccagaattcagaataggccaattgagaacgcaggtcccctccctttttactttcggtaaataaaaaattttttttgaaaaaattagttactaattatatctcctg

SEQ ID NO: 68118 - DNA, 782 bp, Homo sapiens
aaaccccaacagtcagagattgttacaccaagataaatagcatatttctcagcgccttgtattttctgtctttggccacagaccttaggacttaggctgatatttgagaaggaaaaactggaatttagtagaattatacttcctgtatcttaattttccaactcttatataaggtttgctttttctagagagagactaatctggaatgagaatgaattctcatcagtaaaggcaaagctttaagtgggtcatctgactttgcttttgtgctctacattcaccctgctcataaaaggtcctttcatgagttttctaggctttcatcactgccagcgtctccacaggcattgtgaaagtattaaacttcctaccctcccccatgcttgtctcatggactctttcgtagagtgcacagtggactgtgtttagctcagcaggaactctttgcaaacactgaatacatgaacaacccccctggaaagataagagatttcagtattgcttggtgtcatagccgcagaagttagtgtctgccagtatctgatgaatatggtgacttgcagcctaatttttgtgaaattatgaggccaaagtttaagaagtgttcatgttaaagttacttatatataaaatttgcctatcgataatttctgtcaataggaggttgatgaatgcttcacataacctagatactcctaattaactgttttttatttctttttttctaggacacatgttcaaagagcataattaactttttaaaagaagctagtaagtactga

SEQ ID NO: 68119 - DNA, 2067 bp, Homo sapiens
tctcagtgcccctactgcacacagcagggtgctgtctgctatccttcctatttcccaggaggattctagacaatttacaaagcacttgggttaaagaccaaagtcactagtagactagaaggagataattgttctataagacagtggtggccatgggatcccacaggcatcctgacaagccaatgactgtcttgaggtggacagaccccaggccagtggaaagaggtgagggatgcaacctcactcaaacagacaacagggccaagaggaccaggtggtgactgacatgtgcactaggaacatctcagggactgcagagctccccaagaccatagcagaagacaggcgtggggaaatggtttgctactgttttgcaaatcaaacatttacagtgcatcaggagagcccggtaactaaagaagaaagtggttagttcctatgaggcaatgtcttaccgcctgatttgtgtgtatgtgctgaggtttctatgcgtcaggcttgtttagggtggacaagagggcatgcccaagggagctggagatccccacactagctggatcctcaggcttctacgggaggcggggggcgtcctgctgtgggaggccacatggggactgggggggacgagaggggagagaaccaggaagatggcagctcggcggttacgagaccagtgtcctgagacatgaccgccacctctccctccgcagaccgcagcccgagagccccgccccgccccgccatcctccaataaagtgtgaggttctccgaagctgttgcgtcgagttctgtccttcgtcccctccctgtcttccccgctgagacccttccctgcgtgggggctggagggacgcgggtccggccccgcgggcgggagtaactaagggatggccccgggccctggcgggaaggccgggccagagcctgggggcgggatgcggacgtccgcagggtcgccgcttcggttccagaggccacacggccgggcggggcgtgagggacagcccgaggactacaggtcccaaggttccccgcgccgcttccggggcacggtggcgtcccggcaccgcggccgcagtgaggagactcggccatgctacgcgcgctgagccgcctgggcgcggggaccccgtgcaggccccgggcccctctggtgctgccagcgcgcggccgcaagacccgccacgacccgctggccaaatccaagatcgagcgagtgaacatgccgcccgcggtggaccctgcggagttcttcgtgctgatggagcgttaccagcactaccgccagaccgtgcgcgccctcaggtgtgcggccggggggaggtggccgcccgcgcgcgctggtgacggtgggagtgggcggagagggtgctgattcctggcgcgtctgcacccaggatggagttcgtgtccgaggtgcagaggaaggtgcacgaggcccgagccggggttctggcggagcgcaaggccctgaaggacgccgccgagcaccgcgagctgatggcctggaaccaggcggagaaccggcggctgcacgagctgcggtgcgtggggcgggaggcggggcggggcggcgcggcctggccggcctgggagaagcccgggccccgctcagcctcggccctttgaccctcacaggatagcgaggctgcggcaggaggagcgggagcaggagcagcggcaggcgttggagcaggcccgcaaggccgaagaggtgcaggcctgggcgcagcgcaaggagcgggaagtgctgcagctgcaggtgggcaacgtctccggagggtgggactccagccggggacgcggcttgcggggcactgggaattctgggcaccgcgacgcgggcgctggctatgtgcagagacttacagttggcaggtccggatttggagaggagagtgccagtcaggcgcaaagacccggaggtgagcggagtaattggacagtgttcaggtacctagcaggtctgtgggagggaccctgcgttccacaaagaggttgtattttgcataacaggtgatgaagccatgaagggttaagtatttcaggctaggattagcaggtgtg

SEQ ID NO: 68120 - DNA, 1182 bp, Homo sapiens
aagaatcaggtcacttctcgacacacacattgcactcccattactcacagggattgctgcatagcctcctccctagtttccccacagtcttttttttttttttttggaaggagtctcgctctgtcgcccaggctggagtgcagtggcacgatcttggctcactgcaacctccacctcccgggttcaagcgattctcctgcctcagcctccagagtagctgggactacaggcgccagccaccatgcccagctaatttttttgtatttttagtagagacggagtttcaccatgttagccaggatggtcttgatctcctgacctcatgatccacccacctcagcctcccaaagtgcggggataacaggtgtgagccaccgcgcctggttccccacagtcttgtcacagcactatatccaaagttatcgtaagctggctcagaactccctctcattcccccatttcatttggaggaaaagcccaagccctgtgaggtgcagtcccacgttacctttccgatctcgggagttcagtcactctgctccaggaccactggcctccttgctccttgaacatgccaggcacattcctgcctcaggacctcagcacttgtcatttcctcccctccattacaggcagaatgctaaagtggatccctgaaattctcagcccctggtatctttctgtggattacacaatgattacctttgtgtaatcttttctggcttcatgtgggtagaacccatagctttttttttttttttttgagacggacagagtctcactctgtcacccaggctgaagtgcagtggcgtgatctcggctcactgccacctccacctcctgggttcctccacctcccgagtagatgggactaaaggcttccaccactgcgcccggctaaatttgtttgtattttttttagtagagacggggtttcaccatattggccagactggtctcgaactcctgacctcaagtgatccacccaccgctggcctcccaaagtgctgggagccagcgcgcccagccaaccacgctccagcctgggccacggagcgtgactcagtctcaaaacaaaaacaaaaacaggcgtggcccactgtgcccagccaactttcttctaaacattagaagaagatgacaaaggtgataaccacgactatactacgttatatggcaaag

SEQ ID NO: 68121 - DNA, 1679 bp, Homo sapiens
acccagctaagccatgcctggcccaatgtaataagcaaatgttgttttaagctgccaaattgtggtagcttttgtgtttttgttttcgttttgagacagagtcacgctccgtcgcctaggctggagtgcagtggcatcatcctagttcactgcagcctcgaactcctgggctcaagtgatcttcctgtctcagcctcccaagtagctgggactgcaggtgcatgccaacaaacccagctaattttttaaaaacattttatagagcctgggtctccctatgttgcccaggctggtctctaattcctgggcttaagtgatcctctcgcttcagactcccaaagtgctgggattacaggcacaagccaccgtgcctggcctgtggtaatttgttacacagcaacagaaaaccaatgtcccctcagatatctgcatggtttattttctcttcttcacaaagaagtctacactgaccaccctcggtgaaatcgcaacaggcctcccttttatctctgtagcacttactaatctactgcaatatgtatgttgttactgaagtatgtttattgtttatacttgtttcctaactaactgaaatgtgtttattgtttaacatctctcttcctccactagaatataagccccatgagggcagaggtttttgtgttttgttgctgctgtttccaggcatttgtaatgggacccggagcatcttcagaagaggggttgttgaacaggtgaagggatgcagcccatctgggggacataatactatggtaatttatgcacatgtgttagcttaagtgaggtcatcgtgcccacagagcaggtgagagacctctctgggccactgctgggtcaggcccttggacttctaggccctgaatgccaataagctaatctgggtgagagaggactggctgctgatttgtaatgcaggtcagcctgaccggctcctgggtgctggacagctcatgccagtgactcatgccagtgactagggtcagatgagctctgtgacctgcttggccccatcagcctcttcaccttcctcaacaagagggcaggagagtctggagctgtcccgttctcttctcccaggggtcggggactggcccaccagtgaggctggtctctcacagtgcttctcatttcttccattctgcctcaggttgggttccctacaggttgggttccctagagagcagacggagatggtttcacaaagggggtttttattacagaaggccctggggacccacacctttgggagggaggggtcaaaaataggagtgagcagagggagaactgctatgcagaccacagctgaccccatagggagctctggagccaaaatgctccttcagagttatcctgcatttgggccaaaatggaccagtcattggatgcgggccacctgggaagggtgtgaccctgagccaggcagctctctgcagctgaagcaggctctcgaggagctacccctgagggccacctgcagagggcactcccagcagctgggtggcaggtgctttcacaaagggagagttgagcagcgcctttcctttcttgttcatgatatctaccaatacctctcccactggggtaatccatcttttcttttaattattttccttttgagatatattaaaaatgcaaaaaaaaaaatttttatttttttg

SEQ ID NO: 68122 - DNA, 1590 bp, Homo sapiens
ggaaaggtggaatatcagttacagattagagacagatgtgatctcttcctatccaagtttcaggtgcagggaagtgggtgttgctgtgtggtgagggtgaagaggttttctggaaatttgggtttaggaagaggaaatgttcctaaaagaggggacaatgatccacatgcgtggtgggccaagagggtgggcggatcctgccagagcctcctcccacctggaggggtcccagcgtccaccttccctgccccagcccccctcctcgaggtactgggaggctggataaagtcttcggctgggccacaccccaccccaaattctccctgtcccaccctagtggcccaggccaccccggcctgctcccttccgcaaggcacctcaccttctgtgcccagaccattagccaacgcggtgaccttgaccccggcccaggccctgctaatgaagaggaaagcccgtacgcactcggcctgacccacggcgaccctctgtgaccaatcatactaccaacctcttaaacagagctccaccgacgcaatgcccaggcataaaaaggccaggccggagagaccgccaccagtcacggaccctggacccagcgcacccgcaccatggccggccccagcctcgcttgctgtctgctcggcctcctggcgctgacctccgcctgctacatccagaactgccccctgggaggcaagagggccgcgccggacctcgacgtgcgcaaggtgagtccccagccctggtcccgcggcgctccggggagggagggacccgcagccacaggggcgcgccccgctccggcctcgcctgagaactccaggagctgagcggattttgacgccccgcccttgaccgcggtcgaggcccccacggcgccccagcgcgtctcagccccgctgtcccgcccgaactccgaaccccggaccccagcatccttgcccggcgcaccccggccggcctcgcagggtcctccgagcgagtccccagcgccgccccggctcccgctcaccccgcccgtccccgcagtgcctcccctgcggccccgggggcaaaggccgctgcttcgggcccaatatctgctgcgcggaagagctgggctgcttcgtgggcaccgccgaagcgctgcgctgccaggaggagaactacctgccgtcgccctgccagtccggccagaaggcgtgcgggagcgggggccgctgcgcggtcttgggcctctgctgcagcccgggtgagcggggcaaggcgctccggggccagggggaggcgggcgggggtgcggccgggattcccctgactccacctcttcctccagacggctgccacgccgaccctgcctgcgacgcggaagccaccttctcccagcgctgaaacttgatggctccgaacaccctcgaagcgcgccactcgcttcccccatagccaccccagaaatggtgaaaataaaataaagcaggtttttctcctctaccttgactcgtgtctaagtgccagaaatgggacggggagggggcattgtgggactggaagatcgcgcgcgttggacctgtggcttgttgcgctcagagctggcccaggaagacgtgt

SEQ ID NO: 68123 - DNA, 1053 bp, Homo sapiens
cctgtagagactgagcagacaagggcagacctctccttgctaaatggctctgtagctgggccaggggactcaaggagagggagaaagagtgaaagactgtacagggaggtggacatttgggcaaattgggggtgggcagacattcgtcaccccttccaagaaatagtagcctgattgttttgacaaagacaagtggagggaaaggagtctctgaatctgtatttaggaagaggaagttcctggacctcattctaaaactgtccccaagtccagacactaacactttggattgaattcagtgcagccaagccacctgcctcttcctatttcccagtctggaagagttaataaattcctattaggtttggtcctgctctagccccagccagatgggggatggccctgagtggacaacatgaaacaggagcaggaggtcatggcagtgacccaagcctgcatggtccctgtccccactggctagacccagtcgtgccgggcactgcctggcagaggagcccagaaccaggtcaggggtgagagccaaggggagccctgggagtgtggaagagagcctgaccttgacatgtgcctggactctgcccagggctgctgaggctgggctgcttgagtcaccaggcttggccgtaagcctgggcattggggtcagggcccaggcggacttccctcctcctgcactccctcctgacctcagagtttgcggaggatcccgaaggagatgcagcctcttgtggctccaagacctggagcaggaagcccaaggagaggatgcagagaaaagaggaggccaagagagagaaggatgggaggtggcagagggggtgaggggacagaaggggaggggtggaggggccaaggagagaggcaagagggggcccaggagctggcagaacagggaggcgagagcagagtgagagacaaaggagagaaaggggcagatgggaccagaaaggcctcaggttcaagaagggggtgagagaacccaagggatgcagaggaagaggccgagcactgctggacgtcttttcgccaaag

SEQ ID NO: 68124 - DNA, 476 bp, Homo sapiens
cagctaatcaggaggctgaggcaggaaaatcacttgaatccgggaggcggaggttgcagtgagcagagattgcgacactgcactccagccagggcgacagaatgagactctgtctcaaaaaataaaaataaaaataaaaaaaattagccagtatggtgctgtgcgcctgtagtcttggctaccgaggcaggagaatcacttaaatcccagcagcagaggtcgcagtgagcagagattgcgtcactgctgcactccagcctgggcgacagagggagactgtttccaaaaaaacaaaacaaaaagaaaccattaacaggccgggcactatcgctcatgcctgtaatcccagcactttgggaggctgaggcaggtagataacctgaggtcaggagttcaagatcagcttggccaacatgacaaaacccagtctatactaaaaatacaaaaattagctgggcacggttgtgggcacctgt

SEQ ID NO: 68125 - DNA, 1807 bp, Homo sapiens
ggcccagattttattttagtctaccaggtagtagcaaactatccaaggacttgcccaggaccattcaggtcagtgagctacagaatctagttctggaaaggcagccattcttactattcacaaagtgtagaaaacgtgaattcagattccagcagcaacaaatgactggagcacaaaacgccagccacagttggtgctaacgcagctggctatcagctccacaggatgaagcactgtccaagggtctgatcagtgaagcatcacccaagactgatgaacacagctgatatgaggggacccaaagttccctgagtcaagacagaagagctgtgtcacggtttgcacagaaagagaaagagcaactattcttacccacggaaagaaaaagggagaaggccatcaatactacccttaggcttgtgcaacgagaaactgctaaaaatggggggaaggtatatatcctatcatactgatgtttaccgaagactccgcatcccaaatgctaagcaacatactgtagggccttgctactcagtgtgtggtctgcgtgccagaggcttcagcctcgtctggaatctagttaggaacacagttatctcagaacccaccccagtcctacagaatcagaatctctaagcgattcgcaggcacatcaaagtgtgatgagaggcgcggcagaatatctgactacattctcttaacagcaccgtgagacaagtactgttacgatctccatttcacagaggaaaaaaaatcaagggtcagataagccccctgccaaagatcacaaactcaggagcggcgagagtcactgaagttctcaccacagccaggcctgcgagaggcactggcaacccaggccaagagctgaacaaggcctcgatgcgctccagctctgggccggccgggaggacaggaggcacaggccaaggcccaggacggtcgtgaacgcggaaagaggccgccgcgacctcctccccggccgccgccactcacctgatcctcccgaaggtgggcgccgcaacaccaaaccggggacgccgcgggcggcggcgacacagatactggctcctccggcgactccgagcctcacagccccacttccggccaactgcccgctacttccgcctgctgcgcgagtgacggatgcggccgaggctcaaaagactctgtcagcgtttcccaaggacattttccactggaggacgttgttgaggaggcagggggagtctaggacctgcagagggaaaacaccttcctggatggatcgctctggaagtcattaagcagcttagtcccggcgcggtggctcacgcctgtaatcccagtactttgggaggccaaggcgggcggatcacctgagttcaggagttcgagaccagcctggctaacgtggtgaaacccccgtctctactaaaaatacaaaaattagccgggcgtggtggcgcacgcctataatccagctattcaggaagcggaagcaggagagtcgcttgaacccgggaggcggaggttgcagtgagccgatatctcgccactgtactccagtctgggcacccctgtactccagctctgggacacagagcgagactccatctaaaaaaaaaaaaaaaaaaaaaaaagtaagtagcttagacacatgttcaaatctgaggaccaccactcagggttttatggccttggagaagtcacataaattcattcttgttatattattattattattttcatagagacggggatggcagtgtcttcctatgttgcccaggctagtctcgaactcctgggctcatgcaatactgccgcc

SEQ ID NO: 68126 - DNA, 1933 bp, Homo sapiens
ggaatgggcccatcacctagctactggctctgatgaagccagtgtttcaggactgagggggccgagagcgccccctccaccccgagcacacacacgcgcgcacacacgagcttctgctgggggtgggagggggggtcgccattcaccagcagcccacggcccgcagagccaactgatagagaccccagccacaggccacaggacctgggagtccctgcgatgggggaaaccccgcccgcacctccccaggctccccaccaacgcgtgtggccccggggggcggggcgcagagggaagaggtgacataatccgagccgcaccccctctggccgccacctccccccaggccgggcgaagcatccatgacatcatccgcctcctctccgctcccctcccccttgggaccctagcagcgggacgcgccccctacccagtccgggtcaggtcagacatgccgcgcagtgcagcaggcacggcggcaggtcggagccgggagggatgccacgatgggcctgcctcacttactcgctgcctcagggtccggcgcggggtctccgacacgggcgccaccggccccgcttgctggcgcagcccgaagcacgcccggcggggcgcgctgcgcgggcccggctccgctccgcgcccctcctgctccccgcccgagccccgcccaccagcggctgcggcaaacgcgagcccgccctccggccacgccccccagggcagccaatgcccgggctggggcggggtgaggcgccttaaccccttcgtcgctgcgccccgcccgcgcgtgggacccctcagcctcaccctctctagggcgcagcaagtccgccgcgagcccctctgctcatcgctcgttaccccccaggcccttgggcttgggctcaggcccagtcgttcctctgcaacaaatccaatggaaccgcgccctccctgaatcccacgtctaggaagaggaggaggagcccctcttgcttgggggaaggggctcccgactcggagccccgagccccattcctctcccgcgccagctcttcgggacgcggcctcccagcggacgccctgagaccttgcaagtccgctagggaggggtcgggacgagccgtcgcgggtggatccgcccggccgagcaacgacccgcccgggcgcgaggaccacgggctgtcgtgcgggaggcgtcgaggggcagtaaactccgttcgtgaccaaacggagacgatttgaaacttgctgctcacactggatcaccgtctggaaggtgcgacggggaaaaaatacacattacactccagcaggattgaacgctttcaccctgtgccccgcgcctggcgtaacgcgtggccccagaccacacgctgtaacccggggtgagagggagtgaggtgggacttcgtaccggacccggagcgccggcctcgcccgcgcgggcagcgttcactgtggggagtgctcactcagcctagggcggcccgggaggactgccgggaggagggagtcggccttgaattgaggcctcagccttgaatagggtagggaggcaagcctagccgagagtttagcactagcaaaagcctggaggcaccagggtctgccctaagaactgcagcgcctctgctctggctgggatttaacgcattacgtctctgctgtttataggtgttgtgtttggtcttacgacttcgtattctatagtttttatttattcctgttttctgaattttcccacatttgcttttatcttctatcgtgattttcaaggcagaaagtatttttaattcttctcgcggctgcctttagatttatcaaatgaaaatagtttacatttcacacattagtaaagtcagtgacaaataattcgtttttatattcccccatgagaaattttgtgtgcttttctgcctcctacctgccgccctcactacttatattt

SEQ ID NO: 68127 - DNA, 2467 bp, Homo sapiens
caaaccctggctgaaatgacagtcccaacactatgactacctcagggccagctgcaagttaaagacccactgatgcctgtgcagcaagggtctctgaacccaagtctgagccagaaggtacggcaaagaaagggcctcttcttgagctaaagggataatccccaaaggtacaaggcaaaagcctcaaatgcccccagtttctgagaaacgcccagacgccccctcctcaggctcaagccagctgccaagtactggagaagacaatcctgagggctctcctggtctcctggaagcagggatatggaggcctctgtgtcaacagaatgtctctatctttaaactgttttcctggggttgtgggtgaccccactccaggaactgcagaaactcttggccaggcactctgcctctagggtgaaatcctcagggaataagtgtgcccataacaggaagggtgcgaggatagaaggggtgaattgaggaacattctgaatcaaactgaagacccttgccctctgcttggacactgagagccaagatgaaggtagggggggttgacccagtggaacaaatgccaggtcccaagtccccccctactctaccgtgtggctcccagacgtccctcctaccctgaggcttcataccctactcccccacttagctttgggggcccttttatccccccctccaacccaaaccctctccccaccaggctgggcccctctcacctaggatgacagcttcctcctcgttctcatctgcttctgcccaggccacccgctgggctcgacgctgggcctgtaggcggctgcccaggtccctccggcgccgaggcctgcctccagctctcggctcctcaggctccaggggcccaggctgggccacccggcctgctcctgccagctcctcattgtgcagtggctcttggccggctgtagggaagacagaaatgacaatgctgcctataagcccagcccggcccatggcaggaggagcggcagcccggaagcctcacctcctctgcttagcggcctgctgcccacagcacaaggccccgacttctcagtctgactggcaaggccttttccaccaggcccacagcttggtcccaggcgggggctcagcccttccctcgggcctgtgtgaatactcctctcccctcccggctccacctttccagctggcctgtcaggaggcccctatcctgatgtccccagctctcatcgagtaccccctgcaggaatccactgatttctcgcctaacaccacctgtggttttatctggctccccagccagagagtacacttcccggcggtggccgagcctcccccgggaagacctgctggatctccgccttccctcagcgtgtcccttccgctcctgggagcgcgcaggtgctcagaggtagcttgtgggcccagggagcaggaaaacacatatacaaacccgcccgctgaccagaaatggggggaaagagggaggatgggtgtatctgttctgtgccctggccaatgacatggccttctgatcggggagcggattggggagggagagtgggccctctccttggcgggaagggagagagcttcaggaatttcctggagccgcctcgcgcttctccagctcgtgggggacaggcagaaaatattcagatgcccccttcctggcacctgctctggagccaggctgggaggaatggaaaacccctgcggcctccctaacaggtgcagagggaaagggccccgacggtgacggatgggagtgtgcgccggccagggcctcaggcctttggaggtatggagttcccgggggtgaagagagggatgaggccagactctggcttggagtcgagagaaaggggtagcggcgcggccaccgattccaggtagggcactgcggaagccccacccggcacacgactagcgcacggacgcgcatgcgtcccgcccgcccaggtgcgcacgcgcaggagccgcggcgcgacggtccacaaaggctcagaaggccagaaaacccggtaccaccaaccctggtgcagcggcatctcctacctgatgccgcccggccccggctgcgagtcaggaagaggataaagccgactagcagagccgccgctaccaagtaccacacaggcgccaccatgacgagggcctcagtgcagaaccactgcgtccaccctgaggccgggatctcataggccccgcccctatttcccaatctagactccgcccactactcggagccccgcccagcggcacatcacagagaggctttaatgtcagacattaaaatgagtttggggggtgtaaagaaacccacaatgttaagaggaaattatagcagacggtatgtccagtagaaaacatctatgtatgttttttttttttgagacggagtctctgtcgcacaggctggagtgcggtggtgcgatctcggctcactgcaacctccacctcccaggttcaa

SEQ ID NO: 68128 - DNA, 2367 bp, Homo sapiens
gctcactgcaacccccacctcccgaattcaggcgattctcctgaatcctgaattctctgaactgggattacaggcatgcaccaccatgcccagctaattttgtactttttggtagagatggggtttctccatgttggtcaggctggtttcaaactcctgacctcgggtgatccactcgcctcagcctcccaaagtgctgggattacaggcgtgagccaccgggctttcccacactttgatgagcatcagaatggcctgaggagcttggtaagaactcagactccctccctttcttgtccatgggcagaagtggccattcaagaggtactgacacaggggtccaggcggggggcagagggctgagtctctggaggagggaggtcagatgacttgctgcaaagagagtatcagcagaggttcagcagacccacctttgagagggcacttcctactttctgttgtgtttggaatgcaaagatctggctgaaacggtggccacggagaaggggtgatagatttgagaggctggagggatgaggaagtgaggaactctacatactgagctctcaagcctaggagtgaaaacgggtgagaagtttgggcttgttttaggctatgccgagtttaagttcacagtcgagtggatcatagctggcgggtaaggctgaaggtgagatcaggatgagggtttggaagcccttgcctagaaggaggcagttttttgagacagcataggagagcgcaaacctccagggtcacagggctgcagtcttctcctttcggagaccccattgcagagaagagcgaaagcaggggcggggtgggggtgggagtggtctcttccggttcttgaagatagcgtcccttaggcaggaggggtgggtcactcagtctccaggctcgggaggcccccagcaaatcggacgctgtgggctaggccgccaccgcgagcccactcgcccgatacgcgccttggggtccgggtcggctttccccgggacccctggccggaaactgagccgttcacttccgccaccagccggaagttttctgtcactggacgccaaggagttttcggtggctcagctgggtaaccggggatcaccatggcggcctcattggtggggaagaagatcgtgtttgtaacggggaacgccaagaagctggaggaggtgccgggagggtgttgggggctaactgggaggcggctgggaatagggcggagaaggggcttccgggaggagggaagcacgtgggaggaggcatggagagagaacagaattcagcccggaagaatgggtcctgacccggctgtgtggaaaagctggggcgcaagaagggagtggctgcagaatcggggcgccccggggttggcgagggaacgagggtctcgacagatcccgacacagggcttgtgtggtcagcgactgcgggacccggaggagtagcggggctcttaacaaccgccccgaaggtcacctattgaagtagaccccaacccagtgtcccgacactcttctgggacttatccacatcccgctgctgggccagggctagcaggacccagagagggcgtgggacggagttccacactgagcagtccgtgcctcaccaccgtcctgaaatgttctaacctcttttcgcgtgtgtgaaatggggatgatgcaggacatttgcttcacagcgctatagagaggaggagtaaaggaggcagtggatctaaagtttctgtttgcagggactttgtggctagcaagtaacagaaacacacagggagctcatgtaagccaccagatgactcctgtgggaatatagtgttatcgtgtcccacaggacctgaagttctctcaagaagctgacttgtccttgttctctctggatgctgatccctattcctgttcatatctttcccctttcttccctgctgggggatggaacaatgaggcttctaccagatatcagctccgactggctttgcttgaatcaagagtttgcccctgttcaatcagccatagccatggagtgggggtcatgtgtgggggatcaggatgacacccactggatatgtctgaggcagaccagtggggtgtaatcactagggacacctacatttgcctgtagtgtagggagggactgatgtcactttggtgccaggactgagtggccttctcaggaaccagagccttttgccgaaaaaaggtttgggatcctgaggccagaccagtcaggcagtccaccctgaacagagcccatgcaggacagtgggcatgagaccccaaacctctggctgagaatattgccctcacttaaagaaggagctggaacccgagtgcagtgcctcacgcctgtaatcccagcactttggga

SEQ ID NO: 68129 - DNA, 1437 bp, Homo sapiens
aaatactggtatcaatattcataatactggtctgtagttttcattttctttagtttctttttattgagttttgataacagctaatttctcttttttttttcagatccagtgccgtctgaatttttgttttaagctaatttcattaaaagtttgcaagatgttctttttcaatgctgtctggttttagttcatcactacattaaaacgttttaagggtaggatctgaacttttatttatttttttagacagagtatcgctctgttgcccaggctggaggtgtgatcttggctcactgcaacttccatctctcgggttcaagtgattctcctgcctcagcctcccaagtagctgggattacaggcatgtgccacaatgctcagctaatttttgtatttttagtagagatgagggttcaccatgttggccaggctggtcttgaactcctgacctcaggtgatccacctgcctcggcctcccaaagtgctgggattacaggcgtgagctgctaatccagcccaaattcagagcctggtttagagcccggccagatctgaacttttaaatagctctgaaactatatttgaaggttttaggagaattacgaaatgtgttcctggtaatttctctgccttttttcaattggttattttagattttctatctatcctggggcctattttaattaacctttaaccaaatgtgtttgcattgaaatgatgcaattactttcttatgactcttaacttccttgtacctatcattgccctcttttctcttttgaaatttctgctttttcccttttttttcttgttagattagtttattagtgaggttattgcttacaggtctgcaggctggctatggctcagctggactgttacagtctgttctatgtatgtcatttcaggacccacacataaagcagcaactacctgagaaaagttctcacagcaagagtataagaggccaagaaaaattacacaagaacaccgaaggcctctggtcagacatgtcatgttatgaccaatcaccttccatatgaccagggccaacatcagtgtaacaggaaagaataaccactgtcaactataacaagggcatgaagggaaaaaaaaaggtatgaaaaaataatataacctaccacaattaagctaatggtttctctatttcattattttcaggtccaaagtaccagtgctgggattatttataaattcctatgttctatttcattattttctgctttccatgcagtgaattctttccttactcttttccccttcttcacttggctacttattttcaattaaaaatttcttacaagcactcctttagctgtttttcaaatactctgatatgtagtgttttcattacttaaattattagtgaggccaggtgtggtggctcaggcctgtaatcccagcactttgggaggc

SEQ ID NO: 68130 - DNA, 2254 bp, Homo sapiens
cccctatttatccagtttttcctcctgcgtccctaatacctctacttcctcccaacccgagctccctattgtggagtgagggggcgtcgcgatgcaggctgaggcagggggagctggggaaacgcgcgacaggggagatgctgtcattatgtacgtagggggcgggggacactctttaaggaagccgttgtcaagggcaaaggctctagagacccacgggagggggctttctaggtaatccatttgggggttctacacgagggagctattgtgtgtgtggaggtgtgaggtctgtagagtagcagtttctgagggaaacattccctggggaaggcgagtgagttattcatagggaagcctctgtggggttctgtgtagaagaatccttcctgggagaaacgttctatgggggtgaggacgtcataacagtgtcttcacagggaatcgctgtccctagggaagccattgtggggaaaccgttgcagggttgtctgtgggggagccattgtggggaaaccgttgcggggttgtccaaaggggagccattgtggggcctctacagagggcgccgttcctgggaaaaattcctccctgagccgttcagcaaagaaccgtcccgaggaagccatgtcggaccacgccctgcggcgggaggcgtcgccggaccccgacagcccgcatcccccgcccggccgcccctcggctgcctctgccccgcgtacctgacggagggtgacccgcggctggagccgccaggggaccgagcgcggggcagcccctgccggcgcggggggtacacgtccatggcggcggacgactggcggcggaggaggacggtgcagctgcgagggtctcagttgcccgcagggcggctccacgctagctgcggccgggcggggcggcagggcgtgccgggtgggagggggcgcggcgcgcgggcccggcgggggcgggggcgggggcgtggagggggcgcgcgcaccgagagcggatgggggcgttgggagcggctggagttgggggtcggcgcacggccacagggaccccacttcttaagctgcgaggccgccggaccggatgttgggagcgcgtgtccgcagggtgagggttgccacagcgccgcccggcctcgtcctcaagcccggcatcatagagcggggctctgcgcggcgccccccggccacgcacacggacgcgcccgggggcggagcctctcccagcccggccccgcccctccgcctctgcccgccccgccccgcccgaccagccccggcctccagcgaagtcttccgctccggcgtcaggatccagcgcacctccccagtacccagcgcacctccccagtacccggctcgcttccctgttctccggaacggtgtcttcccgcttcctggtcatcaattccgcacccacccttcaaacatccaatagattcctagccggcctcgggttagcgcagcagtgcgcacccagccctgcgcagggcatgagcgttagaggcgcacaggatcccagaagacccctaacctttactgttaagatcctagctctaccggtttctgcagggacatgtacaagaaacttgggaaatactgcactgatagttgccaggagtcctgtatatacaggacgtatttaatgattattggcctgcgtccttcgttgacctcgtcggaatgccttaaatgtcctgtattcatctttttacactaaattgcaataattagagctatttttctcccacagtaattggtgctagatcacttaaattacaacactggctgaaaatccttcctacactaatgaagatttggacaatccctatggtgtctccttcaggtttggctgagggaagaccagaagggagtaggaatttaaagtgctcgtctttcatattcaagaaaggaaaatacttttttagctcaagtccggagtcgtgaacaaataaccaccattatttagagataacttctcgtcggtgcagcagctctgaaaatcagccaatcagcgatagcctcactccggtaactatgcttcttagtaaatcaatgacaaccccacgcttctgaaagtcagccaatcagtgaccgctctaagcctccgacaatagccaatcaacaagtgcctgacaccagcgaccaggcttccgaaagtcagtgggtactcagctgccgcactccacttctgattcggaaagacagccaatccctgaaggcgaatatttccaaaaccatttttttttctttcccagact

SEQ ID NO: 68131 - DNA, 542 bp, Homo sapiens
catgcctcagcctcacgagtagctgggattacaggctcccaccaccatacccagctaatttttgtatttttagtagagatgggatttcatcatgttggccaggctggtcttgagctcctggcctcaagtgatctgcccacctcggcctctcaaagtgctgggattacaggtgtgagccaccgcgcctgacccacaacatgaaatcaatatctaggtgcagatttcaaacaatatagagaattggtttgtgagaatgacatcattcagttggaacaaagtccagctttggcagccctgttgggaaaggtagatctggcatctacctgtgtggaaagcagagaggatgctgtctggaaagaatgctggtgtgtgtgtgtgtgtgcgtgtgtgtgtgtgtgtgtgtgtgtgtgtgtgtgtggcaggaggctctcggctcatacactctttgtgactataggggaggctgggcttgacttcttgccatcaggctcctgaatctccagagatcttgcggaactttccacatgaaaaaaacaccaaaa

SEQ ID NO: 68132 - DNA, 2560 bp, Homo sapiens
tgtgtgtcttcattcagtttattaggcatttactgagcacagcctacatgccaggttcttcattttttgacacagggtcttgtgttgcccaggctggagtgcagtgctgcgactgcggctcactgcagccttgacctctccagactcaagcgatcctcctgcctcagcctctggagtagctggggatacaggcgcgcaccaccatgctcggctaatttttgtatttttagtagagacagtgtctcaccctgttggccaggctggtctcggatcccagagatcaagtgatccgcctgcctcagtttcccaaagtgctgggattacaggcgtaagcctccgcgcccggcctatgccaggttctacatgtgttctttcttgactcttgtgttacagaggctcgaatgaagcctggcttctacagtaccgcacccagcacctcgctgcgatgcagcctcctgtaccctttccgtccggcagctggagttagggcagagtgccgggtctctaggagggcaacactcaacgcagtcggctcctaggcatccagtggggctgcaaccccgccgccggggacgaaaggcgaagggggaaaactagagctttcgccggccgggacagcgcagccgggtttcagctcgttctacggtccacgtcagaagatcgcctccggcgccgcggacgccggagaccactgtctgcgcccccgcacgcacgcacccacgtactcgcgcacgcgcgcgccggccccgcccaccgccccgctgtggcccctttggaccgcacgagccaccgtccgcacagccccgccccgcacggccaggcgaagcggagccggccgtgcggtgtgtgtgtatgtgttcgcggggcgccgtctcagccccgggaagatggtggctgcagcggcggcaactgaggcaaggctgaggaggaggacggcggcgacggcagcgctcgcgggcaggagcggcgggccgcactgggactgggacgtgaccagggctgggaggccggggctgggggccgggctgcgcctcccgcggctgctgtctccaccgctgcggccacggctgctgctgctgctgttgttgctctcgccgccgctgctgctgctgctgctgccctgtgaggccgaggccgcggcggcggcggcggcggtgtcgggctcagccgcagccgaggccaaggaatgtgaccggccctgtgtcaacggcggtcgctgcaaccctggcaccggccagtgcgtctgccccgccggctgggtgggcgagcaatgccagcactgcgggggccgcttcaggtgagtggcgggtggtgtcggagggtcgggtccaaccagaggctggggctgaggggcgttcgagacggctccaggtcagagggagatgctggacagaaagtggagagggtagggccgccctatggggtttgagggccatttgcttccggggagatcatcgtctctggcctggggtctttctctgttggaaggtgaaaaggtgtggggcaagggtgggggcaccccgacggtatttgggtgcttaggttagttagatgggaagaatgctgagggacccaaagagcatcaaagccgatcgctctaaaactcggcgtgtttcagctaaacgaggtatccaaggaaaggtggtcgagccaggtttgcttgaacacttccttttaacatccacatgtgccctaggacccgatgagttccccgatgcactggagatgtggggtgctctgaagaaacagggccctggaaatgctttgttggctggagataaaagggaaagggtagcattgtaagatattagggatagaaggaccagtggtccttctaaaggaaagtgaggaaactagccttttggcaaaagctccctggaggtggcaaattggaatagggtctgtggtgaagagggaatggaaggagattcctatttgccttggtttctggacaatatgaagttctgaattggcttagtttggggcagttcctcttggagaaatcaataaattaattagcagttatcgttatttgcttcagttgtgcaatgattttccagataatacagacagattagccagactttggccttgtccacagggagtttggaatatagcaagagaaagataatgtgcgcacataaccctagtcataagggttacagagtcattcacgcctttgacaggtatttagcttactgaacacatgtctgatgtgggggagtggggaaatgtgaacaagacagacagggcctctgctctcattgaccttaacattctagtgggagcaacaggcacttaacaagtaaataaatgagagaaataaacatggtaatttcaggtaatggtaaatgctatcaagaaaataaaaacagcgtggtctgatagagaattataaccggtggtgactcttggagagggttctcatttgaaatgacatttgatctgagacctgaatgaggcaacagggaacttgtgggaattcagggatggagaggttgtggctagctggagggatgcaaggaggactttgaggaggcggtaacattggatttgagca

SEQ ID NO: 68133 - DNA, 1166 bp, Homo sapiens
gtaaggtaagtcactgaggaagcgatgtgaagtctgaggggtgagatggtactacctgcgtgaggggtggggtgctgaggggccagcaggtacagaggcttggggttgaagcggatggaaggccaggtggcaggagcagagagagcaaaggggagcttggcaagactggagagaaaggcgggaagccaggccaagtggagatctgtgggttggattgagaattttgacctttagcccaagagctgtgaaatggcgtagttcacgcctattttcatgacattataggcttttagattggagccagaatacaaatggccttgaaggtgaggccagggcattttccatttgagaagcttccaaggtcaggtgaatggatggttgagtcagacgaggatccttcaagttctgaaaacctgggacactgtggtaggcagtggggaccagcggtgtgggaaggggacttcatagcaagatcaatctgtaatgttcagagtaggtacactcactttgggcatgagagatagggggcagctaggtgggatctgttggcatgggtcagagcagtggtaatgagagcttgtagaggtgaaatggacaagtcttccgtgtaaactggtttgctcttggaaaggtgggggatggtgagggaaagaaaactagatcctgtcttgggtggttgagaggacagtgataccattaacagacacagggacacaggagcaggtgttagacatttaattgcatgcatgctgagtttggggtgctctcagagtacacacctggcagatgttaagtttggagtcatcgacctatgagggagattgccagggagctctctctgagagtccacatggaaagcccagaggattggataagagctacttgttgcagggaacaggcagtcctgacactggttgtctcaaatagtgtcacaggtgagtgaagggactcccctgcttattgtggacattccctttgagctgattctaggtgatgtcagtgctgtttcctgggtagacaattatgactttggtcctgatgataccattatattttgtgggctttgggattttgcatttttaaaaatgaaagtaggaggaacttatgactctggtcttttaaaaaaaactcagtaggccaggcgtggtggctaacacctgtaatcc

SEQ ID NO: 68134 - DNA, 1886 bp, Homo sapiens
cttttcatctctacttaccaaggcccaccttcagttctctataatctataattcatacccttttttttttttttttttttgagagacaaggtcttattctgtcatctaggctggagggcagtgctcctgggctcaagtgatcctgccacctcagcctcccaagtggctgggatcacaggccagtgtgcccagccaatttttaaattttttgtagagatgaggtctcactatgttgcccaggccaatctggaactcctgtccccaagagatcatctcgtcttgacctcccaaagtgctgggattacaggcatgagccactgcacctgacccctattatcttcttttgaaatgagtcatctgctaattcacttcataaatatctgctgaatattgtgtgttaggtactgtgcccttccttgaggatatgaaggtgtgtaagaatcaggccttgctttcccctaagagaagttataactatgaagggaagacagctacgtacacagcaattagaatttcataataaaaatacaggcaatatgtggtgctggactaagatgtgattgacttaactcttttgggggttctggtggaagacatcacagaagagaggacatttgggcaggtctgagaggtttagtgtgagtagaccatctgggggagaaagacattccagaaggaatgaagagttgatgtgcaaaggcaaagaattatggattatcatacttagtgtattaatttccaagggctgttacagtgaagtgccacaaactcatggcataaaacaacagaaatttattctttcatagttctggggactagaagcctgcaatcaaggtactggcagggccacgatctctctgaagactctcagggaggatctgttccatgcctttctcttcgcttctggagttgccagcagtccttggcattttggcttgtagatgcatcacttcagcctctgcctccgtcccttcaatctcatgtgatactctccctccctttgtgtctctgtcttttctcttaagggtaccagtcatagtggatgaacgagtatgacatcatcgtaactttgttgcatctgccaagaccctgtttccaaataaggtcacattcacagggacccagggttaggactttgacatatctttttggggaacacagtacaacccacagcacctggagaactgaatgtaggtgcctgttgttggaacataacttgtgaggggtgtaatggaaggaagggggtgaggttgtaaggttataatggcctctttttgtcccttcccaacaatctccagcttctgggtttatgcttgacctaggataagccctcagggcattccagtttctggccgtgctgattgttttgaaatgggtttatgattgattttaatggactcaatcagagtgaatctcaggacttttgtcggagatccctttcctctgtgggcgtttagaaggacatgtgttgccttcttttctgtgtggcgaggccataatgcctagaactgttaagagttagcgttgctgctgtaaggaattcacctcaggtcagaacaactcccagaagatggaggatggcagagaaatggagccggagacctgataactttctgaatctctggatcaaaacttgcctgaaggtgtagtttttggtttgtgaagtactgcagtccatgtttttcttaagccggttagagttggatttccttccacttacagtagaacaattcctaacatacagagggagggaggtagagccagctgactagggttagtcagttagggcttctgtaacaaattaccatagactttacctcgatgaaaggttcccaagatgggcagatgctttttatttaccgcagtatagaggacaggtatgtacg

SEQ ID NO: 68135 - DNA, 831 bp, Homo sapiens
agcacacatacacagatatgtgtgtgtatacataatttttccctctgaacctttcaagggtaaactatatatatcgtggctcttgacccaaaatactttagtatgtattttctgagaatagtgatagtcttaagagtcttaaggtacagtttttaccttcaatatatttgacattgtacaatgctttaatctactgtttgtgtttcattctgtcagttgacctgcaatgtcctttgtgtaattttcaacgtgcagtacaggatccagtctagggttaggtattgcatttgattgccacactttaatctagaacagaggtcaacaaacattttctttacagggcctgatagtaaatattgttggctttgtctgtgtcatagatctctgtcacatctaatcacctctgctgttgtagagagaagcagccattgactataagtatgtgaaaggatacagctgtgtttcaggaaaactttatctgtataagcagacagcaggcctgatttggcctggcagctgtagtttgccggtccctgatttagaatatttgtactgcctttctttttctttattttttgttttttaatgatattgacattctttgattaatacattccccctcttttaatccagttccttattttgcgtttgttttgttttcccatcattagattcaagttacgaatccttgaccaaaatactgcataggtgaaggggtgttcttcttagatctggaggcatacgttgcccatctgtctgatttttttaatgttgattttattctcctgtttgaggtgctgtcttatttttccactatataattactatttt

SEQ ID NO: 68136 - DNA, 557 bp, Homo sapiens
tagctcactgcagcctctatctctgggctcaaatgattctctcacctcagcctcctgagtagctgggactacaggtacactctaccacattcagctaattttttttttttttaatttttagtagagatgaggtctcactatgttgcctaggctggtcttaaattcctggcctcaagtgattcatccactttggcctcccaaaatgctagggttatagacgtgagccagagtttctgtggaattgcaatagaaatcattaacaaaaagataactagaaaaattcccccaaacatttggaaattaagcaacatctaaattacacataggtcaaaggagaaataagggaaattagaaaaacattttggaatgaatgaaagtgtaaacacagtctgttacatttgtggaatgcagctaaagcagtatatagagaggaatttgtacctgcaaaagtttttattagaaaagagaaaagatgtaaatgttctaaatttccatagccagactacctctctagattccttctctctgggcagggcatctctgaaagaaaggcagca

SEQ ID NO: 68137 - DNA, 1235 bp, Homo sapiens
atggtatagcctactgtacaccctgcttatatggtacagcctattgtacctaggccacaaatctgtacagcatcttactgtactgaatactgtaggtaattgtaacccaatggtaagtatttgtatatctaaacatatctatacatggaaaggtacagaaaaaatacagtattacaatctcatgcaacctctgtcatatatgtggtccattgttgaccatatgtcattatgtggtgtatgactgtatattttcctaaaatgcatttccccttaggaaaccatagttttcagtttttcacctgcaactggctttctaaatttctttgtctcaaacattttatttcctttactttaaaaagaaatcagttcaacaaatattttttgtgtttctcacatggggctcatctggctgatgtcccatgtggatgagggaggtaacagagagcaaacagtacacaaggacaggagatcaggcgactgttgtgccctcgtgtttttctacccgctttggcttagaaatctctctgacatatctttgaactgagaaccaaggccattttctgtgtttagaggttcacttacaaggccaaagagcagggtggatggctgtgctgagcatttaaaatggcattggccaagtgttggagtgtatatgtttatgccagcatttgaaacataacttgtagcaaaaagcaccccagaccttaatacaagccccaaaactaagtgtgatgttatcataatagtacttgttggggattcacttgttactgtgtttgttaatcagaattcacagagctcttgttgtatgccaggcactttgaatcagcttatcaggagccttgtaggaacatgagccaagcaggtatacatcactctgtggttcacctggactgtgtatttgataaacagtggtagcggtggtagagcagagagagtggttgagaaaattcttcaaaagaacattattccttttagagtttttttttttttttaggaaagttatatgctggtggggcagttgttagactgtgtgatctagaggaacccttccccttcccccttccacctccccttcccctttctccttccccttctcccttccccttcccccttcccccttccccttttccttcccttccccttccccttcccttttccttttctttctcccccaggctggagtgcagaggcaggaacgtagctcactgcagcctcaacctcctgggctcaag

SEQ ID NO: 68138 - DNA, 1674 bp, Homo sapiens
aaaaaaatcatctgggcatggtggggtgcgcctgtaatcctagctactgaggaggctgaggcaggggaattgcttaaaccagggaggtggaggttgcggtgagccgagattgtgccactgcactccagcctaggtgacagaacaagactcggtctcaagaaaaaaaaaaaaaatgaatgaagggccaggcacagtggctcaggcctgtaaccccaacactttgtgaggccgaggcaggagaattacttgatcccaggagttcaagaccagcctgggcaacagggtgagacctcatctgtacaaaaagtcttaaaaattaaccagccatggtggtgtgtgcctgtagtcccagtcactcaggaggctgaggtgggaagatttcttgagcccaggaggtcaagactgcagtgagctgtgatcatgccactgcactctagcttgggctagaccttgggtctagctagaccttgggtgagaccttgtctcaaaacaaagcaaaacaaaaggaacgaaaatcccttcccctcctcattttcattccttgcttatggattcttccagccatttttgtatgcatttatataggtatgtgtaagtgtacacatgtacggtccattgttttgcagcttgcttctcccccatgcccttatcagaatgcctgttgagcttcttgttagtcccgcagacctaggtaatatgcagtgactcatgcagtcagatttctgggcatgagcatttagatgggtttcaacctgttgccatctgaacagtgctgtggttcgcattcttgtatattggtcatcgtgtacatgagcaagtatttcttctacaaagaaatagaattgctaggtcagagtgaatgagcatgaggttgtgtgtctgggacagattgcgtagggcctggcaaggatataggcttttaccaaatgtggtggtggtggtggtggtggtggtgaatcaataatggggcaaaaatcatggacatatgaagaaatgcaacagcaggtagacataagaaaaacaattaacctcaggagtaaaaagaactcagaaccacaatttaaaaattgctttttacttattaaattaacaaaattaaaatagaactagtagtccttgctgttggcagagtgaagtgggatggacccttcattctgtattgatacgatttcaaatcacatatctcttctggaaagcaagttggtattatggctctagagtcttaaaggcatcatttagacccttttactcagtaaggtttttttttttttttttaccagtcacacaacaaacatttagaatccgtcatgtgctgggttgtgagtgaggtcttaagaagaacctagggagcttttaatgatatagaaaatgcgttaagttttatttgtaaaatggaatatacaatgtaaataacatcaattaggctaagaaaatgcatcagaatactaacagtgttggagttatgggtgtttgtttagcttcttcgtattcttatataaatattttatataaaatatcttgggcacaatggctcacgcctgtagtccctacattttgggaggccgaggtgggtggatcacctgaggtcaggagttcaagaccagcctggcctacatgatgaaatgctgtctctactaaaactataaaaaattagctgggcatggtggtgggcac

SEQ ID NO: 68139 - DNA, 1622 bp, Homo sapiens
tttattcttttccttcccagacttccaagcatgaattcagcaactctgtaaagctcatcattaggaggctaccaagaagaataggatagtcctcccacccatgaggagctaacagttctgcacaaatctcctacctcctttaatttctttgactttatgagttatttattcttatcctcttattatgagaatccagcagggttgatttgatttcattacttgtacctcgggctctagctatgcagtgttgagcaaacccatttggactgaatccttaagtactgcagttacacttgtgaatgaactgagacagtgagattcttaaacttgtgtgggaggaagttatgctaagttaatggaagcgttgcgttgtgttaatgtaattttccctgctatttttacagttttgatatgtgtccaaataactgctcaggccgaggagagtgtaagatcagtaatagcagcgatactgttgaatgtgaatgttctgaaaactggaaaggtgaagcatgtgacattcctcactgtacagacaactgtggttttcctcatcgaggcatctgcaattcaagtgatgtcagaggatgctcctgcttctcagactggcagggtaggagcttctttcatttttattttttcttccatttatagaacattcccactaaataaattatagattgactttattcttagcacctatataatttatattaatcaaatacgaggtagcatttaagcttgaaacatccctctatctagctgcttatgaatttcggtttcatacatgtgtggtcatggtctttagaattatggagggttggccattttttgcatcctgtgtgtgaaagttggagaacttggactcagtcataaaaggatgtagcagagagccaagctgggagatgggacaagagctgacaataatgatatttcctcagaaacacactctaagttcagagaaaattggtgtcagttatacattagaatcttaaaggagttagctaatagttatctacagaaataattaaagaagctttagggaattatttaaggggtgagtgataataactgttattaatttggtgatttttcttgtaaacttaccccttcctcagaacctttttactttgaaaggaaatatgctggtttaaataccttagtttgttgggtttggctgacattttagagttaataattgaagaatttcagtatctaccattgtgcaaatattgcagcagaagccaaacctcccaagaatggagtctgtttcttcaatttgtttaagttttttgatttaccagaagatggatagtttgtatgattgctcccgggtctagttatcaaacttattcctccatatccacaagttctgcatctacaaattcaaacaaccatgtgtagaaaatattcaggaaaaaaacacaataaaagataatacaggctgggtgtggtggctcatgcctgtaatcccagcactttgggaggccaaggcaggcggctcactgaggtcaggagttcgagaccagcttggccaacatggtgaaaccctgtctctactaaaaaatacaaaaattaggtgggcatggtggcaggcacctgtaatcccagctacttgggaggct

SEQ ID NO: 68140 - DNA, 3498 bp, Homo sapiens
tcccccttccctctggggggaaagagacctgtcagggtctattctttcttggctggacaacccagaggaagccccagagttgttcaggggctcatgctctttccagactctacctcagcaagtcatttgtgtgggcacctcttagactgtgtcattatcaataactgcagcccctccataatctcatttctaaacgttccacattccaccctgcttcttctgtggtggacactgttggtgccttgcccagatctgtttatctttacctggctggtgcagtgcacccagtcacctgatgctgtgcaatttggctgttgtcagttcatagctgaccctttctctgaagaattctctcagcagattggagctgtcttacccaggaacacctagaatactatgctctatccccaggatgtcccctagtgtagtgaccaaccagtttgcctggaactctcccagttttagcactgagtcttgtatcccaagaaacccctcagtactggacgaaatgggatggtcaccctggcccccagctgctgactggctggatggaggtacatgagtctgaccctgcttctacatgggaaaattcatgttccagggctccccttgggatcaggccaaagctatacttcaactgagaccacctttttacttatcctctccttcctactaccttgcttgtctcacttcctgatgtttgtcaaaagagtattccctcagtaaatcacttgtacaggaatctctatctccagctctgcttgcagggaatcttacctgagacacttttcaatcttttcagatatttctctctaataccctaacagtgtttgatctccacatgggtccataattcattgattctttctctctccctctcctgttctccttcttaactctaatatcttcttttcatttttcagattcctaccacctttccttctgttttcattctcagttaatggccttgcttcctgcttctcttttgaaagataaaggtcagaaaatgatttccacaaactcctaccaccacatttccccttcacctatatctgtgcccctttatggtcatcttttctgtagatcagtgctgtctcatagaagtttcaggcatcattcaaatgttctgtatttaccctgttgtatcactggccacatgtggttatttcatacctgaaatatggctagtgtgacttaggagctgaattttttattttccattcttagttcttatcttacttgatctggcaccaacatttgatacagttatccttccctcctcttttaaacactttctttagttggcttctaggacaccacatccccttgatattttttttaattccatattccttctcagcctctttagctggtttctcttcagctgactgacttctgaatgatgtcagaccagggcttaacccttggtccattgctgcctgtttattcactcttttggtgacctcatatagtatcttggcctttatacttggtgactctcaaatttgtatttgcagcctagactttttacctgatcccctatctccagctctttaattgacatctcaaccttctggctgtgtactaggcatcttatgctcagcatgtcccacactcatctttttctcaaggctgctcttcccccagatgtcccccccagttaatggccactccatccttctatttacttaaggcagaaatcttgggtcatctgtgacttcttgtttcttcacaccccgtattggtatatttatgagttatctcatgctacataacaaattaccacaaacttagcaccttaaaacagtttgcatttattatcaccatttcagttggtcaggagtcctctgtaatcaaggtgtcagctggcctgcattctcatctagaggcctgagtgaggaagaattcatttccaagctcacttaggttgctggcagaatcaatttccttgtagttatagaaccgagggtcccagctttctgctggctattgacttgaggctgtccttaatttacggaggctgccttcagctcctagagcttacctcagttcctagaggccacccagtttcttgtcagctgagcttcaccagtatagctgcttacttcatcaggccacaagaagagtctctagactgagtctgctagcaggatggatgtcacagaaatgatatcctatcatcttcgccatattctgtttgttaaaagcaagtcatagatcctgcttacctcctaggggaggggattgtacatggttatgaataccaggaggtggacatcatgaggactaccccagtgtctgtctgacacgataggtcatatcttgttagctctacctttagaatctgtcccaaatctgatcacctctagtgctgccaccatgagaagagaaggtaaaattaaaggcatgaaagtgattgtgccttctgctgttatactagatgttatgaaagacacatatttaccattatgtgattttaccctaacatcctccctgtctcttgaagcaagaaatctgggaatctttagatatttccatatgttcttctcttcgtaccataatttcatattaagccctctcaactctgtcaccaaatacatgtcatatttattctttttatgtacagcctgctgttatctcttacttagtcttcagcagtaggtttctatcaaatctgttcatttccatttattcctattaatcaaattgctaaacatgaactggggtgccattgaacaatataaataatatcatttactaccttcttaaaacccatcagtgtcttgcctttggacttaatggccctgcatgatgtgaccactgtttaccttcccagactcagtcttttcctctcctgccatcattcacagcactcctgccccaccaacctgctttcttactcaaaacgtacggtgtacatcattacctttagagcctgtgtgtttgcccttcccttggtctagactgttcctgctattgtgcctcagggctggtgtcttctcaccctttagatctcagtgtggttttcccagagagatcttctctgaccatccagttcagacatttctccctgttcttttttatagtcctcattttctttatggcagtgttagtgattttttgttatgtcagtgcacactgttgtacttgctctttgtctgcctttgccaagttcttcaaggttagggaccttgtttactcactgcactcagagcttagctcatagaaggtactcagataggtatttatcagataaacgggggagtaaatgatttatttccttcacaaacatctgttcctggaaatattaatatcacctattacttttttttgactgacatacttcatgagccacattgttttttagatcataactttttttttctactgatcaaaacatgattttctacagctttatttgtttcacgtaaatattagcatagttccaaataatgaactttcatgaaaagttaatttagtgattcattttagaagtag

SEQ ID NO: 68141 - DNA, 537 bp, Homo sapiens
catagtatatgtagggttcagtactatccatggtttcacgcatccactgggaggctgggaatgtaaccccacagattaagcaggacactatattgccaaatccaaaggatactttttggttctcctcttcttgacttctcggtgatatcaaccaactgactgcttcatgagcgagactcttccagccgtctctgacccatgctgccctactgctgcttcttagcctgcctattatgcaatcttttctattcagcctctcactgttgattttttcccagaccttgaccctggccgtcttctcactctgtgttctctgactggactctgccttccccatctgcagcacgacatgcccagaagtgaccaattccatccttcctcaccggtgttccccacctcactaactggcaacatggctctgctggttccaagccacttctcttgctttcactcagcaggcactcccttaccaggccccagagctgtggccgtcagtgcactctccacctccactccccaccccaccaaccctagcat

SEQ ID NO: 68142 - DNA, 566 bp, Homo sapiens
ggctttgcactgactgctcctttttccagatgcacttttgcaggcgtccatgagccacctcccataccttctccaagtctttgttcaaatgtcaccttctgagaaagaaaggcccacacactctgaccatcctgctgtggagtgccactggtactcctgaaccccttgctcttagcatctttttatttctgtagcacttacctaccttttggcatgctctgtaatttgcttatttacttactgtttgtctccacctgctggaatgtaaattccatgggacagtaatctttgctctgtttatcagtgttttccatgagcctagaacaggacctgacccaattaaagtattgattaaaaagacaatgtaggccagtcacgtgaggcctgtaatctttgccaaggcaggcagatcacttgaggttaggagtttgagaccagactggccaacgtggtgaaacctcgtctccactaaaaatacaaaaattagctgggtgtgatggcgcacacctgtagtccaagctactcaggaggctaaaagaggagaatagaatcgcttgaacctggga

SEQ ID NO: 68143 - DNA, 1497 bp, Homo sapiens
gacagggccgggaccgggaggggacctcggcgaacgggaaggaaccgggaggcagggagcagaggggtggcctcaccttgcggggtgcaccccggggccggggagggcagggacgaccactgcagcggcggcggctgcaggagctcaacgccgagcacgaggaagggagccccgcgccgcggccgccctcccgtcggcacgcccccgcctccgcccattggttgatctgggagggtggggcgagggacgctccggaccaatgagcgggctccaaagaacggccaactggcgagggccgcctacgtcacgtgccagggtcgccgaggcagcgccctgctagtccgcgcctgccgggcgagctctcgcgaggaagacgggcaggcggcccaactaggccaggggccagaaccgaccactcgaagagggagaaggagggcctcggataggccccgcccccgctccttcttccgcctgggggatagcgcctctagccttgaaccttgcttaggacgcacctcccttgggcccttcgctctcgggagggctgtcgggcgcgtctcggggctgggtggagctcccgaaggtggcctttctccctgggcttccacgccggcttcggccatcgatacgggccgtgttggtctcgttcaggagctgaggaaccctccatcactcctgtttcgaccccagggtttggacctcttccccttccaccccatcccctgtctcgaaagaagcaacccccgtgcgggcccgagacgcgtcccgggtgcctggcccggcctggagaagcatcagaacaaagaaggcacgcgggctgggggctgggagagcctgtgacgcgcccccggggaccgcagcctctgctcccggtctccatggaggcggtcgccatggcagcgagatgcgcctcgctcagcaccgcggggtgggatgtgggcgcctgcaatgagccgaggagcgagaggcgtggccctccggtctgcgggggttcttgccggtgctctccgcccgccggttcgcgaacaccccacctatacttcgcccgtggggacggattccccaaagtgccctcagtaagccgtccggagcacgcagcgccttgcttccaacggaactagagagacggcctgggcggccgaaggccagcctcccttcagcagggccggggtcgctgccttaaaggagccctcaagtctgccaccctgtggcccataacctgtctgctgatctccagtctgcacactgttggcaaattaatctttctgagctcttgttttcatcgcgtccctctcctgctccaaagccctctgggactgcctccagtagcgcttcacaaacttcagcagcactttgggtgactcatgtgccctcgcgtttgagagacagcgcttacattgagagcttttcacattctgatctcagcccatccactcctgcccactctacccactcccaccacactacctttagaccttgtcttgaaagtctaaagtt

SEQ ID NO: 68144 - DNA, 1567 bp, Homo sapiens
cacccttggagttggcggtgtagtcgcagggcaggccggcttggcctgcgcggggcttggccgacttgccggccaccagcgggggcagcttctcgctgccgtcggcattggcgcatagcaggacgctcaggcgctgggtggcttgacgcggccgtccgtcgcctccgcacagccccgcggcctggtcgggcaggaagtcgtaccatagactggtctcggtggcgctgaacacgtcctgcgaggcgtagccctcggccaccgacggcggctgctcctcccgagcgcgccaaccagtagtgctcccgccactgccctccgagggcaccgcggccggactggcaggcgccgccggggtgcggggggcagcgtttcgcgcgcgggcgcgggccacgccgctgcaggacaccacgccgtggcgccggcggaagcggtccagccagccgttggaggcggtgaagtcgtccatgcccagctcctcggctatgcgcagcgccttctccttgaggatgatgcccttgaccggcaggccggcggcgcggatctgctggaaccaggcgatgagcaagccctcgagcttgtcgtagggagacagcttgttggtcttgcggcaggtggaggccaccccgtacttgcgctccgacgccaggatggcgcgcttgttcttcaggatcgtgctcagcgtggacggcgggatgttgaagcgccgcgcgatctcgcccttgcgcaggtccggattctcctccacctcctggatgatccgtgacttctcccggaacgtcagctgtcgcctcttggggcccatcccggcgcgccccccgccccggggcccggcgccgccgccgccgccccggggcggggggcccgggcccgtggcggggggcacctggcggcctctcccgcgcgccccgcccgagacaaagcggctcgcgggcgcggcggcggggcgacgacccggccgggccgggggcacctccggggacgccggcgggcgcgtcgccgggcggcgggcggcaggcgacgggcgcagacgagggcgggcggcgcgggcgcggaaggcaggaagtgccgcggcgcggggagctgggagcgcggcgagcggggcggagcgggcggagcgggatctcgcgggaagcgcggggacgcccggcgcctcctccccgccctccgcgcccacccccttcccgccgccgggacataccgcgggggggcgctgcggcctgctggacctgcccgtgctgcggcctccggcgacccggcagcgacgcgggcggggacgcggtgcatcgctactgcgcccggcggacagcgacttgctgctcaaaaagaataagaaccagggtttttgtttgttttttttttttttaattaaggtaaaaataacgcacttttttttttgcggaacctgaaaaattcaagaagttgaaaaacgcttttcacgtcacctggagagatgcacaggtaacattttgatacatttccttccagtcttttctctagatgcatgtcgttttctttttaaaaatttattatataaaactggcatcagactgtatagactgtatatctg

SEQ ID NO: 68145 - DNA, 1276 bp, Homo sapiens
cctggccaatatggtgaaacccccgtctctactaaaaatacaaacattagctgggcgtggtggcgcgctcctgtagtctcagctactcgggaggctgaggcagaagaatcgctggaacccgggtggcggaggttgtagtgagcagagatggccactgcactccagccgggttgacagagggagactccatcccaaaaaaaacaaaacaaaacaaaaagaaagataattggaagctgctccgcttaaaacgaatgacaaattcagcctccctggtctggtcatcaaagaaacaccaattaaataatatggtgccattggcaccaagttagccaaatcatcaatgggcgtgatacttaattcgcctctctggttgctgacaccctcctcgacccccagccgcggaaatccattcctagttccaccgtttagagcctctcctggggctgccgcgaaaattgggccggttggggtaacatctaacctggggtcccgcgaaagagcccatcagttccgcttgggggccccactgccctcccacctcctacgctgggcgcttctcctgcgaatgacgttttgctgctgctcagcgcagccagtcgcggaggcggggaggctgcgcggtcagaggcgcctggagcgagcgaatcctggcccaccgcctgcccaaccgcgtgaccttgattgagttaatgaacttcacgcctcagcgtccaggtctgtaaaatggggtgtctaacgcagaccgtacagcccagctgggtttagcaaacttccgggagccagttggagcctctccccatccctagcggtgatcccaggtgacgacatgccgcggggggtcctgcggaggccaccctagggcgttgctgctgcctttgggagtgtggagctccaaaccatgtcgcgagaggcggattttgggaggccgggatcctcgcgccagggggatgtgcgagggtgtgggataaatcttaattcctccggcccacccaaagcctggaaatccagcctccgcgcctcttgccctgcgggccccgccctcagtcccgccctcatctaacccgctaccccattggtggcgtccggcggcgcggctgctgttatttttcgaatatataaggaggtggaagtggcagctgcaactagaggcttccctggctggtgcctgagcccggcgtccctcgccccccgccctccccgcatccctctcctccctcgcgcctggccctgtggctcttcctccctccctccttccccccccccccacccctcgccc

SEQ ID NO: 68146 - DNA, 1276 bp, Homo sapiens
acacctcttgtggggctcaccacacccaacgcggactggctgagtggatgagagggtggggccctctacggagatgagatcttacctatgtaaaaccacgctccagagttcctaaaccacaaccctacctgggaagcacccagggctgagagttggtctttaaaacattcttagcctataacctcttctttaaaaatctgttgtctcttctagaacaaattattttaaaccagttcaagaaaaatgcttagtgagcattgtggtttaaagacgcatatgaaggaatttccatagtaaacagggagtggagccctgtaccgtctgggggacgatgtgtcagctctcagggtccatggttgggtttttgtttcattttctaatgtgtcaaagtccaaactagaaactgttttttttttttttttttttttcatattgggacatggtgggggaaagaatacagaaagtgccactactttcaaaccaaggtgctctgtcccctcaggtctctgcatggattcccccagccctatggacccccacatggcggagcagacgtgagtagagaagggaatgtgtacttccaagcattcagcacctgtctttaagaatcctagttctaccataaattcacccgggaggcctgggaaagcagacagaccatggggtggcttcaggatccccatggccggggggctcactgactttctcaggccttggcattctgctccctgtctcagagaaggatctgctctcatgggagccaaccgagtgtgggctcagggccagggatagtggggacagtggccactgggagagcagatactagactacagcccatgtcttgcaggaatacaagcccagcgtatgtcccgtttttctttcttgcctatacccatttttttctgtgaaatattacaatttaaaaatatgatccaactaattcaaaactttaactcactctaggccaaacaaaacacagttgcctgcagattgatttggctcttggccgatcagcaacctctgacttcgatgacactttaccctctggccagccctggtctaggccctttctgcaagggaatggagagagagttggtgggctctggcctggacagaccatccccttggctgtgggcatgggtggtgtcttccagagcacagctgttcccatccagttgttaaagcccaagcagcggggcagctgccagccattagtagggacagctgggcatctctggcctgtgctggggactgtggctttgggtttaggatagtg

SEQ ID NO: 68147 - DNA, 1013 bp, Homo sapiens
gtgtggagttcatctcttccacttccctttttcatttctctttccccttggaaggttgttccctgggtgtcagacccaagaggtgcctctcagttgccatgggaaccagaactgaatttgaaggccaaagcaggtgtggcctctgattttgggaatgaaacttcattctttgaggctcctggtcttaccaatttaactttctcccctctccctcatcccttccgttcccttcaggccttcctcctacagacagtagacggaaagcaccaagacctcaagtacatctcaccagaaacggtaaacagcgttgcgtcattttctaggcagatttgggactgtagctccattgttgaccttccctggggacaggctagggccacctgccagctgccagcctgacctgccggaaccaacccccatgacctcctacagatggtggccctattgacgggcaagttcagcaacatcgtggataagtttgtgattgtagactgcagatacccctatgaatatgaaggcgggcacatcaaggtaagatggggcaatggggagaggccctgaagatcccacctggtttaggtccttgctttgccaagagggtgaatgggtggaggacgggtgccccctctcatggggagggttcctactaagagaaggacagcgactgcacggggagggccctgactcctggacccggggctgtgcctgacctctggctcctctgacagactgcggtgaacttgcccctggaacgcgacgccgagagcttcctactgaagagccccatcgcgccctgtagcctggacaagagagtcatcctcattttccactgtgaattctcatctgagcgtgggccccgcatgtgagtcccagctccgcccagccagctagtgtctgccctggccttccctgcccaggctcacaggtgctggcaccattgagatggccaggggtgcaagtccaggtcctcctctgtcccatctgatggcctagagctgacctcagccccactt

SEQ ID NO: 68148 - DNA, 740 bp, Homo sapiens
gcgcagtgccttgcatacccaaaccaggtgggagcgttttgttgagcatgacagcctgcagcaggaatatatgtgtgcctatttgtgtggacaaaaatatttacacttagggtttggagctattcaagaggaaatgtcacagaagcagctaaaccaaggactgagcaccctctggattctgaatctcaagatgggggcagggctgtgcttgaaggccctgctgagtcatctgttagggccttggttcaataaagcactgagcaagttgagaaaccagcattgtgtcctgtggggccctgggcaagaccccagaagcccgccaatggcgggattggggtaggagacagggtcagcaaaggcaggaagagttgctggagaggtgccctcatgctcttgtcccttcttctcccaatgtcttccatctcttgggtgacactcctgccaggactttggattcaacccctccttcccctcacctggcctcccaagcacttctaggcttgcccttcctaaactcggcaccaaaaggcaagagtgacctcatcactcaaggatcatcagtggctccccattgtcctcaggataaacttaaagccagctgcagtgactcacgcctgtaatcccagcactttgggaggctgaggtgggcagatcacgaagtcaggagttcgagaccagcctggccaatatggtgaaaccccatctctactaaaaatacaaaaattagccaggcatggtgg

SEQ ID NO: 68149 - DNA, 2449 bp, Homo sapiens
cctgtagtcccagctaactgggaggctgaggcagaagaatttcttgaatctgggaggcagaggttgcagtgagctgatattgcgccactgcactccagcctgggcaacagaatgagattccgtctcaaaaaaaaaagaaaaactcctggcatggccttttgagatttgggccctcgccagcctcattccctcaagaaattgggaaagggccaatctgggagcccaggccaaacccagatctctgaggaaatcctccctgaataccactgcaggtgaccctccccccagccccccacacacaaatgggagctgtgcgatgggagggactcctttatatctgtatatataagatgctgtctttgacacagagtgcacacacatgtcaggcatgattaccactttctgggacagttcatctatgttgtgaagtaggtgatgcaatgattatccaccccgtttttcagatgggaaaatggaggctatttcctatcagaacagaaaaaggggactccagatccccatgctgagtctaaaggacacttgtgctatctctagcttgttctctcaagtttcttatgcccaagagcttggtcttcactcctggttcagagccctctgcaagggcacaataggtgggagttattggggtgtggttttggtcttggggctgggctgtgctcagggagggaagggacctcaagggttcagaagtcccctccacctagcaggcagcgatagaaaggcaaatgtttatttggtgagaggatttgcccagaaaaggggaaacagctgtgcagatccctgagaaagggagatggaggaggggagaggatgggccccgggcgccatcatgctggcatgcctgctccaccctaagtgcttagggagtcttgtgaagccaccctccctcctggtttcacagacgaaagcagcttcagaagctcacagaaggcactcacttgccccagggcacacacaagatgtaagcagagcagctatcccagccttcccaggagtatcccatccccccttacctcccatcttagtcccagagcccccaggcgggtggggctgggcagcctcacttctgctgtgagcgtcctcttcccactccgggatcaggccacgtgatgaggaggaaacatgggctgagtgtctacaatgcccaggctttgtgccaggtgctgatgtccgtggccacatctgtccccattgtaactcaccatcagagtcttagttgcagccatgggacaattagtatgctctagacacttttagatataatgtctcctaagcccacccaacaggtattcagctcattttgtgggagagatgcgggcattggtcaagccaggagacacctcttccccaagaaaaggctctggtgctgacatctctgctgaggaagcaggagcctgggcctgggcctgggaaagggggtgctgtgggcttgcctctcagtttctgactcgggaccccctctgccctggaaagttcagggggatggggcagaggtgtctcatctcccttccccccagcaagagaagctataactttcttcctggatgtgctaaagggaagtggatcaggcaggaaggcagtttaaaatcccaggctgccagccagttttaaaagttgtttagctttggccagggtggggcaggaattccagcctgcaggagttccgagcagccacgtgctgccagctcacatggttagagagctacatgaggctggcgtaagcacagagagccagttgggggaacagtagtgtctggagggaagggggaagaatcttcatccactccattgtctgaattgttcacccggtaacttttgccatgacaattttacaaattaaggttttcttttaaaattgaggaataattgacatttcatcaagggcacagatcttcagcatggagcgtagacccaagggaccaccacaaagctcaagatgtaggacatctccatcaattcaggaggctccctccgggttacccccactccagaggtaactactattttgacctctgtcacagtaatttagttttatctgttcatgagcttcctataaatgaaattatacagtcagtactcttttgtctggcttctttcacccagcacaatgattttgagattcattattttgtcctgtgtagcaggagtttgtttcttcttcattgctgcatactattccactgtatgaatatacccctactctctttcttctttttttttttttttttttgaggtggagttttgctcttgttgcccaggctggagtgcaatggcacgatctcagtccactgcaacctccgccttccaggttcaagcaattctcctgcctcagcctcccaattagctgggattccaggcccctgccaccacacccagctaattttttttttttttttgagacggagtctcacactgtcgcctgggctgg

SEQ ID NO: 68150 - DNA, 1783 bp, Homo sapiens
actctgtctccaaacaaaacaaaaacaaaaacaaaaggccaggcacggtggctcacgcctgtaatcccagcactttgggaggcctaggtgggcaggtcaccaggtcaggagatcaagaccatcctggctaacacggtgaaaccccacctctactaaaaagacaaaaaaataaatagctaggcctggtggtgggcgcctgtagtcccagctactcgggaggctgaggcaggagaatggcgtgaacccaggaggcagagcttgcagtgagccgagatcacgccactgcactctagcctgggacacagagcgagactctgtctcaaaaaaaaaaaaaaaaaaggtaaatgttaatttcactcccttaaccagaaaatgtgattgctgtatctagcaaagagatctgttagctgtcaagtgctgaacccacataccgggatgtggtggtggcaggcatttgggtgtcgcagactcagcctgttttccgactctcctatgttgaaagatgaggctatattagtcttagtcttgatttgttctcaagtcagattcttcaaaaatcaaagcgcctctttggagttcattagctgtatgttaattgccttgagtccttctgctgacaacagcccacaaccatctagaaaacatgatttctacaaagtcttgatcctggaatggagcacacagccccttctccccaggccatgatactgctggtggtgcagaacggagtttagacaaggaggtgcatggccgagagcaatctggaaacgatcagagaggccagttgcgtaatgatggagaagccgctgttttgcagccacgaaaatcatgcctggagagagaatgttccgggatgtgaaattattcacaatctattgttcaaagaagacagttgattatgggacggaaggtaagaagcgttcccaccctccccacacaggaggagtctgtgtgggtgccaaggggcgcagcgagggttgccttggccccacccagcgcttactggcacgcagaaccctgggaggactgccaggctctgagtcagcggggcctggggcagcaggaagggaggggcctcacgtggctgggcctcctctgcctcgtggggcctcctggctctcagccctgcaggcagtgcggctgtttgaaaggacaaatcacacatggcctggtcctcctggggcccagccaagactatgttcctgaaggatggctgaggggagggtgcctcctgggtcgggattgggagcactggggaaggaggtcatccaagcatagggcggggagggagctctcagggttgggtcatggaggatgagcagggatgggtttgcagggatgctatggccttccagagctccaggagaagagagctaagccagcccttgggatgactacaagaggaccgggggagacagggaaacacaaggggagtagaaggcttcagtagaagatttcagtagaggctgaaatctactgatatgtacacctccaaggacacatgtgtcacatcagaatagttgctgaatcccactgggcctctatttcctcatgtgtaaaatgggaataataaagctcctacttcacagggctgtggattagatcaaatgagctgatgtgtgcaaagcactcagaacagggcctgctgatcgggtgcagtggctcatgcctggcatcccagtgctttgggaggccaagctgagaagaccacttaaagccaggagttggagaccagcctgggcaacataggaagattctgtttcaaaaaagaacaagggcggcc

SEQ ID NO: 68151 - DNA, 2196 bp, Homo sapiens
gggaattctaggctgggggaacagtcagtgggggaggctccgaggcacatttgggggacaaggctgaagccattcacatgccaagaggtaaaggaggtgcagcttcatggtcgcggtgggggtggtagtggtggtggtggctggaggaacacatgcaagtcaggcagtgaggcccaggcaggccttgtggggcccccaaacaccaatgggccaagcctccaagttggggcttttacgtaaggctctataggggttagcgccagagtgcccctttcaggtttaaggtataaacctcttccctgttgttttgatggcctccagtcaagaagggggcttgctggtcagccctactaagcgttcgccctgggcgacactctacaaggttttactggggcccaatgaaattgacagatctgccagggacacacactgagagtccagaagcagcgttcgaatcgttctgcgccgaaccgagtgacagcattaaaccgctgcaggaacccacaaattcagaatctgcgcaaaatacacatatttgtatttaaaatccgcgcaaaatacccatgtgcctaaatacacatatttccctccaaagtcataatttccgggggtacagcccaggaatgtacatttgaactggtgccccagtgattctcacgcatgttggctagataagaactcagccgcagcccgtagctgcgcggcccggcctaggtccacccgccgcccgtcccggagcctcctaaggccgcaggcgacgcgccccgccctccggggacaactaggccccggccttttccgcagactccgcgctccgagccgcggcgccccctcgcggccgccggggtcggcagcctggggctccgctgatctagggcaacgagcgggggacgcttcgagcccgcagcgagagtgaccagcatggtccctgccggcagctcggggccggagggttttgactgcaaggccagcccacgccgagggtccaagcatcgggatatgccgccagcacctggctgctgcagcaccgcgctggacatgagcgctccgcccaacccgacggcgtcagctggcgcgcgcgcccgcgaccgacgtgcgcaggcgcccacgggccgcgcagccgccattgctctcctgccacggaggggagcgcttggtggcagtccgcgggcccggacggaaggctgaggcgacgcctcgacgacagcggaccggagctgcaggggcaacacattcagggcggggtgccccatttaggcctggctgaccggagtaagaaactacaacccccgaagtgccttgcgcctcaaggttacggaggcagtgacgtaagctgtcttgaccgctaccatttctctagtagaggcgggacgcggcggcgcggagtgatgacgcgctctgctggcggctggagggttgcggaggtcagcaattgggtgctgggctccggttctcgaagtgcctttgcgaacctgctattttaccagtttaaactgacggtctgtttagccttagctacagatacccactgactgtgtacccgccgcctttcaacccccgggccggccactgagccagccagataaccattactattatttagtttctattttgaaacagtttcaggtaactcctgtatgcacttggatgagattcacaagttgtaacctcatttgccccatttaccttattatttcctctgtttttctctctgccttttttcttccctggaccaagtgagttagttgcagatatgaaatcctgtttcctctatatttagaggcccatccgtgtttattttctaaaaacaaggacgagctcctgcattcaaaatcgggtaacattggtcaagactttttctgacccatagtccatattgaaatgtttttaaagtttttattagtgtcctaataatgccctttatggaaattatccttttgtttttctttctttttttttgagacaagagtttccctctgtcgcccaggctgaagtgcagtggtgcgatctcggctcactgcagcctcccctcccgggttcaagcgattctgtggcttcagcctctcaagtagctggggttacaaccatgcgccaccatgcccggctaatttatttttagtagagatgaggtttcaccatgttggcaggctggtctggaactcctgacctcaagtgatccgcccacctagacctccc

SEQ ID NO: 68152 - DNA, 2150 bp, Homo sapiens
attagccgggcgcagtggcatgtgcctgtaatctcagctacttgggaggctgaggcaggagaattgcttgaacccaggaggtggaggttgcagtgagccgagatcgcgccattgtactccagcctgggcgacagagcatgactctgtctcaaaaaaaaaaaaaaaaaaaaagaatagaagaccctgtgcctggaagatcgtaggtgctcagtaagtgctggcctctgccccagaaggggaagggcgaggcagatggcaggaactgcgggaggtacctgtcccaggcccttgggcgtaagaggcctctcccacgcagcacccaacccatacccagcctgcccgccagccaaccttggcgtccctgccttgcgcctacctacccagcagtcccccgcccgctcccactcccacaggcccagcgtgcacgtctccaggataggcatccttgcccctgtgacttcagcggcacccaacgtttattgggcactaactgtatgccaggccatgggggtgccggagagaacgacacgaagaccctcacccctcaaagttcccagggggaggaggggctgcttcacttgggaagcgtggggatggaattctcagccccccgatgactccgaggccggccacctgcctggtttctggccggacaccggacttcccctggaagttgctcgagactgcgcgcccccagcaaaaaatcaggtcggttctccgagcccagtctagcgcttcccgacccgcaaaccaaggcccagtgaccgtccccgctgcgcagccgcctgcgtcgccagccaaccacgcgcggccgagtagccccgcccctccacatggccaatggccgcgcgctctgcccgccccgcctcctcgctgcgggaagggtcctgggccccgggcggcggtcgccaggtctcagggccgggggtacccgaggtaagatcgcttcccgggcgttgggtcctttcggctcagcacgcacggacgcctttagggaaggtggctgcagcggcaggacggagtccgccgggacgccctgggtctggggtgcgcggggggcccaggaggggacaggacgcgcggggatccggaagagcgggccctgtcgcaagagtttcgggaacactgagggctccaggcgccgcatccagcatccggggaaaagggggtaggtggcgctgggcgtctgctcaggctgggggaaaggtagggccagaaggggacgggcagcggccgctgacctcctcctgccgcccgcgggcccagggtgacgctaaggtggggccgagcctcgaccgggtgcgcctagaggtcgagtgctgccgccctccgctgggtctggacagttctcggcggcgacaccagctcaaaacggcctccccgccctccgcggacctgggtcgcgcccaggaatccgatccaaggctgtgaggcctgtccctttgggaagggtgggtgtttatttccgggatgcactcagagcctctggacagtcaggtcggaaactttgctgtattgggaacactctgtcacctacttccttctcagttgggaaggaagtgccaagaaaacatgaaacaaaccaaaaacacgaaaaagggattctctgtatggaagccgtgaagcctcaaaaatatctaggaggacagccagcgacctgggacctgtggcagccatgtgaaagcagggttaatgtctggactaaatgttgcttccacctaagtgcaccctcagcctccctcccgccaagtgaccttgggtcctctttgggcttgaaggcaggtggctgtgtgggtctcgctgcaggggtctctgtgccctgcaaggtgtatgaccagttgcagtgaggcagcaggttttgggttcaaatcctgtgctagcctctggccagctgtgcaccttggcaacactttccctgtcacgggattggggaaggattaactgaaagaaccttaggatgtgcctgtctacaatgggccctccataaatgtgaacaaatgtgggcttcctttccttttgtttgggccacatcatcccttcccctccatctgtggctgaagctggaatgcagaagagtgcctcatctgactgccttctggtacctggctgatgccatgagaaaggaaggagaaaggggtcttttttttttt

SEQ ID NO: 68153 - DNA, 2703 bp, Homo sapiens
gcaattttcctgcctcagcttcccaagtagctgggattataggcatgggccaccacgccccgctaatacggaggcacttttaattagcccacagtccagtgaaatttgacggagtgaggaagtgacctcagagtacagaacgggatgggatccttccgggcttgggcagcctttggtagtggggatgcttggaagggtcagggtctcagtcctggaggtgaccaatttttctctccaaaagagaaaggaagatgattaaaaaaaaaatccatgctccaaagcggcagccaaatccttctatggcccccaatgcatcacccagaaaggggctccagactctcctgcaaaaggccaactctacttcccggctcccacttcccctccttcgccacaggagggtggcgaaggatttataacccacctctttctttcagttgccatggagacaagccccagtcctttcattccttctggtacctctctctccaacgcaggcggaaaggaggcggcttagcccaaacatgctgggggaggggctggcggcctcgacggcagctgcggaactaggccgagggacaaaggctaaggtcagccgcggttcaagccctttcgtctgccgacgaccagcggccagacgctgcgggagcactgctgggctggaggagggctcgagctgcgaggacggcacggagcagcggggtgggactcggggtcgccccaggagagttccgcggcccgggggggcagaggcatgcacaagtggggggcggaaggagggggtggatgaggaggctcgggcccttccacccacgcgtccattgggcggcgccgccatcactctcttctgggctacaccgccttctcttcctccgcggaacccggatcccctcctccaccaccctctccccgccccgtcacgatagcctctcattggacggaggcacggtcaatcctcctcgagttagggagccgactggacgcgaggcctttgggccgtccccagcctcgtcggattggcttcctgcgcgttggcgcaacggaagaggcggccggccgagggcgcgcctctgctctggctggactgccgcggaggaggcgagaaggaatccgacgctggggggcttgctcgggcggcagcgactgctgctgcggatgggagggggccggctcggcgcgcccatggagcgccacggcagggcttccgccacctccgtctcgtcggctggggagcaggcggccggggaccccgaagggcggcggcaggagccactgcggcgccgggcgagcagcgcgtcggtgcccgcggtcggggcctcggctgagggcacgaggcgggatcgactgggctcttacagcggccccacctcggtctcccgccagcgcgtcgaaagcctgaggaaaaagcggccgcgtaagtgttccgtggggcgccctcccggcccgccctgcccccccttccggcccaccctgtccccttccggccccgccgccgtttttcccgcgcgcggacactgtccccgcacggtggtccctcgttggtgcgtggcctgacatccggctggaggcctcgggtgctccgaaagcggtaccttcgggggcccccccgcacccattggtatgcacttcccgcttgttggagtggagggcttttccccaggacctgtcctcccttttcttagctccttgggcattctcttcctgagggtcacatgattttatcctcgagaaggcttcttttgactcatttccacctcctttcctcccaaatcctttgaatccccaatgtttgttttccgtgggtttccaaagagctgctctctaatactttaagtcccttttattcgtcaatttcgggcttactggaaaatggtgaactgccccttgagttgcaccaggcctgaaactgtattccgtgcacctctaaggtggctgcccttcttctcgtgagaatccaggtcatctctcacccacatatcccctccgttttccttctgtctatttgcaggtactcacgattcagaactgtggcattctgggcattaaggctctttgttttgaggggaaacaacatctttctgaattttgccttgggagttgcatacgctcctcccagagaatccgtttccccattttattaggtttctttttctgtgttgtgtattttctcccctttacaagtcttcaattcaggaccgctgcctggcagccattgctgctgttgaaagtatcaattgtcctgatactgtaatatgagctttacagtgtgatgccattttacatatggttggactttttggtgggtgttgccagattcctatttcaggaaattgacttgtttaaatgcagattgtgagagggagggaaaatggcaagatgtgagatttttattgaatagtcttctaccttagcccagtcacccaactgcttttttgaatcttctctgatatggatgattaaatgtagttctattttgctgtgaaaagtttgggagttttcagttcttttgtctttttccatcttcttgcaacagatttggaaaacagattcttaacctgtgccattttcagagtcagtcacctagttttgttttatttgagaagcacctgagtttgaagcaatgcaaaatatgagatccttcatggttttgtattacatcgttggaaatggatgtaaattccaaagattcagcaaataagagtatag

SEQ ID NO: 68154 - DNA, 926 bp, Homo sapiens
ggattctgtccagcactgttctacactaatggaaattttcctcctcatgcccagccatctgaaccaaggacaggttccttctcctaagaggacagaggttggattccagaaaaaaatcctggagtcatgccaagagcagagtagcaaagctccctccatccattctccatgtcacgcagactgtattcctaatgaaaaacttcccccactcacacctgtgggatggagtggagcaaagcagttgacgaggaattgaggcaggcgctcctaagatggagggaggcggagagcagggctgtggaaaagaattttccatctgacctgctactttccatagctaatttatacaatattcacaaatcttaatggactttgagtcatttctagaaaagttggacagaaagagccaaagagcagcatgcgtttctctcctataaagacactttcactttcagtttcggaagtccaaatactgaggcacacaccaacggtggacagccctgcaggagcttcctgaaactatctacaattccaagtggatcaccagcttcagaattacacagggatcttatttgggataaagtgttaaaaagtgaatgacaggcttttttttttttttttttttttttctgaagtagaaagagagatagggcaagagagagaagagatggaaggagggggagaggccaaagggtcggcattcccttcatccagccgggccagaagtatgggccattctcaaaaagccactgctctttggagccactcgagaggttcacagtggctcccttctgaggcagtggcagtgggctcacagcagctacactggaaccacagtgcacatgtggggatgtgggcagcctcctggatcactcagggacagtgtggactcagggcccactccctgctggggctctggacgggcc

SEQ ID NO: 68155 - DNA, 729 bp, Homo sapiens
agtgagaccctgtctctacaaaaaaaaaaaaaaaaaaagaaaaaaaattagcctggcatgctggtgtgtgcctgtggtcgcagctacttgggaggttgaggtgggaggattgtttgagccctggaggttaaggctgcagtgagttggagatcacaccactgcactgcagcctgggcgacagaacaagactctctctcttaaaaacaaacacacccccgccccccacaaaaccaagaacagctgaatcatcatattgatagcccatataccctaggagatatagtattttgaacaaaaatattatagagaccaagtcagagtcaaatattataaactggaggaggctataataattactattatttttcattgagtttactcccaagacgagtactgagtttcgtgttttacatattatctcatttggaacacaaaacaaacacatgaggtaggaactattattaaccacattacaaatgaagaaagagagaggttaggaaacctgctggaggtcacatagcaaaaagtgaaagagctggaattcaactccaagcagtctgatgccagagtccaggtgcaagactgcaaatatatatatatattatatatataatatatatattatacatgtaatatgtataatatatatattatatatataatatatatattatatatgtaatatgtataatatatatattatatataatatataatatgtataatata

SEQ ID NO: 68156 - DNA, 1274 bp, Homo sapiens
attaatgagtaagccgagggaagaggtctccaccccgaccactgccatgcacactgtgacaacggggcacgagacaagcgccacaaagaaaggggaggagtggacggggaccaggaaaacactgccacgccgcaccccccaaggcgcgcgcccaccgccaacgcgggggcagcgtcctcgccatcctcctcctagcctcccagctcatcccagccgcctcccacgcccggggacccgatgccagggcttgggcgagcaggacgtgcgggggcccacgcaccttccctccgtgatctccaggtgacagccccgctccgccctttgtgagggactcaccctccagtcccggggccgcgccggaccctcctccgcgtccctcctcagcctggagacaccgcctcacccctgcacaccgcgcccggccggccgaggcgccgggagagtgtgtgtgtgtgggaggctggcgcgggcccgcggtctcctcagcatcccgaacccggagcggctcggtcccccaaaccccagcccgggggcggcggccgcggcgctcccgccctcgctcgctcacttactcgggcgcgccggtggcagcggcagacgtgcgggaccgtcagcgccctgcggcgggcggcaggctgcgggcggcgagcgtccgtccggacagagcgcggcggaggtggcggcggctgactgcgcccggcggcccctcgcgaggggcgggcccgccgggggaggggcgggcgccgcgcctctcattcatgcagcgggggcggggtgagggacccggatgcccgggcagtttccccacccacctcggcggagggctcggcggcttcagagtctgcagtgcgcaggcgcggcgctccctggccaggcctggtgcggccctggccgctggctctgttcctggttagaactacgccagacaggccgggcgaggtggctcacgcctgtaatcccagcactttgggaggctgaggcgggcagatcacgaggtcaggagatcgagaccatcttggctaacgcgatgaaaccccgtctctactaaaaatacaaaaaattaaattagccgggtgtggtggcgggcgcctgtagtcccagctacttgggaggctgaggcaggagaatcgcctgaacctgggaggcggagcttgcagtgagccgagatcgtgccactgcacaccagcctgggcgacagagcgagactctgtctcaaaaaaaaaaaaaaaaaacaactactccagacagaccttctccatcgaccgtttagtatt

SEQ ID NO: 68157 - DNA, 841 bp, Homo sapiens
aggctgctggtatatagtagatgctaaataaatactggttaaataaatgaaggattgcaatgggtttgggggaagtctgaggccagggttaggggtcacaccaaggtcaggtttttaaagtataggatcccatttttggtactgaaacgtggttggggtatttaggggtctgcctattgggacaaaggtttcttggaggacatcgcacacctctcaacctgaggactccttatgggctcaggggagcagctactggctgagatttttaaagcagggtctcagtcagtgaaagcctggcttgctttccctgaagagagctatgcgcgtgcctggccatggggctcacagctgccccctggtggtcagccacagccccctgccaacccttgggcgtggtatttttccagccttaagtcaggcagcaacggcacatcctaacgcagggtccgtctggttcccgggccccaggtggcgagggaacaggaatgagggctctccggcactctccgctttgcccttggcctccttttttcatcagggaagactcaggggagggcctgcgctgtgcctctcttcagcatctgtgaagattctgccagctccccagccccgtgctctccgagggcatttttgtgcacgcagggcagattccggattccaagaacatcagtcatggaatgacctctctccggccccttggtgtgacctcactgtcttgcctcctccacctgcacgttctttgccagcctgtaggtcctatcgtggggactcctccctgacctctgccaatttgaagtgggaactcagatgagtgcctctgacttttttttttttttttttt

SEQ ID NO: 68158 - DNA, 1450 bp, Homo sapiens
ctgtatgtaaatgtatatggcagcttcagtcataatctctccaaagaggaaacaactcaaatgtccttcaattagtgaatggataaactgtggtataaccatataaaggaatactactcagcaataaaatatgaacaactaatatacacattggcatgaatgaatctcaaatacattaagctaagcgaaagaagccagactcaaaaggctacacatactgtatattttggaagaggcaaaactgtagggagggaaaataggtcagttgttttcagaggctgggggaagggaagaggtgatcacacaggggcatggaggaatattttgggggtgatgcgactcttttatatattgattctggtggtgataacataactgcgtgaatgcatcaaaacttgcagaagtatacactagaaagagtgaacattaccctatgtaaattatacctttaaaaaaagaagaaaaaaatcgaggcatcctcagggtattttataacctcactctcttcaacatggaagtaaatgatgtttattacacactcctgcaaacacatacccacaccccctccccccaccaaaaacgctgtttgttgttgagtcagatttccagaaccacttcctctagccctctctgactttttaacagacgacttttccacctactttaccaagaactggatcagatgaacacatctgacctttctctcctctgtctcaaatttcctctccttattcatgtgaaaatacaagatgacctctaagaacctccaaaagtttgcattctagtatggaaaataattttaaaaattattaaaaagtactataaactcaccagaaagtatagtgacttggtagtatgaccagacgctggcatactttgacatttcaggaccatttgaagactcttcaaccatttacagttaagtggaagaagccaatgtgaaaaggctacttattgtacgattgcaaccctaggatattctatgaagacggtaaaaagatcagtggttgccaggggctctggaggagggagggacgaatatgtagaacataggaggtttttagggcagtgaaattatgatatgtaattatgatatgatatgtaattatgatatgatatgtaattgtatgatatgtacgatatcataatgttggatacatatcattatacatttgtcaaaaactcatgcaatgtataccaagagtgaatcctaatgtcagtagagactttagttaataataatacatcaatatgggctcattaactggaacaaatgtaccacactaatgcaagatgttaaaaatagggaagattgggaggaaggtgaaggagtatatgacatctctctgtactttttactcagttttttctgtaaacctaaaactgctaaaacaaaaatttactaattaaaaaaaagtggtatagaagggttgaactttagacgtgaagt

SEQ ID NO: 68159 - DNA, 3064 bp, Homo sapiens
cttttactacatgcacacacacacatgttgggcagaagaaatcaagaattttattttggccatgttaagtttgaggtgctcaggaggtagtttgataaaaatccaagctctagcgagtgaccagggctctagacgtagattcagcagacaccacgttgaagccatggggctagcgagagtgtggggaaggggaggcagtcaggaccaagaggggccctcccacattcagaggagcattgtcccgtgaggcaggaggaaaaccgggagagtgtagggtccgagacgtctacagcagaaagccttcccagagggaggcagcggtcagtggactggatgtttctgagagattgagcgaggtggggaccatcggatttggccacgtgggaggtgctggaaaaggaagctggcctgcagtgggctgggaaggaaggagctggggatgggaaggacccacaagccttgaagaaggtttgctgtgaatatcacggaggaggggcgtggtcgctggaggcagataaggaggttagggtaaccttgttttgtttagatgagagcggctggaaaatgtgtgtatttttatgggaacagtccatgagacagggagagatggaagaaacaggagaggagggagaactgaaggaggaggggcacagtggagtgaatggcttttgctaggagcaggatgcctcccgtgtctcagaagggacagcagggtgggacagacagcccctaggacagggttgagtgatttccccagcagcgctctctctctgagagctctctggggtgtgtgcagagagcgtagtaggtgggtctaactccatcagtgattctcaaagtgagcttgatgggcgagcagcatcggcatcaccaggaaactaagaaatgcaaaccgtggggcaccaccccaaacctactggatccgaaactccgcgggcggggctcagccatctgtttttcacaagctctccaggtgattctgaaagtttgagaagcactgaactagggcgaaggagcccagcgcatgcagatgacccaaaacgtctggatgagaatggcttcagttcttcgaggaggcagaagttcatgtggtatgagctccaggggtgtcttctctcttcgccagggacagaactataagtaaaccctggaaatttccaagcatggaatgccattcagaggaactctgaatctttctaatgaaggattatttatcaagacaaacaacacacttcaatgtacctattctttttccacgcctgcatttgaatatcaggtttcacctatcttgatctttgctcctgccagcagtgatttgaaaggaccctggactctgtctccctgggtcacctctttcagggttgtcccgaagaccttcttgtggcctggtccatctttccacatggctcaattccagttttcatttctgttgggaaatagcagtgacctggcttggccattctctgtgggaggcctttttcttctctgctgaaataaagacaaagatgactcagcctctcccaacctccaggatttcccagtccttccagtgactcagaggatggtctatttaatgggtaactaacagctcctcccaggaagttggcggccccagcctccccctacctgagtcaccagctctgggatgctcccatcaaggcacagttaccttcgagaccaggggaggcaaaccaagaaagatcagcaataagtggatcaggaaagaggacagaagctgaaaggctagatttgttcctcatttgctggcggccttgggtggaccaatggagggctcagtgtccctatttgaaaatggagaaattgtgtatcctctgatatcatagctgccccaaaggagagaagataagcccagccctctggaacttttctgtgcaaaaggaagggaaccctgggggtgggtttatccttgaggatttctaggacaagctgtagcaggggcagggcatagcaggagagtggaggaaggtggggtgaggggcaggaggtcagatatggggtgggctggccaggggcagggccggagcgataagtgggaggcagggaagcttggcgaggagcaggacctggagggcgcagggcacctggtgggaacagtagcccaagaccttggttttgtgatgtcctcaattttgccctgctttcttctccctgactccttcactacttctttgcctttgctcttctccattcctctcctcccccttctcttttctctcctccttccctctctcttgcatcactgagagcatggaggcagccttcccatgggttgagcgtttccttcctgtttagatagtgagtggcatctgcttttggagcagccatcggtccatcctgtttacttgttgctgacccagtgggttgtggccagcgaggccatccaccaggacccccacagggtggagtgggaaccagggcgctgacacacacacaggcatacacatagccatgaccaggtcaggctgccctactggagttgatgtttgggatgctgtgggattggcagctgggccgaggtcatctcctgtgctgttgacacggatgccccagcctgcctggcatggctcagggctcggaaaagatctgactgaggctgagcacgcggcctgcagctgctcacagggtcaggggaggagtaagaagcagaaagggagatgccggaggggcgacattaggaggcaccttgtccggtggtgctgtgattcctcatgaaggagttagagccagacaagataaagggcttacaggacgggtgcccttcaccacaccgcctccctgttccacctcccctgaccgggcccttccttaattcatgtgatttgagatgcactcctttgcttttcttgatttctctaaatgctgtgcagtggctactgttcagggtgacgctggaaactgacaaagtttccaggggccggtggtatgggctggggaagggggcaggcctgtgagaggacagatggtggaggcgatggcatttaagtagaaagttggaggaacctgaggcaaaaaaaaaagtgcttgaaaggctaggtgtggtgcc

SEQ ID NO: 68160 - DNA, 1883 bp, Homo sapiens
gtgatccacccgcctcggcctcccaaagtgtggggattacaggcatgagccaccgcgcccggccttatttaataaactctttggagtaggtactatttattaaccctgttttacaaatgaagaaactgaagcaaagagattaagcttacctaaggctacttaggggcagaattcaaatccaggagatataattctgagagctaacaaatattctgctctccttggtgacccaggaggattcacagaggaggttgtgacatgtagactaacatttaaccccaagagggcatagggatttgtggggaggggtgaggagaagaggcttccaggggatggaatagcttgggcaatgacaaggctttttctgctgagaggaaacctcacctgaaattcacttgtcccagtcctgaagcctgtccccaagcggttccctcttggaggggagcatcaaaccccatttctccagggccacctctaccctcctggcttctggacctctgccgccgccctgtgctacacgccggggcctgtcccgctgtgggtcccctgcgggaggggggcccctgctagggagggagggggtgcgggcccagatgtgggcgtgggacccgggtttccgaggcagggatccagcagtctccggcttcaggggcttctagcttcccggctcccggcggggcgggcccggggaggagctcggcgggtccccgcccagaggcggagcggagggccgggccggagcggggtgggtaggggacgcgaggcggagcggggccccacacaggccgcggcggctggctcgggcccctacggtcccggcggcggctggaggaggaagccaggcggctggcggaggaggagagacggaggaggccgagaccggagcgccgctcgccgcagacttacttccccggctcagcagggaaaggtacggtgcgcccgctctccggccccgggccccggctctcagcctcccccgggcgcaggcaggggctgcggccgccgcgagagggtgaggggcccggagcggtccccgagggctcggccggcccggggcttgggcggccagcgcggcgctcgggcgctcgggcgggggtgcggggcgttccgggaggctcgcggggagcagggggcgccgcgcccccctggcttccgccggggtaagcagtggtgtgggccggggtggcggcgatcccggcgccagggctgctcggcccgggccgggcgccgggggtagagggccggacggacccccgggctacgtgcgggaggggagcgtcccgggcgccctgcaggcgcgctccgtgggcgcagacaaagccgggcgcggacgccccgcgacgactcgggctgccgggagggtgggcaccggggagaggacagaaggctcccgggtgatggcccgaacgccaggagaggctgtgctgacttccccctctgggctccgggcgtccgggtggtccccttggggccccgggcagggtgaggagcagctttctcttaagggccaactaggggctcacgggttgtcccgggcttggcgggagccgggctcgcaaagggttcgggtgtgttggagggctcactttgtgggaggggctgagggaagccactgccctggggtaggggcgagggctcctttagagcagttgaggggcccgcggagcttgcgccagggggacttggcccgatgagatacgctcggtgcccggcacgtatagtgagaggtgcccacaggttgtttgcagaacctgctgttggtggcacatcacgtaccagtctgtgggggcaacttggccgtgattggagccagcagtaggtgccctggggttaccgggagcgacgcgggccggggtgccatgcatccgaaagtgtgtgcagtg

SEQ ID NO: 68161 - DNA, 2130 bp, Homo sapiens
ggcactcctaggcattgcctgcttggggacatggagaataacctcaaggcgtgggtgcaggcgctgggcaagaggctcacacccccactttgccatggaagcaggagcaagaaggcaagtgtctgttgcccgccctcctcctcttccctgcctggctgagccagcacttttttcttctctcctttatctgctcagaaagtacagggtgttctgtttctcctgtgcatacagatcaaggagcggatgttatttctttctttctttccccaaggcgagagaaggacagggcaggcaccgagtaccatttaagtgattctccttcctcagtaaggcagtttctcatacattaaaacaaaacaaaacaaaacccagaagggaaaggaaacgatgacacaaaccaacagaaaacaagttgccccttagtgcccccactccccagcaggcatttagcacacagtaggtgtcctggctatgttctctctctccctttcagttggaccacagggtgtgctggctccatgggatgatatcagggccacaggacggactcatttctctgccctctgtgggctgtgtagggggctcctctggcttcctggaggcattggggattgacaggcttatctgggacagggcctgaggagggacaggaccgtgggattagctgtgagggtcagaatgcaggggactcacgtggcccctgcttacttgcgtgtcattccatgtgcgatgtctgtttgagttcaaagtctctgagaccaggtgcagggagctgggggttctttctgtgctgatcttggaggcagagtggctgcctgcattcattccacggtccattccacagcttgttccaaagacagtctgctcatgatgtagcttctgcacttgacaaattattttcatgcacgaggcccttgaaaatgttgacagtcttgtgacatccatggagggccttatttgacggtcacaaaggagcggtgaggacaagcgggccatgcatggctctgggagcagggaaggcaggtagctggctgggacggccctgctggcaccgagcgctgttcccctatcctggcttcccaacgctggagcttatctggtcccctggttttcagaggtggtgctccagggagcctggggtgagggggacccccagtttaatacctgctacaccctgacccccatagcagctttttaagaaggggttccaccagtaaggcgtgagagccactgcagccatccctttccgtagtggataggagactgtgtgtggggtggcctggggcagacccgccgggcgggttgcggcgccacgtcagtccagggtgcccagggtggcggcgtccccgtcgcagctggcgcggcccctccggagcacgccgcgtgtttaccgacctgacgcagcgtcccggcccggctggcagacatccggcggcatcgccgctgaccctccccgcccgccccgtgcaggcggccacatcctcacctctaaatttagtttgcaggaaggagaacctggggtagggtgggggaggactggagccagccctgatccgtgtcctctcgggagggaggcaggacctagcatctctggggcgagggaggagagggacgggagtcagaggacagaggcggggaggaggaaagggccggagccgccctgctcccggcgtggcctcatccccagcgaaagcgcgacacccgctgtctgggaaggggagcgggagcccttgcctccgaactggacgctgcccggatgtggctccgggtctcgggcgccacctaccggcccttttgggaaccgattctgcacggagttggcgggcctgggtctcagggggacttggagggattttaggggctggagggtgggtgggtgggagggggggtggtggagggaggattcccgtccaggcccaggcatcgcgggggcaggtgcaatgggcgggggaggcacaaagagcagcttctcagcctaagcgtatttcggaaaaagcctcctttgttcacccatgtcacttaagggatgttaaggacgctgcggttccaagtgggatagaaacctcagtggtcagaccctgaaatgcatggagaagaaagtcagtgtggcagcctttgacggattgattg

SEQ ID NO: 68162 - DNA, 2058 bp, Homo sapiens
caattttttttattttttgtagaaatggggtctcactatgttgctcactctggtctcaaactcctgagctcaagcaatcttcctgccttggcctctgaaagtgctgggattacaggcctgagccactgcacctggctgtcaacattcttaaatctctttccttacatgcttcctaaacctctcacccaaaactaggagactagatgtcctattttccccagggcatgcctggtttacgcccatttcactttaaaagtgcccaatttgggtaataatttataagatccccctccctctaaatcctgtccttctatcacttcatccttcgctctcctttaaaatgagacagttgtcagcaggaatcctgcgcaagaacacaccaccctgtttcatagaagatatctcaggtaatgtgcaaacacgggtttttaaacggagcgcatttttctcatttgttaatatcaccacctaaatcatctcttgcctaaaacaaggagtagaaagtgaatgaaggaaggaacaggtgatggtcagtgtcctttctacgcctcaaaatttaagagtttatgtgaaaattcataaatattaatctcaatccaggttaagcaaaattttttgctctcctctttagaaatttctggttgccaaagttccagaaattgcttcctcattcctgagcctttcattttctcgatttctccattatgtaacggggagctggagctttgggccgaatttccaattaaagatgatttttacagtcaatgagccacgtcagggagcgatggcacccgcaggcggtatcaactgatgcaagtgttcaagcgaatctcaactcgttttttccggtgactcattcccggccctgcttggcagcgctgcaccctttaacttaaacctcggccggccgcccgccgggggcacagagtgtgcgccgggccgcgcggcaattggtccccgcgccgacctccgcccgcgagcgccgccgcttcccttccccgccccgcgtccctccccctcggccccgcgcgtcgcctgtcctccgagccagtcgctgacagccgcggcgccgcgagcttctcctctcctcacgaccgaggcaggtaaacgcccggggtgggaggaacgcgggcgggggcaggggagccgcgggggccgagtgaggaccccgggcctcgggtcccaggcgcaagggtgcccggccgggcggggtcgggaccccagtgaggaggggccgggggctgccccgcgggcgcgtgacgcgtctcgggcctgcccggctgcgctggtctccgctcgggtgaggcggcttggcttcgcttttcaggttaggaaagctccctttactgcgcgttggggggctgggggagctggcggagccccgttagggaggtcggtggcgccggggtgtctcagcgccccctgcaccccgcgcgggtccggcccagcgggcgatcgctggcgcccagggaactccgggagggccgccagcgggctccgcagggcgcggggcggggaggggcgcctgggggccgcggggctcgcgctccccgcccgttggccgcccctcggaggccgagatcggggcccagaacgccccttggcaaggcctggcgcttccgcgatgcccagagggtgcttggggggatggagagaggggcgcccgccgggggagttccgggagcctcggtgcctcccgccgcagctgcagcgttcctcccgggaggcggcccagcccttcatcctcgccgcctgagcttctccgaggggggctgcagccttgcggccgttgccaccgcctggagaagcggcccacgcggactgacgggcgggggcggggcctcgggcctcggcgggggcggggtccggggaggccccaccctctgttctccaggggcggggagagaggagctgcaggtctgcggcctggccccaggtgcgatggcggaccccagcttggccagtcacattcctcccagtccccctggagggagaacgctggccatggggggctccaaggaacaaccagcctcggatgacgacccttgggtcaccggt

SEQ ID NO: 68163 - DNA, 737 bp, Homo sapiens
tcaaggaacatctgtattataaaatgcagacactcctaagcctagaaaaaaagctcacatattcattcattcaacaaattgtggttgtatcccaggcaatgagaatgcagtcctgcctccctgcaggagctcagtccagactgagtgccccgccaaggaattccgctgttacacaggaggcagtcagtagccacaaagaaatgccaagaacaggagtgccacaatcagatgctagcactggacagccattctgggtgcagcaggagagtggatgggtggggtaaaggaatgaccctttggcacacgaggagacaggagctgggcaaaggtgttaacagtggtctgggaaagacagtcagcttcaggagagagcaatgatgtggacttaatgccccctgaagattgtctggatgggagctctgtggtgagtacagcggggagatgccatcacagcacagcagggggcacgggagtaaagtgtccaggctgggtttctcagctgggaagctgggtggatggaggtgccagtcccaaagagactggcaggaggtaggggtggaatgtttgtaagccaattcaaaatgtgtttgacccacagaaatcatccaaaaaaggaaggtttactttgccaggctagtccaggaagtttatttaactgtaaatactactgacctagaaaacctatgatttgcacaggtccagctgtctgtccctggggacctcagagcccagcttcc

SEQ ID NO: 68164 - DNA, 2524 bp, Homo sapiens
tgagccatgatgatgacactgcacttcagcctgaatgatagagcaagactctgtcaaaaaaaaaaaaaaaaaggatggaaactcatggatttttgtctgtctgttcattgctgttctctagagcccagacctgtgagtggcacacagttcctatttttaaaaggacaaattaatgaatggcttgcaggtcctgtatgatcactgtctgacctcacattctatttctcactattcccctccctgatttatttttcttcacagaattagtgaccagctgccacaagattgacgtatttgcttgtttctttactgtttttctcctcccaccatcactaggaggccaattccaggacagagcctcacgcaaagcaggtgcccaataaccatctgctgaatggaagaattcctttcctccgcactttccaggtcaggtcactgtcggctcacacctggactgcgtaagcaccctaacttgccttcctatctccagacccttcctgccccggcacccaccgcaggaatttcctaccccaaaacgagcaaatttactatgacctctcctcagcatccctgctgctcatctccacctccactgtactctgcactaaacttgcgccccaagcaggacactgccatgcacaccctcagctgagaggccttcagtctccctcctcttgacctactatacctagacattttttaggagttccatgttatctcccctgggaaccttcatctgaccggcaaggcccaccctacaacacgactgggcaagggtctcacgtggacactatcacagcacccgtgcagaattcaaaccctaacactgatggtatgctggctgtcttgccatatgtcccccactgggctgtaagcagctggttaccaggtatgtgcaccagacacatttaatcaatggaggaacgtgaggctgtgggctcttcccattacatgttctgaagaacacacaccaaggtaagatgagaagtggtcggttcttatgaacacccaggagtatttctcccactctctggtaagactaaacctcataaagttactcgtcggtccatgccgctaatatctccagacagaataatctactcttgatacccaaatattctcacaaaggctgttaaaagaaataaaagcttaaggaagcttaaacgctttccctgactctgaatgatgacgcactgaaacaacaggctgtgtgtgtcacagccgtgcctgtgccaacaggaagtttgggctgttaactgggcttccaggtttaggtggtccaagaactgctgagcaaacacacagcctttttctggccgtgcttcctgtctgtactttgggatcaatgtccctagggtacgatcgttcatcagaattttttttgctttttttttttttttttttttcctgattcctgtttcttgccatgggcattcacccctatttacgcatttcctagctggctttaaaacataagaatttgcctaactagagtcctgtgggataagaagaagatcttttgctatgttccccctatttgatatcaactctgaccacatgatctaatttccatgagtcctggggcctggcacatctcttgttcttactttgacctagtggacattctacttctaagtatggatttgttctttttctttgtaaaatgtttgtgtgggtgttttgttttattttgtttaaagatctgggaagcactcatccaacacaggatgcctaagagaatctctaaagataagatccttatcagccacacaccccacctccctttccaggagacaccccacaagcctggttctcagcaacggccagatttggttactggtgcccaaccacgctgcactccagcacacctttctctagatgccttaacagctgacagcctaaagcccagctttggattctgaggcaaatgagaaaataagagccaacatttcagcctcgcaaggccctaaccagcaagcagagatgggctagccactagccacgtgtggctatggagtacttgacgagtgcaactaacgaagtgaatttcaggttttattgaatagtatttaatttaaatgtaaacgtcacatgtgactagcagccatgatgctggacagtacagatccagacaaaaagataaaacccagagctgccatgctggctattcttcaatatttacatttgcaaaggccagaatgaaacaaggcactagcatgcagcaatgtcctggcatgatcctccctgtcactcatgtgtgggtatacccaacggtgagaccctcaaccctatcttcctctgccagctctgcctgccagcagcaccctctcacacgggtcagtcaccacccacatgagccatcacagtgagtctttacagctctcctgatctctatgtgtgtcaagtcccacacccccactgcctgcaggctctaggagcaccgcagttcaaatccacaacttctcaaataaaacccatcatcttccatcttccccaccctccaaacttatggttttccctagac

SEQ ID NO: 68165 - DNA, 1727 bp, Homo sapiens
gtcgcccaggctggagtgcggcggcacgatcttggctcactgcaacctgcacctcccaggttcaagcaattctccctataggcacgtgtcaccatgcccagctaattttttgtatttttagtagagacggggtttcaccttgttagccaggatggtctcgatctccctgacctcatgatccgcccaccttggcctcccaaagtgctgggattacaggcgtgagccaccacgcctggcctatctatttttttaattacaaataaattttacgccctctttatctccaatcccccagagtggggcctatctaaagcaagcttgtccagctctcggcccaggacagctgtgaatgcagcccaacacaaattcgtaactttcttaaaacatttgagattttttgcgatttttttaaagctcatcagctatcattagtgatagagtattttatgtgtggcccagggaagccaaaagattggacacccttgatctaaagtatttttatttcagataaggacaggccactgaacacatgactgagattccagccctgactgtgccattaatgatgggaggagatttaattttggggatgatttaaccccctccaagtatcacatcacttctaaaatattgtcttttatgaaaacacaaacatatccccctcagccagagaatctctaactaagccacagggagcgaaaagcagttctcatataaccctgataggaaaacttttggaatttgttcggacagttccacacagaccatctgcagtgattgcctcatagcctctgtgggtagagatgtacgtagacagttgcccttatgcaaggcagcatgaggtgagagaagggcaggaagttgggggagtgcttatctgatcacttgttttcttaatgaactaagaagcagaggtcatggctgagagtaaaaaggctgggaatgggattggacagaagtgactatggaagaagaaaaacgatgagaaaaatgatattattttaaaaaaaaaaatcaaagtccagctgagcccagaactcataatatgaaatagagaaagtcaccttgttatctggtttctctccagcagagttcaaccacccccgccccaaaaaaacagaatagttaagaccagggcactgagggagcttgacaagttctggagacagctcagagagggaggagaccatgttagtaagatggcagccacgtgatttcctgtggcgtccatagcaggtaaaaaggactggggaggcaagaggaagccagagagcaccacagagctggagcaccaggaccaatgaaggggaggaatgagagctagggaggacagggtgtgtagacacactcccagctcaggatcccaaagtgctgtctgggagacgactgggccttggagagctgatataaactggaagtaaaactacctgcaaaaggtaaaaggtcagtgaggtcccgtggccggataagccaatgactgagagatgatgctagaagacacagtggaaagaaatgtggcaggccaggagccaacattcaaggggcataaagaaaggtcaagaagttgctagatggcctggcgcagtggttcacacctgtaatcccagcactttgggaggtcgaggcaatggatcacctgaggtcaggagttcgagatcagccttgccaacatggtaaaaccccatctctactaaaaatacaaaattagccgggtgtggtggcatgca

SEQ ID NO: 68166 - DNA, 1719 bp, Homo sapiens
gtggataccagggaaagagaaaatgctatttcagtgcacacaaccagggtaatcataagatcacatcctatggatgtgtaaacttttgatagttttacacacacacacacacacacacacacacacacacacacacacacacaggcatggccatctttatccaaacatcaaagacaaccctattattaatatcctacacagtcagctgggcagattacatgatggggagcaggtgccataacctaattttccacacacagaactgagaggagggaaggaagcagatataaaagagaccaaagcagaaatccagaagcagaatccagtgctaacgagaagcacaagatgaaaggtcagaagggctggaggcaggggctctttgagggaagcccagaaccagtacaagaaatctaaataaacacagggcccatccaaaggtaaacattactcaaatccagaaaggctttattgctattgatctgcaagttccagtttatggcaaacctaaaacaaaataatatgtgtatttaaaaaggattatcattagaagtcatgggacaaatttattgatgagttttttttttaacaccatacagaaaaatcagcaaacaacttagacaatttataaacagctggtcttaatccaacactaacatgttgatttttcaaaataaccagttgaaaaggccagacttgttctaatttgcttggaatctctttcatagtaactgttacacaactgttccatcttccttccttaccttcttatgtaagctctgtaatcaccatcagtgtttacataggtttgtgaaaccacccaatttctccagtaaatatttaattctctttgctactgatcaaaccataagcaacacaacatttttatacgacatgtttggtaatgagaaaatgagacattgacgtcaacagcacaaagtctataaaccaaaaacaccaggatttcccgatacataggcctcttggaaatcaggcaccaataaaatagaaaattctcttcactgctccaagtgtttgatccagtttataactgagttccgcagcatctgtggtggttctagcaaatgctaaaatacccttcaaccagaaccatgcacccagtctgcaggcttcaggcaccaagcagaatgggtgttctcagctatgaaagccaggcactcaacaatcacctgtatgttattaatgacaaaaacgaaaggtacgagcaagcctcctcttttctcagtttagtaagaccgtgatattttaggatctgtactgatcatctcaaggcaaatggaatgacaccaaccatccaactagatccctgactgcccttggtgggctggagcaaggagatggagatacattatgctgaggctctttcccatctgattgtacagtccggacacctagcaaatcagagaaaacacatacaaccatagagctgggcaggagagctcaaggacactggaactccaggctggaagttgtcaggaatgacttttaggaagtgagattagggttagccttgaaagatggcgggaatcccaagagagatgccactacggaggtccagaggtaggtggcatatgatgcgtcttttgggcgctgaacacaacagcctaaccccagcacctggaggtcagaggacagggaggcaaaggaagaaaaccctttgtggagtcaaagtagccttgaaaagcaaactcaacacagaac

SEQ ID NO: 68167 - DNA, 1574 bp, Homo sapiens
ggattacaggcacaagccactatgccaagccttaagctatgtttatcagaaatttgcaatgtcagaagggaggcacaaaggtgacatccatcaatgtctagtcaagaggaataatgaaaagaacatgagaaaagaaaacaagagagacactttaaaagaatggcttactttcagttaagttataataacaaatacagttccttgaaaaatacaggttgtacaatatgtgtggttatgatttcacttttattaaaaggataattacatagtatgcatttgtgtacacagaacagggctggcaaggatacagatcaaactgctttgaagtggtggggggacataagaaaagatcgtgtgaccttctcaatttactaaacacaagtctgacaagctagaattatttttcaacatgtgtatgcttcttttgcaaatcctttaaaaaactattaattaaaaacggctccatgagggcaaagtgcaaattaacagaatgtcatttttagctacaaatcattggaaaattctgaatggggaagcgaaagtactatgactccttaaagacatgtttttggagagtatttttctaagctgagtggcaagatggctggaaggacttaactactgcacagaacaagtactgagaccaaaccacagaactgggtcagaggttttaatactgggaacatgcaaatacatttttgagaaaggaatctctgaggaaggagttaagaaggaatcacgatacaaacaaaaacaagactgagctatcagtaagcaaccttgaacttctggcagagcgctccgctgaatgcccctcccattcgtgggttccaccgcactctggaaacatgaaaactgtcctttgcacgcaaggctacggggctgagatcaaagcctgggcgctgcggcaggtcagaggaaacatcacttgggacacactcatggccacatgactttcccccatcaaggcccgctgaactctcaagaatctgttcacagtgcttctgttgcttcttaattaggatgtgcaaaagtacatactacatgctgtggtttccagacactgacttcatacagaaaacattcaacaaaaaactggggaagaaatactacagaattgccatctgtgtatcttactatgttatttaacatctaccactgactcaacatcatttccttaaaaagggatgttaactcttcaaaagcaggaaggagagaatgccagggccagtatcataacaggccagaacctttgaacagccaaatcattctatcaattcagtagatgccaaaaaggctgacaaaacacttcctcctgatttaaaaagcaaaaaccagccaggcgcggtggtttatgcctgtaatcccagcactttgggaggctgaggtgggtggatcacctgaggtcaggagttggtcagcctgaccaacatggagaaactccatctctactaaaaatacaaaattagccaggcatggtggcgcatgcctgtaattccagctactcgggaaggctgaggcaggagaatcgcttgaacccaggaggcggaggttgcggtgagccgagatcgcgc

SEQ ID NO: 68168 - DNA, 2067 bp, Homo sapiens
tgtcttaaaaaatcaccctccactctaagcaaagaaaccaaaagagaaatgccttggtattaaaagaaagaagctggttgccattttggcaaaggaaatagcctagaaagcagatacctcatgctcaggatgtcacatggaacaggctggacacacctgctgcctccctttaactagcaggtgtgccatgagagcttacactgggcacacccactggtgcccaaaagccattaaattggggatgaatgaaaagagaacagtagtaatacgttcataagtgaccctgatagagccaaccataacccagcacagaattctgattttttgagctgaaaagggccctttatacatctcaccaggttcaaacaccttcaggggaggcaggcaacgtcacctgcaacggtgaaaaaggcaggtgtagacaaccagaaacggtgaggcccaaacccaacagcattcaaatacaaaagcataaaataaaaatgctccagccaccccaattccagccttttgcttcagagaggacgaagccggctgagggaggtcacatggccaattagtgacagctcaaaccagactgcctccggactcccagtcccatgtcctcgcacatcccggggccttctctgcgcgcagatgacccaattgtcagcagggactgcatcttcccccgcccgtctcccagcactgcaagaatagaagtagcacctactacaaacgctgcagacccagaaagcccttatgggtgactttcttccacctgcagttgccctcatttaccctttgccctgacaatcgataatttcccatcagtcacgcttaaacccccagcctgcaggccgacatcctatcagccacccatccaagggggggcatctaggaccaaacgaaggagaaaatcctgcgccttaaagtagtcacactcgaaatgtcattttttccccccgaaaggtggcaaggagggggactcgcgaccccccagggaacaggccagaaaggccccggggtcggaggagctgcttctaaaattacttcgcgcagtctttgtagaagggaagaaagcaagaatgtaaaaggcaccctcttgccgcccctcctgatgcccctgaattccagggggcgagacgatgcccgtgcgcaccaccgggggaggggcgagggaagcgaccccaggacgcgcgggcgcagagcccgggaggaggcggcggcagccagtggggttctgggggcgccccatttgcctccccgctgcgcggcctgagggcccgagcgcgctgtggctcccgtggcgggaaggggtgggtaccccgggggcccggcccggccggcagaacggcaggagctgagggccgccgggcatcttgggccccggggccagggtggccggcgggcgcggggtcccgggagatgggtcggggtgggggcgcgcaggccgcgccgcggggccggtgggtgacagcgcgcgggggccgtgccaggccggcctcgtgggcgcggcgagcacctcgcggccccgccggcaggtgcggcccgcaggccgggcagggggcgcggcggccgggctctcacctggctgcagctcgcgtggttcccgtcctgccgccgcgcctcggcgccgcagtgcccgctgcagcctccgcctccggtccccgcgacagccgcctgcaaaatggcgccgcggaggggcgggccgggggcggggtgcagcggagccgcccgcccccgcgccggtctggggcccacctccctccccgcccccgacccctgccctcgggcctccccccggggaggggctgctccctggcacccggcagcgctccccggaacatcccgggcctcgcacccagccgtccccttcccgttcctttcatttccctcccctgcgcagaaagatcgccccccttcgcgacccttcccaccagtcacacctgttcctggggacccacctggcaagcagagcgctggtccctgagtgtcctggtccaggtcccccctttttaccccgcctgccaccgagccctgtcattgctcgagcgtgataagcaagcagtttgtggtgcattgggc

SEQ ID NO: 68169 - DNA, 1579 bp, Homo sapiens
tcacttgagcttaggagtttgagaccagcctgggccaacaaagtgagatctcatctctattaaaaaaacaaaaaccaaaaagatatctttttttttccatgaatgaaatgcaaatatccaataagcacatgaaaagatgaaaaatataggaaggcaggtttagtctcattataaagactaacttcctcagccaggtgtggtggctctcacctgtgatcccagcactttgggaggccgaggtgggaaagatcacctgagctcgagtttgagaacagcctaggcaacatggcaagaccccatctctcaaaaaaaaaaagattaacttcccaatgcattgaaataacccatgagtatcatgaactctgtcacaaggaagggacaccagaggctcagatgttggctgagaggtgaccaattgtcaggagcaggggcactggtgatcttaggggatgggaacagagaaatctctgtttctgtgatttccatgatccatttccctgagctgcttgttttcaccaatggtccttgttgttatgggcagcaaagtccctctaatgatctctttgaggctagccagcaggggagaagtggctgtgagtggggcctattttcctggcttgcaggaagccagggggccagagcagaggccccctactgcccttcactcctcactaccaccagcttcccaggtgtcctggacgcatgtgggatgcctctgagataaccgggttaaggccagggcctgtctaacgcctgggctctggagcaggacccgggttctgtgggagctcatatgaaggacaggaagtgaccagtccacagactggaccaaaggtctgtgactcactggttgtatgtagtagggatcacgcccctgccatgccaaacaccaaaactgtaggtcagattggagttgtactggagtaataccatgacgaggagtgggctgcactggagacccccgtccctggaatgaccggggaagcaggggctgatgtgaggaagggtggagaggggctgcggtgatggcgaaggaggccacaagttcccggttttggcatgctgctcaggccttcgcctccccatgctggctgtattctacccgcacacccatattggcccagactgggaaacctcacagctttgctaagtcatggtcaggttagtcaaggccagtaaaccacgtgggtgatgcatcattgccaccctggcacgcctccttccagaccaggctgggactggctctccacatcccagggcctggccttgggcttctctgccagctggtcagggtgagtcactcttctttggaggatgctgccttcctctaatgttggacatgaagggcttttttgtcctcctagagttctggagcatcccagaaaaggcaaaactagggagcagaggaaagagaacattttttaaaaaacaaaaatgttgcctgggcgcggtggctcacgcctgtaatcccagcactttgggaggctgaggtgtgaggatcatctgaagtcaggagtttgagaccagcctggccaacatggtgaaaccccgtttctactaaaagtacaaaaaaattagc

SEQ ID NO: 68170 - DNA, 1079 bp, Homo sapiens
tccagtctcagtcttgtcccttgggaagctgtggggtgtcaattatgcctcagggttatccttcttcaaagcaagagatctggactttcttcctcccacactatcaccctggtaaatataaaatcccagcgcttacacaacagctccaaaaactccagaaagactctcctgaacgtcacaggtgtgggaaagaaccaggaaggttctgaaggtggggcacacaaagacaatgagagagaatgtggacacagggagccctagttgaagcagcctggaggttctgcatttttcctgccctggggcttggctttggtggctcacactgagggaacttcactgtgtatcctggcttggtgccactggctgggactccagggtgtggtcagagctgctggagggcaggaccagagccagggcctggctgaggcctggcaccagggactgtacaggcgaggctgcctgggccctggatgaagagcagtgatgtgaggtgccagctcagacgccagagataggaaagcccaaaggctagcctaaggcttgggtagtgggagttgatgcaacaaagtgggggagactgaacaacggcttcctctctcttcctttcactcttagactgtcctccttgaagggaatcagattatgccaccccaaaatatgccacattggcacaagaattattttgagctgaagccaattaagaaatagcagacaccggaagaactctctgcctgtgttactgtgtttgcaggaatacctgaagctgggaatttataaagaatagaggtgtatttggctcacagttctgcaagctctacaggaagcatggcatcagccagggctcagcttctggtgaggactcagggagctgccactcatggtggaaggtgaagcaggagcaggcatgtcacatggtgggaacaagcaaggcgggggaggggccacacttttgcacaaccagatcttgcctgaactcagagcaagagctcactcattaccatgagatggcaccaagccatttatgggggatctgcccccatgacccgaacacctcccaccaggcccctcctccaacactg

SEQ ID NO: 68171 - DNA, 2012 bp, Homo sapiens
gagccagcgcgcccggcctaactgttttacgtggcttgcagtcaatgtaaaataactagcataattaaataattggtgctaaatattaatatccgtttttattgattacatcctggtctagaaatcaagtatttaaaaattagcataatgttaatctctatacttttcaaaaaagattggatcaaactgtgtcaaatagtaggtttttagtgttgtgatcccggctgcatttaattctataaaacaaagttcaaactaccagtatgtgtggtttttgagggcatttaaccacatctaacttgcaattagacttttttttaaagtacgtcccctgacattaactgttcatacatccgcatcaaaacaatacatcgcaggggcgtgagggagaggggagacgaatgtttactcttggcaaagaggattctaaaagacgggaaaaataaaaacgagcattttcaaagtatcagtcttcgttgccaacaggctttttaccagctcaccgctacccccaaactccctcagcacctgaatgttacgagagttctaaaagcatcataaaacgtttggcacacagtgcctggcattacgcgcctctacatacgttattctcctacccgtcttcagaccttgccagggagagaaataagaaccgacgcgaatttagacgtaaaacaaacaaaacgggcttctggaaagaggccaactgtgccaggggggacgaatgccccacacggatgactcggagcttgatttcggcggggagcgcggtctcggacacgcccagagcccgagaggacggttctgtccccgccctgccgcacacacgccttaccggagcgccgcgccaggccgcccgcacacccagagctcgcccacggttggcagcgcccaaggttgcatggcatggcccgcttaagtgccactcagccggccccaggcgggatcagtgcgccggaagtggcgtgccggaaacaggcgcgtcggaagttgcgtctccggaagcgtttgtctctttacccagcttcccgggctaacccttaccgagtgtcacctgcaggaggcaccgggactccggggctgcacggcccgaatgcttcttcgtgggttttgtttaagcagccgcgacctgtgcctgccgccggctacctccgctgtggcgggcgagcacctagggtcctcacctacctgggtcacagtcaggtccagggcaagccggctacgtggtttctcccctcctcagtacaggggccaggctagagaccgccgtggcttcccagggaggcagaagccgagtccgtcgagcctcaggaccagcagtcagagcggccagatatccgctgcaaggcgccagccttccatgggcgcgcgccgtcaacaccccactaccacacttcccttgaatagcacacttgtctgtgctgtcagcaccccactatacttcccttgaatagccccacaaacttgtgcttatctttagggcttgtccaggtaaaaggcctgcccacaagggacattttgcggcaaatgaagctttttaaaaagttaggtttattgaagtatttatacacaagtacaaatagatgagctctgaaaatacatacggtcctagaaccatcaccaatctagatggaaatatatccatcaccccaaagttccatcgggctcttttgcagcctatttccttctccactcacaggcacactgtaggaaaatgaacttactactggacatggttaattctcatgtccagtaactagaactcagtccaagtaatttaagaaagaaatcagtcatttaatctaccaaacacaaaaatgcactggaaaaaaggattatgataaagcagtttttaaaaatgttttttctaaagccaaattgagcagcaggggttgtatacctactttagtgatactaatgttagtaagttctgataacctactactattaaaccagccaataattttttttgagatggagtctcactctgttgaccaggctggagtgcagtg

SEQ ID NO: 68172 - DNA, 1981 bp, Homo sapiens
ttattaatgcagacgttttgggacgcatctggcagtatttatactaaaataccaccagcagtgtcccttctggatagaaacaatctcctgccactaagtaggatgacaggctgccacatttctcgcaagggcattataaagcatttaaagtcaaccgcgactgagccgggaggatcgcttgagcccagaagttggagaccagcccgggcaacacaccgagaccgtctcagaaacaagaaagccacagctaaagcgtccattcaaggccaacaggatttagtgagcaaagagccctggaacagtgttcctggcactgcggaaaaacccttgattttcccgccaccacccgctttgtgactttggcgcgaaaaagcaggttcgcgcagcagccagcgcgggcttttccgaaccgcgcgctcagctgggccccaccccactgcgtggcaggccaatgagaaggcgcggatggcccacgccagccaatgagggctaggctcgaaagcgctcccgccaagcaccggaggtgcaggcgggccggggccggcttcccggggccgcgaggctcacctggtgaggttcacgcccatggccaggttgcggtcgcagcggtaggtgtcgaagccctcagaccgcagggtgagctgcaccaaagagacgtgggacgagtccatgctctgcaggtttacaccgctggagctaatatcccagcaggcctcgttgatgaggtccttgagtgcctccaacaccttcttgaggatggagccctggaccaggcgcgcctcgaacatggtggcggagtggcaacaacgccgctacaggcaggcgggaaggaggaaagtctagctggtttcggcttcaggagcctcagagcgagcgggcgaacgtcgcgacgaccggctgagacctagaaagacaacgaccactctgctacgcctgcaaccgtttaatgccgccgcgtccgcaagcgcgcgctctcaccctgcgccgcgttgcgacgtcaccacgctgtccagcccacggccttgcggggaagactttagggccaatcgtgtccatgctccccgcgaggcccgccccctagagcatacattggaggaagcgggcgcagggcggggcagcgtcgcgcaggtctccccgcctctttgactcctgaacccggccgcagaacaagtccgggcatatgtggagatcgggtcccggtcccggctcgtcaagccccagctttatggtggctcctcagcctcccactacgtgggtagaaagtttccagccacgaaagtgaaagtgaaatgcaaatcaagcctaccgggaggaaaagcctccttgcagcctgaagagagtacagctgctgcaaatatgcactttatttttcaattacagaattgatgcgctcgtaggtgtcacaagataaagaggtgaattgttctgttaaacttagctccctatcatcctcttaacattcccccgccagctcttataatcactcaatcgttcattgtataaagcttttaaagcttttttaaaagttcgaatacactttttttttttcaaaaatgcactcattccgtaaacacttggaaaagtacttaataaagtacatttaattttatgccacgtacatcttttatcatatcagtacctctttaaaacatagcatcacatgtatataacataatttatcaatctcctgttgtttaactacaaacacctttgagcacttaggcaattttggtgatatcaactccttgaagtaatacagctgagtcaaagagcgtacacatttaatattttttcttttcttttcctttctttttgagatggagtcctgctctgtcatccaggctggagtacagtggcgcgatctcagctcattgcaacctccgcctcccaggttcaagtgagtctcctgcctcagcctcccgagtatctgggattacaggtgcctaccaccacccccggctaatttttgtattattattat

SEQ ID NO: 68173 - DNA, 1962 bp, Homo sapiens
aaacaaacaaaccactgaggaagatcttaactgtaaaattcaaatcatacccacttccaagccatgtgtggattaaacgagataagccaactaaagcgattactcagctcagtgcctagtatacaattagtgcttaacaagtactagcgaccgcttggcaaagcaaagcagactgaagcgtgggtttcatttctcatcatgtgataagtgataaaatgctcttaaccaggtcggctcacctggcctttccattcgacctaaataacgtctacttacttgcgtaagggaagagctctggcccaggtcagcaagcatttgtcaggctagagcctccgggtggcgcttctcgccctcagtaaccggttacctccagaaccagggcgccagctccggccatccgcggttaagcgggagctcccattggctaatcgcacactgaaacgcacgccttttcccgcccctgacgctgccgtccaatgcgcgcctctcgactctgctccgccccgccccgcccccgtcgccctgcctccctggcgtatttgcgccattggtggatattccggaccgtgatggtggcgctgcgcgtgcgcactcgctccgagccctgctcccgggagagggagctctcgggtcggggctagggaaggctgaccccgctcggcccgggtgaaagggcggtgacggcactgggtggggccgagctccagggctggctgctgggctgctaagggaactgtgagccgctcagagccgcgcgcctcccgggcggggcggggccggccgtgggagtccgcgcgtgcccgcgccgagctgcctgctccggcggcttcgctgctagctcgcggcgacgtcgggccgattttcccaggatgacagagctgaggcagagggtggcccatgagccggttgcgccacccgaggacaaggtagcggcagcgtcggggtgggcgcggccgggacagcggcgcatccgggaggcctgcgggggacgcgcgcagaggggtcgtcttgttctctgaccctttgtcgcagccgacggcggccccgggcccgggtagcgcgaagggccctcgggtgcccggccttcgcggcgcgcgcgtcaggggtcggcgggtcggggtcccggctcagggtctgactgaagtggctcccccggggcgcaggaaggagcttctcgggagtggcgcacggcctcctgcctcgctgggctggctgcggggactcccctctcccccaactccgtgaggccttcctggaggtgaagatatgcagagccttcttagggaggcggctcctctgagcgcaacttaggctctccgttcccttttacaatgttattattttggggggtgggggaatcaggacaaggccatagcatttgcctcctgggagatgtaaatcccttcttgggcatgaaatcatcggctttgagcaaaggggtgttacccagtgagccagtccgtcatcagcaggtgttggagggcgtcctcccggttgatgggttgtttcctgcaccgtgtgggctctggtgggtaggggaggagagtaggaaggaggccatcttggcggggacagtggcgggggtgacgggtgggggagtggactcctttgggtgaagtgaaagatctgtgtaggggagttaaggaaggtagggattggttttattactgtggaggttgaatggcagtataggactttgtagcagtagttgtgctttccgagatagcagtgatcaggagccctgtgtttgggaaactgatcagacagtgatgtgtagaagggactgagggagcctggaccagactgagggagcctggttcactcgggattgcccatgagtgacctgtagatgttttctttggcccacatattgccttaaaaatcagaaagtttctcctaacaatctaaatttcttgcctgtcttagataattggagggtccaccatcactttgtcacctgct

SEQ ID NO: 68174 - DNA, 1425 bp, Homo sapiens
gtagagatggggtttctcatgttggtcaggctgttctcgaactcctgaccttagttgatccacccacttcggcctcccaaagtgctaggattacaggtgtgagccactgctcctggccctcctagtatttttatagtttgcttttgacattgaaatctttcatccatctggaatatcttttaatggggtgtgaagtagagatctaaaatgtggtattttcttaaaggatcttaaaaaacgatccatttttcaaagtgctgccactgtgataactgaggagggcttggggcagggtgtggctttgtgttggctggctgctcagcagggctgaccatgcaatgaccagttgtctgcctgtgtccatttctagaaacaggctcactggattatcagaagcattggcccttgttttaccgggatgagcaaacagacctgcaattcagtaacttgacatgttggagtttgaacccaggtgtgctgaatctcagttccatgttctttgcgttacgattctgccttcctagcttcctggtctccgccagtcatttttctcccacgggttggccaaagagcccctaacacagggaagacttgcaagtttctcagggtcagccagcagggccatgaggagtggggcagcccttgccttactttgtacccagtctcggagagaaggggaggtgacaggggccactgggttccatggggcctgcaggccgaaagcaagggcaccctggagcagtgcaggcctgtgtggcacagtgccctcatcccgaggcccaactcagccccagccccagcctctgctgtggagcattcctgacgctcccaccccatttcctcatctctgtctcctctctaggcttctttggaaattgactgtccaaaccctcattaggtgctgtctcctcagcagatggtctctggagtcaggttctttgtcttcgatttctgtagctcccacgtgattcagtaaaggcatgctgattcatcatagggttcctggcagaagggcaaaactatcaggggaacaaagtagccagagatcacatgcggagccaccttctgacttggtcaagaactccttgctggtcagacctggctgttcctagcacgtatggttgtcaggaggttgagttggtactaaatcagctgtgaagattagcaactgcctgggcagtgagaaccaggcctctggtttcgggaggaatttgttgtgcagcaaaataaaatattgccatgttagtgtttatttttagtgttgaaatgccaccttaagttgacagtgttaatgctacattgacatatgatatacttagtatcagtcccaatatttcattaaaaagtacttagaatttataaaactgaaaaagtaaaactgatgcaagtgtaccaagtttggacacattagagaatatcaagtaa

SEQ ID NO: 68175 - DNA, 1014 bp, Homo sapiens
aaaaattagccaggcatggtggcacacacctgtaatcccagctactcgggaggctgaggcaggagaattgcatgaactcgggaggcggaggttgcagtgagccaagattgcgccattgcactccagcccgggtgacaaagtgagactctgtctctcacacacacgcacacacacatgaattagtctctaggcagaaactttgctttattgattggttttcttcctcctcttgaggattatggaggaaaagaggaagccttttaaatgaggacagcttggtgtgggtaagtctcaaaatataagtggagtaactggaaaagcatgccatttagtatgcatttgtaccacacgggcattgttgctttgtgttttaggttctcatctgtaaaaggtcagcaatactatatctcctgtccctcctgttttgtcccacaataatagccggcttttgtgtagtttagtttacaatattttgtctggattgtcttggggcctttggggctagttttgaactttgatccacaggagtaaatacaacttacagtgtgtcccaataccaccttgcatgcacagatcacttggaaacaaaagtttcaggaagcagtacttactgtttgtgatatattcggaagttttcttttctgtttgagtctatcttatactttttatgtacactttttattaaagtataacatatgtatagagtgcgtacatatcatatttttacaatgacttttcataaagtaagcacatctctgcaatcaagataaagcaaaatggcaccagtcccagggaagcgtctctcctgatgtctcctaatcactgctcccctcaggggagccactagcctgacttctggctccatatcttattttatattttgctagttgtgacccactgaattgatttcaagacccggtaggtctcaacctatagtttaaacaacacaaccttgttttattttcccaataactcttaggaattcctttttatggatgaaaaagctaaggccca

SEQ ID NO: 68176 - DNA, 2089 bp, Homo sapiens
ggtgtgagggatggactaggatggattgtggaggacctcgaatgggaacagtttgtctaattcattaggcaaaaatgaatgggggagggatgtaatcagagctgtgctttttgaagattaatatggtagtgtatggagaataaatgagagaagggaggaatttgtggagatgccaattaggaggccagcttagtagtgaagggttgatctgcaggcttcagcaagggtgctagctgtgagaatgggaaagaccctaaatgaaagggtctgcatagtgtgagaactgaggaggtgtgtagggtaggggatttggcaacagtgatgcggacagtgttttccatggggcacatttcagggagattagggtcttgaaggaaagcagaaggatgaactagtgtgggtgggaaagatggtggttgtttttgaacccactgagttggaggtatcttgttggcaggttgaaagtttgcactggagcttggaggagaggacataactcgtgttatgggagctggtccacagaagagaggctgaatggcagggtcagctcactaaggggcagtgtggagatacagcctgggggagttactggcatttaggaagtgtgaggaggaagaactgagaagatgtcattggagaggattcagatgcgattaattgtaaatgcaggcagccagtcacattgactaaaaagaaaaaaaggaatccattggctcatgtaacttagaagactaaggtaattctagcttcaggcctggtttaatccaggggctcaaatgtcaccaagctttggtctccctccatctcttggctccccctcatgttggcttcatttttgggttttaaatggtagtagctagatgtagcaagatgttggccagcaggtgaaagtcccatgggaaaggtcatgccttcctcctggtggctccagaagcacaggaaattgctgttacgtgttcttgtcatctctgacctggtcactgtggtcaagggagcacagtgctctgatgaatcaggtctaaattatgtgcctacacttggagtagggggtgggaagagtactccaaagcaaaataaagggaccattactgcacagagtggaacaaagctaggtagtaagacactaaatgttcagggcaccagggatctgggtgggagggggaatggtggtacgcaaagcaaggattggttggatgctactgagatggctgtgaggatgctggagaacagtgtgtggggcttgacagtcagcagttaatctttcaggaaacggttttctgacacagtgtaggctgaagccagactcgggaagtttggggacatatggtaggtgcagactttgtaaaatagtttggaagtaaagagggggagaagtggattggtggctccaggccaaatggagttgaaagaaaaatggttttaggacaaacatctgaagagtggaaaaaaatctgagagaaaggatcatgatggtagaggcagagaaaggaggagttgattggcataggagagcactggaagatgcgggacctggggcctgggcagggaaagagaggccatgtctcagtctgtttgggctactataatgaaacaccatgagctcagtggcttataaacaacagaagtttatttctcattgttttggggtctgggaagtccaagattatggcgccagcagattgagtgtctggtaaggagctgctttctggttcatccagggcttctcactgagtccttatgtggtggaagaaggatttctctgggacctcttttataagggtgctaatcccattaatgaggggttcagcctcatgacctaatcaccttccagtagctccatcttctaataccattgagatgggggttaggatttcagcgtatgaattttggggagacataaatatgcagaccaccgtaggccaagacttcagattggggtaggtggcaggcacttatttcacttctttctgaaggagcttgttactgacagattatcattttaggtcctttagttcaagcttgtctgacccacgacccaacacaaattcgtaaactttcttaaaacattatgagttttttgttttttgtt

SEQ ID NO: 68177 - DNA, 920 bp, Homo sapiens
tgagctttgaaaattatgtaagattccatatctggaaagagaaacaggaccaaatgggttaacagctgagttttatctaacctttataccaaagccaatgaggagagagaagcaggaatgataaacccatttctgctacgattatagataaatcattctaaataaaatactagcaaatagaatctggcagtgtgtcaagggaataatatgcaaataccgagtggattttattccaaaaatgcagtggtttcatgtatcagcattgatagaaatcactggccaactgaagcagctaggtgatcttagtgaaaaggttaaagggcgggcgcggtggctcacgcctgtaacccaacacttttggaggccaaggtaggcggatcacgaggtcaggagttgaagaccggcctgggcaacatagtgaaatccccgtctctactaaaaatacaaaaaaatagctggtgtggtggcgtggcaggtgcctgtaatcctagctattccggaggctgaggcaggagaatcacttaacctgggggtggaggttgcagtgagccgagattgtgtcactgcactccagcctgggcaacagagactctgtctcaaaaacaaaaacagaaacaaacaaacaaacctgtaatcaaagaactttttaaaaagtgtcagtgtcagggagtggagggtgaggagagagagaacaagtgtggaaaccacctctttcatagtgaggatgactggatcagcaggggagtgggcagaggggaaatctagctgtgcgtgttggggtttcacactcaaatacagtcctggggaaagatagggccaactagagctagtaataaacagcaagaaaagtcagtaaataatgaaagagtcattaaagcatactatttagaattggggaggtaaccactagaaaaataaaa

SEQ ID NO: 68178 - DNA, 571 bp, Homo sapiens
acaagcttgagcccctgcaactggcctcgttttactttgtaaatgtggttactacaaaatttaaaattacgtctgtaatttagctgcattggtagcttgtattatatttcctttggttattgtgtgctccactcttacctcatactaggaagttaggacttaggttatagccccagcgtctgacagctgataagaagtggaatcaaggttcaagctgagtccagagcccacacactgaactgctggacatgcaggacagcatggcagtactttggacatgcccattgcttctgccactggttttcactgaagaaacctcccccagtggcctctaggctctgagaactttgaacctcatgcagcagctgttgcaaccttaggcatgggaaatgacatccttagatgcccttcctgatgggcagctggtgagtcttcttccagctattttagtgaggtgggtagcagtgcatggggttgctgaggcacgcaccctcggaacatattggtgtctctccctaatggggcagcctactctgtacatgtcagaaaaggtgcctgtgaagctggcaat

SEQ ID NO: 68179 - DNA, 1753 bp, Homo sapiens
aaatcaggaatggattgcaccatgtgcagttttgcttgtttgcttggtgttatttgtatccacgacattaggaattttgaaaaaaaaaaaaaaagactgataccttgtatttatttcttagttaagtcacagctcgtcagcaacgtagcaaggggaagcatgacggggtagagtagtgggtgagaactgtgcagaaatgggaggaggcgacagaagagtatgaagaaaaaacatcgggtccaaacatcctgctcagttccatcagttcctctatgcaggtctacatcagactaacagctgccttaaggtggaagaatcctctacaattcatgcccgatttcttttccagccagccagtggagtctggggagagggctgatgaggacacctaagtgattgaggctctctctcctacctcagcaaggcagtctgaagagctttgggaaaagtagagctttggagagaaggggcagcagacctaaaaaattgtatcgagggcactcatgactattcctggaaccttttcctaggaaaggcactttagtttcttggaataactgaattatacaagcatgccctagactacgtgtccgggcaatttcagaaaataagcagttgtcaaaacacggtgagtaacttagggacagagagcggcggtgagccgggggccgctgtggggcaggggatgtccccagaggacctcatctgcatttttggtgtctttgttccccgactcagtactctgcatatttgcggtagtcctatgctccacgcaccctgctactcctcaaatgctccacgtattttttagaagggaactaagccccaggcagcccagcagaagcgcggcagtgaacaataaaagtcgaagagtgcgtcccagccaccgatttagcgcagcgaacgcccggccgccgttcccctgcgggcagtggccggcccggcccggcccgaggaccccgcccgcgcctcggccccgacgccccaggcccgccgcgtcccgggccgccctgacagctcagcccgccacgtgagtggccgcccggcccccgcacccggctcgctgcctcacctccgggttcgctagtccgcaggtccgcgtcgccgccgccccgcccgagagcgaggaccgcgggcagaggtaccgggcgcccgccgtccgtgcctcgccagcgctccccccaggcggcctgccgcggcgtcgagcggcaggaagcagccacgctcaaaccggtttcagctgctccagaccaaactgccaggccaccccgcggggcggggccggagggcggtggggcgggccctgacgtcacgcccggcgccgtcccagccaatcggcagccgcgtgcggggggtgcgggcccgcgcgttcctggaaagggctgacgtacgcggccgagggcggccgggcatcccccgtgtccccgctgcccttctcagccgaccccggcgcccgcacgttggagagctgccctggggtcataggcttgtactgtggtccaccaaagccgccttagaaataacccacgtgggccgggcgcggtggctcacgcctgtaatcccagcactttgggaggccgaggcgggcggatcacctaagatcagagttcgagaccagcctggccaacatggtgaaaccctgtgtctactaaaaatacaaaattagccgggtgtggtggtgcacgcctgtaatcccagctattcgggaggctgagacaaggagaatcgcttgaacccgggaggcggaggttgc

SEQ ID NO: 68180 - DNA, 687 bp, Homo sapiens
tgaatttagatctcctttttgtttttctttgaatgctctgaacatcttaccaaaaggacagagaaagcatctgatgatgtctggaatctatatgagcacacatttgaaagtgactgtaataacattacatcaaatatatactgcaaagagaggctaagagagcaggagccaggcacatagccacatttggcaaagctgcagcagattttgtgccagtgggcaggtgcccagaattcagagctgggcagaaggtcaggaaaggatgggtcattcaagtccaacatgtcacaactcagcaggcaatggatcctggggcttactgcctaggtagcatgaagcacttgggaagagtgcttgtttaatcctggggctcagactggtgagatatggtagtgggtggcatgggagggaagggacatggactatatggtccacctcagaatggactaacaccatagactacccatcgtccaaaagactgtggtgcactcagcttgctccaagttgctcttggtatctaagatgagcaaatacaatggatgagacaaggcagcaggtatttacagattacaggtcttcacagattgcaggtctttcttgaagtaaagcagatggcagtcttgtgagttgcagtgtttttcccagcaggaaactgatgtcacatgcaaatagggtaattaggagaat

SEQ ID NO: 68181 - DNA, 436 bp, Homo sapiens
cctgcctcggcctcccaaagtgctgggattacaggtgtgggccaccgcacctggccagaaatgagcaaatttcttagtgtcagtatcaggccacttaattaaatcacacaacactttgtttagattgattgaatcaattgtctaccgtacccaaaattctcatcttatccatcatctcttcttattgtccctccggtccacagagccaatacaaatatttgttgaatgaaagagtggtttccttcttgtaacatatttcacaatgcactctatcaggaaataattacttcctgaagtctgagtcaacagataattttgaagactgggcagagagttgtaggatttaaactggcaaaatagatcagaaaattatctcagaaaataactccattccaacaaatgtataatcattaatattctaaggatggagaaacct

SEQ ID NO: 68182 - DNA, 1454 bp, Homo sapiens
ctgcagtggcaagaacatggccaactgcagccttgacctctcaggctcaagcaattctcccacctcagccccccaactacctgggcctacagacatgtgccaccatgcctcgctaattaaaaaaaaattttttttgtagagacagtgtctccctatgttgcccaggctggtctcaaactcctggcctcaagtgatccgtctcagcctcccaaagtgctgggactacaggcgtaagccaccgctcccggccaacatttaaatttttgaatattttttctgttcccttagggtttaccaagcacatttatcgacaagcctcctcaggaaattgcccaaaatagccacatgtggcaagcctcattgacaggccaaaagcctcagtcaacatggccgcgaccggcttccattgcccttcactgcccgcagtaaggatggctccggtgacttccttcgaacctcacatttcccataaaaaagatggcgccattgcttccgcgttccggttgcggatggtgagtgtgtcggggggcttggcggcttttctcctcagttttctggagtgctttggaggagaggtaagcgcgggatgggatgggggggggttggagtggtgggggcgggggtcacagcaatgcatctgatcgttctctctcaattaggaagttatggaggctttcctaggcatgtcaggatttcctgctagctccccgccccttccgccccaacacacggtgtctgcagcctgtgctttggggaattttgggaatttgtggatagtgagtatggataagcttcggttttgttgtttttttttaaattttttcagtgacctgccacttcaggaggttctgctaaaaaaccaacaaacaaaaaaacagctttcttgggaaatttctattcacctactaagtaaaatttgcccatttaaagcgtaaaaaaaaatcaagcctagcatagtggcattcgcctgtagttccagctgctcaggagactgaggtgggagaatcgcttgtgccccggagttccaggctgcagtgagcccagatcgcgccactgcactccagcctggaagacagagcaagacaacgtacccaaaaataaataataaagggtaacattaagggtttttttgttgttgttgacagaattgtgcatctattactgtgatctcattttagaatactttcatcactccaaagaaaaatcctgcctccagtagcagtcattctacattcaccacgtccactccgcctcaagtcctagacaattgctagtatactttctgtctgtatagccttgccaattcgcacgtttgatataaatgaaatcatacagtgcagctggcttctttcattaagtataatgtcaatgtttttgtgactagcttctttcatgacttttgttctttttttaaacggagtctcatgactctcactctgtagcccaggctggag

SEQ ID NO: 68183 - DNA, 839 bp, Homo sapiens
cagtgagccaagatgacactactgcactctagtctgggcaacagagtgagactctgtctaaaaaaaaaaaaaaaagtcagttaggagaggttatcactggtaatcttgctgttaccaagcaatgaacttgaggtgacagccttaaactctgaaggaggtcactgccctaacagcccaacctggtttactccgacctaaccattttccaccttaagtttcagaattgtccaggggcctgggtttttcatttataagttgagtccattttcttttccatgcctcttgttcataggtagctgtagttacgggttctctccccatggcccttcaggaggctcttgccgacattttaatctaattctgatgactctggatctattgtttgctcagagacatgcccacctttacactaatctctactgggccaccattctatctcagattcttaacacctccagttcccaagccagtttgatgttctctcttgcttacttgctgttatgtgttgtaaggaagttgatcttccagggattgggaaatatagccaaggtttccagttggagggtcattcagggtgactcaccattggtctctgcccatcctggtatttactcagtgaggcacacactgttggctaccttcatgtagcttgtgcttggctcaaaatagagttgactatctcaagaactggcagagtatggcaggttgcttacagctgaatggggggtctaagggtgaacttgggacctggctcccccagctactgggtgaaatagagccaagctttggtcattaggattcattaacttggcatagtttttacaatttctgtttttttt

SEQ ID NO: 68184 - DNA, 1088 bp, Homo sapiens
gccgtacttactatatatatatagtaacttactataggtctttgtatatatatatagttactgtaagacatttgtatatcgcaaaaaaaaactatatatatatatacagttactgtaagacattagtatagtgtaaaaaaaaactagaaaaaaaaaccaaaaaacaaacaagaaaatctagctcctgtgtgttttttacatgaccttgtggcacctgcaggctaattttgtttgttcaggttttgccacatcctgtgatcgttcattatctttgacttgatatgtgaccgtacaagaacatttcagttatggcctaacataatatgtgctctaaaaattccattgcagaaatcatacttgatgaaggtggccgtcattcatttttgtcacctaatcatgaatgccagtgccactttccatttcaggactggcatggaaagttatgcctgtgcatcaaacaaaagtttgcatgaagaaggagcctcttgttcaattttgcatgagatgtttcctattgactttgaaaacttgaagtgtttgaaggcaagggggaaagcaaatcaacccaagagattccacatattcaaagactccagcactttgtttacctaacacagaactgtgtgctggtggcgaaataaagcctttgccctgaacaggaaatcttggtggagtccaggcagcaggaggcctggcagcattccacagtgatcagctgaaggaaaaacaagagtttacaatactaaccccaaatgccctttttgtctcccaggagaataatactatcttggcctaggagggttgtgccttcatgctcaactcttggtctaacagtcatgaagctgcagtaacattctgttttcccctccttaatcttctttatcaaagtcttaatcctttgctgctgttgtttttgagatggagtttcgctcttgttgcccaggctggagtgcagtggcgcgatctcggcttgccacgaactctgccctctgggttcaagtgattctcctgcctcagcctcccaagtagctgggattacaggcatgtgccaccatgcctggctaattttgtatttttagtagagacag

SEQ ID NO: 68185 - DNA, 1563 bp, Homo sapiens
cctgcttgggtagagaagaggatagaaagccagactaggtaggagacgtttcattttttgtgggatagatcctgactgggggattagggaagaaggaggatctatggtggaaaaaaagggggaacctgaaggagactctggagacaaggatgagatcctaaagtgaagaaaggagggggtgtctctggaaagacagtgaagatcccaaggtcctagggaaagaacttcaggacaggtgattagggtgtggagagggaggcattggcaccctagggccaagaatggaattctggggaaggaactctgtggaaagactgaaaaggatgctgaaggtggacggccagatatgaaatcatggagggggctccgggaaaaacaggagggttaagggagattatgaggttcgaagacgggatcctggtggaaaagccttctgtgacagaaagacccgaggagacaacgagggcggggaatggggaccgagagagccaagaatggcaccctggcggaagaattctgtggagaaacctggagggagggggtatctacaaggtgggggcgggagacccctaaaatcagcgatctgacttactttctccgctggacttgtactgctttaaacacatcttcacgtttcagcaccacgaagtcgccgtcgcggatgcggtggtctccgggatgctgtggttgtgggcccggctgctcccctgagccctccatgacgctcagccggtcgccgtgctccacggcgtcccgcccctcctcctcggttgtcgccaccgccagcctcacttcccacaacctggcgcactaggagccctccgaccggcaccgcccccacgtgttgcacgccgcttccgctttccggcccagacctcaagaccgcttccggaagcctctcggcttccgtctggccaaactccttgattggctgcactccgccccgcccctctcgtcttgccgcttctttgagcggaagttggatcactgaagcgccaaaaaagaatttaggggaagacctgattttcgcttgaggcatttttgcggcgctgtgcgctacagacaccttctggaagctgcggtggggaaactgagtttcccgagccgttgagacagatggggttcagcaccgcgcggggacgacaggaaagctgcggctgaagagaactgcggacttggcaggagtcgcctgaggagctaagatcccggagactcttagccccgtggtgcttctctacgggagggagggagggagaatccggccggacagatctgcgcgtatcctggagccggcccagttgtgaactaggagagctttgggacctctgtcccaagcaagtaagaactttagccttaggagatgtaaataaagtagtatttgaagaagcacaggtacccaactgtttctttttactctttctccagtcctacttcttaacgtttttttgaatttgttactgttctcagcatattgtctcgtttgagaagggtatggcacgcagcgttgttgaaggagcgcctcagcttgggaggctgaaagttttatctctgtactgtcgacaa

SEQ ID NO: 68186 - DNA, 3166 bp, Homo sapiens
aattgaaacttttgtactagcaatgtaaaaatttaaaataaaaactatttaaaaagacaattctcataggtaaacattgattctggataatatagtattactgttttcagcaaaacaatcagccattgctattactaacatttactaatgcttatatttttagcatatgcatctttattcaatgctcaaagaggagagaattacagagccaatatttattaatcatttcttctgcactagatactgtaaaccacccacaagaaccgtagggcgccgcacgcaccttggagggggcccttctgccggccacccgcctcagagggtttcaggccagggcctgaggtggctccggccccctcgcggctacgtcggctgcgcggtcatcctatcttgttcgtttctcccctttccccgcccacccccgggccttggctcccggctgcgggccaggagaagagagcgccgcgtacccgctgcttcccaaaacccactgagcctgatgcgcgcgcctccgctgtgccaggggcgccgggaagcccgacgacgacggtgtcgtaaaagcgtcgcgaaggcgtccgcccttggcggcttcctgccacctgtataagtggagtgtgctggggtgtgtaaagtagtatggaggcagcggtagcccagtgtctgagtggttgccgggtctccatggagaagcggctcgccagtgtcccaggctgctgagctctcgccgcccgagaccccgcggcgcggccgcagggccatgctagccttgcgcgtggcgcgcggctcgtggggggccctgcgcggcgccgcttgggctccgggaacgcggccgagtaagcgacgcgcctgctgggccctgctgccgcccgtgccctgctgcttgggctgcctggccgaacgctggaggctgcgtccggccgctcttggcttgcggctgcccgggatcggccagcggaaccactgttcgggcgcggggaaggcggctcccaggccagcggccggagcgggcgccgctgccgaagccccgggcggccagtggggcccggcgagcacccccagcctggtacgtaccgatgaggcggcggcgggccggccctgggctggggtcgccgcccctgcactcaggtaacaagctctgggtggtgcagctcggacgcttccgtttcctaacttttagactcttccctgaaaagaagttactggcaggtcattcggtcgggatgaatttcagggtcaccagcggggtccacctacggtctctgtggtcaagttagaaatcctctcatcccccttctatctgcacccgttgctggaagggccgcctctgcatattgcattgataaaggtagccttcgcttgtcttactaaaagcctatttttaattcttttgaagtgaatccccagtgtttagggcaagtctttgggaatatttagaaaggtatacaggcccttctgtttgcttgtgcaagttccgttcaccatcatttgacctttggtaaccttacacattataggatgaaggtaattaaataatttaggtcgtaattaaaagatcttttaacctttaattatagaaaaagatttaaactattcttgaggtaacggagggaagtatttgtccacttacctgttgatatgctacccagacagaagacacccgagcatgagtgtgggagagcttttgatgtcatgttagcaagactcatgcaattattacatcttcaattgttatgtcttcagtggcccctgtactgctttcatcagttgtacagcatgggttgaggtggccagatcctggcaggggtctcaactccactgatagctaaagcatgttggggtttgaatgctggatactttgaagttgccatatcctgactgaagtccttcccagaacggcagtagttggtcgagtatgccacaggttatctggttgagtaatctgagattagctctcctaacattaactttgaaacttttacggatttaatgattacaaattaatgagacaccttaactgaaatattctatgtggagctaaaaagaactcccttcactgttccagcaacattgagttctgtttgttaattcgccaaatgaaatgatgtttctgtttacaactttgtctttaattttgccctgtggataatttctgaagttaatttggggaccttttttctgatcttttgcttactgcttttttgcaaccgtgtgcagccttctcccctcccactcttccctttgagttgctgtaacctttgatcagtatttgacttattctctaccatagtatggtcaacagacttatcttttttctttggactctgaaacactctgatatttgaacttgaatttgggatgtattccaagaatgttttcattgtataatgtggattactttcagtaaaagatctcagagtagaggtttgtattgcttcttgttttgtgattgctcttcggataatttgaagtttttctatagctttcaatgacagtattctgccacctgaccccagcaataactatttaattatccctccaagctgaggtgctttcttgctgggtttcttttataaacacagacatagtgtctttagagaatacttttttttttttttttttacaggatagttcatagaattttaaaagaatcttcagaaatggaattttaaaagaatcttcagaaatggcctttgccaccttttttacaaccaaaattaagattcaggcaagttggctagtactgattaagaaagaggttaaaaggggttctagagaagagaaagtcccatggagtggaattggcagtcttgacacagcggagaaaaaaaatctaggcttcagggaaaggcgttttcttgttgttatttctgtaccctgttgtgcaaggtgtcttagctccgctgggccgaggcttttcaaagctgaaatatcctctcatgagtcagattctgtttggcaagaaggggatgttcttcagacagctgccaaagagctcttttgttagtgccaacttcaaacagcttggctccaaatgagttgtctaggaattgcaaagcccccagatgggagctgtgaaagtccttggtttttagttgaggatcttaacatttccatgactgttttgaacaaatttacacaatttctcgatttccaaatatcacaatcc

SEQ ID NO: 68187 - DNA, 821 bp, Homo sapiens
tacattcctggttaaatgcagtcttgcatgttcttccatgcatactatacatagattttaatttgcatggatttgctgctcttttttttttttttttttttttaaagacagagtttcactcttgttgcccaggctggagtgcaatggcacgatcttggcttgctgcagcctctgcctcctggcaagcgattctcctgcctcagcctcccaaatagctgggattacaggcatgccaccacacctggctaattttgtatttttagtagagatggggcttctccgtgttggtcaggctgatctcgaactcctgacctccggtgatctgcctgccttggcctcccaaggtgctgggattacaggcatgagccaccgtgcaggtttgctgcattttaaaagtgtgattgttgttagattttgccagctaatgattgctacagaaaagtttgtttaccggtacaaaaatgttcctaaaaattatgactcactgttttcatgcttggctcatatagccacatcttgtttgctccaaatgccgtgacttgagtggataagcattttttctttggaatagtattatccatcaaggactaggccaaggatcaatatgtacatcatagctataacagcagagatttaaattttaaatctgtaattagagattttcttcagattgcagagccaattgaatgtcaaaactggagaggaccataagtatagcctccaataattcataaaagatttgtttgaaagtattttggaagggatgttcatgatcctttttatttttatctttatttatttgaaatagtttggatgctgtt

SEQ ID NO: 68188 - DNA, 2535 bp, Homo sapiens
agaaaaaaacaacaacactctaagcacctcatttctctggctcccagacctttttggtccagcctctcctcccacagctaactgctcttaatgcccctggttctctcttactggtatgagcctgagctcaggaacgcctgctctggagctagggtaaggggcatttcaaggctgggcaaggctgggaaggaagggtggggtttgctgggttaagcttagtggcttctggagtcaagacaaacactgctcattggcagtgtgaccctgggcaagttcaccttctgaacctttctcctttgtagaggaagccatttctaccctctgtgggctgacaggagaattgcacaaagggatatctataaactgcatgtcactaaagcaaagtgccctcaacactcagccatcagaatcagaggcttctgctgttctattgccgctggggatctttgcttgctggtgtgtgtgtgtgtgtgtgtgttttaatatagaactggaaagagacaaaagagctcatgataaggcaggatatgccaggaaatctgtgaccaagtcagtgagaaaggagttgaaaccagcgggtaagtgaggtttctaaggggctctctgaggacccctggaatctgccactccccacaccacgggagggaacgacccggaatcttggcgctgtgaggagagacacatgttagacctcagagttgcagtcccttttcataagagaggaaaaagtcacctttttggagacagtaggttggagaggacacaacaggaccgtactcaaatccatataaatcttttacttaaaagtcatataaaagaataaaaaatgcagatttctgaatcaactgtagataaggaagcaaatgatgttgaaaggtgcccattaatttaaaatttcatcataggaatttgggtgaccttttgcactcagtattaaaaaaaaccatcaagttgctctttggaacagtagcatttaggtttgtttttttttttttttgtcacacttgtttatttctttgggatgttgctgtgtgtcatggaagaaacgctcccctgaaaactgtaaccaaacaaagtttggttaaaacaaagttggttcctttgttttcatggaaatgtcagacaactatgaaaagctaaggaagcatgttgaactgaaggtctggctttggtaaattaggcagagatgttctcagcagcaaacaggtaaaatctgacatcgagaagcattattttaatgtaggaccagttataatcttaaagaactgactaggttctaaaataatagaactgagaaataggactgagaaatgaccaacatcaagtatatacggtacacttagcacttgtttctatagaaaacatttcaaatcaagttctttatgatgtgaaccagattttccaaatgcctaaaccacttctgagctttaagcaaggcctcagaaattcagcgggtgcctgggaggcttcattcacattcacctctaaggagaggctaaaagaggaatttccagatggcagctactggctcagaaccagggggtcccttgccaagtctgtctctatgtggctcccggaattgctgaggtctcacttctcagagggctttgatggaaaataaagcaacagctgacgctcacgggcctcggaactctggccaggctccctgaggggtgcatcctaggagaactgaaaaatgggattggagcttttgccttatccttacaccccaagttctttgtgtggcagaacatctatgaaaaaataataaaatattgtctgatatttccctttacttctggtattgcttttgaccttctcaaaacccacccctcccacctctaacaaaccaaaatggaaaatgacaattcaggcagctgttaattggctcactctctcaaggcaagcactgtctcaaggcagtctcaaggcagagatgacacagcaaaaaacagagggggagaaaaaagtctattattggcttgtgatttacaaaagccaaagtcctttagataaaaggccaggagtcgtaccaacatagataccaaatccaggagaacacagaccagcgataagagggacgcttccccatgacccagaccagcctaaagcccctgtgggggcagccagtggggagctgtcagaccttggacatggtggtctttgagaatgggtctgcccttctctccctgaccagttgggatagacacctgactggaatccttgacactggcaggtgtttctatgaacagagaggactgtgcctgtcttcctgaatcccaacccagagtagaagcagtggagacatggatctgggttgagaaatgggttttcctgtccccctgtgtcacccacatcttcacaaaggacttacaggtggctgagagatctgtaggaatggaatggggcttgcaggtggccccagaaatctgaggagaccaatgactaagaccagatgtgggtcagtggtcatcttggcaggtatcactgtggacagatgacactgagggccactcctctgaccttgggttgtca

SEQ ID NO: 68189 - DNA, 462 bp, Homo sapiens
aaaaaaaccaaaaaactgaggactgtgcactctggtattataagagattggaaagatgagaaagaaccagccaaggagaccaaaagaactggtcagtgagggaggagaaaagccaggaaagtcagctgtgttggaaggcaagtgatgcaagttggcaaagggtaaggggtgactcattgtgtcaaatgctgcggagagggtagctggtgcaaggactgagaggcgaccaatggactcagcaatgtgaaggtcatgggtggccaagaggtgaccttgatgacagaaagtagcaggggcagtggggtagggagggagagaaaacctaactggagtggtttcaagagagaatggaagcaaggaattggaggtagtaggtacgtacaatacattcaagaagttttactgcaaattagggcagagcttggggagagcagctggagggggttgcaagaaggggaaact

SEQ ID NO: 68190 - DNA, 1100 bp, Homo sapiens
cacccgacctgtcttttgccagctctgcaggatcctggggcggatgttgggtggataaagcatgccccttactcccattaaggcagcacctgcggctgaactgaaagtttattttgcggccagatgcgtagggccggagaaggtggtcacatccagacgaaattattttcaatcaacagctatttaagtacaagaggctgcagaaagaaaggggctaagggggctcaggagccactggtgcccatgaaagcctcccaacctctagctccccagccctagctccggagcacccacctcctttccaggagcccgtagcgtccagcctcgcagtcgcgcacgtggagagctgcgtccctacaaactaccccgggccgagccgaggagcgggcgctggcgaagtggggagcggggggcgcccagtggcggcggctgctcagctaaggctgcggcaggtgagggctggagccagggcgagcaggcgaagctgcctcgggacctcccacggaggctcggtgcctgcccccagcctggcgcggcgtgcccggtgcactgcacggccccagcggcccggctgagggcagcgcgcagcgtggcaggcgagggcacgcccagccccgggcctgctaggtctcgctcccgcggagaggaggcgcagtctgcagatttttaagggcaaagggtggccgaagggctgctcggcggagagaaggcggcgagaacccggggcgcacgctcagtatctgcagctcctcttgcgatgtctcatcctgacgctttaaggccgcctccagtttccctgttcccccaggcccgccggggactagcccagatgattaaagccgcgccacttcccctcctttcaggcatacccatcactcacaccccggggtgcgtccaggcccaggagactccagcctcccgcctagaacagctgcctccctcagaaagagccccggagcacttgtggtcagggaggtgaaggcaacgacaaaacgattcgtctctgagtaagagggtggtgtcagtctccagaaggctgaggctcccgaccaggggagactccaggagacccaagggcaggctgcatgcggaagtctggg

SEQ ID NO: 68191 - DNA, 589 bp, Homo sapiens
acacccctcacactgacttttctaagagataggccaacatagcaatggtgctggatatgaggtagcatggaccctttgttttgacagcccccagctaaattggggttccagtaccagagcagctagcagccctgccaggaaatggaggggagctgagcatgggtgtctacacgtgttttgcatcggatacttatttcacgtggtggatagcctaatgcttagttgtctcgactgttaccagggtgtccctcacgtgggaaagttgtttatattggcagatgtccttgcagctcttgctgacctgtgtccagtttctgcctgactgatgattgctctggcctgggagcctgccctcatgttctccctggcaccccaggcaaaacctggcctggagtagctcctggttcagacggaaggtgcaaattcagtacgccatcgtgataggaaataaatccaaagatttattacttactggccctgaaggccctccagcctcgggtcatgaaaagcagaaatgaagaggaagagtcaggcagaaagagatagagaaagagagagtgagcgagcacgtacagcaatgaacaatata

SEQ ID NO: 68192 - DNA, 512 bp, Homo sapiens
tctttctttctttctttctttctttctttctttctttctttctttctttctttctttttctttctttcctctctttctctctttttctttctcttacacacacacacacacacacacacacacacacacacacacttcagcgttggactctggccatcagaaacatgcattctgtcagtttaaaagggagttgacaggaatcattgtgaaaacacacttgttctggaatctgggctcatggaatttgctcctgctggacattccctggacccggagtgatgccaaagtaaggcaaggccacaagcagccccactttgcctgacctttcctcactccatgcctgtggggcttggagagcagctgcggaggattgggtgacttccaaagtcagctcttgagagcaggttgccagggaattctcttgaacagggccgtccaagggatggacacatttcctggtcctgaagcagagaaattagaagcaaaaataggcatggaaagatgctctgccc

SEQ ID NO: 68193 - DNA, 1528 bp, Homo sapiens
gtggctggggttgagaggtccaggaaaaattctgacttctacctttggtaatcccaggcaaatcttgtgatctttgcagggcaccattttcttctgaaatgaaggaaggtgggggaggtaaggtagatggatctttaaggattcttctgggttaaaagttcagaaagtctgtgattccagatgggtgttctcgtccttctttcacagtcctttctctttaggaatcatggaagggccagagaggcaaaagcactgttcagctaacacctgcacagcttggctgacaggtgggccctgagaatgaacagcgtctgtgtgtgctggccaagtgctgagcctgcagcctgcagctggccttcttggcttctgtcgaccccttggctgcctgagtctccggcaactgttcaatcatttgttttttcccctccgaagagacagtcaagggtgctggggggcttgttgctttgggaattctgccacatttacaaatgccttgtaacccttattgagtgacagatttatttgacaatttttgataagtgggttgtttgcgacttgctgacggagggaattatttgtaattccaacttgaaaggctggccatctgaaagccatgactaagcgagcacatgtattaaaaggtcattcatagttgcttaacatcttggcatatatcatcttctgatctctgtttttattgttttgatctcaaaaagaaactttaaaaaatgtgagatgtggaaattgggaagtgacagaactatttatggtccccataagcagctgacctacttcagtgacaaatgttataaacatgtcgtgttaaaagcccaatcttttgctctcaattctaattacttggaattcactgaacttgagggaccctggattttgtttcctgctgggatttggtaatggcgacattctgacttggcagagtgagagccactctgctgagtcacagtcctcttaacttcatccaggtctctacaaatctaagaactagaatttggtcactttgcaggtgtctggaactgttcccagtgcctattgctgagttaggagactgaccataaactttttgctttaaagaaatgcaaagcatgttcttgtctcccaccagggtgctgcttctgaaaattgaagtgttttgtgtcctgtactgttaaaggttggttctgaggctagttgatcagctgagctctaagcagtttatatggatttttctcatttaatccccaacataccctttggagataattgctgttactggtcccattttcaggtgaaggctggttagctaacttggcttaagtcattcagcaagtaaacaatggagccaagatgtaaagtctgggaggtctgatgccaggacttgtattattatccatgattcattcaagttaaaatgactctagttcttggccacttataccaggaagccacctgggagatgtgtacaactggtcatggttagggaagagggaacatgtggtaaagaccatcagatggaagaagggagcgaccc

SEQ ID NO: 68194 - DNA, 836 bp, Homo sapiens
tacctcattttcccattctgcccagtgcttcttgggattgcctcccagtgaatcaacgtgcacttggacgctttctcacatccctttgcttctgggaaatctagcctcagacaaccctcaataaatgaaaaaatgtccaagtatttatattcaaatagtacttactgcctggaagtcaccaggagtttgattcatagtgtcatagttttttcccccacattacacattcagtcagtatgctttttaattctggctctcacagggaaagcatacaataacatatgttgggtatgttgtttaacgttcacagcaaagacttactatgtgctttttggtttgaggatttttgagtaagtggtggagacatttttgatgtcaccccaagttctgctgagcagaagtgataagaatgtctctctatgaagctccaccaatagaatgcattgagtcagaaaatttcataaccttccataaacaaagaacaaggtcctaagtgaagggaaaacaggaagcgatatgaggaggaatttgtttaccatgatttcaacaacactggaatttatttttatcaaaatgaaaccatgggtaagtcaacaaggctgggcaaagcccagagactgtgaggtcctagattcccaaccgggacactatgaactcaaggaattcaaatacattttgatttttctagaaattgctcaatgtttctcacatgagtctcggtttcttttacttttctttttgaatttcaaatattttctttttgaaaacataacatatcaaagagagttttcaagaacccagatttaaactttaaagccaaatttctgtaaggtcac

SEQ ID NO: 68195 - DNA, 1366 bp, Homo sapiens
attttcccttgccgccaccatgtaagaagtgccatgattttgaggcctccccagccatgtggaactgtaagtccaattaaacctctttttcctcctactctcaggcatgtctttttcagcagcacgaaaatggactaatacatagtccttttgcttattccaaacaaagttgtagtatgaattagaaacattgataatatgctcttaattgagaatacgcctacagggccacaaactcagacatgaaatgtctgagttactccattaatgtccatcacctgaggctctgtgaccacagcccagtagtgctcttatcagatgctgcctggtaatgagagtatttctgacctagtacaaagaaagagcatataaacattcagggctcccacctctgaacagtgcacagggaattttcacaggaaactcccatgcctataaattcggttaacatgtaaaaaccccactgtattaatgggagacagtcagtagaatggaatgctgattgactggcatatgtgggacaaaaattctgctccaaatataagcacctgtagatgcccttcccctctctcccctgccttatctcacttgacaaaaactgtttagatgagatgtatttcccagggcttatgaatcagttgcagttaatggctccaggacaattggtgacttttatcttcaggaaatcccagtacttagaaaatgaccgtcagccgtgactatcatgccaaacaacttttctccctctatttataccaggtgattgaacaaaaaaaggtaaggggtgtgggggagggcataggctggagctcttgccctggtctgcactattgagtcatcaccataacatgccaaattactcaaataagtctggtcatgttcacattcagcagtaagaaggatactctgtatgactcgcacgaggacatgaaatgccagcgggatccatataatcaacgtcttggcttgtgccaagaagggtgggtggagtcgtgtgccacatgcaaggaattcctaaatgtttactctaatttgctgcctagttatatttgacttctgtgggttggcacagcaaccattctatataattctggctcttctgattgttagaggaagagtctggggctcttaagctaaagtttaaaaaacagttgtttggagtcatcgttccttctccgttagagtaattgttgagcatagtgttgtggttactccccaggttccagagaaagatgggtttagatttcagttctggttcttactccggaaatgtgcctgacttctccatgtttctgcttcctttcttatttccataatggggataataacagtgcctgcttcatgaggatattgggaagactaagtt

SEQ ID NO: 68196 - DNA, 2943 bp, Homo sapiens
gtggagtcttgctctgtcacccaggccagagtgcagtggcacgatctctgctcactgcaacctccacctcctggatttaagccattctcctgcctcagcttccccagtagctgggattacaggcacacaccaacaggcccagctaatttttgtatttttagtagagatggggtttcaccattttggccaagctggtcttgaattcctgacctcgtgagccaccatgcctggccgttcttttcttttctcttttattttgttttcctttcttttctttcctcttttattttgttttcctttcttttctgttctctctctctctccttccccccctccctccctcctttccttccttccttccttccttccttccttccttccttccttccttttgttctttctttcactcttccttttcagttaaatcttactgggtaacaaaccaacctaaaacttactggccaaaaatggcaaccattttatttactcacatgtctgtggatcatcactgtaattcttctggtctgaaccagctttgcttatcgctgcaaagttctctcatggcctatagtcagttggcaagtctgctctcaacaggttgattaaggataacttcattcagatcactggtggttggaaggctggttagtctttatgagcttctgttgtggcagtttgtgtttcttccatgtggtttctcaatctttagcaggctcacttgggtttcttcatacaatggtctaagaactccagagaacatgtgcttatccacttctcaagaatccacttgaatcccatttcctaatgtctcattgatcaaaacaatttttatatgaccaagcccagagccattgtgtgagaggattacctcagggtatggatacagggaggagaattatcacagatgacaaattattatgttttcgcaaatggactattccatataacatgaagcttccttgtttgaagtcactgatattttgagttctttgctagtgcatcatgacctaatctgttgtgactgttgcaacacctgaatcaataactaggctgctaagccaacaaaaatgagctcagtcatttttgtttgatatagctactgattttccagaagcaagaacactatttccttttcttttatgcacacatctcctttacatatgtcttcatagactgaaactctcagaagatagcatttaataacacaggaagtttgtgagaggtgcctggtacggaagagagtgagaagttgtgatagaagaagccaagctgctgtgatgacagctgagactctgactgcagaaaatgagagaagtcttggattttcatgtatgtcactcatttgatattgtagaaaaacaggcatcagagtgactaaaaaatctctcctcagttcagcagtcacagaattttctgggaatctggacaagcaacgtcccacaaagcactaagaagaaattttagctacaaaccaagtgaacagcaaatagctaagataatgtgatagccaacatactcagattcttagaagatattgagttaggctgagtagtagtccatcgtatgtatataccacaatttctttatccactcattgactaaaggacatttgggctggttccacatttttcaattgtgaattgtgctcctataaacatgcatgtgcaatgtagtacacgttgctttcaaatgtgtgacatggatcatgagaaaccttcagataaatagaacattgtctcaaattcctagtcaaagagcaaaactgatttgctacagaaaactggaaaattttagaaagcattgtttcttcttaaaaaggactaaaaatatgacttctaagaatgaagagttaaaaataatgaatggaagacaaatgaagagataacaagggaggcttggagaggagggacgagggagctggatgtgtggaggttgatggacaggctgcagctgttagcaagatgatgagtaaaagtgagctggtagatctttccccctgaaacgctacttggagtaagaagtgcctcgatctggcactaagacaaacactcccagaaacagatgcatctcagagtgggtaggaaacagacccgagagaaagcaatcagaatgagagagggaattctatggtacactttcctcttaccccattacctgaatgagtcatttcctgccatgtcactctacaaggaggtggcatcatcggtgaaggcccaggctggatgtcaggcatcagtatcggacttagacagggctaaagggagagatggcgataccaagctcaatcagatctacagctcccgagaattctctcctcccaccccctgtccctcacacctgggtgacaggtgtttaccaggagcatggaaatgagatccatgctctgggaagaggtataggaaggttatctggtggtgaggtggcaaatagagagttgtccctctcagagtttcaggattattttttttttttagatgcagccacctaatctattctctaaaatcccccagaggggtacaggctgggacctgctcttatctcttcacacaggcacactttgtggatactccccgggaaaacactacagaagaggagaacatatgtgtatatgtacattgatatttatatttcagtataagtatacacttaaatatatgtgcacttatacacacatatgtatatgtaaaaatactgtatatataaaaacagaaaagcaaaactcctggatagattatattgtacaaaattgaattaatatttcagaatcgaattttaaatgttaaatgaatatattcaaagtgatatggcaaggcttagtaaaatggaacagaactaagcagtaataaagacaattcaactgtaaatatgagttacgaaaaacagaagagttgtgctaaagcagcagttcctaaaatgtaatcccaggagctacaacattggcat

SEQ ID NO: 68197 - DNA, 1128 bp, Homo sapiens
aatgtctttttaacatagacacacataatatgtatatatatggataagtatggctatggatatatacaaatacatacaaactcaaacacaaatacaaacaaatccatacatcagtgtatttgtttcacatgactgttaggaaagtatttctgcataagaacaactagcacaaagtcctgaaactgttctaaaccatggggaaggactgcgctatcttaaatgttgtctttttgaaactttctttagtgacacattaacctctgtgttgttgaccacagcacagaccagttttcctcacttcctgttatcttgttctcatttgatagtgaggctcagagggtgtctgaggggagggaacattttggtacaaaggcagttggcaaacaggaaaagcagcccccttgctggttacaggttaataacgacagcagggagaggagttccttagaattcccttgagccggtcagcttcccttgaggtcaaaaagtcctagggcagctttaatctgctgtataaaggcaaggaaaagtcacttctggtttaccgtaaaacaaaaagagctccttattggatcagaagctgcagaaatgcttatagtcaagtgggttctgttggttgtggagagctgatgaggttagtttgttagaacacactttgtgaaccataaaatctacagaagtaatttatagttgtttgccaaagggatttttctaggcagcttctatatactacatactcttttaagtacttaagttaaattttaattttaacaacattagttgaaatcacggtggttaagtctaaaacatattgctttctttcttatctttttaaataaaatatatttgaccaaacagtctttcttatacaacctaatgggatcatttatgaacatcaggttttgaaatatggtccaatatatactaattgccatttattgaaaacctgttgtgtgccaggtattgtgctaagccctatgcaaaaaacttagatgatttaatctgcaaaacaacctgccaagtcagtgttatgcccatttacttattttacatataattaaaccatggtctagaaagcttaactcacatgaagttaaacaaccagtaaatagtgcccatagaagtaga

SEQ ID NO: 68198 - DNA, 597 bp, Homo sapiens
ggaatctcttacttaacatgatgcttgtggaattcaccatgtagttgcatacagcaatattttatttattcttttgctgaatattattccattacttttgccagtttgaatggatttctttcttacagtcaagtaggccatgactaagggagataatgaagcatggaattgtcttttccagagaaaccacaggcatggaataagaattccctgaggaggccttttctgtcctttcttcatcaagctgcgacattattttcatattcagagaacttcagagcaacaccgagtttcgctgagtgggttcagagttccatatggcagctgtctcagttcctggcacgaggccaaaggatgacagttcttatcttctttcatgttcttttgcccaaccttagggaatatttctttaccctgtgattgctcatatctgaaaatcttactcacactctacaatcttccatcagcccaatgccatgtggtgttaaccctttgcatgctgcagtgttgagctgcaaacctgcccttttcttgcagtaatccaaagtgcccgtaaagtcttgaggcagacaatgttattttgtcatgtatgttcat

SEQ ID NO: 68199 - DNA, 1997 bp, Homo sapiens
aagaactatgactattcaagtggcaatgtcttatggttaattaagtctggtgttccgttttagaggtgaaaactgagaccaagggaactgaagtggcttggtcaaagccacgtggactcttgggctctggaccctgtctcctggctctctcttttgcaacaggacgcttgtgttccctctctggtcttgccagcagacactccctctgctagcctagagaagttatttcacatgctggtcgttctccatgtgtccccccagatgcatcctctgcccttctttgtcctgctctgtgcccaggaggctgacccttgggacccacttcctgtgcctcctagcttccgtgatgtgagagagaagttggagtgtttgtctccacattccttcgggtcagttctggtgttgacagtgatcacaccttcgctaatggccatgaccccagtcagtggcctccctcccgtggccgcagctctttctgggttctgctggcattgacccttcccctctgctctaagcctggggatggtacaggctcccgctgttgctagcccctggtggcttagccccctgttgcttcgcttcatcctgtccacacctctgcatgcagtcacttctctagagtcttttccgttcagcatctgagtggactgggaacttcctgccaggccagaaggatatgctgaagggtttcttcctttgacaaatggggataacaacagtctactcgtggttttagtgaggatcaaatagggtcatgtgtgcaaatgtgctgtgtctgtctggcccagatgaaggtttgtcttcaccagggatcatataaggattttcggccaatcatagcttatgccttaactagtttctacgttggcatattgcaggggcaccccaaccacccctcgctatttctcaggtcagccaaattgataccatgtagcagagccttgcagttttcactttgaaggctgtgaaattgtggactcatcccttgatctggaagcaaaactgggagacgtcacacattccagcttcatacctcaggcagctgccagcattgatctgcgaggagggccctgcctcttctgtctccacctgttacttgaaagccagagaagagtgactcatcagcggcctaatgcagcaaagaagacaaataagtctcagcaggtagggtgtccccaaccatgctccactcagagttctgagcagcagggtcagcctagggaaaaaggcaagtgggaaaagtctactccaagggcctcgtgccccaccccgctctgccagtctctgcactccgacatgtagctccccccatccgcactctcacctgccccatctccagaatactaatcctcaatcctctaaggacttaaccaaagaacatcccacatccttttaatgacagcctattaaacttggtaaaattctgataacatgtgtgagtgcctaaaacatgctggtactatctcagatgcaggaaagacaaaaatgatcgagacatgttgtcatttcatctctgccaacaaataccattgtgattatctgtgaaattaactgattacttaaaataagcattccaaacaacctgctgatcagagggggccctggtagttggctctagctgtgctttgttagtggttgagagtatggaatttggagccagtcttctctgcatttaaacttcagctctaccaggtacatgctccatgacaggaaggaagtaacaactgctctgtctggagagttgtgctggagccaactcaaaaaagctgattttgcacatctctcccaactctgtgttcaccagcatcacattggtagtttaaaatctatgacgggccgggcacggtggctcatgcctggaattctagcactctgggaagccaaggcaggcagatcacttgaggtcaggagttccagaccaacttgaccaacatggcaaaaccctgtctctacgaaaaatacaaaaaggaaaaattagtgggcatggtggcaggcac

SEQ ID NO: 68200 - DNA, 5011 bp, Homo sapiens
acactaaatgccaggcacatgccttgtactggggtgcaatggtgaggggtgacacccagagggagtgtccccctcttctgtattactttttgcctgaccttttcagtagacttcagagttggtcatcatgacttcctgaactcatctccttccatctttctctcctgagctctgagaagcaaagtcaattcaaatccaaagtgctgggcataggagtttgtttcgtaagaattcaaactttattgttttacctctaaatctggcctgcttctatagtgcttgagacttagcaatctctcactactcttagctgtttttgttgttgtggctgtcaatattatttaaaactgataaaaactgcacagggaagttgacacagtcagatattaagttgatatgcctatcattgaatgtctggagcaaggtaacctcacctcagacttgattcctaacaaacttcagtgaatattcaatttttgttttatcacaaatgtattattacacctgcctatatgggaaggtgaagatgggccagttgtttgctttgaaaggaggaaagagtgagaatgtacaactgaatgaaaaaaaatattttggccacagacactttttctcttggctttacaataataaaatatgtagtgggatttttattttgctttagaatttttagttgttttttcctttttgaagtgctccttcagaggaaacaaatctttctattgacattgaaaatgagtcataagagaagtgttgctactttccttttgagggattttttttatttagttttgtttccattaagttttagcaacaggaaaatatggactttcagcatccacagggatatgatcaaatggaaacatatgctccctgtttgtccattattacaaaccatgagaaaactcacaaatcactcatagactttctagaaaggttgatttgacaaaatatttgacaaaatagcctactgcttccttgatatttctgaaaccaaatgagtatttgtgttttgaaaaagcaaagttgattaaaaaaaaaaaagcagctgatgaaaggcccaaaatgcatatgggtcaactatgtttattgcagaaacactagagagtggatgagagatgggtcagtgggcacagaagcccacctgcaactgcactcacaccttggcctacattgccaaagagaccaatatatcagcaattgattggaaataccacaaagatgaatcacagatcaggaaagcaaatgccaatcaatgattgagcctaggcaataatatatgagctaaaggcatttatcaaacctgtggaaaattagaagacttgcctaacatggctgagaatgctacatatgaaccaacttttagaataattcagtcttttttttcagtcccctagaataaaaagggcatatctaaactcttgaatttattttgattaaatcaagaattccctcctgtatcctcaggatctggtattgagtagggacacgataaaacacttgtcaactggaaggactctatcagcagcacctgggctccatttgattttttaacctgcttagtatttccaaccgtaatgaccaaaatgtctgccttcagttacagtatttgtaccctgaggaaatgaaataatttagccccctggccctccaccccactccgttttctcagctgcaaacaaagggattggactttatctggttgctttcagttccgtaaaagagaggtcaaatccactttatgttgtcaaggattctttttctgttttgtgagatacctggtttttagattcctctccctttttaatttttctccagttcttcctgctttctgcatcctcttcctgactttccattgttttctctttaacaatcacacactagaaaatatgtagaagtgagtgaaaaatacatctcatgctctgtttagtgtatcctcaaaaagacttcatggtaaaagggtggttaggatgctgtgttctctgtgggtttctacttttattgtattataatttatattttcatgcttactacaactctggctgtgatttatttttctatcccagatatggtgaaaaataatactaatatgtgtgttttttgtttttagctgggtattagcaaaaatcattccattttccctgagacatcttgctccaaccaccttgcagtgcagctattttgattacttcatgtcactattaatcatgtgcttaaaggaaatagataaactttgaaacagaattcagctcagcaaaggtttattcattatctcctgggtgcctggctctggtgctaggtgtttagagggaacaaaggtgagtatatcagggcctatggtggagacagcaggagaagctgagtgagaatttacatactctcatgtgtgacttatgtatcaaaagaaaggcccaaagtgcttggagtattaaggcaaaggagaaatgatgtatgtgtatggaagtgatttgtttgggtgaagtccttggggtctgtgagagcgaagcctttccatatcctggagtgcttgggtgtggaattcaaatcttcctcagttggcaaaggggtaccaaatggaaggcttttacccaggaaaccatgatgccactggtgctttgggaagatgaatctggcaggagtatgcggggtagtccagggccgggggagggaggcctggaaagagcctctccgtgtcctgatcctggttgcactgcttctttgccaatccctactccatgtggttgcagcagctcacagctataaaaatgtgttgacccaagaggtttaatattaaccaaagttatagtcaaagtcaatttggaggattcaagaaaaaatctgatgctaatagagaaatagaagtcaatatttgtaatgtgagtcacaggctcaaaatagaaaagtaaaacacatcactgctacagttcccagagggctgtgggttacacagcgcagcagatctgtgaaccaggcctcaccaccctctaggtctattttaaaatttcctctggccccttcctctaattcctaaattccagagcatgatattctagtggaactcaccagatatccagccctggtgaagtcatagcttgttttgagtgggtcaatggaaaaaaaagatttttttccctagttgtgtataaccttcctctctagtgacgtggcatggaacgaacttatcatgattttattttgtagtccatacttcattctacagtggctatcactgtttaaaacttcatctcttatgtgttgcctattttgaagaaggcagaggagaagagaggaaagcagaaatattcagaatgacatatattttttgttttatcacaaaatttatatattaatagcagagaggagggtgttgtccactggaggggctatgacatgttgaggagcttctagaattttctttaacaggatggcttttgtgagcgttcatggcgtagctttatcctgactcagatgttaatcctgcacagaggcttgaatgtgttttcctgagtgtgatcagaaaatgaaaagattcatgaagataaaggaaaaaaaagagcaaaccatagcatgtatacccaatgatcagcagttactttcttaacagtgcttcacctagtttatgttgtgggatgtacaacacacaaggctaaaattagctgctcttcacccaatgtgttggaatgctatagggccagatagtatcttatcacaagtgaccacaggaaggacaatgcattccaaactgagtcttcaagggccaaggcgggtttgatagagtctgagatttataacccaggctgctgtacatgaatcctctggagggcctgagaaacgtgtgatacttagttctcccttgatttctttttattgctttgcaagaagcccagcttataaagttcagtttgaacactatctgcttcaaagaggggcctggtgatgagaccagagatgatcagataagaaggaaaaaggaagtggtgaggatgggtgcagccagaacagagtggactggcagctgatgaaccaacctgggcaaggaagtagcttgaaggctgtgtctcggggttggccatttttcctcctttctcatccggaccttgtcaagatcctgtggtttatcataagttaccaatgcccaaccagtatctgcttcctcatcagcacgatggtcatagccccatctccctcgcagcatgttttcagaagtaattaatgcttgtgagatgttttgagatcactgataaaagacattctacctgcccagggtgttattacattatcttattttcctcttcatagtcaggatcaaacccacgataacttagaaatgagacaaattagtaaaacgtggtatgtgaaggctgccttaacaattggatatgtattgaactgggcattgtacttgaattgtatacacaaaatgtggtgctgggctacatcttaagaaatcttaattactttcagattctgtcaggttacatttcatgactctacttagatctccttagaaatggtaaatcattaagagcaaggcatccactgacgttgcccatcaaaatggacttagtacctggccccagaaatgcccaaactacacatgaccttttgcgcatttatttctgtctccttagaggactgtgtatctctttgaagaataggagaatagacaggatatatagcaactggtaatttcagtttatgatgctcatgtgaaaattggattgtcaccaaaacccttcagggtacgatcctcctcttacaaaactcagcactgtacttcatgtgaggcatagattaagaaagctttttccttctccaaggaaggggcactgccttgaaagcttacgtggttattaagagtacttccatcagatctttcgaaagaaaggtggagatgaccaaagggcagaaggtcacctacgtaataagatccacatgagacaataattaaaatggaatgcttaaggaggatgcacgtgtcctgaccatataattctcgataaaattactc

SEQ ID NO: 68201 - DNA, 6174 bp, Homo sapiens
gtgcatttttctgggaaaatagtttatccccctttccttatatttctaacaaacatggtccatgacgcttaagaaccacagtgccatgtgaaatagtatagattaagcgtgtgaaattgatacgcagtgtaggtttgtttccaaatgcagattaggcattttattttcagacaatatttagttgtgttttccttgatgccatgctgatttttattttcctgtaatcctcatccaatcacaatgttccaccaaagcctgaaggtgcatataaaatatgtgatgtgaccttttacccatttggagatatagaaaagcatcctaggaggtgtgtcaattacagcccttctcaatagagaacaaagatcatctcttggaatatggcctaaggttatggggagggggacggggacaaaggatcagtgtcaaggtggggctgaacccatgcattctaatcagttgccatttcccattctccatcccatgcaacatgcaatgctggcattttaaccaagagatagatgttagggaaaggacaggtagtgcaggctgacaccatagatcttggaacagggcagggacatacagctcagtgtttaagggcacttaaactctgagttgggagagtaagtttgggtaagacccaatgagccatgtccataagaatgtttgacctagactgaagatcaggctggagataaggagagggagtagaaattactccccagcacagttctcttaggaagtggcctggatgtctttgaaaggcataagctttaagctccccttccatcacatgaatggtgactggtgtcatgagtgtgtataccagggaatgtcccaggccacgtcttgagtgagcaagggttagctaagccatatcacgtagttcgtctggtgaggagagaaactgagattgagaaaagcaagaattcaaaggttacattgcatatcagcatggctgcagagaacagcagctatcagtggtccgaactacagggtctgtggtagattatctacagagataacaggccacaacttctcttaagtctgcatattcgtgccgcttctcccatcaacagggggagtctatttccgtacctcttgaatctgggttgatcttgagccttacactaagccagcttttgaatgatgcagaagggatgttctgggatttccacactcaggccttaagagatctggtagcttctactttaactcttactattctgagacaccacatgaaaaagcccaggctattcagctggagagagaggctaggtggagaggaaggccccggagcataagagaccacatggagatctctcaaggagaggccacaaggagaaccaaggtactccagcagccagccagcaccagggccatattagatcctccagctcagcccagcccagcccagcccagcccagctcagccgacagctgagtgcagctgcattagtccagccaatcccatgtgaagtagagacaagctgttccactcagccctgcccaaattcctgacccagaggatcatgagcaatgaaatgattgttgttttaagccactgtgttctgaggtgatttggcacacaaagccatagataactggaacaatgtctgaatggtcctggggaactcaggcagaattcaagattgtaacctcttggatatgctaagtgaggtttggaagagggaagtttagacagaaaagtgccagccttgtggtctttctggtttaaaatgaaaccccagaatctccccaaagtacagctttttggggagaagactggcaaaaataagagtgtaaaggcttttgtacggactggatatgcatatgggagacaacccattcatcttccctcttgctggtgaggagacttctaatggtctctgtcttggtcagaactggtgtaggtagccctgcaggctggatgctggcatggcaagcggtgttatttcaagcagctagtgctgttcatacaaccagctcatgtgccctctgcccagcagaagacagaggagaagcccagcccaccaaccagacactaagggaggttttgtgccagacacttggcagtcaccttaaagagacaaaaagataaataagacatagtttctatttgtgaaaagtacacgatcttgggtttcactttttttatatgtcttcctttcagagttgcccttggtgtcaaattgcatcaaatctcacctagccaaagcatggcagggattcagaaatctcttgggagagctgtcctaggccctgctggcgtctgggacaagaatgcaagcctgagtgcatatgctacagctctgtctgctggcatgagagtgtacaggtcttcgaggttttgcaggtaattccgatacctacacattttatttatttatttatgagtcagagtctcactctgtcacccaggctggagtgcagtgactgggtctcagctcactgcaacctccgcctcctgggttcaagtgattctcatgcctcagcctcccatgtagctaggattacaggcatgtgccacacacccagctaatttttgtaattttagtagagacggggtttcactatgttggccaggctggtctcaaactcctgacctcagatgatccatctgccttggactacacattttaaaataagcagatgatttatcctcagtgactcaatgaataagtaaatacttaaatattcagcaagaatttacagaatctctattttatatgagccccaagctgaaccaattgcggaaggatagaaaagtcttcttgacaagttttcctgggcactgtggtgtttcttaatttgctgctgttgtttctgctatttctaattggttttgttatctccattctttgtgttgtatttccctgaggtgtggagaagttaaggccagagttaacgtttatagcattaattcaaaccccagaagacaagagattgataagagaagaaaggaaaggtagaaaaaagattatctacaagccagtccctcctgctactctttaactgaaaccatgaagaatgaacccaagcttaatacatttgtatgccctgtgttgtgtatttgtgtgcatgatgttgtgggttattgtatgcatcactgttcctttgagaacttagtggaattccattaggttccaatttatcccatcaaacaatgtcataaatcaggaacaatttaccttcctgatctaactgggaaggactttactcagattaaaaagagttaaagttccaagggaatcactaactctcctttgttgggaaaagtgctcctaatttgacgtttcctcacattccagccatacctcatggtggaggaactaggagatttccgggtccatggtgtatgatttaatgatttgtgaaaggcaagaatgttaacttagttgattactcaaaactgactgataaggtatcagacaggttaatttgctacttttctaacctctcccagagaacttgaaccaaagcctccttctccctaggtcatctttattgccctccgcatggaaggctaagaatttttgaaggaaacaagcattttattcctgtgctttcatttgctccatcattttattccaaagagacagcctttatttgtgataacctcattatttcctcaacaaccagtggtgatgtcacagttgaaatattttgatctcagatggaaaaagaaccctggcagatagggcctgtttacactgagaaacagagcttagtgctgagggtaaagagcaaggcattctccttttaattcaaacactaacagttatcagagtgttatctgggagacaagctcctggggattctgtgatctaaaagagtggcttttgactcgtaccttgttccttacagccattgcctccatggaatcctacaaccccatttctagaagggacccaaagagcatcagtcttttcctttgcctgcagaggtttaggagatctctgtttaccttggtctgggaagcttgttttatatgtattcttgagaaggtgcttattctctgaaatgagccaataaagaaattgttgttttatatgcatttattacaggaaataaggctaaagtcaaaagttttaaaagtgaattataggccgggcacagtagctcatgcctgtagtcccagcactttgggaggccaaggcgggtgaatcacctgaggtcaggagtttgacaccaacctggccaacacggtaaaaccctgtctctactaaaaatacaaaaagttagccaggcatggttgtgggagcctgtaatcccagctacttgggaggctgaggcaggagaatcgcttgaacctggcaggcagaggttgcagtgagccgagatcgcaccactgcactccagcctgggcaataagagagaaactctgtctcaaaaaaaaaaaaaaaaaaaaagtgaatgataaattgaaatggtctcaattgcatccttgagtacttggcatttaacaaaccaaaggatattttttaatgataaaataaccctgtgagaggacataaaaattccacgatatgattctatcatgtattagagacttaaaaaaaacactactaacaataacatataagattacatttacagaattgtatacagaagatatactaataatatagacccccaatatatgtctaaacaattcaagatgatctaaacttcttttctgttcagattttattattttaagaaacacatgcatatgcatgtttagactgttagttatgcatatattttttgaatttaattgggtgagatatttgtgacaagtgaatgcaggcttcaaatgtgggttgagtgggaaataaaattcagatttaaggatgatcatctaaagctattatgtcattaacattatagcaggcacagcaatacgttaacatcatagacctgggaaagctggacagagttgggagattgtgatggtcctaaaaaaggccctgataatcatttagcatgaaattatatagccttcagtaaaaactttattataattctgtgcattaaacaaatatccaattaactgacaataagaaaaatgagaatcgtcaggtaaacccttgatcaaatctttttcacctgattttctactaaatccagagtctcaaagcagtctatgtagagagcaccctctgtgaatgtatggataaaatgcatcctcccctggtcgccaggtaaaggagctactaattctccttgcctcagggtcacacatgctaggcctcaaatccccttggctttctaatcagccttggttctggattttcattcgttccttgttgaaggtgaacatgcagaatttattctacacaatgtcgctagtgacaaacgaagaaaagaaagggccagctagaacttaacagttccaactatctcaaccttcattctactgaaaaccacagaatgcctcacttctgtagagtcctctttatctaaggcaaacagtgctaagtagcacttcattacttaacgattattaagaaatgaattctctcaacccttaggcttctttgaaataactattatgtgtcgtagactcaatggacaaatatagaaccaaatgccacccttttaacagtgctctgagactggccggggaagagggtgcttatgttgaagaagcccaggaaaagctctgcatgtgaccaggaaggagagaggccagggactaggaaagagcaggcaggggccaaaagggaagtcaaatgtggtgcactgggcatgcatctttcagccagcctggcgaaggttcaaaatgagctctgtaacctcctgggtatgtgacctgtggtgtgtacttaacctttctgatcctcggctcctcgcctctaaaattatgataataagattgccttcacagtgctgtcgtaaggattcaatggcatcatgtacgtgaatcatttagcacggtgccttagataaactcagtaaacagatagtgttatgtcaaaaattgtattacctatgttgttattattgttattaaagtatgcttcaaaagttggccctgtgataaaatacaaatagaccccaaaagaggtctgtgaaataaagccatttggaactaaggtggcatgtaagataatatatttaagagtgatttctatttattaattcattcatttcaccaatatttatttctcaaccacattattccagccac

SEQ ID NO: 68202 - DNA, 693 bp, Homo sapiens
aaatttcctgctcttccctggaggatgttggcagcctttttcaatgggcaggcaagctctggagtcacatactgactgccccttaaaatgacttaaggcttggaagggtggcctctatttttcttctttttaaacattgctgtgctgagccaatgtgggttggtgtatccaaaaccaatttggcaggtcattagtttgtttcctctgatagtgctacactgcaggcaggattacaaaacacattccagctggctggactttctgatatctcgaaatggttccatggcctttagttagatttagtggtcaagattctggtagatttccctttctctttccttttaatttacagccaatttcagtggaaccacaccataatacagatcaatgtattatatttatattttaaataccataggtcaaaccttgaagtagaaatcttggatattaattcttcatgcatattttttataaagtaattttcatatagatgcttgttctttgccctagtagaagaagaatgaatggaaatgtgagagtgagagacatgggaaatacatttaataacttttccaaggctctgtcatttaattttgtactaagagaaaggtgttattatcttcattttaagaaatgaaaaaaaaggctaaaagggatttcatatattattcaaggtgacatagctctgtgaag

SEQ ID NO: 68203 - DNA, 2727 bp, Homo sapiens
tatattggatatatttatgtaactataaatttacatgcgtatggatatgaaaataaatgcatacacatttatgtaaaaaaatttgtacacatgcatttacatatgtaaatacatacatctctatgtattaatgtttaaaaacactcaatttccagcctgctgttttcttttaattttcctcctattccggggaaacagaagcgtggatcccacgtctatgctatgccaaaatacgctgtaattgaggtgttttgttttgttttgttttttgaaatcgtatattaccgaaaaacttcaaactgaaagttgaataacgggcccagcggggaaataagaggccagaccctgaccctgcatttgtcctggatttcgcctccagagtccccgcgagggtccggcgcgccagctgatctctcctttgagagcagggagtggaggcgcgagcgccccccttggcggccgcgcgcccccgccctccgccccaccccgccgcggctgcccgggcgcgccgtccacacccctgcgcgcagctcccgcccgctcggggatccccggcgagccgcgccgcgaagggggaggtgttcggccgcggccgggagggagccggcaggcggcgtcccctttaaaagccgcgagcgccgcgccacggcgccgccgccgccgtcgccgccgccggagtcctcgccccgccgcgctgcgcccggctcgcgctgcgctagtcgctccgcttcccacaccccgccggggactggcagccgccgccgcacatctgccgccacagcctccgccggctacccgaacgttctcggggccagcgccgagtggatcaccggggaccgcgaggcacccgcgcgccgcagaccccgcgcgggctggagcacccggcagagcgcgccacagcgccgtggcctctgctgcccgggctgcgccagagccgcggacgggcgcgcagagcgccggggactccggagccgatccctagcgccgcgatgcggagcacctactgcaggagatcgggggcctgggacgcgctggccgaggtgtgatcggaccccaggctagccacaaagggcacttggccccagggctaggagagcgaggggagagcacagccacccgcctcggcggcccgggactcggctcgactcgccggagaatgcgcccgaggacgacggggcgccagagccgcggtgctttcaactggcgagcgcgaatgggggtgcactggagtaaggcagagtgatgcgggggggcaactcgcctggcaccgagatcgccgccgtgcccttccctggacccggcgtcgcccaggatggctgccccgagccatgggccgcggcggagctagcgcggagcgcccgaccctcgacccccgagtcccggagccggccccgcgcggggccacgcgtccctcgggcgctggttcctaaggaggacgacagcaccagcttctcctttctcccttcccttccctgccccgcactcctccccctgctcgctgttgttgtgtgtcagcacttggctggggacttcttgaacttgcagggagaataacttgcgcaccccactttgcgccggtgcctttgccccagcggagcctgcttcgccatctccgagccccaccgcccctccactcctcggccttgcccgacactgagacgctgttcccagcgtgaaaagagagactgcgcggccggcacccgggagaaggaggaggcaaagaaaaggaacggacattcggtccttgcgccaggtcctttgaccagagtttttccatgtggacgctctttcaatggacgtgtccccgcgtgcttcttagacggactgcggtctcctaaaggtagaggacgcgggccagggcccggggtgggtggtgggtgggagggggatttgggcagccactgcggtagagcccttccttacgtccaggccagaagtaaacagacccctctccagtccacgtgcaacggagccctgcaggggctcccacttccagctgccccgggcgaccgtaagcctcaccctcccggcccgcactcttccacccctctttcttcccctctccctggaatacttttggagctgttaacacttagatgaggtgttttatttatttatttatttatttttaatttttttaaaaacttttttgggtcaaagaaatccctttgagagggtagcccctgggtttcacccgttagctgagaacctgtccgctctgccatggtgatctccattcttcaagtgtttccgggagacttggtttctttgctcagagccgtgtcccatttaggaaagtactaggagtttggggttctccctacttgtttccagaaatgcgaggggtcagtactgaaggatcacttggtactgtgtttttaacagctgacacgtgcattaatagatattcaccatttacgtaatcccgggaagatacatgtgtatcttgactgcactgtggggatgcgggatggagctgcctttcgagacacccctgagggtaggggcctgggacacaagtcataagtggcttcagaagttgtggccttgagcttacagggtctggaagctataagggtgtgtgtgtgtgtgtgtgtgtgtgtgtgtgtgtgtcaggaagttctatacagtgcctctaaggaagtcacatgcaccatttatgtgtgtttatatgccagacagcgctcagcactccgcatttgggtttgtataggggacgcagggtgt

SEQ ID NO: 68204 - DNA, 709 bp, Homo sapiens
catagaaagatagtaaaggaatctcttgtgttggtggaataataggactgaaacatattgaacttcttgaagggaaagtataagtagcatcctcttcttttgctttctggacacatattttcccatctccagaaagactgagtccccagggaataaagactattgatgtggccttaagtttgcaatttgtgcttcccataaaaattcctcccccaactatgtatgtatgtcaatcatgatatgtcaccagcaggtggcaacagcgagtgcaatagaatggaaaaccccaggtcagaatctctgcagatcactaggaagggtagcatgccagtgtacacagtgtatgcagaagggaaatgactgctatttatttttttttaagtgctttaccactctgtcctacctctccaagagtccattttctttcttccacaaaaattgatttagaccagaggtcaatactcttattaatcagagggaggtccttttaatagcctgtaggtcttttcctctacatcagggacagggaggtttgcccttgtttgttaaagagttctcattttctgacttgcctgcccctatgggcctcttaaagcaactctgaaaacaagtggcaaagaataattttttactagaagacttagcaagagccaactaatttgacccattaagtgggctatcagaaagctaggaggagatgacaggggtt

SEQ ID NO: 68205 - DNA, 898 bp, Homo sapiens
agtgtaggctgagtttgaagccagatcacctggttagtctgagaacggaacatatgatgaatccaaccattatgttccaaatatgttccaaataaaaggagtcagaagatacatggacaaccgaggcagtctcagcattcctatggccttaagttgggaaaagaaacaaaacaaaacacatgaactaatatggctgaactgaaaggctctttggaatggcaacttttgacccttgagtcttaaaatctctgttgactcacctcataactttgtaccaaattggcagtctcaacatatttgttggatagatttccttctaacgttaatttgactctcagttcactttctttgaatcaatcaaaagcttctccacttttcaagaagttcaagttggtatctatgactttggccatagagtagtagtgttccacttggcctgtactttagaattgtctgaggagatgtgtgttaaattacattaaatttggcctaatcttcctctttatcttggctctgtacatagcaaattgcaacctaacttggtgtgtaaacaaactgtgacattacttaagagcacattcttgtgacaagtagctgagtctcaaacaatcacagcaaccaaactgcatccaatcacagactgccaactaatcagactatgtccctagatgacaaatgcctcatcataccatgtccaaataaggctaatgccaaactgtaaccaatcaagctgtttccacattttacttcctttttttttttttgtccatacatacttgcctgcttctactgctaggtggagctctctgaaattctactggttaagggtgctgcccaattcatgaatttttctttgctcaaaaaaaaaaaaatgctgctaaatttaattggtcaaaag

SEQ ID NO: 68206 - DNA, 3235 bp, Homo sapiens
gtttctttcagaagctaggctctagggctcatttgtaagggtagctcaataccacttataagcttgtgctgaaaggggctggcttgcaaacgatacattcagcaagcccatgctgaagttctagttttttgtttattaattgaggtgaaattcacctaacataaaataaaccattgtaaaatgtataattcaattgtatttattcagtacatttataatgcaatgcaactattaatgctatctgttataggctcaaaacatttcatcacccccaaaaagaaaccctgtacctattaaacagtcacttgcactctcccctgccccaagcacctggcaacagataatttgctctctgttgccatggatgtatctgaatatatacccccaaataattgaaaacaggtattcaaacaaatacttgcatatgaacgaagatccaattttaaatgggcaactttgaaaaaaatcagtctgtaggtcagttaatcttagaaagtgagtctataaagaacaggctgggtggccacaatgcccattgaatttattaaaacctgtttttattttgtaccttagttcagactgttcttagtgccaaaagcagaatcagaagatcacaatggcttctagaaacaagatgaattaatatgaatggtgagttctgagtgagccaggtcataactttcagtaagaaaaacacagaatccaaatttcattgttttcagcttttgttttaactgttttataattgggaaattttgccctcaaatgaatactattggtaaataatcctttctaattgaaggcttaaaatgtctgggcaaaactaaaaatgactccctacccaaggtttagtaatagttaaggcattcaaacaggagcaggctgaagaatcgtcttcaggtttggtcttagcaaacctgcaattactcatctccccatccagacttaccctgaacaaagcaaagggtaaccaaagtgcattaatcgctcactgatgactcaagataaacaaaaaccttataatctttgtttcaaatagtgtgcattgagatacatagagagagagagaaaaaaaaaacagtccctcttaggtggtgaataaccatttacccatcagatcttctccaagtcaagagttccactgcctatgtcaggcttttggacaccgcacataaaacaaattaagctttattaacttagtggaatatttggaaatactaattttacaggtgcatgagagaaaactgcagttccaagtattagagtaccattaaatataatacactccgtatgcaggggcagttatttaatattaaaccaataaaacattaccagtgccggtgagagttttggttgttgacagcaggctaggtgtcccacagccatgccgtctttctgtttgcaggccaattttacacagctgctttcttctggaaatcatgcctcatttgaagccttcgcaagtatgacaaatagcctctctaagccttagcgacggtggagaaacttgaaaatatttaggagcatttattaactagaatatgaaagaagatttagttcaactgcagcttttgactgtgtggaggtcttgttattgtaagaaatgctatctgtttgggcgtgtatatcttttgcaggacactgtgtaaaattatcaccctgagggcaaagctaagtttaaactgcatagaaattctaacgttgatctataagtggacaaaattagaatcaagtctttactttcaaactcagctgtctggtggtactgctgatccacatgctgccattctacgtatcacaaatgtcagatagagctccttgtacagggagcttcaaatctgtgcaggaatttaggatttataggaaaaagatatagaaaaaaagaaagactaggtgctaattgaattgttcaaaccaggcttgcaacatgcaaagcacactgagactaaagtcaggagaggtggacccagctgttggagtttgggatgaataatggaggaagggaggacataggcaactggcaggggctaaggatggggtggggtggctctgtgcacacaacatgacatattttgagaaaaagtgaaccaatatggctaaagtggagagttcatgaaaagtccatggaggcaagtagaaggagagaaatgtagatacattgaatggtcccattacagaggctcttgaacaccaggataggatatagatcttttatttaactacaggaaatgtggggtgatgagggctttgggaacatgagtgtgacataagaaggaagggtttggggaaattccattacaacagcctcttagattaattgacatggagagaattgagaaatgcccagtatgcttagaggattgagtaatgagagacctgcacgaggttggaattggcagtgataaaaaggaatggaatgttttaaagaatcatttgaaagagagaaacattttgaaggaagtatttataggacctgagaactcactgggtgtagagagtgacgtgtgggcaggttcaggcggattctgggactttgagcccaggccacttaaacaacaaaataagaaaactcaaagagtaaactgacttggggaggaaaagatgagctcagtcagtgagatttctgaggaagactagagagctgtagcagaacagagacagaacccctttttggcttctagatatttagtgatagaagcagaagtgaagccaggggtgttaaagaatgggccaggatgtagtggaaaacaaaatcttttgtttcaaagcacctagtcaataaaaattactgcattgaggattgagaaaaagtcattgggtttcctgagtaaacagctatgcactattgctaggtaggtggggtgttggggggatccatttctgtaggttaaggaataaggggctgctttcaagatggaagccgtgaatagactccacttttgaagaaatgaaagttaaagcaaagagagaaacaagacaggcattttggtctaatagaagcatcaagagtacacatttttgacaaaagaaataagagtttaacttagataagggagaaatttaaaagaagaacatatcaaagacactaagtagagtgtgtatcatcttggaaggtaaaaaatcaagtattaataaagcagatcatgacttctaccaaggcagaaggtaattagagatgatggctgaaaacaacagcgagaaacatatatcaaaattaatagaagtatttgaaaga

SEQ ID NO: 68207 - DNA, 2221 bp, Homo sapiens
tggcttaatactgagaaagagactgaataattattgcacttctggcaagtctatatatactgtctcctgacgaaggaccctccagcaacttcgggctgaaatgaagcagattcactcaatccgcacaaactctcagaaaagtgcatctggaaaaaaaaaaaaaaagtgacagggactgagtcccagagatattccccaggaactctccccaatctgtggtgcaatatgtggtctgacacagctggacaccaggcagcacttggccaccagcccttctggctggactcctccccaaggtagggtttaccctcacataaaattgccaaccagggcccacttgggtatagaactaatttagcctcctgtacacttgatgaatgaagaatttcctctggggactaaattatagggcttgttggagttgctctttcgtgatctgttatttggaggtaattttccaaaagggctggaacacatggccatgagctagaataggattcaccatgaacagctgccacgcgctggccggcacatcccagtgcccttgtcctctcccccagcctcccctgccactacccctgcttcccgagagaggaggtccagacaacagggctggacttaacgttagatctttactttccttcttaattaaaccactagaatggaatctgcccacctttttctgcacccaggtttccagaaatgtaacatcttgtcgtaacacgtttcaaaacagatgacaggccttcccctcatcctccaatgtggctgattacaagcttctgtcaaattccaccaacccccaccaacccaccccagttggctggaagataagcttctgatcttcccttggctttttgaactgttggaagctgtgtaaacacaagctgcaggttagtcagattctatttgacccacggcctgctgagtgcaaagagattacatttgaacactcccttgtctaattaagcaatggtgacctattgcggggtgcttgctgatgaggtcaaatagcaagggtttttaggctgacctgttgcagctggtcatttgctgataaataagaaacagctagtttttagtgagccaacttcccgacagagccttcctttcataaagcactctaatttggttatttctctgaatttcttaagtgagtttcagtactttagaaaaatttttagtactgagagtaacagacatttgtcctatgatggaaacccttcttcgcacagcagtgccccttcaaaggatctacaaactgttatgctgtgcctctagatctttttagaccaccaacttcttcaaaattgtgaaagatgaaggtcattttgaatgttgacatttggatgggatatgatggtgatagtgggacaggaagccccaagaaatagatctcaagaccttgacctagctacataatcagaatcatttattgagcatctgctctgtagtagacgctgttgtaggatcttttaatctttatctccactccttaccatgatcgtcacagcaagtgccattatccttgtttcattgctaagattcctgaagcataaagaggtcagaaactttcacaaaggcttgcagtcatgaagcggaaggtctgggagctgatccataattcccatggctttacgggttgttcatttcaggaagctgcccaatttccttgtggaagaagtgtctgaaggccacctatggggagcaaaatttgacggatgaagattttatctgtgaataagaaataaaataagaaagtgatatcttcactttgtatctaaaatgttggaactgtagacattgaaaaagttatcaatgaagccctcgtattcaccaccatgtccctacataggttatccctaaacctctgtagagggtatctgttttttctgccatcagtctatttcctgaaattctggaaaaaaagtgtacacagaattcctgcctcgtccaaaattcagcacgtgtgttctgacagacgcagagtccccagatgcctggccactgtgaatacctttgagccaatcagaatcaaatacgtgtgtatggaaagttctgccacagacacgattgccctttctcttggcctttagttgggaatcacaggctggaactactcctgtcatcttgccacctaccatatgtagccatacggatgtatctgagagctagaaactgggtcctggtgatgttggaatcctgatgaagctgtgcctaa

SEQ ID NO: 68208 - DNA, 2442 bp, Homo sapiens
aattacaggcatgagccacagtgcctggccaaaaaaggaaatattatttttgaatggcctcattaaactccatttttgaaatatgtagaaattaacattttatatgaatcttttgttcatctacccaaatactatacgtcatactacgataaaatttgaaaaataaaattgtaaaaaaaaaaggaatattattgttatttatctttaggctgcataacaatttctcatttccctcttctaacaatactatgtggcatatagagaaggaaaagttagctacatacagttcacatatatggaaactgaagctcagttcatttaaaggacttaacgttagttacatgagagtttaagaggcagattgataatttagcaccaggttgtgtgactccaatgtcaataacttagacattcctgataaagagaccatgttctttgccatcagtagttatagacatgtttgagtcagccactcaatgtatttaaaaatgtatactttccaataatttaaggaatgtaataccttgtcttgaattaacttgcagattacgattgcattctatgtaagaaaaggacttgctaagaaaactaatgatatacttaagaaggcggagcctcttaagacttacttaagagaacaaattcgatgggttgtgattgtactttacccatttgttgaaacagatacaaagggtacaggccagatccaattcagtgagcagttttagattaggttccttttccattgagataaaagtcacattactctccaagttttctattatttgcctaacctttccacccaattgcttattacagtgaagtcattattgtagtcattagagtattatcggataaaagcatgcatacatttacatagttcttccaataatatctcattgggtttccaagcctttgagcaactttgaaggttctaaagtgcttgaaagatggaaaggttttgcagtctctagatccaaatgatgttttgaaggtgattcaagagtatgtggcaagactggaatatttgtccttgagtctgactctacattctgatctctaaccacggggtgttgccctctccctctgtgagcacggatgtctccagacagaaaaaaaccagagatatcttggacattaaataagggtgtttcaaagaatatgggccactaagtcatctatacccaatgacttggcaggaagtagaatcatcacctccttttagagtcatgatatgtctgaaattgtgtttattctggtaaaataaacagtcattagcatgattcacactttttccagctttagcaaagaacagataaattatctactattatcctcctctaccttttacctcatttttgagaaatcaaatgtgtttatatgaatagctaccatttcttaagactttacctagtgcctgtcctcttgctaaacacaaatctatgccttatctaagcctccacaatagcccattatgagttaggcattattcttttcctatgtttacagataaggaagtggaggtttaagaggcttaagtaacttgcctaacctaacattgtttggcttttatttgtaagtacttctttcagttacctctgcactctgaaaatgcttcaatgatgactccaagacagacatgccaatgacaaacatactgatacttaaatagattttcttctgtctccatatgtgcatcagatgaagacatgaagctacaggttcagctcttattgaaaaattgcattcgtgccttgagtttctccattgaataatgtagcattgatatattaattaaaaataatttgtgacattttctcatcacctatgagatatcactttgaaggcacagttgtgataataaaaagaatgctttaaagtaaatttgaattccttaggaggtaagctttattttcaaatctttctgagtaagattatagcaagaggctgaagaaaacttctagcatagtgaggtgggtacactatggaagactttcttaaacatccagtgtccctgtcaattaattgtagatagtgtaagttcaatttgtctacagaatgaatttcatcttacttgacaagacaccaagttcttcttccttccctcatatttagaggttcttattagcttagatcagtgtaacagacacttacagtcacctgctaggctgcagctatgtgttggggactgaggatataaagctgatggaacagtccaacagggagagacataaacatagggggtagatggaatttcagagctagcactaagaaaaggctctcaggccagattctccagctggggccaggtaaaggaacttcatcctaaatctgtttcatataagcacctcgatttttctagtttggggtttctgcccttaatttttacataatagcttgttgatgcaaataaagaggcaaaggttcttcctcatttccctc

SEQ ID NO: 68209 - DNA, 671 bp, Homo sapiens
accttctgaaatgctgtactttttaatttggaagagttaaacatgtattttaatatcaacaaaaacaatgtgtatatataatatgtctctttatctaatctacctattaatatctagatatctgattgaatggcaagacatcctcatgttaatgaagggaaggcctagtgaattagctaaggtgaggagtccttcccctgcaggaaagagtatatttgcaaagacaggtcaggtctgagtcacaatttttgggttagtggcaagctgatgaagtcaatccagcttcatgttctcctgactaatgcaagatttgggtcagagtccaggccctgcctctatggagagaacaggcaagggcaggcaaagtagtgtgaacagagacctaatttaagctcaaatcctttgtcgttcaacaaaagagtgaggggattttatgttagagttggggtgaaaaatagaagcaaccaattttcttgcagtaaatgcaatcgaaaccatttctgaagtttccatgaacttaggagatctctttaatttgtacagcaacctctggatttgctgcttttggttagaaaggttggaagattctgcaaactttgtggtaggtcacctaagccagtgcttttcaaagttctatgtgcacataaatgcttgaggattttgttgaagtt

SEQ ID NO: 68210 - DNA, 585 bp, Homo sapiens
tattaggattttgttcagtagatattggagttccattaaaggttgttgaatgtaggttaaacagaaagtaaaagatagcgaaggaaaaaattggcaccagtagctcagagacaacctgatatttcatttctctcacctttcacctatggccattcatttcacttttttttttttctatctcatgagcttttttttttttttttttttttttaccaacactatttggacactgaaaccatgatctcacctagatatttacttttgtttcacagttgtcattgaaagtccctgtacctagctgttagccattgtcctaacatgtttaactgtgaacttcagcaaggcccacattttaaatttcaagtcttgtctggaaccatattaggacctttataatttgagttcatacttcctttcttttgccacactagccacacgaaataaccttacataacccctccattccagccacactaatcttctcttcatttttcttactgtatatccattcatgccatagtgactttgtacatattcttctctttgcctgaaaattaggtctctggtttttcaaatagttatgtc

SEQ ID NO: 68211 - DNA, 875 bp, Homo sapiens
gcaactgccatctcagctgcggtggccatgggaagatattcattctgcttgaggaaaatagaaggaaaagtaaagaggactttgttttgcagtctggataccagtacagccccaggaaaataaagcaccaagcagattgctaaaacctctgatcccaggccctagcttctggatggcatttctagacccaccctgggccagaagggaacctgctgcaatgaagggaaagagccagtcctgacaagacttatcatctgctgactacagagcccttgcgacatgaataaacattagcagtagccaggaaatagtcactacaggccttggacaagacccattgctgtgctgatgtcaggtgtgatccagcacagtctcagcagtggtggccacggaaatgtttttgttacccctccaccaactccaggcagcttctcacagaaagagagagacacaatttgtttggaggaaaataagggaagagaacaacagattctgcctgataatccaggaaattctctaggatcttgcccaataccatcaaggcagtacctctacaagtctttaaaaattgtggtgttactgagcctggactgctccttaatacacatacagctgctatgaccaaggactcaggtcacaacactcaattccttttgaatacttggaaagccttcccgagaaggatgagtacaaaccagcccagaccatagagattacaataaatatctaactcttcaatgcccaggtatcaagaaacatccaaaagcatcaagaccatccaggaaaatatgacctcaccaaatgaactaaataaggcaccagtgaccaatcccacactgatagagacatgtcacctttcagacaaagaattcaaa

SEQ ID NO: 68212 - DNA, 1182 bp, Homo sapiens
attaacaaagtagcatctatggttagagtcagggttcaactctcagctccaccactggctaatccctctctgcctaacttttctcatttgtaaaataagcataataatatacctatctcatgggtatattaaatgagttaatacatgtgaagagctcagaaatgcctggctcataagaagctctcaataaatgtaagccatatttattgcatagttcatttcccctcatactacttgttaccagatggtgcctgaaatgacatgaagtgcttgctgaatgaataggaaggaaaaataagagtcctttacctaacagaatataaagtttcaatgaaattacaccatgcagagaaagcaatttgtcctgtttacatggaagacaaacaaggaactggactttggctttgagctgtgtgaatgggagatggcattgcttccgtgacccacattcacattcaataacaagaccagagagaaacagcttttaggagcccaacaggaatagtcacctaagagttgctatttgactaaacagctactccattcttttcttctacacagccgttccttgcacctttcaactgtgtggcaatatgactctcctgagattgagaaacagtgtgtcaggttccattcatccttaacataacagaggagtggtagctacagtataccagaaagggagctttcattgatctgcagcactctgtttccgtcacagggaagaatcttcttgcaaccagggcactagagaactgaacagccaagtaaaatattgggcaacatcgagtcacccgcacgcccacatagagtcccaatttagcaaaagagtaaagttcatgagcaagaccatcactaataatttgccacaaagagtaccaatttttctgttttatttgtgaagtgttgcaaaatgcttgctgctgatcctcccattgatttaagtacatctgaaccattttttttctatttccaactacagaaatctgtaatttattgagctatttttagctacaaactttccttgttgaaatctctggagttagaaatctaacaggcaagaggaattaaacaaggatcatgtaaattaggaagtgtatgcaaaagattatttgctgatgtattggtattgtggaggtactatacccagctagaagtcttgctgcagtctgtggctgttat

SEQ ID NO: 68213 - DNA, 1490 bp, Homo sapiens
ggccaagaaaaagtaaaaggaggaaaacagaatttaaataataaacccaagtgatcaagacgtgattatttcttctacagtggggcttaaaggctatttttcctgaaataagactaaaatctagagtacatttttaaaaaataatttgctctactacgatatgtagtaatgtattgatattatttatatagactttaaaatatgtttagaaactgtaactctgtaaaatattaacctgaactggaatggccctctttaaaaaatatataattttttttaaactctccttcactgacttgctctttcaatgaaccactgaggtcactatatgatgaggagcaatttgcaataatttaccaaaataataataaggtagctctatatcctgtgtgtttgatttttttaaaaaggagtttccctttcaggaccccatgaatgtacaaggttcaaacaaagtgcggggagctaatgaacagactgtgttttcctgtgccgggcccctgtacagaatgacttcattcagggctacggctcgcgcatggaaagtgctggtaaaaaatcccacagagttcagacgaccttttcctaactttcgtttttttttcccttgtttgcctttcgggcctaagccagggaaaacataaatattcatcagctgatatttgcagtagctgtgaagttatgaatgaggccatgcggctttcctcctatcccatctacagaatggcagcttctccactcagctcccagccaaacgacactttccgaaatccccaaagtgtactagaaggcttttcaaattcagtctttttttttcctttaatgctcaaagcagaaatgctgtctgcttaatgtttaccctaggattatagaagaagaaaaagaaaaacattgctttgccaagctttaaactttcagatgccttgacgtaacaggcaaatatgctagcagctcaaaatattggtagtatatatcaatggatatgatggggtcagggatttttaatatcaaacactagacagatacctgaggcatttattgtgtgaagggcagagaaaaaaaccatcgatttgacctggttctactgctttgttagcatctggacaggtgttagagagagatgctggaaaacagttttgaataagatttcaaataggtcctcaatgatgagatataaaaagaatgaaaattgtgcctgccataaggtctgggatggagctggtctttctgtcgtccagattcctcacaaattaatgctttaaaatctggaatcttttcatcttccagggtctgtcactcaaataaaactttagtagaaggtgaattgtgaatggaagagaccgtagggtaacaaacagcaaatagccatcagtgtctaggaacaaacaaaacctgttctgggctcagcataaccatatgtctttgagcttcctggatctggtccccgtaacacagaggtctgaagagtcaccttcagaaacaggaggcat

SEQ ID NO: 68214 - DNA, 660 bp, Homo sapiens
ctcctatcatttgagctaacatttacattacctaaaataaactgtcatcctgatgttgttctataattggcatgtgacagaatgcacgctgaggcaaatataagttcggaaagcatcctgtctttatgttaaaagaaatcttcggactttcctaaacggacaaactttattttgttgctatgcaactgacatggaacatagtccatcagacagtaaataagttatgaattttacaatgaagagaaaagtcttttctctctgtttgagaacaagccacaacttcctttcatggtttcctaatccaccacagccctctaaagctgtttcacaaacgccaatgttttggcaagataaacaagcaaatgaataacacagcaatgacccaaatgcagtctgcaaacatcacgctaagaggcatcaatactattcaattcattcctacaggcctgggaacctgggctccccaagcctcgtaaagagaagaaggtttgtttcacacccacattcttccaggtagctgaatataaataagcttaaacaaaggagattctggcaatttctgttggcaggcacccatcactgctacaggtctcaggcattattctgtatcagggcataagagtgatttcagccatgaggaaaacatctgtgaggataaaa

SEQ ID NO: 68215 - DNA, 3690 bp, Homo sapiens
tcaagtcttaatgaaaacatttatttctgatccaggtaatctggatgtgaagaagcaaaaataggaaatccattgtgtacataaattttaggggcctgcatactaagcctgcctgtcccaggtttttatcaaagactactgtgaacacatctcttaattatctagagtctccttgtgacttctcactcatttcaggcagtcattctgaacttaataggctctcagaagaccttgagggtcttcagaagggaacaatatccatctacatctaatagtgtcatgtgtgaagacctgaactatgcctttggcttggaaccaacaggaactttcatcccaggctctgatcagggcttctcaatctttgaggaatcacatgggtatgttaacaaaattcagattctgactcagtaggtctgtagtgcgacctaagatctgcatttctaacaagctccagagtcctgctgacgctgatgttccaaggaccatactttgagaaccatgaggtagatattttctttcaaaaggactcatccaaattagtagaatatgtgtgatgtcctgagcaaagttggggctcattgaaaacgggagggaaatatggagcaatggcagtgaagttggtagtggttgtcccatggtttgccaatggcccgccatgccttgctgataaatctgcctttcttctagcctggcaccctctggagagggtcacaggtacatttgccacatttgtttatgtattcttctcttattagttttaaagccaaggaattaaactgtgttcgcataatggcccctcagtacacttaaccattatcccatgattttggtttggtttagtttgggttgtgttgttgttgttgttgttgttgttgttgttgtttgtttgtttagcttgcttatctgggatttgtccagcttcctagatctcagatcagaagcagaagtgaataataaataaaaataaaatggtataagatgaagaagagagcgcttactcaaagctgagaaagcacaagttatcaattataaaatagtttccaaatgtttaatgtcaaatccaacaatcttacacacagaaataagatgatgaaccatcaggcaaaactgaagtttatcatgctgggcttgatgaggaagggaattataatatatttgagaatgatgttcatccacagccaccaccaccaccacaaaacaatagagggaaatagaaaatattagttatcaatgagagtaaattatttggaacatcaattcatatgggactaatcatatacctagattcaagcagaacaattaagtaacatgttaatttagacccaaataatttctttgaaaataattctcttttatgggaaggcagaatcaaatttccaaattatggttttaaggaaaaagaggaaagaggaagcaaaaaagtgtaatatgttcaaagggcctaaagtgttggggttttcttaggtgcatttgattaaaaagctcctacaaaacttagtcatcaaaacagctgcactgaaaataattttgttgagaaaacgcattttgtcatctgcacaggaagtcattacgtaatggggaaaatatgcgatgaccaagtaccaagcagttgtgtggttctaaactcagggcctgtcatagtgaagtgtttgtataactgtgcaccataatgtccattgagtgtgtcatcctatcttcacaggggaactaccatcataaaggtcttcacagaggatctaccatcacatagacgcagtcaacattgttttatgaatgtctaaaattacaattgagattaaccagaaaaataaagttctgaagtcagtgatctaaaagaacaaaccttcaactacaattatgcttgaaatacttaaaagttgtcaaacagatcttaatttacaatttatggaactgaaccaatttaaacactgccaagaaagaccaagaaaccagatttaatcgttgccgtgctttcatcatggcccattgaacgaatccggagctatataatcttgagtgatcacactgccactacacctctagacctcttttttacttatgaaaatattttcaaggaacaattagtctcagggacatcttagctctcccttccttgttttcactgtatttctagggcagaactctgcaacagactaaaacattagctctactgcagtgattcctgtgttattattctgtcattttactgaattgtcaagtcctggcataaatggcagatcatatggagaccataacacagtgataggcctttaaataatggttttaaggagtattgagtttgcacacaacaacttcaaccaacctcccagtgtttaacaacttcagtgttgggatacacatgtgagcctctgacttttttcactgtcacattttaatgtcatcaggcacattaataattctgagaagaagcaatctcatgctctcaagaaagccacccaatagcttaaattttggtgcaaaatcgtagaaatcactccattcgatgactgtctttaatatggctagattctaattttttaataggtgttttaatcaacaatcttgtttcattgcaaagtgattttaacactgaagccactatttatatgaaaatactttagcaatgaattatacattttagtatatgtatatatatcaaatgtccataatcttttaatacatatataagcatatgtaatacggatgtgtgtttgtgtgtgtgtgtgtgagtgcttacacacagaaagagcatgtcactgactttttattgttagaaaagcaagtctaaaacataaaatttggttacactttagagtgaaacagacttaggttcaaaccccatcaccaccattactggcactagaccttggtcaagggcttccttcttctctactgtcaaacagaatgagaattacttcacaggcctattgtaaggattaatcacaagaacgtaaagtccaagcattgcacctgatacatgacaggcactccacttcagaaagagtaaaaatgttccttaaagcaagtccagtgctttgcctggattaggtaaaattgagaataatggggatattttcctagtaggtatgctgaaacatatatctagtcggtcgcctagcacaacacataaatatataaatcaataaagctttcaaaaaatacatcgtttgggtttagagcaaaggaaatgacaattcttcctgttgaatggtctttcactcattgttaaggttgatcacttaatcttggaaaatccagaaaattcaacagctaaaactctcacctacaccctaatgcagtcatctggggtctgtgtggctctttgtgttactctgcaatctgttccacctgcatcttaataggtggtcaagtcatagctgagtcccaaaacttcactttggaatgttctggccttttaggctcaaaaagaaagtgtttagatttaatggttttatggcccatcaaatccagtgtggtagcctctaattgcatccaggggctggaatttcttttaaaactttttttttttttgacagtttaataagaatttgctaatatgctgaacattcctggaacgcattaggtaggttttaatttttcttgatatgaggtcccagcactccctcatgtggcacttgcccacataacaagtcagaagcaaaaggataaatgaatatttaatccttcttt

SEQ ID NO: 68216 - DNA, 5391 bp, Homo sapiens
gattcttctgtgttggaatgaaaattaccaataaaccagcaaccaaaaattcaccagtaaaatttacagaagaactagttctctttcctcctggcaaaatatatctctcctatttgttttgatttattattctcattagtactgattaaaattgaagaaaatacagccctatttctagtatgcatgagtataataaacgtgttgtttaggcacacatgcatatctaaccagcattcacctagtatttcctagatgtaactctacttccagaaacagcatgactttttagtaaatatagtgaagtatgatatagtaatgcagtaacttaaagaaaaaaaaagaagaaaaagaaaaagcccttaatcgaagcgtgcttcctgtagcggaagaagaaattctgccttctattgctttgtggaatagctaagggtctgtaatctaacccttcctcacataataaagtaaaaacatccagtccctgaaaagcataataaagaagttttactgtgtgatttctatgctattcctttgaacattataattgtcattattttatgccacaccacatgctctgttgctgaaagtcttttcttcttgacggaccctcacagcatgattctttgatctccattttgaagggggagaagcagaagccttgaagagagtttttattaccaatcatctctaagtgtgttattagaatgagagaaaacgatcttaatagcagccattggcatgccagccttggaaggcattaatatttacttagagctagagaaacaatgaaagctttatgacaagaacaagcaaatctgcagggcagcagccgtgtgtgtgtgtgtgtgtgtgtgtgtgtgtgtgtgtgtgtgtgttcgcgcgcgcgcgcgcgcgtgcgtgccaaaagggacatttttaaaggtcaaattcccatttataaagcaaagctgaatccttccatctccagacagtggctttacacttgtccacttggtggcgcagtcactttagtaactgcgggctcttaatttcccttaaacagtattttctgttctgaggataatacagaggcttgtcaaccaatgcacaaaacgtaattgctacgtaaaattagataaaatcaatggaatgggaacaggcatgttatctaaagagtcctccatgttttgatatttttcaaatagtagtaacaactatgtcagatagctcactagctttccaagccttgcccaaccccactccaaatttaagtaaatttcccacaatcatacataaaatagcacctcactatattctcggactgtgctttcctgggcctccactttggaaaaagaattggttcaactggcaaacagttgaaccaattgaataataaaccgttttcaaaggatagaaaatgagatgccagagtaaaggaagcggggtaacggggagaatctgttcacaggaattttggcccaccctcacatctaacaggggcctcaaatttaacttataaaaaaatcaaatgatatatacactcctcacaaagtagctgccctgttgaaggaagacacccatgcctcacccagctttataactgcatgctgtttctgaatcacactaactggacatagtggattcatgttttgtaagttgtgtaatcctataatactgcattccaattttctccacattaattttttactctaaacagttaaaatatataaagcaaaaacaccttattcacctattgtggatactagataaattattttgtgacatttatgcctatgagaacacaatgtcactggtaacttcatatcacttctcaaatattaaagtgaaagaatgacatcacttttacccatctgttatttaaaagaaaatgatgccatcttcagtctcaataggtaacgcagcagaaaagagtttccttttctgaaatcatgagggcttctaagtgtcgaaattgtttaatcatcttccatcattgataatttcagaaaaaaaagctacaacaacgtgaagaccatagttgagaaggctactttgaataaatgtgtaagagaaacaaattactgttcttcgttgaattaatcccaatcaattccagccatgcaaaatgtagcaagttgacatttaccctgttttgttataaccaccgtaagaaattttgttctgggtggttccatttacttgtccttttaaacatttttttctactgccacagtaatattagtctgaagtcttacccaaaaatatctccaagcaactgctgggtcacatgagtggtccatgtccccagaactccaaaatgtgattatcagagctgagtacagagaaataaaagctgtcacggtgaatgaccttttgttgtacttgcgagatggggaggtgtataaatttcataaatgtgtttgaaatactctggctttgtatcacaatgggttatctgaggtttgattgttttgcacttttcattagaatcagaatgtgaaatttcaggttgatttccttcatgccatcaacccaaagtctccacaaccctggcagaatttctattcttagtttcacgtgaccagctacatgatgcagtgtgaggaatcaaggttcacctagcgagtcatacagcaaaagaggacacattgcaaaatgtattgcaataaaaactcaactagttgataataaaatagcatcagctgtcctccaaagaaagttgattgatttttttttttaatttaaagctgaacaaaagagaatgatcaaggttcatggaaaaggtgacactgcaaattcattttcattatctgtgtcctatccctaagttactcggtacacacataggatgggaatactcacttgaataccatgtaattcacataaggcatgaggcacttttccagttcataacttagaagtcaccaagccttctatgtctcccaaagtttctacattttaaagggttgcataggtgatccatctgctttggggcgcccctttgcatcctctctgagacctccacttggccaactattttgggcccattttgcatcaattcaacccaacagcattatggaggctgatatgcatccaggggaatgtaagttcctagggacaggaactttgtctggctcactgctttgtcctcagcatgtagtacacagtgtagctcatggagactcctaattagctctagttaattagctagcatgcgacaaagggaattaagaagtaaggaaagctgtatacaaatgaaataaataatcacttgagcattggaggtctagcaatgctgagacactaactctataaatctgtcaagggtctgaaatttccttggttgtaataacctatttgggttaaagtgttttcaagagaccactcataggcaaattttggtggacaaagttaatatcggcccaagaaggggcatcttccaagagcagaaacttttaaatgagtccaaaatagtaaataatgatgcagaattttaagcccctctactctcagtcaacttcccttcccatgacttccctggcatttgttgagctcatttgggttccaggcaaaacctgagacaaagtcaaggcttgaaagggttggggagaggccgtatccttcaccccattgccattttcagtcttctacatggatttgtgggtgaatcagtgctgcctaccagagaccaccttggccaggataattttatttctcctaatttaaatatggaaaactgattttgagtgattttgttgtagactaaagaagaaatcagggaggaaggctaattctctccccctgcatattttctgcctttttgtctttatcaccatcaatgagtacccacaataccgattgcctttactaacagccataatgttagatggatgagactgagtgtagtgtagtgaaggcactcctctcttgctccagcaaataaaccatttttgtaactgctataaaaaaaaaccctttgaaatgattttatttcttgtttttattacaaacagaaaacataaaccatgtcacccaccatcttgtgctttgaaatatgaaagtcaaaggaaaactaatttgggaagagagatgaagtgctttgaaggagagatgaaacagcaaagttgaaagattaatgctgcatagacaaattgaaatctaaagtgaaagtttagacaacagtaatcaaaatgaatgataacacgaaaagccagcaggaagaaaacatttgagccaacaatccagtctggttcatccggataagatggttatctggcatttaatgctgtttcctacaccatgaacataagcatttactgtcatactaagaaaaagaaaagtcatccgaatttatcgctatttttacatgtagttaaattaattgttgtcatatttccaagtgaagtaacataggtttggcttttgcagtcagttcctcaagattcacaggcttggaatattttttaacaatttaaaggcccaagatttcttacagccccaagaacttttccctctctactaagcacaaatctgaacaaataattacacaccaccaacgtaaaactaggagatcttattttggtacggtctttgtgtaattttaaaacatgattttaaaaaataaattttcttacctggaaaatgctgcaatattatcagccaaagtttcttcatcatttgccccagacctgtaatagtcatatatagactttggaagtactgatttagcatgttgttcataatcattgatacaaattagccgggggagcattttcacaggttattgctatcccagatggagttcgttgtttttttttttttaatgtattgctttctacatcctcactgttctgttatttgtcaattattaatagacttttgccaaagttcagatttagttctctgttgcttacatcaagtgagcaaacattatatgcttagcctttgaaatttcatttgtaggctatctgccaaagaacaccgaagtcactatctgccaaagaacaccaaagttgaggttgggaaggcagcagaaggtgattaggtgtctatcacattaaaaaggggaaaggaataagtaaaaaattaaagacttagaggaatacctgtatgaaaccactcttggttcagttttgcctaaggctgcttattgcacatggtctgtgcctgtgctctttgcttgatacccagaataggctgcccactcattttctttccacatttggatcatgcacaaatcatgtaaacaagagcttatgaactgaacggggcatccatgaaatatggggcatccgtgaaattcagggcttctgcacaatataaaatttagctgattacaaacatagacatttggctttaacatggaacattaaggccaaattgacagctaattgttttattcattctgtatatttg

SEQ ID NO: 68217 - DNA, 1393 bp, Homo sapiens
tttgagaactctgtttcagctgattataagagaaagaaatccagtgacacgagggcaggcaggccccgctctgctctgatcgagaaaagcttcctgatgtcagggagatggaactgccaccatcagaaccatggcactttgggtgaaggtgtgtcagcgaccaagggggcaggaaatgggcagtgactaagggggcaggaaacaggcaggcacatggcaaggttctcccagcccatcagcccagtgatggcctcgattttgaagctgcactactgtctgaaaagcacaattactggtgactcttaacaaacttcagcatactggggaaggagactgtcaagtaactgaattggaaagatgaaaaagaaccatctctaaaagttgatgctgtcagaagaataacctcctttgtgcaagtcttgcaacatcttcattcaaccacaggagggcagagagtttcagaacctcccccaccagtgagctccgtgctcacaattaatacaaggaaagggttatctaaacagccagatagaaatatactgcacgttcctttttaaagacgacagaaacttttagaatttcataaacctgtactcattattctgtctggatctaaggagcatagaatcaactttaggcatctttcgtatgcttggaatcgaatttcatgaatttattctaacacataaatcaggtaagagagaagtagatggatagattttttttttttaaggaaattagcctccctgggtacttacagtagattgagtattgagagatttacaaagatataattctttggaagattacagaagatggaaacaaaatcaaatctttcactttcaggtactggagttcattaattctttcaccaaaagcacatcactgaaggaaaatcagaagtggttttttagttattattaaagtagttcaagacccagggaaccccttgagatgaaaacaaaacagtattcaacttttcttcacaagactaccttgtactggcaagacttagaggacttctggcttgaaaaatattgcttagaaaacttaaaaaaaaatcaacaacaactatattttggacaaaacaatttttttttaatctgtcttgtaaaatccttacttccttttgagtctctgatggccacaacatttcatttgagatgtttggcagtcacagcttcaggggttatggttactgattatctaaaccccttaggtcagaatgaacaaacacagttcatgtaaacctggctgttattggagtcctctgaccaagagataatagtgaagagtgtggagagcctgaatgcccatggtggaaatgctggaaaaattaaaggtaagaaataaaacatagcacaggagattcagagggctgggatgacttctg

SEQ ID NO: 68218 - DNA, 814 bp, Homo sapiens
atttacatgctaaatcataaagaaattaacagatatgaacttgctatttcaaagtcaaaacctacttagatgtagagttgcaggagccatgcttcctcacaatcacttagtcatttgttcaagaccctgacagcttcaaaaatggccattaaaattcaagtaactactggacacaggatgatatggctccaaatatcatcagcaagagaggtaatgacaatgacttccctagaaccagtaaggttgatgaaaatgagtccaagtttctattttaatttcctatttctcaaaatctaaatcactcccattggtttcttagtttatgtcaatgcaattaaaaaacatattttattctggcttaatttggaatgataaataaagaacaaagcttgtaaactgatttagcaaaatctgaaatatctctctacaatttcttattcagcagaagagatagagctaaagacgcagcaagtagtttaaacactgacacatggaatcaaagtgttcaatcagtatttgttgaataaggaaaagatgcatcaaatgcctgagctatttattcatacgaaaggcaaacacactctcaaactgtaaagctggcatctgtcctctgttgatggcactggtcatcagtgtgtgtttagccaggacaactgtttattaagagtaacttggctggacacggtgactcatgcctgtaatcccagcactttgggaggccgaggcgggcagatcacgaagtcaggagttcgagaccagcctgaccaacatggtgaaaccctgtttctactaaaaatacaaaaatcagctgggc

SEQ ID NO: 68219 - DNA, 1585 bp, Homo sapiens
atcaacaaatccctttctttctcctaactcaaaactgtagtttcccatctccttaaagaaaaggcactatccaccatttgctttctattgttaaaaggggcaatgcgtatcttcttttctttatggcacaattattaatattactcagaaagtcctacctttacaagttataataagtatcaacatttatttgaaatcatactgtaaaatttaaaaggcatccatatttatgttttattctcacaatgacatctccaggtcttcaaacggaagactacgacacaaatggcctgccttcaccgtgctgcaatttcttcaacaggtaacttgcttagcctgtgctacgtattcatactgcacgtggatgtcactgaatgtcctttctcttccaatacatatctgtatctaaaagcacacggtttgcttgcagattttcttccttcccttctcctccctatgggaagctgcccactccaccccgaaaacactgtcccccaaagcaaggggacgcgctgcaccctcggctgtcaccgcgagggctcggcgcgcatgcgcggcgcgagcggccgggccccacagccgcaggtcgttggtaaggcgggtccgcggaccccaggtcgagcccagcggcagtgcaggatcgcaagcggcccggcaccggcgccgcaggttgttggcaagcctggtccggggttttaggttgagcccaagcggcaatgcgggatcgccaccgggccgcgcgggcttgggagggtgacgcccgcgaggacactgcggcgtccggggcgggcgggcacactcacaatttcagcatccactcgccctccatcaccagcgtccagttggaggcggtcatgggctggacccggctctgctccggcggcagcgcggcctcctcggggcctgccgtcgccgccacagccgcgatccaggcggccaggagcgccgttagctgcgggccgcagcgcccacccgccatgttgggcgccgagcgaggcttctcggcggggagtgtggggaagggcagcggccggcccgcagcctcgctcgcccgccgggtttttcaaggaagcgggagacgcaagggccaccccgcctacgcctagcggcgcagactggcggtgctcgcaatgccgcggaggacgccacctcttatcgccgcttgcccgtcgaggccacgccccctcccgcctccacttgccgttgcccggggtgtcggttacctcagcaaccaccgccctttcttcctgaccgccaagctgacaataaacagatgacccaacgttgcctaagttagaacatgcaccgctgctgcccaggctccaataagggcagggttggcgcgtgtgggcttctctaaagggaaacatggccagtaattttaaaatccatcccctcttcaatgatagcaaatataaaagcaacgggctgcaaggtacacgtatgtttaatgaaaaatggagggacgtggtgagtatctcctgctgaagagagaggaaaatttaagtactctgcatgtgtatattgaagcatcactaatttaggatattgatgaaactagcctatgcaattgcattttttttac

SEQ ID NO: 68220 - DNA, 1558 bp, Homo sapiens
aagacaaacattcctggacctatgttcctaaatgagcaagtttctattaataagactctcccccacccgccacacatcctacacactcaaggagaggagcgggagagggcaccctctttcttcctcggaaaataaaacctttgctttctttaggatgggctttctgtctcgaaagcacaacgtaaccgtttgcccgggtttcaagatcagcgcgctgcaaactctcaggcgcggccaggtttcctcaaagagcctctcaactgcgctcttctctgctgataaatgataattctcttcaaaaagctggtttgtggctggcgctggagagctccagctagagccaaaagccaggggttgcctctttggttcctcccgatgggccccttttcccagccagttgggatccaaagacgctccggagctcgagcccaaattcccaagaaaaccccaaagagcgtaaggctcctggggacccctagcacctctgcaaccagggcacggggcatgctcagagcgaatgcgggaggcaggcgttggctgcaatggggctcgggagccaggaggtgccgctgcgtccccgcttcctggcgcctgacccagcgtgcaaagttgggctgggagccgcggggggaaggaaggacccagcgagcgagggtggcggggaaggggggcgggggggaggaggagggaggagggaaaagagcggttagggggggcgccgggcgtgtgtcactcgctctctccctctgtgtatagaggatgtgctgaatggtgcgctttgaggcggcggcggcggaggagcagaatccgccgcgactggcagcctcggctgaccggctcggcttctcttcgccttccgaggctcctcatccaccgcgggctccagacctcgcgtcccgcccggggcatggccgggcgctgcgcccccgcgcgctctgcctgctgagcggcgccggagggaggtgcggaggccgggaggccggggaggccggcggggagcagagtcgagcgcctccggagcagagaaaggagcccgcgccccgcgccccgcgccccgcgcacggtccccagtccctgccgcgctcgcccgggccgcccggagcccagatgagcccagatggccggggctcaacccggagtgcacgccttgcaactcaagcccgtgtgcgtgtccgacagcctcaagaagggcaccaaattcgtcaagtgggatgatgtaagtattggggcggcccgagtcggggcgctggctcgggcaccgggcagggcgggcgtcgtgggggtggggcaaggggcgcgttatgcaatgggcgcactgggagcgggcaggggcagcctcgggcgcacaggttggcatctgccaaagcggatgtccaagggcagaagctttgcgcgcgctcctgtttcatcgggcttcagtagttgccatcctttctgggtctggcaggcgccccctgagggtcttacatcttttgggccagtggagagggaggggcaagctttgcctggtgacaggtcctgagagttcggaaagtagggagtgtgaagttgggaccaa

SEQ ID NO: 68221 - DNA, 1260 bp, Homo sapiens
ctactctggaccttcttcatctcttctgcttttctttattttgggaaatttcagagtagagacactcctggaggaaaagtctcatcaatgctgatacacgtggatgttttactccaatgatcttaattcctcacctggcatccaagactacgtttataatgttttcatttcatagtcagggctgtattgctcatgtttagtttgacaagcatcacatctgattttctgtgacccttagaactctttgcccgttgcatagctgttttccccccagtgtctctatttgctgtatttggccctgctgcttcctgatgcaagtcttgggcaatccctgtggaacatcgcttgttacttttcctgttgactctgtggtatcgattagtttagacgtgcatgcctctattcatgtgtgttctcttgtaataccataaaaacatgagaatcgctgtggagtgagaattgtggtcaaccttggccaggagactttctgacagtggtgctgaggaatgtgccatgggtctgtggactggcccttgacatgagccttgaggtttagggttatgctttgtagtagtttactaagacttccatagcaaaggaccatagcctgggtggattacacaacggaaatttattttctcacagtttgggaggaagtgggagataaaggtgtcagcagggttgcttcctgctgagggccgtgagggaaggatgtgtgccaggcctctcgtcttggctggtagatggcctgcttctccctgcatcttcacatcattttccttctgtacatgcctgtgtccagatgttctcttcttataaggacaccagtcatactggattagggcccactctaaggcctccttttaacttaatcatatctgtaaagaccctatctctaaataagatcacactttgaggtactggggattaggacttcaacatgtgagttgttggggaggaggccacgataaacctggtgacatacctccgcctggtaaagcgtagctcagagggtagcaacatgacagctctagttagatattgaagaactgacacttagagaagaagttagatttattttgtactatttaaatgttaaaaattaaatggtagctgcatatgtggataaaaccataaactgccttgctggaattgtgtgacaagagcactgagattgctttgtgagaaatctccctgttaaagagtgtccctgtgaaggtttggagttgccctgcctaacagaaatatagcgtgagccac

SEQ ID NO: 68222 - DNA, 2943 bp, Homo sapiens
cttgttttaatctgtcgttgcctgatttgctagtaaactgtgtatattatcatacatttattgatcatttcagtttttccttacatggattgcctatttatatctcttgcccttgtgtggacagttctctgtgtattctagatgtactcctttagctgttataaatgttgcaattacactcttcctgtctgtggtttgtctttgactttcttaacatctaatttatgggtaacaaaagatgacttgaagctttaagttttcatgtagttacattccaactacctccccactttttgcttcctttaagatatttctgattccttctcatcaccgttattaatctaggtttttaatccatatgtaatgtattatgaggactggtgtaaggtggagctctaacttcaatttcttcatatcactcgtagagctgacatttcactacctggtttggatggcccaaagatctgttatgttttaatgcctgtggactgctgggttctgatttcctacttcattcttatctcatttattttctgcctttcttactttgtggttcaaaattgtaattctttttgtttacccgtgatcctatattagagatttaaatttatacctgcatatttagtcatttctggagacttagggcaagaaagattggttctaccattcatgccatctgccatcttgttctgccctgtgaatttgcatgagacaccattctggatgtttgtacagagtgatgattcagtttccattaatggcaaccatagatagtcttctcttatgataaccttaaatttctacagagttcaaaagcaaagtttaaaagttaaatatttacataagtcacagtaacatttttcagcatgagtccagagttcaaaaatattttgaatgatgcatcataaatgtcaacaagaaaatctagtgatttcctattaaaaatagtctggcttccataaagaactactgggtaccacacatttcattaatgatttttagcagtggggctttctctttgggatatgcttctctagggtatcccaaaattgtcaactttgacccttcttgtgtatagtaaatgggataggtcattcaagagtccactgagtgattaaatgcaatgatgtagttataaatttagaagataagtgctatttattttatttggtagctttctctaaaagttgaaacaataacttacattatctgggaaaaaaaccagcaaaattcacgtgaggattgctttgtgagggctgggattgttccttggcctggagcagtgtgtcagtcattgttgactaagcagcagcatctggggactaagtcctttccttcaccttccttgaatttccttcaccagtattgatgatattaatagctaaaacagacacagtgccatacccacaccctcttcctcaccactcctgagaacataagccgggctccagtggctggccagtgcctgcattcttttgctttgtctggctactagaactcatgttgctacccatgcagctgcccagaagttcctggcaattcacactcaccctcaccaatgggattcagtggataaataccacagctccctcacctcttgggtgggataacttaaaggtgcattctttatattatatcccagaactctctagtgggattaagcccagttacccacagtggcaactggcttgaaaatgttccccttatgggcttccttcccttcctgtctcacttctccactcctgattgtgttctaaaaccacctctaaaataaactacttttactagaatccttatctaggaactgcttaatgcagatgcatagtgcttaacaacttaatatagatgcccccaaatgaagggttttaaaatgattccttggttaagagagattggaacatattaagtgaacacttttatttgaagccaagtctgattttcctaaaacagtcctaatttgggaagcccaaagctggttgaggaaaccagctttgaagctgtgacagatgtggtttgtcacagtctggctctgctgtgtatttaatgagtcaccctcagtgaatctctttaaaaatcaaagccttggtttcattatctataaggtgggtattactctcttagtgttgttgtgaacattcaatgtgtaaaatgaatgacttagcataacacctgctactttgtaaactctccatcctttgtggtggcttttattattgctacataataaacaatgactctctgaccaaacaattgtccataagtattagagaccacaaaaatgtgctgttttgaaaaccaagtgaccatttatttatgtatatctttttattccttttttcttcttcaaggcaacactgacttgttttctatttagactctgctgtggtcttttgatctgaaacattgaagcttaggtctgtttgggcaaataagatgtttatttatgtatttcataatgttgtgggaacagagccatggaaggcaaaagaaggatttattgtttaaaagactttccctctggggataatttgctaataaatagtccatcataggtgaaagtttcttggacccttggaaatttgaagcatcgtatggaacaacttttaagatgatttagaggactttgataggagaaaattgtattattcacaagaaaaattggacacaatcatggttgcctatgcctttttcctaagatagtcactttaggattgtgacaactacatgggcatcaggccactcctcttcctccctactgaccaagaccttagagattaaacttttagtgtttttgaggatagtttagccactaagccaaggttcagattgctgaggaacaaatctatcctcaccatatcaacttccaggttaagtttttccatttttattaacattaccttcttttcacttctgtgactcctcagagattttgcaccagtgaac

SEQ ID NO: 68223 - DNA, 564 bp, Homo sapiens
tctataaggataaagaaattgaagcacagagagttaagtgaactgcccaaaatcacactgctggtaaattgcagggccagaatctgaacccaggcaagctgtgctccaaaatgtgtgttcttatccatcacatcgattagctcattctgtaaaacaaccccaaacttggcagcttataacatcaactagttattatttttcatgcattatctggtcagctgggcaggtctgcagatccagaccagactcatagactcagctcatctcagccgggttcactcaagtgtatgtgctcagctggggactggctggtccaggacatccttgaccaggatgactcagctctcttccagaagagctggatgacagaccaggatgactcagacctctcatcctccattgctataataggaccctgagaaacagtggaaaaatttgcaagggtcttttgtatcaagtttgctattctctgattaaccaaagcaaatcacatggtctggtccagagtcagtgtggaagggcaccaccaacgggcatagacataggttggtgtaaaaattggag

SEQ ID NO: 68224 - DNA, 384 bp, Homo sapiens
ctctaggtactttgcatctttacatctactacgcaccatcggtagtggtggctctgacagtctgctactgtacacctcctcccaacgccttattcaaggtcacgactttgttactttgagactggctctgggcaagtatttacaccattgaaaatcaacaatctctaaaactgggccctttcattttccaggagagccgtatattaatcatttaccggcataccactggcacaaaccttaccctctttcatggtacagggttttcccagtatttatctggagttcctgttgcagctttccatggttgaaacattattacccatcctttaaaaacaaaatgaaactttttactgaaataaattaccttctttaaagctttttttt

SEQ ID NO: 68225 - DNA, 1087 bp, Homo sapiens
tgcgctccgccctggaacacccagcgcagctaccccatcccgcccaggccggccacctggcgtcgaagccaggcgcgaggggcggaggcggaggcgggggcgggggcggaggcggaggcggaggcggaggcggaggcggaggcggaggcggaggcggaggcgagcaccgccccaccgcgcacgctgcggttgccccggcagccgcgccctgcgtggcggaagctcacaatcagcccggtccctccggcttccaccccgccccctgcgctcacctgcccgcgcgctcgccttccggggacccggggcccatggacacatacacccagccctgctgtcccgcgcgccagctcaccagccctacccaagggacatcattcacgcctgggcgcctccgccgggctccgggagcccaaggtcgcggctgggccagcgctgagcgtcagaggacgagagcaggggcctccccggtcgccccagcaggcccaggcacataggtgcccagagatccctggcttctgatcgcccggaagactaagaggtgagcatgacacatggcttttcctttgacgttacatctctaccccctccactcctctcttctccagatttttctggagactaaaaagtggaaagcacagtagagaacccccaacatgtaaactatcgcttacacttgtgggtgagctgaaacccgcaaaagtttggtgtattcataaggagcctatattgaaggactttgctaaatgttttacaaggatcatatctcatttccttttcacacagtcccatgaagtgggcaccattgctattgccagttcacagatgcagaaactgaggtaaaaactaggtaggtagcatatccatatttatatccaactagtttgtgtaaataatgatacagggaagggaggatcacaacggatttccccacctcaaaccctacattccactgtaccaagcttgtcttcctccattcctctttctaatgatccttccttgtcgcacagcccccctttgagagttaaatgacctgaacacacacagattcccacagattttcatgtaatttccgagtattcagaccccg

SEQ ID NO: 68226 - DNA, 646 bp, Homo sapiens
gttgcgatgctgcaggtttagggaccccactttgagaaccagtgttctagcctatcagaacttcctctaattagacaactaactccatgctttctggcatttcatttttataaagccctattcggtccttgaattctagcattttagagctgaaagggacttcagaggctaccttgtctcaattaaagaaatgcaggtcaagggtcccactcaaggccatacaattagccaagaggcaaagtcaggattaagcatcctgactcactctatttctatgctgtttactctgcatcctgctggctccaaagctcaataaattccctggcatccagcaactgcagtatttttggtgagctctccatcccaggccagctttgaggtgctagaatccctgtcagacacatatgtcatccgcacaatcatggaaacgcagtggcctcctacctaacagctctgtgaaagagggctttggaaaaaaacagcagctgtgctggccactgtagcagagagaaaatgcagcagctagcaagcaaacccagacaaggtgagtcagcatagaggccctggggctaaggaatataccaggatactgccaacaactggcacccagattctcctgagcaaatctgagaaggtcaatcaactt

SEQ ID NO: 68227 - DNA, 569 bp, Homo sapiens
tatttaaaaaaatttgaagtaaatgaaagtcacccataatcccactatttgtaaggctattttggtcatttacctaagtatatatactgtacaagtaaaagtgtgataatgccaaaaaaaaaaaaaaaagtagttctagggaaagaatatttgagtggttaaggtttcctgctgcttttatctttgggaaattccagtttgatttgggcactaggaacctggcatagtgaatgtagtgtctgccaagctagaagaacactgctgcaacttcagacttcaggtcaattactattgactggccaactttctgtcccgagcataccctcttgggtccaattccagattaataatggcccaattccaaatctggaggattcctggcctctctctctctctctctttcaatgcagttgcttacttcccttaagactggctctgaatatacaagaaggcaactccgggattctggcctttaagatgcaagaccatgggtaaccatacaagcaacatcatgggctttccagttggttgagccattatttcagcctctactttgtatctcatagctt

SEQ ID NO: 68228 - DNA, 657 bp, Homo sapiens
ttgtactcctgtatcagccagtcattgccatagacttctcctgataaaaccatttagggagtgtaactttctgggcattaacttagggtgatacttggggaagaggacctctgttagcttttagcagtcaatacagcagctggaggctagagcccctgctcatccaccagcatctactacaagtgcctgggccttgggcaatgaacgtgggacttcagcaatcagatcccttttctcatcccaccttcctgctcctggcctcctcctactccccatcatcctgtgtggctggggcccccccatgccatgtgcctatccacaggctcctggattttagtacctgctcagagtccactgcattggcgcctgacactttattagtgttctaaagctttgtttacagttaccaggactctctagatagcagcaaaaagtcaacaaggaaataaaactccaccagctggtgtatttgttggggataaactcaccacacaggaaacagctgggtacatgctcacaaacgtcagtaccttgctggtcccaaaggctcatctgaagttgcaagtttgaatccccctttccaagctggtctgtttatacgcactcctccacaccttcagttcctttacaccatgtgagcctcaggaagctgaggca

SEQ ID NO: 68229 - DNA, 1293 bp, Homo sapiens
actctagtcactacttttcatttccatcctttcttccctaaaggtcaactggaaaggcagccggctgagagaactcgatctctgtccagcagagattattttgtggacgctcaaggttctgagagcttacttcctttttctgggtcacctgcttggtgtgaattcatccaaaatcatccgtttatttttagagctataaattatatctgcatttctactctcctgcagaaattcaagctcagagcttgggcaggggccctgtgtttgaggcacagagactggcaaagcgtcttgcctcccacctcttctgaagtgaggcctctgcgctactgtgtcccagcccttcaaaaatcctgagtcatttcactgtttctgtttctcccctttccccagcaagcttcctgatgcaaaggaacaccggagcggggcgattgcctccctagagctgggccggccacccccacccctcgggctgctaaagcagcgggccgggcggaaggtcggggagccagagcccagggaagagcagaaggcgcgggggggcggggggggcacccaggagggaggacggggcagcggtgagggtgtagacgggagggaatctgtccggtgccgcagtgagttgggtggcggtgatttgttcgcgggcgcaggctgggaggcggggttcctgactcactgcggcactggcagggctggtgacagcaccacccccgcgccgcctgcaatctgccaccgctgccaccgagccgaggggcgccagcaaggcatcccctgggtcaaggggcctcccgtgggctttccaaacagcctgtgctcatttccgcgggagccctcggggcgctgtgctgtggctgcattgtcactgtttgtttatttctacatctgctctgttagaagataggctcgcttaggacagagccttctaatccaccccctgatgaattcgggccctcgcctttggcacaatgcctggcgtcatcacaacgcgggtgatcagtaaacggcagcgaaggaagcggggtcaggactggagaggagagggggaggaagacagacgaccggagaggaacaaaaatggaaggtaacttgagctttcataactgcagaagtgcaaaacagctccctgtgtgatataggaagtaaaaccgtagagatgggacttggctggcctgcccttcacacactttagacattaacccaaagttcatgctcctgccatgacagtgatggtggacaggagggaagaaaatgacaaggaggaaaggaggtgtcttttgctcttaaaaatga

SEQ ID NO: 68230 - DNA, 681 bp, Homo sapiens
agaagcacacaacagaccatcaagacaatgcattggatgtttcagattcccttcttggtcacgggagattccctggaaaatgtgccctctgtctgaaagtgcaagtgaagccaaagtaattgattggctgcattttagatttgaaagtttttccatgaacaattgccatgtaacaagctacccctaaatttggtaacttaaaaaatgatgtgtttgacttgtctttgtatagacttggatagcttttctgggcttacctgggatctgcaattggcttctggtcagctaagtggctctgtgtctgaacttggctggctcttggctggggcaatgggagtgatgagctaatgtatctgtcaacccttcagagcctagcctgggcttattcacatgggggaggcagggttccaagagtgagagcaaaattgcacaaggtctcttgagattcggactcagaacttgctcactgtcatcctgccacattctatttgtcaaagtgtgtcacaaccccattttttttttttttttttgagacagagtcttgctctgtcacccaggctggagtgcagtggctcaatgtcagctcactgcaacctccacctccaaggttcaagcgattctgctgcctcagcctcctcggtagctggaaccacaggtgtgtgccaccacacccggctaatt

SEQ ID NO: 68231 - DNA, 990 bp, Homo sapiens
aaaggaatgtgcaactgaagcaattagctgttactatgtaacgaaccatcccaaaacgtagtgacataaaacaacaaccatttgttatttctcatgcgcttacatttctactaggaagttctgcaaatctggattggtcttggctgatcttggcagggcttgttctggcatccactctcagctgctgaattagctctcagttcctggttcagggtggccttggcttggatgacttggctctgctccatgtatctttcacatccttccagcaggccagctcaagcctgttctctagattgtggcaaggatccaagggaaagagagaaagccaaaatgttcatgcccttttttgagccacttttttcaatgagttggctactgtctccctagctaaacacatctcagccaagcccagaaccagtatggaaggtcactaaccaaagctgtgggtaaatggaggcatggaaatctgtgacctttaatgcaatcatctacaataacaagccaatgaccatgaagctggacagagaaatagattcctgggaggaagaatagcaaaatgtctggagtaagaggaagtagggtatttcagggaactcagcaaacagtgtgatgacaaaatgaaagcacagtcatgcaatcagcacctgggtaaatatttaggttggagtctgtgttgacccagtctgcaggtaaccctcagcctggcccagcatttcactgccctcctactacttacccagaaacaactctcctgtattgattaagcaggaaagaggaaactctcctggaagacacaagggcagatccaagcaggagctaaggttttccagaatgtggtcttaggtctgtgaatggcttttggacagaggcacagctgaacattcccatggtttctgtgactttagaatcactaccacctcttgactatgcacctcttgactaatttctatttctcaaattatagaataaaaaatgctgattctaagg

SEQ ID NO: 68232 - DNA, 2017 bp, Homo sapiens
cttaacaacccgtctctttctaaacgcagcgccttcacaactcttcttcccttccccctaccccgcttccctccctccgcaatggagcgcaatcaaaggccgtattattgcctaagcttggctctcaggccagctagggatgtgtgtgtgtgtgtgtgtgtgtgtgtgtgtgtgtgtgtggtggggcgggggtggggggcgagggtgcaaggggagaggttgtacgccgcttttccgaacccagctctaaatggtttctcctaagcgagacaaggattttccatagcctaaaagaggccatcaagttttaacattgcgaggcacgacttctaatcgcatccttcccggaaaagtacaaacagttcctcagacgaggtcccccacctcccacgcgctccccagccctccctccctgcggagagccccgcgacagcctccccaacacctgtgaatcatccgggaggctgccaccgccgagcgatccgcgcaccacccccttcccgggcccgggcacggccagggaggacagttagggttgttgctttataattatcacttttaatctctaatacgaccagcacaagtagcctttgtctccccgccctgatttgagcatccgagggccccccgaggcagcctgcacgggtaccccggggtttgcgcactgagtgaacccccagattcggccgtgtcccagccgtccttgctctgaatcccccacctcctcccggccgtttggacggttccctcggggcgtctgtgcctccgtggggtacccctaagacacccagcatgaaaccccagcaccgactgcaaattccaccgaaagcagagtcatccgtttttgccctcggcaaacaactcaacttcaagcctcgagtccttgcaaacccacgctggctgggctaactccgcttcccttctccttcccccgactcctgcaacagctcagagagcctggctctgacgtagttcaaaataacgtgcgccagcctcgctgcccggctgaccacagcaacgagagccacaagccctcgacgctgcttcgataacatgaagcaatcactcataaaaatagcaacccacgtagcctggccatatatggagctggcgagggtggacggggatgcccctacggaccctcttcggagaaaacaaatcgccgctgaaatttcccccacccctcccatcactaccttttacccctcctctgccttcccctctccttagatgactcaaccacagattccactgaaagggggtgggggtgggggtgggggggaatatatacacatacacacaaattatacatatattatacatgtattataaaatatacacacacatacatatatacatacacacacatatacacatatgtacacacacacgcacacacaccaaagaacatcaggaatgcagttgcgggatgaacgcgtttgcccaagaccgagtgttaaaatggagtcataagagtcgccccgtgcgggtgtttatagaaggtgaaaacacgcaggtttgcaggccagcgcactgggaaccgagtcaagcgcgccgcagcccgggccccgcccccgcccccgccgtgccccgcccccacttcctcccgcccctcgctgggcggctattaaaagctgctgacgtcaaaacggacggccatctttgatgagggcagagctcacgttgcattgaagacgaaacctcggggaggtcaggcgctgtctttccttccctccctgctcggcggctccaccacagttgcaacctgcagaggcccggagaacacaaccctcccgagaagcccaggtaagaacccccctccccaggtcgtggctctggctcgggatggctgcatacccagaagggacagcagctgggcagtccgagtgggcttgggtaaatacaagtattggtgcacttagggtgcggtattccgtgtgtgcacgtctggtgggggctttataaagtgttttcgaggtgagctgctggggaaaagggaaacgggagccctgcaaat

SEQ ID NO: 68233 - DNA, 1659 bp, Homo sapiens
catccctctcattctccagcaggatggcctgggcacttgctcatggctgcagcagaggagcaaaccccactgcaaaagaacaagctttttctcaagcttctgcttgagtcacagctgccgacatcccattggccaaagcaaatcacacagatgatatcggaaccaaagggcaaggaaataggctccatctcttgatgagaggagctgcagaggctcctgactaagcgcaacgacacaggaaaggctgaggaatgaggagacagtgtttttcaaagaactcaaagaaccagaagctctctaccaacagccaggggcaggagaccactgaggttagcacagttgtggaatgttgaaaatgataagtgcctatcactatcagtgacatcagtcagtttaggatttgtcaataaagtggtaagtgccaggccatgaaatgccccagggccctaggatatgccaaaattagggattctctgctctttggacagtttgtgttatcacaacaaaacaaactgcaggtcagcctgagagtggcaagtgctttctttttttttgagacgagtcttgctccgtcgcccaggctggagtgcagtggctccatctcggctcactgcaagctccgcctcctgggtccacgccattctcctgcctcggcctcccgagtagctgggactacaggcgcccgccactgcgcccggctaattttttgtatttttagtagaaacggggtttccccgtgttccccaggatggtctcgatctcctgacctcatgatccccccgcctcggcctcccaaagtgctgggattacaagcttgagccaccgtgcccggccggcaagtgctttcattttctctttagctgccctcaaatgcaatgagaagtgcttcccattacttaatttcttggtgcctcccctgatttttctgggccccaagctggtatgctgccccaggaagaccataggaatttccctagagaaacaaaaatcctgctactgtttccacacaaaccattcctacagttagatgggggaggggggcgatgtgctggtgccggtggtgctggtgatgatgtgtttccactctatttggttttatgggtttgttcgtttgcttctcgtaagctgtagggcccttgatgaaatcagtcatcatttttgactttatttgggacatgaagggataagcctctccctaatttctagaaacataaatagcaaggaaacagaatattaaacaaacaagggctttagcagaaggtctgcggatgttgcgaggttctctctatcactgcggatctgtggcctgtccccgggatggggcaaaaagacttggggcaccttactcaagtgcagcaaacaaaagtcaaggtctggcaaccccatccgcttccctcaagaaggaaatattgtaaaatagtaatgtcatggcccctggtaatgcagattcccatgggtctctgacttaaccaacatgtccttttacacataaacttggaattgtgatggaggcggggtagacagctggacacactgtcaatgttggcacgtggtacaaatgaaaaggtaccatctgtgctactgctgaaagatgatgatgcatagatgtgactttttaaatgttccatctggatataattaaattgcctccttaaaata

SEQ ID NO: 68234 - DNA, 622 bp, Homo sapiens
tgtttttaaatgtcaccataaattttattttattaaaaaataacatttagtacaatataaattgctttaagtttataaaacagaaatgttcaattaaatcaaacacttgcttggtggatttgttatcatgagtagaccatgagctcatccaacttttaaaaacgaaaatacaaatggaattatttgcattcaacggaaggtgctgctatttggaccttggattaactcagtctataaataacctcgaaaaaataataaacaacagtcttgagatcttatgcattgattcatagtagaggttattttgtaaaaaggctaagataactttgccataacctaactgtatactcatactacaaaaataattcagttggcttaggttcaaaatccagccacagtgtcgctattgtgctgaaaggtctttgcttgttgttatttctcactacttctgaaatccattacaaccctttggttatcttcagtgctgttggttctgtctaattattccctagagatagactagaaaacacagatatgaaagtaaggcttgagattttaatgacagcaggttggaggtgggcagtgaaagtgactgacaagtagatgatctttctgcatagac

SEQ ID NO: 68235 - DNA, 4727 bp, Homo sapiens
cttggaaataattagctcacatacgcagtgccatttctaggtgttcccatagctctttattatttccctcattccattctcccttaaactttatctcccaatccaaatcagtctcatttttgttgcaaggtctcctggttgggaatctgagcctggcccccgaagagcaagaattttcatctacatgcagcttgcttgtggaaagaaatctgttaaatgagctttttcagtgtctaccactgctgttgttcatttgtttcccttcagcttttcccagttggtgctcattccctttaattttttacaccaacttgtaccttgttcttggaatccacactctcttatccatactgtccaaatagaaaaagctgtgaaaactaagttttttcttaaactgaatggaaaaccggaactcacatgaggctgtttataatgtcagtttatctcacttactgtgaatttttgtgttttattgcagagacttaaatgtgtttattacaggatgctgctttagatccccctggagatggaatgcaatatgcaatatatgcactgtattatctttctacaatccaaaaatttcaaattccaaagcacatctgggattgcagagctgtaatcaagaattttcttctataatggagataaacttgttcagctgctggagggattggggttaaatttaagcaatagtcttatggccataagagtggttaaacacaaataatttctcccaaagactgtgttaggttgagagatcaaaatcaatcaatatttaacctagagttcaaacttaaaagtcaatttctagctgtctacaggactctgaccctcacacatcagatctttttcctagtggtaaagtaagggggtggatggggaatgcaactcaacacactggggagaggcgtcatcaggtcagaaagaagagaaaataaaatattagtcttttggcaaattttaggttttttgttttttttttagccggattttcctctcgttacccaggctggagtgcaatggcacaatctcggctcaccgcaaactccgcctcctgggctcaaatgattctcctgcctcagcctcccaagtagctggtattacagacgtgcgccaccacacccagctaattttgtatttttagtagagacggggtttctccatgtttgtcaggctggtctcaaactcccagcctcaggtaatctgcccacctcagcctcccaaagtgctgagattacaggcgtgagccaccatgcccagccttggcaaacttgatgtgtctgaagcaggtgataagaacttagttccaggaatgggtttggtgtggatttcataaaagactgggtttttcagagggatggtacccatttacctcctacttagaaggctcctcatcagcatcagctggttagagacagcgaataaaacacaactttcagttacagtattttctagggcagcgtgtctcagacttaccggtacacacaaatcaccagggcatcttgttaaaatgcagattccagttccttaggttgggttgggattgagatccagcatttctaaccagctgccaggtccttctgttgcaaggtcagggctttttaaacttcaacttgcgtatcctgcagggctagttaaacacagccccaccctcagagggtctgattttgaaagcctggagtgggcctgagagcctgtgaattcctcccaagtaatgcggctgatgcaggaccacattttcagtgttttcaagaaaaaattaaataaaacaagcatgccattctttcaggagtattatttatttttatttttatttatatataattattgtacatatttcagatctatcattaatatctgaatattcatttttgaatagaggtaagcatctagatcatttagatataacctggtgtgaaaaatctccttgtaacctttatatgttaaaatgctatcagtaagttggagtataaatatatattcattattgtaggagtttaaagtgctactataattagtgattgtgaaagctgaggattttacctacaaaatcaataatttaaagctttcaagtagttaagtcaagcaagatcagcagctaatagaaatctagtaaaagagaatgtcttggccaggtgtggtggcatgcacctgtagccccagctactcagaaggctgaagcaggaggattacgtgagcccaggagttccaggttgcactgagctgtgatggtgccactgcactccagcccgggcaatggggcaagaccctgtctctacaaaataaagttacaaagagagaatgcctctactagataactttaggaacactccatcctttttgaaccaacaaatgtttacacaattttaaataagaatggaaggcagaataaaaggattatatgtaaaacatatttgaaatctttgcagaattattagattattattcatgacattaaaataacctttaaaaactgtatttttatttcatgattaaattccattccacctatgagttttaaaagagaacagtctaccccggaagttccttctaagttggtgatagttggcttcagtctgatatttatttaaacactaggccagttagcattcaaccgaaatgagttttggcacacttccagcacgaatcttaagaaatgaatcagcggagctcccaagatcatgggtcagacaatgcccttccaccccactggagaagccccaacctccctgcccagctcccctgcttggcactcttgtggaatcttgtggaaagttaaaccagtctgttgatttcctttcttgtgaaagttgggtgaggttagggttgccagattaaatacaggatgttcagttaaatttgaatttcagattaacaatacattatttttcagcgtctgttccaaatatacgggacaaaagaaggcttcccctccgtgtgccttccaaaggtttgctgaaaattagctggcaataggcagattagtaggagaataagacatacaaacttatttaacatgcataagcacaggggaattctggaggatgattactcaaataacccagtgaggtccagatgcatatatgcccgtcttcataggggaagaggagatggggatataggagtgaataatttttagtgcggaatgaatggacctgggtggcaggcagtatcttgtaaatgattctctttggaaattgattgggacctgagaacaaacaatggtttgggacaaagtttgcctgggctctagacatggtgtttaatgttcagtctctttctctgtgatatgagtttatctcttctctggttgatgaatttcagggaagaaatcaaaggcaattgtgcaattttttggtatgtctggtttctaggcagataagggaatttcagagaataacctcatcttgtgctttgtgagaagtgttgagagacaggatcggggtggttggtgagatcagagagatattgaggctgcttcctttgttctgcacgccaaagagccatatttaggggtgttgttttatgaaccccaacatatccaacatgtggaacattcctgtatttttatttgctatatttggcaacattaggcgaggtaccagctgcaggaaaattatcataagatattgtctctgaaactcaacatttcttcccttgtaacatcaaatgggagacatgaagaggagaatgatagtttctttaaatttataaggtatggtataaaagcaatttgccaagggctccattttttagtgtaaatttcatctagtctttaaaacactggttaaaaactgaggaaatcttagttccagtcccacttccaccatagactgggtttgacacgttgagataattattgatcttgtttcatggctctaagacaccaatgcttatcaaataaaccatttaaaaaatgccaccaggagagaaaaaatgctgccaattaaactatgacacaatactaaaacaccattgatgtgtgaagatacatctttatttcagagatattaaaatgtgagggaaaaaatgagcatcttggaattcacaaagcatgatattttgacttgcttcacttatataatgaagataattatcattttccctaccaaatacatataaagattagaccaagaaattaataatcagcttttgtttcacagtctagttttgaattgcatgacagggaactttagtttccaatatagaaagttttccagtgactgaacctgtagaagtagcataaagaaaagtgaaaatgtcttatagtttgtttgaaagatttttttcagttgtaggtcaaaattatctgagtcttttgatccactagtgtagaatcatctttatggttagagacaaatgtcatttaaacaggaagcagctgaatgcaagagtttgtgtcatctgcctgctcatctatcctttgatctgttgatccattgacccactgatccatctacccatcccttattcattcctacctccatcttctatttatccatccatccatttattcattgaataatccacccaacatttattaaatttctattccatgccagatagataaaatttgagaacacagagattaaatagttcttgcattcaaggaggtgccaattttttaaaaaagtactgaaatcctctacttactaagaggtcagatctttttgcatccaaaaatctcaggaaaatagcttacaccttctcttatgtggactactccc

SEQ ID NO: 68236 - DNA, 911 bp, Homo sapiens
ggaaccaacctgggagtagcttagctggcttttttgcatcagggtctctcgtgtggctccagtggtagggctatactcaactcaaggttccactggggagaacctgcttccaaattcactcttgtggttattggtacgattcagttccttttgagctgttggctagaagcctccctcaacccttgctatgtgggcctccccagggggcagttcccaacatgacagctggcttccattgagagagaaggcatcaagagacaaactcatctttttaccaccaaatatcagaagtgatatcctgtcccttctgctgtattctattcattagaagctagtcattaggtcccacctacacccagagagtgaaccaccaggaagtgagattattgggaaccatcttagaggctgcctaccacatgcaaaatacgtcccccctactcctcagatcctcaaaagtttcacttttgcattacaacatcagctcaaagttcagaatctcataattggaatcaagtcagggtgatatcataactggaatcaccccaggcttcctcaggaggtagttctttaagtacagttcctggaacacagttgctttccatctgtagacccatgaaactagagaaaagttatctgccttctactcacagcataaaattatggataaggcataaccataaccatcaccataacattctgtccacaaagctgggaaatgggagacataaaggagtcactaagtctagcccatgctcaaggggaggaaattatgcaaggtctgaaactaggaggtggggccaccttagaggctgcctaccacactgcccttctatttgattgtaataataaaaggagtaaaacttttgataaatattttatgagacttcaggtggggctgatacctaacatat

SEQ ID NO: 68237 - DNA, 3179 bp, Homo sapiens
agatattatctatcaaatgcaatacgtagaccttgtttggatcctgattccaacaaaccacctgaaaagattttttatagacaaattcagaaatataaacatggccttgggtatcaaattgtaggtaaagagtcactgttaagtttttctaggtgataatgcaaatgtgtttgtgtatgtgtgtttattcttactgttaaagacacatacaaaaggactacatagtggagcttaagatttgatttaaaatattctagcagttcaaaaaacagaggaaaagatggataaaagaagactggcaaaacgctgttaactattaaagctggttgtggcgaaatgcccttaactattaaagctggttgtggcaaaaggccattaactattaaagccagttgatggatacttgagggctcaatatactatcctctctttatcttgaggcatgtatgtaattttccataatgaaaataagaatagaaaataagagacaaataaatgcattcttttgatgtacttcaactattcggaatttgtgtttaacttactctaaatccggctctaacttttgcttactaaaagcctgtttaaatatctgcttctgcttgcttgactggaaatgttagcctctaaaacttttaactattgctgcactggcatctaaaatctcttactacattcacctaacattttagaggagattcttttctcagctctatttttcctccaagagtatttctttttgcatgagaagaaactacttgattttcttcctccaaagtttggccatacctggcctccaaactgttaagacatctttttgttctttacttcttgtcataagtacaatatacatacataatataatggtcttactagtctgaaagactatatatataaaaatccagcacctaataaattctctaactccctgcttatatatattaaaactcttcctataaatacaaattttatatagaatgtcctaaagttactcttttaagttgttaagcttctatgttactacctggcttttatatttaataattgtctaatatattaagctatgctcttccacttctgcttatgaacatttaaaagtaaaatcttgatttaaaatattgttgaaaccagtaattataccaaaagtcaaaatctcagaccaaggcttataaataaggaaaatcttactgaggttcttcttccataaagagcagaaccttacactcatctatcttataacaaaacttagagcatattattcacctcaaggttaaaaagtaaattataatagaaaatgctttacaattacagggtcacagttctttatctgaaactccttgggccagatgagtttcataattcagaatttcttagattttataaatacaatatagtgtatataacatacataatcaatataatcataatatagtataacgctatattatagtaaatcaaacgtgacaaatgccaataaaatttctgcagtgaaactcaattttcatattaagtggaataaaaacagtgacctcccccatttatctatgagggatatgttccaagaccacccagtggatgcctgaaactacatatagcactaaaccctatatatactatgttttcttcttgtacatacatacctatgataaagttcaatttataaattaggcacaatactcctgtgctttgggtacattgtgaagtaaagtaacagttacctgaacataagcgcggagataccaccacagttgatctaacccagagtgctgctaagtgactaacgagcaggtagacagacaagggaatgactcacatcctgcgtggatgaagtagaatatcccaggatttcatcatgctactcagaaaggtgcataatttaaaatttatgaattgtttatttctggaattttctatttaatattttcagactagggttgactgcaggtaactgaaactgcagaaagccaaactgcggataaagggagacaactgcactgcaaattgcctcatgtcagttaagatcaagttttgctgtcaaaggagtgaggataaaatgttttggttttgagaactttttgaattttggaattatggataagggactatagacctaaattatataacttcatcctctttatttcagtgactctcaaaagtaacaaattatggtcaagctaaaatagttgatgttaagaaatgaatacaattagttttgtattgttaaaaaaaaaagaacactaatagaagaaaataatcttgtataaatttggacttttgtgatatgtaatggtaaggagtcaggggctcctttgcacacattcatgatcctggtgatgctgctagcaaaactgctctttccctttgcattcaattgactgccaggcaagtgtcaaatgtctctgcacaacgaacttttctagaaacaactgcagaatagtattttgccagtgggtcacaataaaaacaacaggtaacttaccaatttaggcttttccttgccagagatctaaaagattgagtttcccattgttggaatgtgccatatgattaaccaaccagattaaatggaacttacctgaagattgcaagcctgctacttcccctggatttggctcttctgaagatttgaaagtcccagactatcttgctcaggaatgtcgtcgtttttaggtatttggaaaacagggctgcttttgattctgtaccaccccaaatgtatgagcccaactaaagggaccataacaaccaaaactttgtagtctctccacaagttccgaaggctcatagtacttcagcatcagtgtacctaagaaaaggttacagttagaggaaaaaaaccactaaaacccataacctccctttaattacatttctaaatcactacaagtagcatgctgtactctaacaaatgctgactgttaaacattttaaattataatacattgcaatgttaataaacaaaaagagacatgtcattgacccaaagggagcaggcagtcagccttgggaaacttacagagcaatactgactttttggcaacaattgcaaaggagcaacattacctgctggaaaagctatatgaatctttgaaaacacacatgcatggagtgttctttaaatatattaatgttctctgagccacaatagagtaagagcctttttttaaattatatttttt

SEQ ID NO: 68238 - DNA, 2754 bp, Homo sapiens
tgtacttttagcagagaccgggtttcgccacgttggcctggctggccccaaactcctgactcaagtgatccgcccgcctcgggctcctaaagtgcggggttacaggggtgagccaccaaaccccgccgccccaaaatattttctatccgcagttggttgaattcacacatgcggaactcatggatagggagcgtattgtttctcccccatcactagaacatggagtcaggaccgtgcaagtccctcttggtcactgccgtatctactaactcggcagtgctgtagacacgtgtatatctgtttatggataaactgaagatgttaatgaatgaatgaaaccgtcatattgagtctctgaaacggcaacaggatttgggtatggtcttatcggggaggaagacgagcatgaccttagagggtcatccctacaaggtccacagccctgcaagccccgcggctgctttcacgtagctggcagggccacgctgcacaacgtctctaacgccgtcggagggcggcccccacctcccgacagcctggggtacaccgtgcaccctccagacagtcaggggcacacggggcccctcccagcgagggaggggacggggagtcacaggttcggcgtagaaggcggcagcgcaggtgggagcgtggtgaggcgccactcctccagctctccccaccggcgggaagacctcctcgccgcccgcatccgtgccgaccgcaacatttaccatcggcagctatttcagaggtcggtctttcgcctcctacagagagccagcctcctccttgtccccgccctcaaatatccttcagtgaggacaccggtgacctttgggggtggagagggaggcgcctacaagccccttcccctctcttcggccggacacaaagcgggcttttccacctagagtcccagcgctctcacctgcgcaccagccgtcgcgccgccccaggccgccaccgccagaggccccagaaacagatctcaagcagccgctgctgccgcggatcccgacaaccttcgcgtcgcgcgagggcacggagcacgcgcagctctgcggtcgacgccgggccgcccccactccgcttctccgggttttccgtgaagctccagccaacagcggccgtcaccggaaaaaacggggagcgaagtttattcagcgtatattccagcaaattgttgaaactgaaattttaaaagaacgcataaaatttaaataacatatcaaaatggcacagcttctgccttttggtgagcgcttgacaatgatttattgaatgaaagaaagaaatagtccactgcgctctgctctctgtcctgacatgaccaattacaaagcgcttggatttgtcgctcagcgccagtatcccgcctctctgtgcggttgtctggaaaatcaggatttttactctcccgtaactcccgggatcgggtttggaaaacggacatgcgccgtgagagctagttgccttctactaaagcatccgccctcagtccttcctgagggcttacagggaagtgcggagtttcgcagctcgtactcttcacagattagataattcacccggcatttccccatcctgcttctgggttccaggacaaaacttttattctcttttaacattaaaaaacatataggaagttatgttcaaacatggctatttttattaaaatttatccggcactgtgaaagctacctttcctttctcacaatctttcgcaccgaatatatgttccattcttgagctagtcattttccaatgttaagaaaacacaccacagaaaagcgtttttttttctctcggtcagttcaactgcctagcaccgtgagttaccatgatacgttatttgctaatgagagtcattggggtcccagcctttaaaaatagcctgcgtccggcgccatttttgttttgggcccactttgaaagccgcgatattctgaacagaggccatttttcttttgggcagattccacgggccatcgaagtgtttcgctgccatcttaaatcctggctgtggcctcaatcctgcagcgaagctgcccagatcattttgtgtttgggcggcggctgagttcccaaacgcgcgcggagaccctgggaaggaggaagtaagcgcgaaagtgcttcccttaagcttctgaaggttggctgcagttccggctacctgtgtagtccgagtttccacagccaggtactactccgccagtgaccctggacagtaacaaaacatataaagcccgagcccaaaccccgccaccatcataggtaagcacatggacctctgacaacctcagatgttccttcaagtgaactgaactgtttgcccatctcctccctcctggtttttggctttgattttttgagacttttccgaatccttctccctgtacttccacctttcttcattgttttcaaaaagccaaaaagttgctaaacatcaggatgccatgagcatgggcattacggtggagatattattcaggaaagttaactgtctttgcacaaagggaatgcagtagatgggccaggtatttgtatcaaatcatggctacctgcatccagcagtacaaatacctcccccttcccagacatttttggagatgtgaggtaaatacagattgcgtttgtatatacttcccattcattcatttattcattgcatttcttgagtacctaatttgtgctaggccataaggattcaggagttagctaaaaaaaatccattaactcatggagcctaca

SEQ ID NO: 68239 - DNA, 1857 bp, Homo sapiens
ttttttttttttttttttagagatagggtctcactttgttgcctaggctggtctcgaactcctgggctcaagcagtcctcctgcctcagcctcccaaagtcctgagattacaggtgtgagccactgaacccggcctctacttcagttttttaatgtgatgatttctgtagtgtttagctaaccttgcactcctcagatacctcacttgattctgatgtttgtttgtttttaagtaggtttgctagattaaaattgcttttagattattgcttctatgttcactcatagaattgactgatttttcattcttttactgcctttgtctggttttgctatcagtactccataaaatgagcggtgggatgatttccttcttactcttttctctggaagaatttgtatactggcattatttgaaccctgaactactgttgatttttggattctagaggtttagaaatggaatagactatagtggtcaacctttccaactccactgtttttttgaggtgggaagaattaaatgctgaggcttaaatccaagggacactttgcactgtaccatgacccggtgatttcatcattatagaaaccctaatcctgaagtagaggtaatagtcattttattatgtaaaacagatggctcaaagccttcgcacactgaagtccatgcaaatccatgtaagagtggcttggaaaacatcacattagccttagtctcttagttttctaggcccatctgattaagattaagaatggagttaagaaagggactcaggcactctgacagctctgggatcacctgcgagagcaggcagacgaccccgctggcctactgttgagcagctttgagtaggagctagcagctcacaggggcagtgatgtgtttattgctcagtgtgatgataactttaattgggaatatcagataaatattcaatatatggtatttttatgaacattaataaagattcagtatatttttggaaaatttccctaaaaacagaaaaaaaataaaaaggttatatgcataagtgactcagcaccaattatctggaacatttttttcacccagcaggcttttcttgagtaccctctagtgttaggcattgctctgagggctgctcacatatgagtgtgtactccttccaccatggataagtatgattttaccatatttggaacttagcagattggctcagttcatttcagatttcaattcaccgtttaattcatccccagcacatgcctagtgctgtcataaaccaaagaaaagatggtttctttatctgaaatgactttagcaaatatgcaagctcaaggtctatgcaaccgactttccagatgtgttatgggctttatcttggtagaattcatttatttatattttgtctatgaagggtgccatattatgtagcatagtgataaattaattcaaacttcattttcattaactatagagtttctttctttctttgattaacaggagaggaccactacacatgtagcttcatttgaggtcatactctgtgttgggaacttggaccttggcgtgaggcagagggaagaaggtcacacctaccctgacagcccaattagtcactgactttggcaattctacaggtgacagatggtgctagtttgccctcagtggacctgacaagactctatctagcgcttggttaggccatcagctgtgagatgctggcctggtcccataagttctcattaggggaatagatggcaaggctgggagtagagggtctgtaagatctattttagccctaaaattgtgactttttgaatttccaaacattgtggaaacaagtgaaaaagttacataacttgaggcagagt

SEQ ID NO: 68240 - DNA, 475 bp, Homo sapiens
aagaagacagagggttccatgaaagatttcttcaacaaaaaatgaaatgaataaaatacatcatgtatttaaatgcattgagaagagatttttttaggcctgtcaggtagcatgggaatgatttagtcataggaatatagaaaactaaacaaaagaaaaatgatgcaaccctcagttctcagtaaacaaaagattgtgcaagataggaaattaagcatagtatactacgtggctcaactttttgttcttcttgttatagagatggggtcttgccctgttgctcaggctggaatgcagtggcacagtcataactcactgcggccttgaactcctaggctcaagtgatcctcctgcatggttcagctttgaacagaggttacatttcataatattgtgaactccaagttttggaaggctggggaaggaaacatgtgggagggcaggtataaggattaagtcttcattttccacataa

SEQ ID NO: 68241 - DNA, 773 bp, Homo sapiens
taataatacatgagaagaatctttaagttttacccttatgcaaatgccccatgcaaattacccaaaataaaaatggttaggtaacaaggtctctcaagagaaaggacaacatgatcatttagattttgacaaaagtaatgagatagcctattttttagatgttgtctgttcacaattcctgaatttattttttaattcctttctccctgcctccatcccttctttcattgatttaggccctgttaaaagctaacagtgatataagaatgctttatagagctggggtagtttgtcagctggccaggtgatgaatcatggaatagaattctttctgtgaccaaattaaaccctaatcccatgaagaaagcagtcattgacaacttctggcaaggtaaagactaagaggaccctttctttgttgttccgggcagctgggaggatgagcagcatccacactctttggctgagcattttgtagtacctctttgacccagggccatttgtacctctttttcttcctcctcttggcctttgatccctacaaattctccagggctaagtcagctggctccatgcagaaggttttagacaaggtttctctactttggcactaatgacattatagaccagatgatgccttgcggtgggagctggcctgtgcagtatagggtgttcagcagtattcctggagtctacccattagatgccagctgtgacagtcctaaatgtttccagacattgtacacagggaggaagggagcaaaatcacctct

SEQ ID NO: 68242 - DNA, 2271 bp, Homo sapiens
cacattctcagcctcaccccaggtttaagtctcaccatggggctgagctttagcaatttgtgtttctttttgttttctttcttttctttcttttctctccttccttcctttccttccttccttccttccttccttccttccttccttccttccttctttccttccttccttctctccttccttccttccttccctccctccctctctttctttctttctctttctttcttctttttgtttttttaatacctagccgagcacaaagctaatcaatgtgtgtttttaacaagccgtcctggtgaatctgatgctcgcccaagtttgagaaacactgtgtcaggcaatgggtagtggtgttttgaagacatcgaatcctgagaatcaagggtgtgtaatagtggatgctggcagtattactctgaagtcaatgctatggtcttcagtgttcatttggctcaggaggctcttcacttatccgaggaggatacctgggaaatgtaactttccactgagagcctttataaggcttaattgctaatgtgtaggtagcagctgatacagacttgtccctcccactcttttcagccaagctttcaacctcactctaaatattcttaattaatgatcttcggcttctgaagccatttcatcagtggtctcctgtcccagcacgtttcccctttgagcattccttgaagagggtgttattcccagcagtcaactagaaaaggaaagtagaggtggctctacacaagtcctgtgaccaattaacgacctccctttattcctctttgtagttctctaaaaatgggtcagaggaagaaaaactcggctctcaccagcagacctcgcctgtgtttgtctaacatattctgtcccatttcaatttcctgccttaggcatgaattggttgaagattccctttgaactcttactcattctgtagaaattctctgtgatgaaagcagtcatgggattgtttcctgagttctgaagcagagcagaatagtgagggaaattcagtgctaaagtttaaggttcattctcagcaaaactaagggattattttgcattgaatgaattttgaattttgttttctcatttgataaagctgagtgagggtgaaaggtaaagggaaacaaacttcttaatcctttacttgtcagtaacagtttttattgcttcattttctatttacaaggaaaacacctttaaaataaaacaattctattggatcagcaccttctttggtaaagttcaaagaaatttcccaggttagtccctatcattccctcacatgtggtccttaggagccttctggaattccctgcaggatgggattccccttgcatcactgggcacttcctattatgaggttcccaatgttgcttgccctttgtggttttagtctctcactaaaataatagaaccaggatttctgaaccaggagtcactttaaggaagtgtctaggctgtccaatgtggcagtgactagtttatatgtagctgtttaagttaataaattaactgcttattaaccaatttaattagaaataaaatttaaaattcacaccagcctcatttcagatattcagtagccacatgtggcttgaggctaaggtattagacattgtagatatagaacatgtgcatcatcacagaatgttattggacagcagtggtcaattttgtcacccttgttaaataagatactgagactgagaatgatgtttgttaactactctcaattagttaattcctgtttgtggacactgcagtctgttttctttttgaatttaatcataacatctctgggagggcagggattattgtcccattgtacagataaagggattaagattcagagaggctgagaaacttggccctggctctgtggccagtaaagggggcagccagtgtttgcatacatatgtatctgtatgactctaaagcccatgctttgcatgttaaagtcactaaaaggtcaagtactcagatttttggggtctataagcccacatttttaggtgtaaactaaacaaacaaacaaaaaaccaggaagccaatggtgcattggatggttgaagtaactaaatcagtccaatgcaacaagccagcagtcaatcctttcctgtgtagttttcatcactcctcacagggagaccagtggcctatgataacagtgcaatatttattcagttgcccattttaatgggctttgtgtcaatagagttttctcccctgggttgagtggccagtgcacaccccctg

SEQ ID NO: 68243 - DNA, 945 bp, Homo sapiens
cttatttctcattcttccatgttcctatttcaattccaaagtgtaccgtcctagccaatccttttgtccgtctaaaaatgcagtatcttatatctgttatttgctgcttagaagaaagaattcccctggctgtgcatggaatcattcttttgtggagcctacctagtactgacctatttaacttctctcgatgcttcacgtcttccaactgctgccgggatgcttggacatcccctttcaaggtgcagcccagagacagatattttgtctttcctgtcttgattaacattgcatctctccttagcatttccactgtaaatgttaaacttagggaaagtagtagattatgacctgtaaccatgttctttattaaaagttctgtctagtagtgaactttgttgccatttcatcatgagcaaccacataggaatttgtgagattttctctcattgtttgctgggcatgagccgcacagacactgactctgccattaatgtctttcagtgtgggaattttgctgtcctcgtggatcttcatatcttgccacaaggttcaaacaaagatacaagctggttttctgaacagaagaaagaggtacaacaaaactttctactatttaattgcaagtagctgctgctgctataagaaatatcagctctttccagctttcatttctgttagtgggaaaaaaatgttgcgtatttaatccttgaaaaacaattgtattcccaatgacagacacatatgcacccactttttttttccttcagaaactgacacattcataaacttcatatgatactgtattatttaaaccagacattttatacctctttgttttgggggaaggatttctatatattcaaaaagaggagaagaagaagaagaagttaaagtgactatttcagtaatcagggattttaacctgactggttgtgaaggatg

SEQ ID NO: 68244 - DNA, 1158 bp, Homo sapiens
tcccttttgagtccaccacaaggcaaaactagatttcatggttgtctcctagttacaagtgagtcaggggaggcaaaatgtttggcttttaccttgggaaagtgacacttataaaatgtggaaagtcatcaaaacataggatgatggtcaacaattttgagtgggtggacacaagttacaaatatccactaataactttcctcttggcttccttcttccatgagcttctaatcagtaacaacaagctattgcctaacagcctgactttcccaactacaaaggaaatgtgctcaccacatatccttcaaaagagatgacccagagtctcaagtcccagctccaagtccaggacttctaagtgatgtttactccccttctagttcattcccagcccatatttgttaacttttcaactaaataatgaagtgaactactgccaacaaaccttaaataaaatagtagggaaacagccaaaaaagtaactgatgtataaataaatacatgatgcagcaaaggacagtgaggtaggtagatgctaccattctaatttctgtaactgtgaaataagtagttgatgtttgtatcttccctcctctatttattttgtattccctgtgttcttcgcctgtaactcatctgattagcattctttaccttcattcccccaggatttgagctgccagtggtcctgccttgatgagattgccattgttttagttaacttttagcactgggtatgtttcaccaggtagaactgattacattttttttttttttttttttttttttttgtctatatacctctctccctccattcatctcatcatgagccagcatttcaactcccctttggcctgtttgtatattgccataaagagcctgaaacagtcacatggtactttgaactttcagcccgattcattgttatcatctgtgttataatcatcctttgagtactaaggaagcagagtcatggggatggaacgtaaacgtttgctgaggtggtcacctcgcttttccagtccttcgttccaggaaccatgtatctggccaaggtagcacatgttctgctggtcggagcctatattgcatcccttaggaccttactccagttctacaaggtcctgcctcataatttgcatcacaactgagttttca

SEQ ID NO: 68245 - DNA, 2609 bp, Homo sapiens
ttgtttgcaaagttaaaatttgaagagatttcacataaaaacttggatttccagcttttctggtacccctgtgccctagtttccgatgagtttgaaaatcactgctgtcccctttaaacaagccctgagctctctccagttttccagtcagaacccaacccttttcctgttacctgtcttacccctcaggcattaagtttgcaatctcagttcatataaaggacagataaagtggcacataggtaggtatagcatcttctcactcagcattttggtgttgtttttaaaagatggttttaatgtggtcctggctgacaaacaggaaatgaactaggagacttccaaggttgtttcttgtcctttgggtccatggtcctgttagaatagtccagtggttcatgaactctctttctcattgcacatgatctagaatctcagagttgaaatggattccctgcaagacagggaggccacagaggatatgcttcatctggtgttcctctgtatgcacaggaaatttgaaatccattgcagaggggcctgcttgaacagctaatagttcaaacaagcagctacctcatttagaaggcttattaaacatctctgtttcttttgtgtatagttatttaaagatgagtgaagggttttaaagagaactttgagttttataagtacacagtattatattattcttatcattatgcatggcctggcagagttatgattgtgggaaccatagttttgaatatcatttcatctatgcttgcgtgttatccaaacacagttttcatatttaatgttaagggcctttttttaaataaacaaaaaagtgggaaagcaacatggggaagaaatctgaagtgatcatttctcaatttgttttattctaatttttgtctgctctgaaaagccttcttattccatgtgaacaatctctgatgggtcccacagaaaatgaaatttgtggcacatgtgccctctggcattacctacaaagtcaaaagggtgacaggcagaaaatgggtgtttttttctaaataaatttggctccgaagaattattttataaataatgattttattcatgaaacatttcatgctccatttgttttggcatcaaatagacatagctttattgtgactcagagtctagtactgtccttatttagggacatgaaatgttatctcaagggaacctttttggaatctctaaatgtcttgggtaataagtgaaatttttagcctaggatcaaatattccacttacccaccaaatttgtttcccagttgtggtcttagactaggatcccgtatgtatattcctaaacttgggacaggactcttggttttcagttcccacagaacaacccctttctccaacccccccccatcaccagcaatagaggaggtcacacttggacccataacatgtttccaaaggccccatcaaggctttttcataggccccatctcatacttagtctcttttcatgtttgaagtgacagcatcaaactcatgatttccctaccctttctaccctaggccttttgataaggacaaggtgcaactttctgagtgacacagtttgggatgtaatgagttacaacttcatttttccttaatgaaatagcttgaaagcacacgtattcttcatcttttttttttttttttttttttttttttttgagatggagtctcactctgttgcccaggccggagtgcagtgccatgatctcggctcactgcaacctctgcctcctgggttcaaacgattctcttgcctcagcctcccaagtaactgggactacaggtgcgtgccaccacgcctggctaatttttttattttagtagagacagggtttcaccatgtgagccaggatggtctcgatctcctgacctcgtgatctgcccaccttggcctcccaaagtgctgggattacaggcgtgagccactgtgcctagcctcttcatcttttaagtatattatatgttcctagtctagtctaatacccaagatactgtcagtactcagttggtatcagcctctttcttcctgttctcttattaaatcacaaccaagcttgagaactgactcatgacttcagactggaaacagtcacatgtctgaactggcgtgcaatgcagagctgcttccgggttagcacatagtaatctgattatgacaaagtgccctttcttaaagcaaatatcagaccactatccaacctacctaagtaagcttatcttcaccaaaattttaactatctacaaatccataattttatttctttgaaattatcattaggaccaaattttcaggtcatctgtatgccagtctttgaattgtcattatagctttagtttgaacctgtaatttcctacagcagttaaaggagaagtcaaaattaataaatggctggcattttaaaagagcatacaggttgaaattttgtgtttaggcaactgaggttaaaaaaaaaagcttagctgggtgcagtggctcacacctgtaatctcagcattttgggaggtccaggcagcaggatcgcttgagcccaggagttcaagactaaccttggcaacatagggggaccatgtctctaaaaataa

SEQ ID NO: 68246 - DNA, 836 bp, Homo sapiens
ttcatctttttttttggattctcaatgtctaagtgacaatttgttaggaaatctgggagcgtctattcaaaactcctctgtcaagggattctttcaacctgtagacaaggaagccagctgcacttagctccccagtacttaaaggtggttgcacaaaagaactgctgttccagatcaggcagtacaaagggagtaatccccctcctttacggagcagagcgaatgcagccacgctgcccctaagcaccacagcgccagggaggtctgtccctgctgtcactgttgcgtttctcttgtccactcagggactttggtgcagggagatcctctgtgttgcaatagctctgcacagagtgcccatgtgctagggatgtgggaattgtgatgtgtactttgggaagaaaggacattattatgaaatgagtcattgtatttttcttactagagtttctcataagaaatctaaaaactcttgtagcctcagtttttgacctattgctagatataggactggggagtcttttgagagtttttacctttatttggtttgttttttcctcaccgtttttttccttggaaatatgaagaacataaagtgaattttgattgcgctcagctacattccattccaacaatattttcttatttacaaacccaaaagcctatgtagaaactgttttctttctcagatgtaaagtcctggagcctttgggaaatttaaaattatttattatttctttgttaaagttgtgtaaataaccatagaactctgtatatatctgggacatttctgggtcaggacaaagctactatttcattgtgtgttagttacagcc

SEQ ID NO: 68247 - DNA, 3723 bp, Homo sapiens
atcgcacccatcttccttccacccattttgggatgttgcaagggcctcgctgcaggatctgccagctgggcccgggcctcgagctcctttgggggcggaatggggcggggggatgagggcctatcacttacaccctcaggcactacctccagaagaccaccccttccaagccttggcacggcccccgaaggcttgcgggggccgtgcacccgcccttcccggggaagtctgcaaacacagctgttccagagcccgggaaccgctggaagtgaggccacaagagctacaccactcgggggcgggggcaggaaggggccagcagcgggcgggggttcccaggtctacagctcctgtgagggccccaagaacctcctcctgcggcggccgcccccggcccttaagccgaacctggagagcgcccccgcacacactaaaatctcccggggagcagcgggaaacggactcccccacaccctccaggaaggacacacccgccctcccggccgttcacgggaaaggggaggttgccaatttggacggcgttcgcaggccagaactgcgccgagtcgccttccacggcgcaccaggtttaattagttaagcaaagagatcagctacaacgatctcttggcttggggccgggagagttactctgggaacttcaagttgcaagtttacaccggccttcctaggagcctggtcccataaaccctctgggatccccacttttgtgcactaagcaaatagcagcaggaatgggacccacctcgactaccccagccgagatctaactatagtgtcccggctccctcacccgccacccctagagatttccccagttagcgcctagtttcaagccaaagccctttaaatccctctcgcaagggataacagggctcggccaggcgcgggtgtgaggctccgcccggcctccttcccgagtagtcactcaccggccaggcgaaactgaaaggcagcacgatgcggttgcggtcgttgccgcggctggccttgaggttgaaggtgttgcccccgatgacaggcgtggaccctgagccgaagctgcagggccccccggccgtgacgcgggactgatactccttgaggcacactttgaagtatgtgtcacactcgtcgcgggtgcacttgcggtctcccgggttccgggcgccgccgcagcagttcccgttctgcagctccccgttcacgttctgcatggacaggatctccaactcgaactgacccgaggccccacacacctgccggcgagggaaggaggtaggtcagcgcgggagaaagctgttttcttcgagtatagaggtggcgactccctcccactccccgccccgacgagccctcctcgccgagtgaaaataattttgcgaaactacgttcaaggactcaacatgattccggggcaaaaaaaaaaaaaaatgcacgagtgcggaagaaatccgacgacttcccggggggcaacagcggagcgaacgcgcccctgtccggcctggaggggtcaccctcaggaggcaggggctcccgtgggggagttggcgcgctcagcccaggtgcagccgctcgggcgcaggggcgaggagtcgggcgctcgagggctgccgagcctgctcgcggggctcaaccgcccagggcgccgcgaggggagggagaggacggctgggagggaggcccggagaagggctcctaccttggctcgcagggcacagagcagggcgagcaggaggcttagggggcgcccggaccggccgcgcgtccgtggggaacgcatcgctgcgccgcgcgccgcgggcactcgggacgccgccgctgctgttcgcgctggtgctgccgccggtgctgccgtcgccgctgcccctgcggccgccgcgtcccggctctaatatactccgccgattggagcatgcacgactggaaaacaacaccacttttcaaaagccctttcaagagcggcccgttccagaaggcaaagagcccggcctccttttattattctgatcgcttctttgagacgctccccctcctcttccacctcccggctttctttccttctctcgcgctccccttcttttattattatgattatgcgcagccttttattcccttttagatcagctgcatggaaaaaggggggagggaggggagaaaaaaaaaaaccagcctagctcgcgggccggccgcaggtaacacaatgacgcgtgcccgcccggctctcggagaaggacccggagagcccgtctggcagcagcggccggggctggccacctctacccagcacgccgggcagggcgcatgcgcgcttattaatattcatgagagggcgtgctcaccctgggcacgcccctccccttcacgttgctggggagggggtagtgcgaggaggaacttggaaggggttgggggcagcgggatgctcagggcggcgtagaagaaccagggccccacaccaacccccgccctcgggagcttcgggccaggagggaagggagagtgcggggaggtacttggaagggatcgttgctcagggacgcctggaggcccccagcggggaccgccccctcgggcgccccgggccgtgcgcctttgcccgcgcgtcggggccccaggtgtaggcgccgcggcgctgactgagcggtcggagcggggcagcttccgccttccgaaccgcctgcgtcagctgcggctttcgccccgggaggagggcctgcctgcccgccgggagttcggcccgcttcccgcgagcgagccgcccagagcgctctgctggcggcagaggcggcggcgaggctggcgcgcttgccgccgtctgctcgccccgcggaggcgacctgggcagacgctgctgggaactttgaaaaactttcctggagccaggcttgccgcagattcgaggggaagcctcggccgcgtcccaccccctcccaaatccgagtctgcggagcctgggagggctcccagcttcctatccaaaccgcgccggggcagaggcgcggggaaaccgggggtagaaggcggcgggcacgccggggccctgttcaggctttgggaagggccggcggagatgctggtgggcttggacgccctccccggcccgacgccccggccgcagtgccgggattgcacctgtaggcggcctccgagcagctctctgggtggcaagagatgggcctgggagggaccgtgtccccagcaccgccagccgcggaacttgccttctctggggtggcagtggaaaccgatactgttttccaccttgaggcaagcctcgcaattaacagctacactcctggtcataatcaaggtcgaagaaagcccgtgggctggccgtagcctctgctaacccctctcccacgggcttgctgttgcatttgaggggacctttatatggaaacatcgacttcctttgaagggtggacaaagttttggccctaatagtaggtatgtcctgcagaaaagcgtgactattcagcggccggtttggggcttgagttctcctgggtgtggggcgtgatgggctggcaataggtcaagggaaaatagtttccaacatgctgagttatgagcataaaagggtgggtatttgtggttatctacttattgcatttgatgggaggctcagtatgaacaatattttcagtgccaaatctcatcattctgaggaataaactagggcagctaactgacctctttacataggttcaaagctaccaa

SEQ ID NO: 68248 - DNA, 1105 bp, Homo sapiens
ctagcttttgtgtccccagtctgttatttctgcccaggctcaggagcctctaagcacattgctaaatgaattcattgctggaacaaagatttggtggtcgaatagagatggctatcttttgttgtcagacattcaatcccatataccaatccaattacttaagctgtttctatcagtcttattagggctggccattgaggctggctagaatgctggtcgctgtgtcttggaagaatgtggtggaacagattagcgctttaatgagaggctttctgaaggccagatcttttcccttgtatatatatcgagatctaggaatcatttttaggcgagggcccagagtcattgttacaaagactgatcaaaggatggctggaaatctgtacgattgcttgaagaaattttatgggttataaaatattggcatgggttctgtctgttatgggctatctgatgaaaatctctggtaggctgggaaaaggaaattgcttattggcatttattctgtgggatggatatctttggagtttgcatttgaactctttcttcactgtgttacaggtcaaattctgtacttagtactaacattccaggaatgtgggctgcataaaatcaacataagccttgctccatactttgctacccagaaaagcattatgagagagtggctcagacaagggtgaatggatgattactaagaaaagatagcaagggtggagtgaaattgcagtggttaatgtgtagcagttgaaacctaaagttaaaatctgagtgcagttaagtcaaagaacttagaacacccttgctctgactatcaagaaaaggtggtaattggttttaatgttcaaagaaacactattcaccttctatgtgttatgcttattgctctggaaatgtttctgaaatgtcagatgcaaagagggtttatttcattttatttttatttatatattttttgagataaggtcttgttccgtgacccagactggagtgcagtggcatgatcatggtacactgcagcctcgacttcccaggctcaagtgatcctcccacctcagccttccgggcagctgggactataggtgcatgccaccatgcccagcta

SEQ ID NO: 68249 - DNA, 1004 bp, Homo sapiens
gtgagtcatctgtgtgtataggtgtgtgtggccacttgtgtgtatgtgtgtgcacctgtgtgtatatgtgtgcatgaatgtgtgtatgtatgtatgagtctatatgtattgtgtgcctgtgtgtgtgagttagtgtgcatctatgtgtgtaggtgtgtgtgtgtgtgagtgtgttcaaagaaaagcaaatagtctcccttggattgccccaataccctactcatttctttataagataaaaccacaaaaactaacaaatgcagaattctgcttttcactgagaaacgcaaagccactggtgcctgctttctttgtttaaaaaaaagagttagaaaggtcatccaagataggaataaatggaggcagaggcaaatcaatgtttaacttggaaatatttttcagttaatcatctctgaccgctcacactaagagggcactcctagagtgttggcaaacgtgaactggaagtcactaagctactagtaaaacagccagacgtcaggatccgtataatcagaaagcctgaggctctgtaggtttaacctaaaatggcgagaaaaccttcttctgaaaatatgatctagaaatattttgacttctagacttttgcttccaagtatgaggattatgaaaccataggactttccttgctttaggattataaaaacctgggactcatacctggtaggaaatttgttgaaaggtgtgggaaatcgtcttggagtctgtgatatagctttctctccctgttttcttttctggcatatgtaactttataaaatgctacagaatgtgacttagtagctttgtggctcttttgttggcttttttggtcattttgttataaggagcaatctttaagaaaggtatggaaagcatatggggccagtggggtcaatatttgctctaatgggcaaatagactttgttagtctcatttccattttttgtgtgtttgtagatggccagcgatgaggacaggctatgattttgacaggctttgtt

SEQ ID NO: 68250 - DNA, 534 bp, Homo sapiens
agggaatgtttcttccaagatgggcgggaaggaagaaagtttgggtgatgatccaaagaaaacttaaggagtttgggaggaaacttgtgggagttctcatcagatgttctcaattttcccaaggaagtaggtggagaggtcatctttgagagtaaataggcaggggaggaaatagagctggaggagaaggctggctgctgtggtgaattccaagacaaggagtaagtatactgtggatgataaaaagaaagggttacagccaggcacagagcctggctaccaaagtccaccttgtgtgtttactctgccccagccccctttgactctgatgctgacaaggccagaagagcctttcaatgtgcagagatttattgaaaagggtagatagttgaaagataaaactctgaattgcttttaaatagccagagaagactttactgaggaggagggagtttagagttctgagaacacagaaaatttgagtattactccaggataagatagatctctttggaaacacatgccttacttatt

SEQ ID NO: 68251 - DNA, 697 bp, Homo sapiens
agtttgcggataactgagttgaaacaattagtatcagctacataatttatttgcagggcccagtgcaaaataaaaatgttggaccttgttgaaaaattattacaatttcaagacagtgacagcagagcattaaaccaatcatgggacccctccaagcacggagctctgtgtggcagtttgagtctcgtacccacaaagtcagtcctggaagcaatccaagggcagtaacacaagttgcagaagcctcaccagctttcgtcattccttcccttttactacttggtctaagtcctgagccaggttattctgtaacttcccttgtggaaaagctgagtcagcccaacataacactgttgtgatctgttgccctgtgactgccctgggaccctgggcagggagttgggagtggggtgatgtggcggatagagcttgggcaggggtaaacctgtgagccctgttccaggaagggatcacatgtcagcttctgaagcatttttaattcttgcctagaagtgactgctttcagaactgcctctaaagtatcatcttcttggttccttcctttgtttgttggttttggacagagtctccctctgtagcccaggctggagtgcagtggcatgatctcagctcacctcccaggtagaagcaattcttgtgcctcattgtccgaagtagctgggactacaggtgtgtg

SEQ ID NO: 68252 - DNA, 899 bp, Homo sapiens
ctacctgtagaataggggccacatgaagggtttctgtcagactctctctgctcatcaatgcctgtcatagaacttacactgagctgggctcagctggttagtgatgtgactttaccaatattgagggtcattgcaaagcaaggacctgacaagtagagccgggctgtagcctgagatttggtcctggcacaaaggaaacaaattacttaatgaatgactgcaagtccttgatccaccgaatgtgggcctttacctgcctaacacgagtgttgacttgttagctaacacattccacctggaagagtcagcagggaaaccccaagctggcctggctctggctacaagaattcctggcacatcaactgccgaataatggagtgaagcttgcaaacagaggagatattttgattcttaagccactagttccggatgttcacttctgagatttctttgcagatgcaaaggagttgcagggtataaagaatatgaagaagagaatcaagaaacctgacttcttgccagagctctgccaaccattaaatgtgtgaatgtggccaaggcactgtccttttgggagcctccattttgtcactggtaaaatgaggaagctgaatatattttctcttgggaacctttgaggtctatgtatatgtcttattcaagtgcataaatactctaagagagaaaggatctttgcatcttagagaagtatataaactctaatatgcataaagaaacagctgggaatcttacagtgaacattctattcaggaagtctgggtggggcctgagaatctgaattctattaagctccctggtgatgcagatgctgcgagcctatggacctcactttgagtagcaagaccctacgggatgctcttcttatgttaacctctctt

SEQ ID NO: 68253 - DNA, 1085 bp, Homo sapiens
cttggcttacaatttgcctctcactggagtttctggagtttggtgccagttcaagagcatgatctgtttgacatgaattctacagccctctcttcatttcctcctaactggatagcttcagtttgccgatgattaatgagtctggaaggtgagcgacagttatcttaagggctctcaaaagtttatttcagagactagccaaactctcctgctacattaactgcagcgaagtttcctgtttaacagcccatggaaaataactgcctgacccccgccccccccccaaaccaagctgccatgagcgcagctctgtttattggccaacagtgtgcatgttctctctatcgcttcctttcaggcagacgaacattttacctatgagaagtaggaagtccattgtgaggctggtccaatactggacctcatttggatgtggaggatttctgaaattggaaagtcaggactgatctggaaaatgtgcttacagatagtggaacaggaaaatgattcgctccccaaggccagttcctcctcctctgctgggtggaaaaggtgggaggaagggacagggtgttctgcctgtgattggaattcccctgtagagtcatagaggatgagcaagcctttggttttcctttttcatattttattttgcacctacaataataagcatgcagagaggagacagagaggcctaaatgagtttttttcctttctaaataatgaccagctctgtatcaatctgaaggctactgagggatgctggtggctggatggcggggcctatttagggttttggcctgattaaaagttagtcccagggacatgcaggcctaccaggtgcacactggtgccagccacttcagtggggtgggggaaattactgggcctgctgtctcaagtttgagaggacatctgagattcgggtccgatagggtcacaatgtcttcaacacgaataaataggcagttgtaggttggggaagggaaagctaaagtggaaaataaataacttaagacaccagacaagttctggagactgaggtagagagatgatggagtgctcttcacccatgtacacttcag

SEQ ID NO: 68254 - DNA, 898 bp, Homo sapiens
ttccaataaaatattgtttactaaaatagtctacaggctgaatttatcccatgggtcatgctttgtcaagagctgatttaaggcatcaagggcagccctttattctcaaaataaataattagcttataggtattttaataatttgcaagacttcatgaaaggatcggctcagaggaaacacaattcacccaaactttctactgacaagtcatcagtatatagatggtgtacaggaccaagcaggcctttagactttctctcctccctgccactaaattccttttggccttgctgtattttatgagttattcttgtttccagcctaatacgaggaaaatgggtagatggcataagaggacattgaatgtactgaaggcagcccaaatattccatgcattagtcacttcggatatccagtggagtgaatgcggcattcattaatgcccaatgtcggcccgggcaaagtccagacagtctgctggcagcaagaaagctaaaggcaagaaggcctgtgtcgattgtcgtctgtacttacgaggctgagaaacagtagctatgaatcagcctgtctgagactctgctgtcattatttgcagcagtaaggaagataatattttaaaaagctttcaggaataaaatgagtcttaaccactagaggaagaatcacagtctgcagctacattgcctagaggcttaatgatgattcattgcaaattagaccaattaagaataccccccatattgtagtcttgagtggcttagataagatcattggttccctttgactcctgggatcctaaaataaatgggatctcagagatttctggttcagggcttgtggaatgttagaagtatgaggcatctcactggagatctggtcaacccatttctttacaga

SEQ ID NO: 68255 - DNA, 1008 bp, Homo sapiens
caattattacaccagttaaaggacatattttctagctgatatcctgctgttgttatgaagaggattgattctaattgccagtttcctgcatttttcttcaacatttagcttttgcaagaaaaaaaaatcactatgaaaattccacacgttactaggattacttcacaaacagatcattcttgactttggaattccccccagactccaaactgagcttatccatacagaaagcttgaattcattttgaaatgggaggaaagcagggcaaaatgttatctttgagctatgccatttggcttccagtggacacacaaaatggacacacatcaaatgtcaaccaggctgataacagacaggaagcaccactgtggacacagcaagcccgaccttcactggcagcaaaagcctgggtgaaacacaatttctctgaccctgagtcaccccaggcatgaacaaaactaggcctgcaggtgaggatgctggatcatggtgcttcagtatctaaggacatcacacagaaaatcagactgaagtctggccaacagggagggctgagtttatttatccattgctgagagatgagcaaggcagaaaaataggccctggttccaagtcttccctggctccattatcaggaaaacaggacaatatacacagaaataaaatacagaaacttcctcttcaccatcattttgaatctgtcctggcacagatttgcactgactccagctcacagcagattcagtatgaaatttatcttcataggcatgtgacccttggctgccagtaggctaaaaaatatagccaacagtggggcaaataaagataaagaagtttgtggaggacaaatactgcatttcctacacacggctttgtaattcccctgtcccaggaatgaatggaaaacaaatggatacagtcagccaccagggaacctctggtgtgttatctgcacactactgcttgtgaagaagtagataatcattttgcatgaatagggacaagatg

SEQ ID NO: 68256 - DNA, 803 bp, Homo sapiens
gcatcttgggtgggaggggagcagaaacacatttagagcaatgatacaaacacctctgaaatcagcaactcaactctcagatacacagggcctgtgtggaatctcctccttcgggggcactctgcccaacttccccagctgcaggaaagaagacatcaccctaaacactgagagaatgcctgaacttgccgtgtcttctctctcgcctgctcgtccacccccatcaaattctatctttgttttaggccatgactcacaacccacccccacccttcagtcagctgtgactcatagcagaggccagataaactgaaggctgaacagcaggggtgggagagagctgcagtggtttttttttccctcttgctttttttacccagtgagaaaagctaggtcaaatggtcaagttgtgggaatctttgagggtttatgtgtatgtgtgtgtgtgtgtgtgtgtgtttaatttgggggaattcctgcattgactgggggattcagctaggtgtactctttgaaggtaacaataatattgtggttccaacttttaccattgagaataatctaactttgattgcaaagatggcctccaattttttttgaaacatttttgggatccttgccttttgcaatgtgactttactcccattaaggcatcgggtctcttttccctcctttagagtctggggttggacatgtgacttcctttggccaccagaatgttgccaagaagtaagtgatgcaccagtttagggcctaggccttaagaagctatgcgttttcctgatctctcttttgtgcttctg

SEQ ID NO: 68257 - DNA, 687 bp, Homo sapiens
aagctagaccccaagcagtgaaactgctgctatagaacaaaggagatctccaaacccattctgttctaaatccataatcctgatggctgaaggcaccgaagctagaagcagtgtcttgtggcttaaacttcaggcgcttgtccctggacccaggacgcttccagcaacgctgccggcttgccgaggctcatggcaatcagatcctctttctgaatctgagttttctcacctataaaaagtaagtagtaccagatacataaattatagaccgttactatatgaagcctctaatattggccaaagaaacgcctgaggaattattttttcccagcatattttctttatctgggagtggagtgggttggaatggaggctaggagtaccaggatattcctctgcctgactccagggggcagcagctacttgggtaaagggaggtcaatgacccatccaagggttgggtgaccttagttcttaaaccctgaggtaaagagacagatccaacaaaatggactttttaaaagaaacataaaatcctcagaagtcatgccccacttctaaagaaactatggctcccgggagatcctcagaacatgaaaatcattggtgaaaggatagtatttctcctgaagggttttccttagattttcctggataggtttttggtgagagcagatttatttttaa

SEQ ID NO: 68258 - DNA, 2583 bp, Homo sapiens
atgcttttgaatacttactgccccacttttcgtgctctttgaaggacgcaagaaaaaggagtcaatctttacatgcttcccaattacaaaaagtagctaggatggcaacaatctgtcttgacttcccctgtgtttacatcctccaacccagacctgagaaatgactgtgaaattctgaccaagactcactgttttggcagcttccttttcctttatttgctccccatccaaaattctcctccctcttagggatgtctaatttatacaatttgtctagcaggtatggtactggtttaggctacatttgggaattccagctggggctgggaggaagtgaaagaggaggacggttcccagaaggcgcataacaggcattttcagtgggggctttccttctgccactccgataagcccctcgagttcctgcctcctccctaggaaagggtaagcaagacagaagaaaaggtcaacaaccacaacctagacagtgaaaatgtctctgccaatttcgctggggccctccagggctagtaaccctccaacccacttaatgaatttagagacacattagattcatttacataacaatattttaaagaccacacgattgctttggaaaattgtcttatttttttttccttcctcaaactgaactgcagagttacaaataccctcccagagagcctcagaggaggcaaacttggcagaggagagaacggagaaaaatccatcccttgcaaatgccaagcggaagaacaatcccgttaggcggccagttgatgcttaactgcgggactgggggctcgggcagggatcttaaacatcatttcgcgtagggaaacaggcactctcctctcccggaagacaaggctgcgcgtaggtttatctcggcctcctggaggacctgtagtttttgggagagcagctgcgaggggacagaatgcttcgctgtggtggttccgccgcgggctccgctgccaggaggccggcgtgcgcgcagctctgcggcggggcaggctgccagggcccggggagcagcggcagtcttccttggaggagcacctgttcttcctctccctgcgccggaaacgtgccaccttcccccaccccatgctgctttcccctgcgtggctccattttgtctttcctgatggcagatacccccgcggccttcctctcgaacacttgcggggcgctgggggaggggacggccacgtcaggcgcatcccttttcccaacaccccaaggtagcagcagcagcaggtgctgtgacattatgacaaacactcaggtcccccgtgactggatgcgtcacacactatgtctaacagtcgctgacatctcatcaatcacggccttgattatgctgctggggtccctgggctcaactttgggctctgaacagaatttactgcaaactgaacatccttatttccaacgtaggcaagcccgtcttgtttataatggcataatccagctggaagatcacactggcacactcaaattggcccatcttttctcttgtcaatattgcaattaggtgcacatccggcatcagaaattgctgggacctttttctctcctgcactctcccaccgtttattacaactgaaggacacattttgttgtccctgagagtgatgtatttgaggaaaggctatgactcagtgtatgacaattaaagaggaaaggacattggtaatgattaactagcttgtctacatgatgtgaggctgtttgtcaactaacattgattgagccagtagtctgtgaccagccatgtgtgagactctactgggaaacacaggtaggaaaaaaatgattattgcccaggagagcctcaaaatctagttgataggataattgtgcaaatgtttacgtaggaaaatattgaccactcttctttgcctagtaataaagacagccgagagcctgaccacagtgcatggatcttctgctttcctagattggttcactccctttccccagaatattcccctgtgttttcttcctttagaaataggctgatggcattgttctaacttgaggccccacccctcatgtatttctctaaatcaaggtcagcaagctttttatatacaagatcaaatagtaaatagttaaaacttcgtggacccagaggcaaaatggagcaactgatattgctaaaagattaataacctttttttacactttacatttaagaatgaagaaaacactctttagtttatacaccatacagaaaaaagtagtgggctggatttggcccaaggtgcacaatttgctgtttccttatctaaatcctatttgtcttttaagatccagctcaaaccccaggtgctatgtgaaatatatttgacactccccatccaaaattctccttgctcttagggatgtctaatttatacaatttgtctagcaggtaatctcatatatttattcaccaggtagtatggtaggagaaggaagagtctaaattttcaaatcaaacaataattttcaaattctgattttgcaacttacagctgagtggcattctgaaaactacttaaattgtttgattcttgattttcttatctgttc

SEQ ID NO: 68259 - DNA, 1299 bp, Homo sapiens
gacagggcagacattgcgcatgccccgtatccaaggccgcctccgggagcacctcccatgccgctccgctccctcccggtgaccgggcacgcgcgctcgctcccgcagagcgtgccctgcgtgcgggtgcccgccgagcccgccgggcgctggatctccgagtgccccggccggggcctgaggagcgggcacagggcaaggcggcggacggctgcgtcgcccgaggcgaggaggagcgctggcggtgagtgagggcgccgcgggcgagcgggtcggcgcctccgcgcgtgcgcagcgcgggaccgcccgggcaggggcgcgcgccctgcggccggccggaggggccgagcgaagcgaggagaggccgggctggtggccgcaggtcggcctcggacccacgggaccagaggatcccatatccgtcccccgggctcgagaggcgctggccgcgcgggctggctttccgagggggggggggtcccagtggggcgcgtcgggcccgcgcggaggtcctggtgccgggggcggaggggcagggccgcctcagccgaaagaccgcggggaggggcgcacgagcccgcctggccgtgcggacgcccgcggggtgcgcgaccccggaggtggcggaggtccaggcagggggcgcggtcgggaagcctcggcgcctagcaggtggcgggggccgcgcccctctcccggggaggcgcgcggtgggaagcggagcaaacttcccctaagtaactttcctgaggcgctgccggcggggactccggggaccgacgctccgggtttgcgcggcctcaggcgccgcgggaacccagcgagtggcggcgggcgatggcgggggcggcttcctcctgaggctggactagtcctccgagttctgagtggcatttgtggcccgtttgctctaaaaatagacgtacaagtttggtgttcgggaagaaggatgtttgctctcttgggaagaaaaggcttttacctcctggccttttcaaagaaagtattgttcgggcctgctggggatccctatttatcaagcaacccattgtcctgtgtgtgcctggtgaaagcgagctaattctattattagtcctcaaaagaccaagggagatcacggtgctttttcttttttaaatattccccgccacctcgccaaatcctgtaatacagtttccccaaacttggctgcacagaggagtcgctggggagttttaaaactcttaaagcccaatcgcacaccagaccaattaacacagtgtattttttaaagatccccaggtgatcgcgcagccgagt

SEQ ID NO: 68260 - DNA, 715 bp, Homo sapiens
cacagggcaggccccgctttgggcttcagtttttcatctgtggcatgagggcttttcattaggtaattgctaaggtcactattttagttaaactgcttgcaaaaaggaattaaatcttcatttaatgtatgcacagtacaaactggaaacctttgagtacaaaggtttccagtcaacttgtgtgtgtgtatgtgtgtgtatgtgtgtgtatatgtgtgtgcgtgtgtgtgtgtgtatgtgtgtgtgtgtgtgtacattcttgcctttatctctctcacctttgggatcatttctgacttccttcttggtctgttaataattaatagcactgacatttataagccagtggtaatatgtttcgattttatcatttcttttcatgaattatggatatcattaaaaagagatattttagaagtccggaaagggaatggaagttgctggggggtcagaggagggtagagggcacacaaccttgctctgccatcatctgtcaggtttcataaattactttcagcttgaaagaatttgaaacggctggtggctcctgtccgttcttcacatctccttcgtgggtgggaagacagccacagctggaacacagatttataactagagctgtgaacccctccacctatgaagaagtagatcaccaccgaaagtgggtctcccttagatgccattcaagactgtaaatcccagaactgctcaattg

SEQ ID NO: 68261 - DNA, 731 bp, Homo sapiens
taaaaatatcttttcattccacaaatgccaacaagactagaatttctcattagaaccagctaaattgaggatagaattaaaacaagtggaatcttagtagcaattggtaatttaaaaaaagagtaaacacattcttcatggaaaggaaactacctctcccagccctgctgtggataatgttctgtttattgatttgcttatttctttacccacaggttactggatctatgttttaattttttttaactttttgttttgaaacaattgcaagttcacaggaagttacaaagaaatcaaagggaggccctgtgaaccctttacccatcctcctgcaatgtaaacatcttgcataactgcagtactattatcaaactcaggaaatcaatattggcacaatacacaaagcttattcggatttcaccagttgcacatgcaatagtgtgtgcatgtgtgtgtatctttatgcaattttatcccaagtgtagctatgtgacccccaccatcatcaaaatacagcagaacttttatcaccatggggctcccgcatgctgcccctttacagccatgcccaccttctcctctcagggctaacccctgttaaccactaacctgttcactgtcactctaactgtgtcatttcaggaattctatatacatggaatcatgcagcatatatttctttcatactggtaattttcattcagcataattttcttgaggtttatccaagt

SEQ ID NO: 68262 - DNA, 528 bp, Homo sapiens
atattaatttcaaatattctgtgtttaattaataatcaatttctggcttaagtaattgttttaccctgagagagaaaaaatttattaaaatgtaatagtaaaaacgcattaaatataaatacaaaattttgcataaagtatttctactctgatgaaacattctactttctcttgttattgcacagtcaactgggatttcacaatgggaagctgtgctaagccaatatgcctgtgttttacttgtatttaatagagcatgctgtacttgttctgcagacttgaacttacttacacaactttaagtaaatggacattcgcaggcctgaagtcacaaaaggtcagtgaagaacagcaacctttcacatccacagaacttttactcaaaatccagatacatagggaatctttgcagactcaggatacactttaattaacctgagacaggaggaaggctattatttagaagttgcataaaagtaagttactcgcaaagcataaagtaggacattggtattcctcagcgtattt

SEQ ID NO: 68263 - DNA, 699 bp, Homo sapiens
agaggagtggggaagaaggacagggagaacatcatcaataaagaatgtcttgtcaaaccggctgtcacagagcatgcctggggaaagtctggggacaagtacaaaacacagtcctcagaattagattatctaaggagggatggagctagggaatgcatacactaagttctataagtcattggttgagggctgcttggatgaggggaggaggtgcattatatcccagtcatctccaattggcaaaagaggcttcaatggctacagaaagcctcaggcaaagcaattcagatactggcaggggaatgtgggccctgggccctgtgaactgtggctgcaagggcaaaagggtacaggagcatgacaccatctgctgactactcatgcaggaactcaacactgctgagtataaggaaagaattaccccacattccacagagcacctgactgaaacattgtgcgggtcatctctttcaaaggcaggctattaagccccaggagttggaggacaattgaatttgatgtgaccaactcagcttgctttccactctctagcaagatgcccaaagagaacatgatgaagctccactcaagttacagagtttggacgtgctttgtcttttcatttctcaagatggatctaaagtcatgaaaatgtgtcctttgttctataatcctcatctcgcagaatcctcacatcac

SEQ ID NO: 68264 - DNA, 881 bp, Homo sapiens
tatgggagattgggaaataaaattagagatgtacgtaaggatcagatcacagagaagtttcactgtcaggctaaggttgtgactaggaaaccataagaagactttgagctattaccttacaagagctgtgccttagaacagtgagccttggtgtacagtgtaggatcaattaaagtaggagaaactggaaaagtataaaataaaagacaggaagaagaaccaggaaataacatttatcatgggatgcattataacagcaaacattggcaagggtatagaacaactatgacttttgtacaccgctgcttggagtataaagttgaaaagtcacttctcagcattttggcaatttcctgcaatgtttaacttgaccttatgacccagcaatttcactaagtgtttgcccaaaacacaaaaaaacctaagtccacagagaaacttgtacaataatatgtccagcaactgtgttcaaaatatctaaaaactggaaataacccaaatgtccatcaaaaaatattaaataaattatagaatattcatataatagaatatttaacaataaaaagaatgaactatgatacaccacaacatggttgagtatcaaaaatgtgttaagtaaataaagagtatgtgctctgtgatttcacttaccgtgtttgaaatctaaattcagagaaagttaatcttttatagaaattatagaaatcaaatagtggctgcctggggagagatgagaagggaagggtggggaatggactggaaggagcatgagggaactccctggaggaatacaaatgctttgcatattatttggggtagtagtacacatattatacaattgtctgaaactcacaatctgaacatgtgatacctgtgcgtct

SEQ ID NO: 68265 - DNA, 1726 bp, Homo sapiens
cagtccccaggttccctcagtccccagaaggagccagcatggacaatctcctttacagtttcggaagcaggtttgttgccatggagttcacattttgacgggagttgagaagtataaaggtaaccatttgttttagtttcaacgatctgacaaaaagataggctgttgctcttcttctggaaaagcctgattggtaagattcctttaagggctcagccccaaagagctttatcccatcccctcgcagactgaaaactaaagcctgcagagacctctgaaggaaaacctgtcccgggctctgtcacttcacacccatggctaaccctggaggtggtgctgtttgcaacgggaaacttcacaatcacaagaaacagagcaatggctcacaaagcagaaactgcacaaagaatggaatagtgaaggaagcccaggtaagaggcactctcccctactcttctctgaattacctgaacgtttcaatatttctctgtgaagatatttgaggctgtcctaacttagagttcatcttatgaagggtttttacatgttttgactgttgactctgttaatagaaagtgcttggctaccaaaaagtttaggtgtggattaaggagaaaatgtcttctgtatgcaaaagaggatacacacagactcacacagcttcaggctccctaaaatacaaatgtacctactagacttttgtctcaagcattttgcggggagggaagaattaagaaagttccaactctttgcatatatttttgtccaagagacctgctacaaccgtcatgcttcagaagaaaaagaggaagtgaaagtacattttgctgacattatgtggtggagatggcattcttcccaggtccatgagaaatgcatcactgtttgaaaggcgagttattattggtgtgtagtggagcattgttttagctcactacttgatttgaggccacagtatttctttgaaatgtgacgtcacagacattcttttccaaaacacttcagaaagcagggctgattgtgacacactgctctcagaaaacagaacagcatctttaaaacaaacttgtattttccaacttgacactttttttttttttcactcttattgcaccgggatgtttgcagagtgtcctaggcaggaggaactcgaggaaagttgtcagcttgttttaagagagagcctgggtctgtgaggtccttatgtaaggcagttccccactccccacaggacatcccgtgtcactctgctctgagcagcagaagtgagctcatctgcctgaggagcaagcccaagtagtcaaacaggtagcctcctgtttggaaagagaagtggcacagggagccccatgcaatcttccatcatttgatcatccagagagcaagtatccacccacaggaaaggcagattgttctaagatcacaggacaggtgggtctggctggggccagtcctcctctcagtgaattacattcgtgtgtgcaattggaagaggctaaaggagctctagagcctgagttgtgtgtaaacaggctgtggtccccaaaagcattcccctcttaacaaaaggcactgtccaacgctgggaggtgtctatcagaaacctcagaactggcctgtcccacctgaggatctgaaacctggagcaatgtgaagagaaggtgctcaactcctgtcagttgtatgaaggaaattgcagtaatatccaccacttatgcatcactaa

SEQ ID NO: 68266 - DNA, 2123 bp, Homo sapiens
cccacagctgaagtacatctcgggttagtttgttagcttatgacaggaggggctggccttttctttaagaatccatcctttcccattggttcattcttagcaagacaactgaatcacgtccctacagactgagtatagtactcagaaataaaagtgctccacatggtgacctgcgaaaatgattcaatggttgaattaaacaagtcacagacatcagttcgcttttgttaagtataatgtcaatcttaatattccagtcagataactcatgcttttcacctattcacttctttcggctcaggagctatgatggctaaaacatgcctggttatacaaagctggttgattcaggagtattgctagtcaagattagccttgctctgggagaggttattttttcctatattatatggcacttgaaaacaattaatcagataattataattatgatcatggatattattagactttttggaagcaaattaataaattgttgtggtgccattttcttagcgaattacttgtttggagacaatatacttatttttcatggaagcaaaaggctttcatgaaaagtaaaataacatgtgctgctttcagtgcaaacaaaagatctcagccagggaatccgtatatttcaactaagtgtaatctgtaaggatacattctgtcttcaaaggaaaccaaaagatgaaccaagttatatggggtaataggctatgtgcagccacacaccaattcctaataaacacacagagaagggaacagctgctgaatccttggcaagtttctctctttctaggtcagagagccttctgcttctacatgtggctgaatagcagtccctgtttggtctagcatcaggggacaggaaattttgggtgggacctaggtatagtagctcagcaaggaggtgcaagaagaaattggtttattttgattcaaaaagaaaaactgtggtttgtaatccaagttcagtccacggagctcagccaaatgactgtcagaaccacattgcatgtgcctccaggagccccaccctcataataactcatccatgagtcactggctgcccctactgtgaagaaatgccacagggcacaccacactgtgatgtcaaaacacacctctgttgttggttcattcctgtggaatttaggagactagccttttgaattttggtcagagacttgaaatttcagaaccaactaagtaagctggactcatcaaattttcttccaccacgaatataaaagagattttaaaatgactaaccacaaatcactgtgaaccactgaatacgggggctccctggagatctatttaccacatcatcttccaatggccctttcaagaaccatgcctgatcaggctaccatttgtttaaactcatcagtagcttcccgtgttaagatcaaagctgcaatccttaacacaatttgccagccctgcatcacctcctcagcctattcattcttacatttgttccttcattcattaaatatttactggacccctgttacatgtcagacactgttctaggaactggggtactactagcaatggacaaagtggatggaggtcctcctcctggaactgacattcagccatgcctgcccctccctatccatgagctaccccaaccgcacaccctccttaccattcctcaagcacttccttctgcctggaagactttttattcctggtaaactcctactgattattcagattttatttaaaacttcattttctttggggaggaccttctctttttctgaactaggtcagatcccatcctataaccactccacagcactcttaattacttataattttcctttttctaaatattgttcatccgtatttccttccagaccaagggttggcagcctttgatagatagtaaatattttcagctctgtaagctattcagtctctgttacaactactcaactctgccactgcaccggaaatgcagccataggcaatacatgaacaaatggatacagctgggtttcaataaaactttattacaaaattaggctgcgggccataatttgccaacttctggacaatagaacttcctatgatgatggaaatgctctataaatgtcctgtccagt

SEQ ID NO: 68267 - DNA, 815 bp, Homo sapiens
tgtggtaccggaaaaagcactgtatccacaaattctgtcccaagcctactgctcttccctctttatgatttgtaccttatcgcattcaccttcaaccatgacttaaactgtggcccgtagtaattgactcagtcagggtcttccttttctcctacattcctcagtgctctgggaatttatgcaggcaatcaccacccccaaattagcatgttctgtacagactcatgtcttctctccaaaaagcagccctccttccaagtccttctttcttcttatcaacaatactatactgctccttgcagatagttttctttttcctcttccttgacttcatatctaatcagtagaagttccaacatgtcttccttcatgagactctgagtcccttttgctagagtctggacaaatccagcaaggaagccaattttgtgtccctgtgatgcagaaggatgtgggaggtgggtcttaactgggccaggaagtcacctggaattgtggagatcgatgtagtctaaagttcaagtgcagaacagagccaaggaaaggagccaaaggtttgtactaaaatagcatagcaagatcagccatccatcagacctacatgactggggtaaggacatagttagagggaggagtaggaatggggtctgtcttgttcatctttgaatccccagtgctgaacatgttgcttgctcagggaaggcatgcaacaaatgccctatatacaagccaagagtataacctttcatttaccttttactcaagactgcctattaaccaatgctctttcattttcattagcttatgccatgaag

SEQ ID NO: 68268 - DNA, 2588 bp, Homo sapiens
gaaagagttgattatttatttaatttcattcaccaagggagaattcggaggctccatcccggaggcactggggtccgggacgcgggaaaggcttggaaatgtgcgacgcggctgtgtgcgaacgcgtggactaggtcttggctcgctgggagggaagggctgggccggcgctggggaggaggaagggagggaacgggtaggaggaggggaagcgcagtataaaagtcccggccggactgagcgtccgctactccgagtcacttcggtaaggcgggagcccgagcaaggtcaaggagggaagtgcgcggtgccacggaccgacacagttcgctctagcatctgacgctcggactccgcgccctcagccggatcccagagcccttccattcgccaaccgcccactgcaaggcatgagccgcacgcgggagcccgaggctgcagcgcggtcatgaggcggtggcccgggatcgacagctgcgcgacgccagcccccaaatcccctctgggcgcggcacccccgggatgagccccccacagaggcaagcccactagagctgagattcactccgagttcctgagcgcctgagccgcgggcactgcgtctctgcagcttccagccaacacctgcgcccgtgaccagacgaacgcctagagagtcggactcccctcccttcccaggctctacggggcgccgcggatccgcgaacagccgtgcccggctagcgggcggcccagcaagtgtcaagacccttcggaacgacactttggcactcctcctctcccccgactgcttcaggcaggggtcgcaggcagacgcatggcttgtccggcgccccctccgttttccatcactgcaactccagctccagtttgccaataaaggtttctaaagcagcccaggcaccaccccacccacccacagccccgagcctcagtgtgcacaagggctctacccgcgcccgtcacagcgacctcggcagcgggcacttggtacagcccggcaggctgacgctgccgccgagggcgccccggctaccgccaaaccgtgacaacctcggtgtgcccggggcccccatctggaaccggccctccccgggactccgagtgcggggcggcgcggcaggcggccccgaggagcgcggagagtagtggaggtggcttgccgggtgagtggctcggggcggcgagggcgggggcgccaagcgtggaggtaactcccggccgcagctgaagccctcctactcctcctcctcctcctcctcctcctcctcctcctcctcctccttctccttctcctcctcctcctccccgcgcttctctggcggccgctcccgctccagctgcggcgccgcggccacatctggggcgcccatgtgcgctcgggggctcggctgcgcccgccccgccgccgaccccgcagccccctgccagcagggtggcctccggcccggcccgggtcccgggctgtcccgggacccagtctccgtctccgccgccgccgccgccaggcagcgccggggcttgctccgcagccggcttggacacccccggcctcgcggtggctccgccgtggtgcggcggcggcggcggcggcggcgccggcagctcctgctcccccggccccgcacaccccgccgcgcccagcgccagccccgcgggcccgggaagcggagccctggcgggagccgaggcgggagccgcgctgccgggctcccgggctcctactcctcctcccccggcgtcaccgccgccgccgccggccgccgcgccgggtcctaaagccgcgcgtctcaaaaggatggtgcgcctggcggccgagctgctgctgctgctggggctgctgctgctcacgctgcacatcaccgtgctgcgcggctcgggagccgccgacgggcccgacgcggccgcgggcaacgccagccaagcccagctgcaggtgagtgcgccgccggagagggccgtgcgcggctgcggggacggtttgtggggcgggggtgctgagctagtgccgggtggatgcagggaggcaggtcccctgccccacctaagagcaactgttttggcagtagttttgcccgggccacttgacttaggcagaggcggagcgggggcacgtgcctggaggctgcacccggcttccaggtctgcgggctgcgctccttcagttctgtctgtcacgggtcaggtgcggggttggtggggaggtgggaaggagcgaggtttgggatgagcagaggaagtgtggagaatgtgcttgcttgggggtgctaccagtctttcgttgcccttcggaggctgagtaatgttactcgaggctggagggacgcaaggagactttataggatgatatccctgaagtctttgggagaaagaactccgggagtctacccctttaggaagcaatgccaaaggtcaggacataatttcccaaggagaatagccaggcatcccctcctcaccctcagggttcccttgcttccagtgttcctcttcctccgggagcctcgcctgaggttcccccctccccccttgtgcccccttggtcatggggaaggtgcagagtgaaggcaccggtagtgatttgggcc

SEQ ID NO: 68269 - DNA, 826 bp, Homo sapiens
ttattatgcccagtgtttctcttgggactaagcactcactgcccattgtggtccctgacttgataatgtacccttctggctctttctcttccctgccttcctccctcttcgcctaccagagatttctggggtcatctctcaaataaattacttgttctttgtctcagggcctgcttctaggaaaacccacactaagtgaaccacacccaaatggtagtcatggtaataatggatactcctctaggtagcaacaatacaggaagtctccagaagggtaacagagcagagtttccatgaggcccctgcttgttgttgtcattaacagcgaggaagtctgttagcctcagagagatgtgctgcaggcagcaaaagaaccaggctaccccatgccctcccggagcagtcaggaagagggaaattccaaaattacagagatgggctgcaaaggtcacgcctaggcaaagcctacaaattcctggtgtttagagatctaatgggtcctttttctcctgagatgctgatcccatggtcctttactatcttaggtgggaggatgagtaacaatggggaggcctcagaggcgtgtgggattgtcatctactccctgtgaggcatcaactccctgagcacagaccagcacgtgtccctggaaagttatttttgtaaaccgagtagaagtaaaaacagtaggttaactaccccttcttcctgttggcctgactcatgcacattttagtaaacccaatcatcttgcacagagcactctctatggctgacacacatccattagacagcaacacccacattccccatggaagagatagta

SEQ ID NO: 68270 - DNA, 1568 bp, Homo sapiens
tttcacaaatgtaatgttgagtgaaggaaaccaggcacagtaaagtacatgctggataattctgtttaggtaaagttcaaaaccaggaaaaaggaacctgtgctgttggaagagagttacctttgtcagggaagtgatgaaaagggagtccaaggagggcagctagggtgctggtaatgttttgcctcttgatctaggcattggttgcctaggtgtcttcagtttgtgaaatctcattgagttgtagagttatatatgtgtatatttctgtaggaatatcatacttcaattttaataaaagagtaaagaatgcagcaggcagggtacatggtgtagaagagatggctgattttcactgggaaagattacccacagccctggagttcactctctgggctccctgatgtgcgtactatcccacagattgttctccaaattagaatgaatgcaggctggtttcagtattatgggggtgctcctctgcctcaggtcccagtgccattgttacaacatcaaagaccaactgctggctgagatgcggtccatatgaaaagagtgaccagcaaatttactgcttgacttcattccccttaaaaggaactggctccatggtcctccttcaaagctcaattgtagacatatatcttctttataggacatcgtttacaataaagaggagcaataacttaaaatttaaaaaaaagaatacttttgagagcactgtgaggtggacattccatttaataaacatcactgtggttacattgcccaaacattcccagaagtccagccatgggcctgagagacttctactggacatggtgacttttggggactaatttgaattatatttttatgctctagccctctccctaggctctgaaagttcttgagaaggtcattaatgagaggcaatctacttcaaaccagagggccacctcactaaaatcaggcaaaatggcaaaattcatagcccattactcattaacttatttggagctgcccttcagtagggtaaacatttttttaagggttggggccaaattaaactcctggatcgattatacatagttccccaatacccacatggacatcactccacataattccagtgtgaaaatctcacagacttattagcatttccagatactagaactcaactagaaaacaacaaagttgtttttatgcctatcagaaaatgaagaatgttattaactttccaagaaggaaaaaagtaaaattatttataatatacaggatgtttttggcttcacatggagtctgacccaggtggtggagaaagtcacatctacgatcaaaatgaccagcctcctgaaaactgaccaatccagaataatcctttcaggttcactcatgatagcagttgatcagcccatagaggatacaacgttctaaagagtgggcaagtcatccacttctgtttaacccattactcctgaaaaggttcagctctccatactttgctggaaaaaggctaacaactcagtgcatccttccctctctgctcccctcactggtacattcaggaagacacgaaccaggtgaga

SEQ ID NO: 68271 - DNA, 1570 bp, Homo sapiens
gacccaggatgatggaggccctgatgtcttcttagcagtcccagctcagaagtgacacacatcacttctgctcacatagatcatcctttgatgcgggatgacttggaaatgtattccctgataagggttgcctccagcttggcacaaagacacgtatttttggtagaaagctagccctctctgcctcattactcaatatggcttatgcttttaagattctgcagtgttccacacttagggctgtcctcttagctgtttgtcttattcctgcttgacctctaggtctctcttattataaaagcagtaaaacgaccatctgaatgccattgactgccatgcatcccctcacttttcaaatataagctatgaataaaaaaaaattagcccttcactaatgccaaaacctagggaagaaattaagcatgcccaatattttaagctatatccatcaccgttaagcatctgtttgcactatgtctatccattaactaatcagcaaaacatggtttcagtaggaattgttacaacccatttgatatggaatgacaagacttagaggttcagagtatttctgcagttagaatagcaggcacagttttcctgaaatagatatttgaagggaagatggaattgtttctcaattttccacataatatgtttgcttagtggaatgaggatagacctcaatgctcatggtatttgcagaagggagtgtttgtctattaccacatctccagtgtaggcactggtgattcatctgcaggtcagaaagagagccctgttagccagtttaggaaggtcacatttatagacaaatccaaacaaggtactttgctatcctctcttttgttcacagacagacaagataaacctaggcagagagaaaacttgcctcaatcttggattaaatgcagaggtctgcttgaacattccaaggtcaaactaaaagtctacaagagcaggagacttgattcaaaacagctcgtctctgactggttttcatgtgggcagaggggactctctcgacactaagatgaccacagctcacatagaggtgtcagctgaaatatggaggattaccactactgtagaagatgtcctatgcaaaaaaaaaaaaaaccagcataagctaatgaaaatatatagtggtcacttattcggacattacatgtcctcaagtcctacaaattatttggtaaggcagctttgtgatttgttttcacacagcaagatgactagtgaaaagaatttaatgataagcaaacacattgcatataaaaacatattaaagatacttatttagcatgaaggcttattccagttcacaggcatggtattacctttactatatacttccataatttaaacacagataaggagataatgtggtttcttcaaaatccctggccaggttttgaccacattttctattgagaagacatgtcccccttttcattcccctagaagcaaactacctatgcacaagtcaaaagtgagtaaaatgtgtaaaagggaaaggtgtgtttcacctaagtgtcatattcagaaacatctgctttgcctggtgtat

SEQ ID NO: 68272 - DNA, 715 bp, Homo sapiens
taacaaattaccctatacttatgctaccccgtagctgctcaaaagaacacacgtttattatctcagaacttccatgggtccggaattcagacacagcttacctggatcccttggcccatggtctctcacaggctacagtaaaggtagccctcagttccttgccatgtgggcctctccgtggtgcagctctcaggatggcagcagaatttatcagagcaggtaagtgaataaagccagaaaaagagtatgagcaagacaaaatccacagtctttgtcacctaatctcagtgacattccatcatgtttgccataccctatttgtcagaagcaagtcgtttgctccatcccacactcaaagggaggggattgcacaaggctgtgtattccaggagatggggtcattgagggccatttcagaagctgcctgccatactcccctccacatgtacctgcccattcctgtgtgtcccaatagtgatagttcccctgcacactctagtgtagttacatgggtccttacttttccagatttccttaattccttcattttatttcatttctcatttctctcctttcatgtcaattcaaaataatacttagtttcatcttctaaactgttgctctcctctgctcacaaacttccaatcattcccctttccatgactcaaaacagatactgaggaactccatatctggaactgacccacctttcctg

SEQ ID NO: 68273 - DNA, 610 bp, Homo sapiens
gttttgaaagaggtgcaagagtaactcagatgttcagagattgtgattagcatttctttattacttcccatcttccaaatactttacaaacaccaagcctgtgtctggggggcagggcggttcggagagatggagaaatgccacagttgtgtgcataactgaagccaaaacatacttcagccccagttgtctgactattcccggcagaggtacttgtggcctgaactgcccagccagtgaccctaacgcgacacttccctttccatgtgtagacacaacccaacccaagtatcttgactaatcctgcggggagggtacagggctcttcttattatctaatctgctttacatgcaaagtcctcgagtcctagagagtttaaggggtttgcttggtctggggctaagccagaagcactctgtggtggtgaatttcctaccaggaaaaattcaagagtcacatcaatcaatcaatcagacttagtccctgttttttcagacatctaggcaaaatgttaaagagtagcaaaaacacattttctacttcttctaaaatgtaagtgttcatagtaggaagagtactccattcacaggggaaaggaaagagagcctc

SEQ ID NO: 68274 - DNA, 892 bp, Homo sapiens
tacatagcagaaagttcctgaacttggactcagaccaattgatccttcattaactgcctctctctccacagactaacaccctctgcatgatacggttttagatcaggtttcgttgacctgagttgttttgctcttaacaccagcatcatgggagcacgcaaatctcactgagaacacttggaataccaacccccgctgtatataaaatgctgcattaggttataggaaattgaaaaatgtaagacctgttccctccaataaattagatctgtgtgaagatcccagctaccacataaaacagtgctggagggatcatgaagacagaggaggaaaagcactgtgtcccaagggggtggatctcaataggtggaaagaagtcggacaggctctattgatggcacagagtgacaaatattttggaggtcactctttgacaacccatgcacagaaatcactacaagccccagttaaaatttctggtgagtcttgtattgttttaattgataaattggaaaaacaggcctttggctccaatggcccctctccagggactggccacgtggtgtgataaagagcaatggaaccctttggaataggtgcagattggcaaggaaggcactgacttcataccgttgctcaaccttgtttcctatcatggctcatccatgtgtttatagatgttctggttccagaatcaggcagttctcatcccaagggtgtttaggccatgcccaaaacaatctgaagcctgctgtggctagcgctttttcccagaggtgggaatgtcacttggggcataatgctgaggactgagctataatatcagtgtaattgatttaagaattactaacgcaaagtcataggaaaatgcctggatgcgggagaacggaag

SEQ ID NO: 68275 - DNA, 1154 bp, Homo sapiens
gaagataaaggtgaagaagaaaaaataaaatagatgatgatgaagaagattttttgagtacttaagtgtcaagcaaatggctaaagtccttacaggtattattttgtttaatgttcacaataactttatgaaataggtatttatgattgtactcattcgacagctatagtaactgaggcatagaggattaacttgcctagagtcacacagaaagcaagtgatcaacctggaatttgaatccggacagtctgattacagagttcatattcttaatcattaaactctttggtctttaccaagagaagggtattggaatcagccacacagggacacagatagcatttgaagtcaaggtttgggggctttcctgttgttttctcttccagagctcacatccagactcaaggtggtagatttaagtgccttgtcaggggaaggctcccctctgcctccatttacaaatgtttccttcttgttttctgtcaccgcggagagcagtgtggccaggagccctcttcataccttttcttctcgtgtgtcctcaccctccttgcatcctttctgcctctcagttcctggctattgcagcttttctgggctcccttgtaacatgaaggatttcgtttttaaggatctctttacttgtttgattcgttgattcccagctttcctggaaagactcatggggcaaagtctccctggcctggcagttattacactgtaaaagtttgtcctgtaggtcaaccctgcaaataagtttgaggtgcctcacataaaatcagagagagccccttaaaggaaatcaagtcagggaaaccagcagggaaggccaaggctcaccagcaaatgttaccacagtgcctcactccctcctcctcttattgctttagcttgcaccggattcctgattgtaaaggaagcttggttaggggtggtagtttgggtgagccagtaagtttgagtagagctgggttcagttcctcagagcaaattatgagaagcccaactttttctttctgaagcatcaccaacaatgctaagtgtcctagaatatgagataactcttcttggctatgcattgtagcatcctcagtgagctagacaaagaatgagctagacaaatattcaagggaaaactaccacctaacacttcc

SEQ ID NO: 68276 - DNA, 846 bp, Homo sapiens
ttccactcttcactatgtctacacagcaccattccagtcaacctccccacagcattcctcccatcccctcggccacacatttgaccctcttatagccaattggccatcctttgggccagtctttttcaaaatacttttggaacattttatggaagtagtacatacattcagaaaagcacacacgtatcataagttcacggctcaatgaattttcacaaagtgaatacacccatgtcaccaacatccataccaacaccaagaaaaaacagaatataaggctcatgaaggagctctctggggctacagaaatgttctatatattgtgtggtttgattgtcaaaactcactgaagtgtacactttttaaaaactgaatttctttgtatgtaaattttaccacaacacaaaataaataaggcaaaaccagcactcccatgcccccgtccagtaacgggcactcactcctcaccaagaataatcagtatcatgaattttacaccagattagttttgtctgattttgaccttcgggtaaatggaatcgtacagcacccgctctgtgaggtctggcatattttgctcaatattggattgtgaaattcttccatatcgctgcttgcagctaaaggtcattcatgcttatcacatttccaatgtgtgaatatatcacaattttatttaacagttctaccatggaggaacatttggattgtttctagattggggctttcacaaagagtgctactatggacagtccagggtgtgcttttgggtgtgcgtattcacacatttccatggggagtggaattagaaggtcatagggcatgcacagctttagttgatactgc

SEQ ID NO: 68277 - DNA, 1066 bp, Homo sapiens
tgcatcccacaattttgatatgttgtatttttatttatgtttgttccctctgttttctcaatcctctgattccactttcctgccttttagggaggttattaaacatattttagtgttctaagacattttacgtaagtctcagacagacattcccaacaaactatagacggtgtcctccagattcaagacatagctcaaattaatgagaaaattcaggagtttcctgctttaagaaaagttattacatcaaaaattttaagtgcatttccaatagaatagaggtgattctttacatcatcaaaatatttattaaacaattctatactgaagcaccacccagttccccatttctgataaagaaaagtctcagctttgccttggagaaggagaatcacctctgttccatacataattcctgtgatttgtgctatataaacttgtacttcatttttgctgaagctagttagaggtgttactgtgtgtgttttgggggtttttttgtggctttttttttttttttctgtcacttgcactgaaagagtcctggtgactaatacaaattcctctaacaggaaattccacagtgcttttttaagtatttttttaactttactcccttctttattttccgtgacactggtcagcaaatttcacaaagacaaggactgtgaccatcttgctcaccatgcaatattctgtgaccaatacctatttttgaataaatgacaggtctctggttttcagttgggatttgtttgggtcaggatgcaaatggattaattgacccatttaatataatgatgctggagcacgttttaatgttcggtctcattgaagaaatgaccgtaagtggtctgatcctcaagtaatttccagtatgacttctttccttgggccatggcatgcatttactgtgtccctgtagaccacaaaaagattttcctcccatggacaatttctgacaatgttctttgtggttttggaaatagagattacttacttcaaaattgtgttaacatgaattttgtctattaagatccatacatgtgtgttgggccaactatgt

SEQ ID NO: 68278 - DNA, 5272 bp, Homo sapiens
aagatgagagcaaggcccactgtggaaaaagacatttgttgaaagtctaccacagcacagctgagcccattaagtctcctctctcattgtgtgcatccacacaactctttaccagcttcctggaagaaagttgaaggtttattctttggagtaaatgtatttggggagcatgaccagagaagagcatagataaagcaaaggtgaagtaaaagtctactatggacaccccccattcccttccctatgctccttccagaactctcccctcacctatgcacacacacacacacacacacacacacacacacacacaaacacacaccctggcaggagatttagatttctctccaaatagtacaaagaaaaggcctatagataatgacatttacttcctgataaccctatgatgaagtttggagaaaagccccatccgtgattttagagtacccaatcatagtgtcttactcttgaatataaacataccaccagcgatctgcagagtctccagcatgaatgaatgaaatcaaaaagaaaaaaagagtaaatgtaggaattaataaaaaatgttaaaaatagtattcatgttctcagataagaaaagatattgtatcatgctgttgtgagtaatgaacacagaggaaaaaaaaagagctcttgaaaataaaaaaatataattactgaaatacttttaaatgtaatagaaagttgacaaggttgaaaaaatgtccagagagaagaggcaaacagcaaaagcaaaaagaaactaaggaaaacaaattagaggatcaatccaaccacctccaagagaagttggaggcagacagaacagggagacaaacagagagaggagagaaaattgtcaaagaactcatgcaagaaaattttcccggaactaaaagaataaatttccaaactgaaagagttctctgagagtctaagacaataaaagatgaaaaatttacaccaaggtgcatcactgagaaatctcagaacacagttaaaaagaagatcttaaacgcttccaggaaggaaaaaaacacattacatagaaaagaatacaaatccaaaaggcttctcaataacagtaagtttccagggggcccaaaggagaatgagtttcaaccagggctgcttcctgggtgtgctaccactgacatcacatagggccccgcattcagaagggggcctcacacttggctttaatggtgtggctgccattttgaaattcttaatacttttatctttgaatttgttttgtaagtaaagaccaatagcacagtagtgcatgccctgagcagtcttggctcatgccccgtcctgccccctgcctcctcttatctcccagggatgggttcttggctacctcctcccctaacgccacccagagatcactgctgccctgtgcccgcagtggaagaattgaggttgggccagcacatcctacacacttagctgcaagtcaggactctgatgcctatgaaggtctacactcacccctcaagtatgccagagcctgaggcagtataacattaactaggaaattagacacatcatgaaagtttgagagagaccatcctagaaaggaaaaagcttttttcctgttctttgtaaaaaagacttttaagtatttattttgcattgggctctacaaattatgtacccagccctgatgtcaatgttttctgcctaaaaagtgagattttttttttgtatctcaaaaatctcaactatgagtatcactaaagataaaaagagcaggtactcctaacattggttgatgtataactacaccagaatggttccagtgtgaaccctgggcctcccagttgggggattcccagtttcaatgagtctcttctgagccacactctgtctactggatttgaatgctggcatcaggcatccagccagcaatgatttctgatgaaataaaacagtttcagataggactagatgtttccaagggaatccatgagaagatttccaggttcgatgtttttgatgtatgaatagaggcaccagaattcagagggattctggggttttgtaacctcaagttaaagcaaaaccatctcaagtggggtttgagaccctgaaaatggcttccaggaacgaggaggatttccttctctggggaattttaagaggaatattctggctcacctggaaggacacagttttgaccagaggcaacaaggtggggagacccagacagactctctaagcccctcccatcttgtgagtctctgattttcagttttttagacgccgaggtcattgccagctatgagaagagccaagtctagaccttgccctttgaagtaagcactgctacttgcttcacacagctcctcattcccaaagcattttattcttccctgacaccttccccctcactgccacccccaaatctcagacctcactggatatggtgacctgacaactgccctttacatggggatttgtatggtaaattgccactaagaggcccctgatccacaccttcctcaccaatttatgctgtcgtggctttcagacagaaactggggaattcacatgtggcaggcttggcggttcatcagacaggttctattaacttggtcaccaggtggtaaccatattatttcatgcttcttggtaacttttgtgcaacacaattacctttgacagttcttgagtgggacagcaattttcagcaaatgttttcggtaaccagaggccagaaggaaaggaaatgtgagtgcttcagttaagctttgagtgtggctctgacagctcttcagcacctctgtcgtgttataaataggaatttggtggaaatttagtacacatggaacttacaaaagggggttgagcaaggctgatgatggcttctactgcatttaagaaagcatttgtccttacgttaccagaaaagggtcctgatcgagaccccaagagagggttcttggatcttgtgcaaagaagaattcgaggcaagtacataaagtgagagcaagtttattaagaaagtaaaggaataaaagaatggctactctgtaggcagagcagcccttagggttgctggttggctatttttagagttatttcttgattatacatgaaacaagggtggattatttgtgagttttctgagaaagagacaggcaattcctggaactgagggtttctcccctttttagaccacatagggtaattttctgacctgccatggcatttgtaaactgtcatggtgctggtgggagtgtaattagcatataatgagcagtgaggaagaccagatgtcactttcatcgccatcttggttttggtgagttttggccagcttcttcaccacatcattttctcagcaaagtctttatgacctgtaccttttgccaacctcctagcccatcctgtgacttagaatgcctgacctcctgggaatgcagcccagtaggtctcagtcttattttaccagcccctgttcaagatggacttgctctggttcaaacgcctctgacatacagtataataagtcctaccatgatgaaattcttctgagctccaaaatacagtaggttgcaaggattttctttcagtagggtttcatgctaaagatgttttgacatccttcacaccaattcctcattgcaaagaatgtgacattcacgtcttggacttgcttgaatttacagtgccttcagcattccttgaagatatccaagaaagatgcagtccaccctccaagtattgatttctaatctcaggaaaaaggtaagcagtcatcacagatgggctgttccaaatctggtcttacagagtaagcaattgaattgcttctccacactcctcaccatcaccaccatcaccaatacacctacacacaaacacacatgcacacacaaatacacacacccatgcatgcacacatatacatgcaatagccactttctaagcacaaaacaaaatacctgcagtctctaatcatacatcataggaaaggaaaagagcgatttgcccaccaaatcatcaggtattaaagggattgatcacacacaattggtaaatctgctgagtttaggactggcagagttgaacacgaggtcacatggccacaaatacatcctggagcatatgctgtgacttgaatcccattggcctggtacacagcaaaacttccctttgacacacccaagagaagagtctggactttgctcccatttcatgaacaatgtttcacaggcaagctttcttttgatctccagtgactagacacatgatatcatcagctctaaatcaagccacatttttaccctctgcctgaaatggtgaggacaacgccagctaatctgtaacatgttgcagatagcaacatctcctgggaccatcatttttcaccttctttatttgtttagcagccactttgtcaattaaagctggtgatattttccccagactcagagaacagaattttgattataaacttttccttcatatctcatccttaccaaagtttgacatttagccattactgattttgaacgaattttctacatgtctgggggctttgttcttgccttacatgtgatttttttttgtagacaccaataatacaaaaagtgatctgcataggatatgatacagaataactcaagtagacatggcctttcttcccccaaatgaaacaagtgacagtatgtcaacctttcataagtgttgaacattcatcttctgcttggtttagatgatgagaggagggacacaaaagccagggattatgtatgtaaccaagtagtcccagctcacgctcaatatgaaaacagttaggttgaagtcttttgcttgattcctttaaaaatattaatagcagtctggagtccttttttctcttattatagaaacacaaagtatgtctgttacacaagcatgtcaggaagcacaagcaagcacaaaggagaacaagaacaaacaacccataaatactccaattttttcacctggctgtctctactacagagtctgaaaaaggccaatactatccagcctccttgcagcttaggtgggcatatgacacatttctagctaatgagacctcaacagggaaaaacaggaacaaacacaaaaaaacatctggggagattccagattctcccatcttccttccttgatataagcttcagctgctgtcttgagaccatgagacagttagccagcctagcatgaggaagacagccaatatattaaggatgacagagtgggcctgcaggcatcattgcaacaccgaaccaat

SEQ ID NO: 68279 - DNA, 1128 bp, Homo sapiens
ggtctcgaactcctgacctcaggtgatccacccgccttggcctcccaaagtgctgagattacaggtgtgagccaccgcacccagcccttaatttctaaataccattctctacgaaaaagaaccaggattctttggagaaatgtccattccagagctgggacagagaaaatataaaatgaatctggaacatcttgttgtaccagaaaagtaaggaaatgctcaaagagtaaaggggacttatccaaaagacccaggggtcaacttgaagggctcttactggcaaaaatctgtgcctatgaaaataaataatgagagtaatgagttataaccactgaacaaagtcagaaccagtgagcccatactgatccaaacaaataaatggggaagaagacaaagctcttccttcagcagaatgccaactaataagtatagaaaaaataacagagttagaaaataatggttgctaaaactagtaggtggaaatttgaagaaggatgggctatttacatagcttcaaagtatctctccaaaaaattcttataacaggaaaaactgtttgttcactgtggaaacacttgatggactccaacttaactccatgaacaaagctaacaccaccaattaaggcacaaatcagtaccatgtgccttttgataagataccttgagacacaacacttctgtggtatttggtattcctgacaaaaatgcataaccagaattgaatgaggaaacatcaaacagacttgaaatagcaacactctactaaataactggtttgaactcttcaaaaatgccaaagtcagaaaacacaaagttgagaaacttcctgtttaaagaatacatgacaactgaacacaatgtgtcattctggattgtaccctggacttggtggtggggagagatgttataaaggacattatggaaacaattgataaagttggaaaagggactctgggttagacagtagtgttgtatcaatactaaaagccatgactttgataactgtactgtgattatttagtagaatggccttgttcttaagaaatactcaccaaagtattaggaataaaggagcctgatgtctccaattcactctcaaatagttcagggaaaaaaatgcacttat

SEQ ID NO: 68280 - DNA, 2315 bp, Homo sapiens
gtatcatatggttgattcattaacaatgaattcaccactaatagcactataatttctgcctaaatgaagcttatccaaaatgcacatttttccccatgagacactaccatcttctcgcactctgaaacaccagacagcacttcagtactatgcttggcgcaattttaaatggcaaaatcaccattaaaaagtgcaaaaatgtggaaaacatggcacaaaataggccacaaaatggatacatttgtagtaccagagctgagacaggaaggcagaacatcatcttgtttacctcagctgggaatgtgcacatgaggtgactcaaaatgtttaccagttcatgcatgtccacaagtgactatgagagtgctgaaatgctgattcatggattacaaataaatgttagcaagtaggcaaattaacaaatacagaatccaggaataatgaggattgactgtatttatcaaaattacacactctttgacctagcaattctatttctagatatttattccacagatatgcctttatatatataaaataacatatttataagaatcttcatcaaagtagctttaatcagcaagaaactggaaaccaattaattgcctattggacatatgtataactatgatactgtatacaatgaaatactatgtaacaattaaaaacaaatgaggaagctctacatggatatggaaccaactacactgtttttcaaactttttgatcacaagccacagtaaaatccaaaaccaaatcaaaacaaacaacaacaaaaaaaaccccacacattgtcatttactacacacatctatttataactaaaatttcacaaagtaataattgctcttctacttaacaatgtattgatctcttctactgggttctttatagtctacttattgctttttaacaattctgcttgtgatttactaaattgatttagaacttattaatgtgacatgctgcagtttaaaaaaaaacactagtctacaagatagcttggctaaaaaaagaaaggtaaggtggagaataatgtatagatatggttctgccatttttgtgaaataaaataaaagacgatcatgtatgaacatgcttgtaagtacatagagtctctctggaagactatcttagcaactggcagcaacggttcctcctgtagagggaactagttgagtaaggaacttgagtgaagggcaacctatttttcaccaccttctgaaacttctgaatttgatcctgttttcatatatttcctattttttaatgcctctaaaaatcttgattaccctgttaacctacaatatatatgaagaatttcttccctgtttagatgaagacattctgattttagcatatattttaattgtccctcattagaatgtattatcatgatgtgaaactagtctaaaacgtccaatttgtttcttgtctcatgattatctaaaacataagcaaatcttaggatggggcatgaagaagcctctacttccatttacaccaaacacatatacttaaggcaaaatctgctatgttcaaagggcaatcaaaacaaacagaacaaaacaaacacgcactgtacctgacaacttcctcaagctgcttttccatcagaaattttaaaaggtcaaaatcattataagttttttttaaaataaatagagacatttgtgagtaagttttatctcacaaaaaagctttcaaaatgtgttattagttaagtcctaatgtataattaaaactcagcaaagagtagtacaaagtttgctcaaatacggttacatagaaaaatttaaaatctcagtaaaagagtagcatttaccatcagtgatatctggaagtctataatgtgtctcctgattttgagtacttaattgaaattcttccatgtactgaaaattgaagtttatggtaagagtattaaaagataattctaataacacagcaaacctgggaaatgctacttcatagcactggaatttttccaggtgtaatgattacatgaggaagaccatgaactccagcaacacgcagggtaaatgagtggcctgaagtgacacatctgagcctgtgaaagcgctggctataacagtctcggtgtggtcaagctcaagcttatttccatctagagaagcttctagcctttcagtaatgaccattttcctttggtagtgactagtagctgtttataacctcaactactgattgaaaaatgcttatgttctttagaaggccaaagcccagggctttgtgggacttctagaaatgcccagaccacgaaaagattctcatcagaaaacattaacaacaca

SEQ ID NO: 68281 - DNA, 876 bp, Homo sapiens
atatagtaatattttaaatttttatatatacaaattcatatatatacatattccatacatactataaatatgtacatctcactagaatctacaggcaactagactatctgttcaccactgaccacccagaacagtgtctgacacatagtaggtgatcaacaaatatttcttaagtaaataaatgagaagctattgagctattggaatctgagaagggcatactcactttattagggaaaggcctcaggatggagaaaagaaggaaaatccgcccttggataatgggttgaacttggttcaacatcatggtgctgagcaaacactagataatcagtcacagctcttgactatttggacaatgtgaacattgataaaggtcacaaagaagagtgctcagaatatggcagacacttagtatccactacatgatctggacctagagaaaggctgaaggctgcgtgaccaggacatgtggaaagatgatgtccctaacaggcagtgctgggaaaagagccaactgggtttagacatggaatagttttgtcaaatcaaggaactaatgattaacgaaaggagccaagaagagaagggacaggaacaaagtctggaagtccaagggacaataatgtagagaccactagatctatggaggaggagaaacaacatgaaaagaaaatcaaatggactaaaatggaaacatcagagaggaatggcaaggaactgatggtgcagacaggggaactcactgaaatcggaacagcaggggaagaaacagacctgagggatcttgtggcaaaagagaagaatggatgagggaattgctataaaagacagcaactggtggccaagacgttcaagagagtggtattgtcttca

SEQ ID NO: 68282 - DNA, 898 bp, Homo sapiens
atggctaataagatagcaagggtaactgaaaattattaactcctttccttcatttgtattggtaaaaatatctctgccagaattaatacagggggtcttcaaaaaattcatagaaactgtgcattatgaaactatgcatggatttcaaaaaatgtttgcatgaaaataaactcacactaacttgttataacatgtctgaaagagatctagtttgaagcactaagaaatataagacatcagtttgaaaagagcccctctcatagtgacatcaattctactaaagttgaagaaagaacaaacatcaaacttatggtgaaggttgggtgggagaatggtggaatcactgatgctttatgaaaagttcatggggacaatgccccaaataaatcagcagtttacaaatgcattactcattctaagaagagacgagacaatgttgaagatgaagcctgcagcagcagaccatccacatcaatttgcaaggaaaaaaatgtgtcttgttcatgccctgattacagaggactgacaattaacagcagaaaccataaccaacaccctggtctgctgctgtgcatttcatcttcaacactgtctcatcccttcttaaaatgagttatccatttgtaaaccgctgatttacatggggcattgccccataaacttttcacaaggcaatagatatctcaattgcttcagcttacacaatactgactaaaaaatttaagttgaacaaactctccactcgccaggtgccaaaagtgttgcaaccagatcagctgcagacaagagcagagctttcaatgggaattttaaacaagcgggatcaagatcctcaagcacttcttcaaagaactataacagcagatgaaacatggctttactaataggatccagaaga

SEQ ID NO: 68283 - DNA, 1222 bp, Homo sapiens
gcccaacaaaatcatattgtcaaattaagttttagttccaaaaggtaaaagtaacaaactgaaaagcttttgcaataagaatagagaaacatcaaaatttaccaattcttggctaacatgtaagatatatcttcattgcatttctagattattttcaatcttttttgtcttcatctaatgtagtagtagcagcagtggtgggatgagccccattattacaaaatgaaaattaaaagacctttatgtgtccagttattaatgtagtgttctaatggttgaggacaataatataattgctccacaggacctcaaaataagattaggattttaaaatataactcataatctcacagatctttcttatctgtgcagactttttgtcttctaaaccactcccacctcaattctaatacaaagagccccagaggggaaaaagtgaagttgcattcacagcagagacacaacccacattcctaggcagcctcctacaaaagcacaggctcgacagcaacaaaagctcacattcagtacccctggcacaccacacgtctccaaggattactgatgattttgaagtatttatgtcatcttataaatgctgccattcactctcactgtggctagtgggcatctgaaaaatctttcaacacatcccctcttagaagtccacagggatagataactaataagaaagggcctttccaaatttaaaaggaaacatttggtacttcagtttccagtattgcaacatctctttttcaacaaaggaatttattacacagtacgtcaccttttccctgtcaaaggatttactgccaattttggagttgggttacttctggttttcaagcctgtcttgtgaaattaaagagagagctaccttaaaagtgataggacacacatgatttcagtcttcacagtgtccctatggttatcaaacctggaacctattatatacaaggggaaaacataaggagcttcataaagagatggaataagtggtgaagatgtctaatccagtcacatcttaaggttatagctcaccgacacatatttagcgtttcccaaatattcagagttctctgtaatccacaacttgtctcatactttggttatttattgtaatgtatcaaaaacaactcaggcttttcaattttttctgtgataaataataaccaaaagaaaaaccaattttataattatctcctagagatatcatctc

SEQ ID NO: 68284 - DNA, 868 bp, Homo sapiens
tgtttccttagtggtataaaaataatggtgcatctgataaaggatgatgacttagattcaatgaaatacagtaagtattgagcccctactctgggacaagaaatgcactaaaagctttgtgtatgtcaacttacttaccccttacagtaatggtagatattattctggttttacaaataaccccttgcccaggctccacagctagtgggtctggaagagtctggacaggaactcatgtgcctgctctagtctatccctagctaggcaaattcctatgacgccagaacattagtcagagtttgaaaggtcagctcctgttaatccaccccctctccccaagcccttactcatttctcctcacccagtgatgagaacaagatgctagagtttatccctcaggctaatgaccaaatcacccatctggccttgggagagccctatcctaaccataactaactatcttttctccgcctttcaattatcaccttctaagatatataatcctaaaatgcaggccaggtctctggattttctgcagcagcctaaggcacaagtcttctttattttggccaaacagttgcaaaattcagtgctccacctttcttctgacttgatcacccaactctgccatgtgtttccattgtcaacttcatagcaacagccccatgagaaacaagaatgaggcaatcacacaaagtccaacggacaagagggactggagatttactctatcatccccaggttctgtgggctgatgatggttagtcttttagcttgcgaagagtataacatgacaagttgggtatctaagttaaaaagctacactggatgtcatgaactggaaagctagaggtatctttagacatat

SEQ ID NO: 68285 - DNA, 1302 bp, Homo sapiens
aagcactgctttttgtaagtggtggggaaaagttttatttacaacaaaaaagataaattattaaactcctaagaatataagtaaaaattccttcgctaataaagaataataataattcagcaatctaatggcccctaacacacctttccttcccctcccctacagaagccaggaaagttgaactctctccttccggaaacacgataccctcgatttccaggacatctctagctcctgctttccccccctcctctccagctgctccatcttctcggtcctttcctcctcctcttcttcctcctcctcctccccctgagtagtaagtgctaacgacccgcaggactctcatcaggcctctattactaagtaaggggctgccttacccccaacccgccacccaggacaaggcgcacattctcggctgtctgcgaacctcggactctgagacatctccagcctgagactgcaaagtgggtgaagaactgcgagaactccccacatacagacagtacttccccggtggccacgaggacgccaagccggagatgaggctgggaagggggacgacggggccgcctagagcgaccaagactagggaactagggacatcctggccccctcctctagccccgcccggggcaaggggtgtcctgcgcgccgccccctctcggacccggagaggacgtcccagctagcgtacggggcccacacacagaggcagcagcgcggaggcggcagcggcgcggacagcgtgggaaagagggacactcacccgcttcagccccgagccttcactgcaccggaagtagtcacccgcccgttgccagggtgaggaagcggggctgacatcaagtctccccattggtcattcggggtaccacgtggtcggaagcagcctcccacaagcggctctgactccgccctccgcttcggagcggctcacctggcctcagaggtgcagcgctaactccacctggggcttcgttctgagctgcgcatgcgctattgcttatctctacccaccccgcccctgaataagcccgcaggatgtgattatatctgagtggttgattgactaatactgtgatgagaaatgaaattaaactgaccatcattttatctaggtgtcgcttaagagttactttctttcaatccttagagcactgttagacggtagggaaaactaaggttcagcctgcattgcttgtaggagttggggcacgagccttgcccagggggaaggagtgtaggcggtcttttatcggctaggatgtaagaccgaaacccagtcatgggttttga

SEQ ID NO: 68286 - DNA, 883 bp, Homo sapiens
aaagtaaaaagtgacatttgagaaaatacttgaagaaattgagagaatcatttcagacagaggagcaaccagttcaatggctgtgagtgaagggcaagcctggagggttggagaagtagcaaggtcagtagctagagcaggagcaagggggagagagttaggcaacgaagtagaaaagcaattgaggggaagactctgactttgaatccagatgaaaaatagggagtagccaggcacggtggctcacacctgtaatcctagcactttgggaggctgaggcaggtggatcatctgaggtcaggagtttgagaccagcctgggcaacatggggaaaccccatctctactaaaaatacacaacattagctgggcatggtggcgggcatctgtaatcccaactactcagggagctgtggctgaagacttgcttgaagccgggaggcggaggttgcagtgagctgaaatcccgccactgcactccaacctggtgacaaagcaagactctgcctcaaaaaaaaaaaaaaaaaaaaaaatgaaaagaaaaatagggagccattatatgtgacatgacctcattacgttttaaatcgattgtctggccaggagtggtgactcatgcctgtaatcccagcactttgggagtccaaggcaggtggatcacctgaggtcaagagtttcagacaagcctggccaacatggtgaaactctgtctctattaaagatacaaaaaaaaaaaaaaaatagccagacatggtggtgcacacctgtaatcccagctactcaggaggctgaggcaggagaattgcttgaacctgggggggtggaggttgcagtgagccaagatttgtgccactgcactctagtctgggtagcagagcaagact

SEQ ID NO: 68287 - DNA, 1075 bp, Homo sapiens
tgcagtggcgcaatctcagctcactgcaacctccgcctcctgggttcaagcgattctcctgcttcagcctcctgaatagctgggactacaggtgtgcgccaccacgcccacctaatttttgtatttttagtagagacagggtttcaccatgttggccaggatggtctcgatctcttaatcttgtgatctgcctacctcggcctcccaaagtgctgggattacaggcgtgagccaccatgcccagcctcactcttgtttcatctacgctcctgggtttcctagttcctaatgtcctgatggcacctccacccactttccccagaactaacttgataacctgttctgttcagggttttccagaatctgccatgacagccattttgttggactcatcaccaggaaacacactccaattacctgctgaatcctactagcccaggttctatcttttggaccatgacatttgaaccttgagatggggcaagaaccagatcctctatctgagctggatgaacagaaagaatttatgttggtagcatactgaaatagccactgggtcccctggaatgaggtcatcacaatccaagacagaagatatggtgcagcacctgtgtgcacaggcattgcttgaaattctgtgactgaactttgaactgctgagtcattgctgaaataccagagagggcactgtatagttagcgaggtgcatggatgaaacttaggtggaaaagaagatatgtagtttttttttcaaaattgactgctttttgcacagatgcattcaagttttcaattttgtcataggttctctacttgtaaatagatatatgctcacattattttattattatttattttcttactaatgtttaattattttaaattaatttataatttgtccacagacaattcactttctctgttgagttttttatttttttttacagacagggtctcactctgttgtccaggctggaatgcagtggcacgatcatagctcactgcaacctcaaactgctggcctcaagagatcctcctgcctcagactcctaagtagcaaggtagcaaagtatgc

SEQ ID NO: 68288 - DNA, 571 bp, Homo sapiens
aactgtcacaattaactggaaacaatacatttaatttgagaaatcaagagttacagcaatcacgtggggctgtggggctctgcttatctcatctccttcaattattttgcaaatctgaacctcttgtggtttcaacatgcaatcttatatccctgcatgtctgacttacactttcagtaatcactccgaataatgagcctggacttagaacaagggcagggactgctgcaggccctggcacaccatgcagaccattgacctgccttcttgccacacaatagctgtggagttcggtgtttttttcaagttgcctcatctttcccaagtccctctagtcacactgcctccctgagttggcagagacacggtgtggctttggtgaggttaatcaagaacaaaaaagaacatctctgtcttctttttcatttggttttgctaaccaccaatgctttttttgcttctcagaaaaaaaggaaagaaaagaaaaaaaagctgtggctatcaggttggtctgcttaatccttctgccttgccttctctttcttctggaaaaagacctgatttcccttcc

SEQ ID NO: 68289 - DNA, 2125 bp, Homo sapiens
acatatacatatgtgtgtataaattaatattgttcccttgtgaaaagtctccaatggtttagcatctctggatgggaattttgcaaagagccaaaagtcgttgattattaagcaacccccccccaaaatgattaaaagggcaatatttcttatttaaaaatcaagtccttttaattacactaactaggaaaaaaaaggaagctatcgctggtgcatttacacatttttcgatgtattacagcacttaactctctgagcaatcttacgaggtaggtaccacctcaaccaggagaagtactgcatgtattgtaaatgtttagaaggaaagcactcattatatgtcagataatccgagagaggggaaggcgaccggacctcactcccgacacgcgcccgcatccccgtagcccaccctccccttctgcccgctctctaattcggagaacacagggctggcccctgaactagggtctcctttccacctcctgtaccgcaggggggcagctaacagactgattcgagaagcgaccctgaaaaggatcgatgaagactgaagaatgagaccgaaaaaggctcaggaggaaggggcaaaacccctcgcagatccgaaagagatcctgttagagactagttttttccccgcgccacacacacacacgccctcaagcccttcatctcgagctcttcaactccagtccatccccactcaccgtccgcagtcctaccaagcctcacgtggggctcacacccacaatcctccgcgtgacgctccgccgtaatggcaagcgaactaggccaaactacttgcacgttccctcgagaagatctttggagtagacacaaaagccgcgctggcgcatgcgcacaaaaagcgccggcaattggggtcgcagctggagatgctgcggccggcagggctctggcgcttatgtcggcgaccttgggcggcgagggtcccagcggagaatcttggccgtagggaagtcacctctggtgtctctccccgcggtagcacctcgcccagaaccctgaatattttcgaccgggatttgaaaaggaaacagaagaactgggcagcccggcagcccgagccgaccaaatttgactacctgaaggaggaggtgagcccgcggggcggcggggcggcggggcgggcgacgcggaggcttgttttcctctccgctagttccggctaggccccgagctcaccccacctagccgtctgaccttgaccagcagccctgcctctttcggcctctactgtaatcacgcaaggcctggcctcggatatttgtaacatgctttcattcattcatgcattcatttcggcaacgtccttgaggctgaaaggaccttatagaggcctccagtgaagctccggagagggagagagtgggagagaaggttaggaggacccaaatcatcagggccttgcaggatagggacttggggttttcttctgtatctgcactgtccagccagtatggtaactgccggccacacatgtggctgttgaacacttgaaaggtgactagtccaattgagatgtgttgtaaaatacacacgagtatagtgacttagtatgaaaaaaggatgtaaaatagctcattaagagcttttatattgattacatgttgcagtgattatttttgatatattgggtcacatgaaatatattaaatataaatttaaatttttcaattaaaatttctctcgtttttactttttttcttatgtggctactagaaaatttgaaattacatatgtggctctcatgatttttggtcagcactgctctaggggaatgtgaagctcttgttttaatcagtggagtgatctgacttatgttttaggaagatcaaattaagatttctgatttgtcttggctcgtttgagaaacctttctccctgcccaggtgagccagagactgagggtttctactttcaggacacgcattctcaagttcaggcctcagtaaatttttattcaggagtggaacaaagttggagtcaagtataatgcaacaaacagttattgaactcatagcttgagcagagctctgtgcaagtacaggtctgatcagatgattgacagggtgtctttctcaggaagtcttaggctggt

SEQ ID NO: 68290 - DNA, 958 bp, Homo sapiens
agcatggcatggaggataatagttccagctcaggattcagactgaccgaattcaagtgttgactgccccttgttagttgaggcacttggtttgacttacttagcttcagacacttagcacagtactttgaacctggtacgttttcagtaaaagtttaactgttacttaagttcttattttttagtttaacattaatacttaatggtatttcacatgatgatttctaagtattccactgcttcaagaagtctgagaaatagggataattattgataagtatgtcagttattttcaagttaatttacattagcttctttgcattctttatctggatgtattattgagttaaaatatcctcattaaatctgttcttcgagtccacatcatggagccacctggtggaaagctggctcatcacaaggtcctgtgaatagctagcagacagacttgccttgtactgtaggctctggtatatacagcttgtaaggtgaggctgaaaaggcagatgatgtaaccttctggaagttgtgtttactggaatgattttacctaagaaaaaataattcttaatttatagactgtgttatggacagagcataacctctgtgtctttttttttagaaatttcccccttgctttggatcttggttgtggaagaggttacattgcacaatatttgaataaggtatatttattcaatgacctaatttactttgaaaagtaacattggctaattttaaagaaagactttcctaatcagtttagcttgcaacatatttagattttaattatatcagaattgttaatttgtttttttttttaagtggtagaatcaatggtggttttctcccttctttagaatttttttcttaaagggtttttctctgaatccattatatattatgtttctaccgataatttatttgaatctatagaagatatatttctctttgttcac

SEQ ID NO: 68291 - DNA, 1104 bp, Homo sapiens
ccagggaataggcagttgaagatgactttggacttctgagaagatggccaagctgaagttagggattggaaagtggtcattgtgaaatcatggaagttgataagctgtctgagggagagcggggagctgcagaattctgagaactaagtcttaggtatttggtttagtagagtttgatgacaggaggaggaagcaacactaaaggtgaagaagggaaggaaccaaagcttttacaaattatttacttaatactgcttttaattgcttcatgacatattaaatataaatttaagacagtacttttattagaagagcctactgtgatttggattctggtttacttcagaatctaccttttcctgtaatggtcctcattgctgagaatagtcaatcaaactagttacagcttgtagtctgagagtgagcaaaatctgtgattctggaattctctctggccattattttccttaagttactaattagaaattggttttgttttaaagctggaaaataaattgattacttctctttaacgaaaggtaatatgttactaggttaatgctgtgaatcataatgatttctctgtagctttttctgcataataaggcaccccaacttgatggcttaaaacaacaactatgtagcccatgattttgtgggttggcagttggggctggatttggttaggaaatctgggtctggcttggctcatctgtgtgtctgtgatcagctgccagatcgtctgggagctagctggtttggagggcctcggtgcacacagctggctgatctctgccctacatctctcctcctcctctaggctagctcaggcttgttcacacatcgtggctgggctgggctccaagagagcaggtggaagcatgcaacacatttgagacctagacgtggaactggcacactgtcacttccactgcattcttttggccaaagcgagtcacaaggccagccaagattcaaggggaggggaaatagactccctatcttgatgaaagttgttagaaaacgacgtttcagaggccatagatgcagggaggtttgtgatttttgcagcctaccccaattaaatttttttttctctttcag

SEQ ID NO: 68292 - DNA, 1323 bp, Homo sapiens
ctagctcgcctgtcacttggcgcacctggctctacaggccacgccctcaagtcttccaagaggccagcggtaagcgcggtccacctccctctcccactaggcgtcggcttcacgccgcgcccacgtctcgaggacagctccagccccctcgctccctggctccgccccctcgctccctggctccgccccctccagctccctagcgtcgtcggcgtcgagcccgagcctgcgcctgcgcgtgcgccctggggcccaagttggggcgcgccgtggctagaacacggagagcggcgggcagtgcagccaatgggaggcggcgctgcctagcggctggtaggcggtgcctgcgcgggtgttaggttagcgcgaggcgtgacctagttgacaggctctgaggtgctgctgtggcggcgtccgcggggctgaggcgggtgggagccggagccgagcgcgggctgagggaggagggcggcgactggagagcggcgagcggcgagcagcgcaggacgcagagcctctttcactttttccctgctgagtgccccctcccacccctcccactccacacacaccctgtttgcccgtgagcctggggaacttgcagcttaaagccagccacccccacggcaacatgtaccccagcaacaagaagaaaaaggtgtggagagaggagaaaggtaaccggcccgtcgagtcctgggggtgcgggcggtgggggttagggtgggggcgggggtcaggctgtgtgtgccgcggcgccctccgcccgagctcccgcctcgcgccctcccggccggtgccgcctccctccggtgtccgtgtgtacacacgcgcacactcgcgcgcactccggcgtgcacgcgccgcccctgggcacctgcagctcgcgcacgtgtgggcgcacgcccctctctgttgccctcggcaccccgtcaccttctcccgaggcggtgctgcgttcgcctcgcttgcggcggggacccccaggcggcagccccgggcgcggcacaagttcctctgcaccgcagctgggacttgggcactgccggcctgggtgtcccgcggacaggtgcccgtcggcgggcgctcaggctgcagctgccgctgtgcctccgcgctccgtgcaccctcatttctttccttctcgcccctgtccccccagcccccgaatggcaaagcgtacccaccatcgggtgtttaccccttgtctaggtttccttccttcgctgccgcagcgtgacttttgaaacctggaactctaggggagccctaaaacgagcgtgttgtccgtgaggataagtgccttcagagaagtctgaatgg

SEQ ID NO: 68293 - DNA, 792 bp, Homo sapiens
tggttatcatcctagaaaatttgattagtaggaagcttaaacaaataaccaaaatgaatttattagcatggccatgtgatgttggctttgtacattgttttcaatatatgtattaatctgtagttttccttgaaagggtacttgtttctacatttttatagagagtttctcagaagcctgggctgtttagtgagaaatcttgggaaatgccttaccttactttagaaaagagacttatttctccagataacactgtctttaagcaaacagtgtttgtgtaaccaccttgtagcaacattcagcttgaagataatagccttcacatgcttgataaaatgatgaaatcactgaccagcaggatccgtcagtggagtcagcattttatcacaatgtgataattctgtttaatgtggaaatggttacaaaatcttctgatatgtgtggaattcctgtttgatgaccacttgcttggaggaaaaaaaaaacctgtgcaagaaggtttagtgtgtttatttcattgtaaagacatttctgaccattttctttaattgaatagcagaagtgtatgttggttcatacactttgaaatgtaaagtttctgctcaggccattgtggaatgagcatcttccattaatctcgcttcacactaaaatgagtaagagacttatgattttttgaactgcatgtttaaattgtaattttgctggaaaagttaccaaatgaaacatttctgaagaaattaagataattagacaagacttatgaaccacacagtgtcattatttttttaa

SEQ ID NO: 68294 - DNA, 4105 bp, Homo sapiens
gagagcaatttctccctcctttgatttaaacagaataatacctgcagaaagctttttatacatccctgacacttgattttagggtaggaaagagattatgcatatgcaaaacaaatgaaattttagcttttgcttaaattatattctattgctttctacttaaaatctgttttctctggggttttcgtaaatagataactcaaagttctttcttacacaacataaacatagctttgaaaactgtcttttagtgtgatgtttaaccaaattgagtgatgtcgatctgtattttgaaactggaaaatactttttgaaatgtgtatacctattttcttaagaggaagaatgctgtttcagaagaccaactctttgttggaaatttatttgttgactttcagtaaatttttgaaatggtggaatgttagaaggagctgagaaacatccctttttatgctctgaagagaaaatgcagttttgaggattaatattgctgagagatttttactgtagagtttttgcccactggggggtggtacactctaccagaacactgctttctgaagccgcaagtcagatgttggctgctgctggccagtttttctctggtttaattacaacaaagcctcccgttgagaagaacagtgaaggcctctggggcaaaaggtggggggtgggagggaagggggaaggaggaaagacggaggggagaaattatggcctttgaaaaattactgaatcttatttccattgttgactttatttatggtagtcttcatttgatttaaacagttatttctaatgctttttttttttaaataaatgggtttgaataaaagaatatataaggggatctattcagaatttttaagttagctctggattttgccattaatcaatcacattctttgttatatagcccacccaccttaaaaagaggcatagaagttaagaaatgactgaaatggcaactataaaccaatactttttcattgaccagatttaatattggtatgaacattggcatatcaaaaatgaaaagcaagaaagaagaaacattaatatattattaagacaaggccaattccctgcactgatttttgtagggcttaaaactgttcaaaataatccagaaaaaggaggaagccttagggtgtgtggccaagaaaagcacagaaaaatctctctgcagtgcacttgcatgtttaaagctgattattgtatttttcatctagagagactgagtgttcattagggtcttgtgtccctaggcaggagatgctgagcataattggagtttctatttgattgggcaatatagtctagagaagaaactggggtaaagataattaatagcttgctaacaaagtctgacagccacaagatttcaaccaaatttatttcacactgcttcatttagctctgaaaaagttttgatagaattgtaggctccttaattaacacttgaaagcaaaagaaacataccttctattttgctgccacatttagttatgacagattttcttactgtttttcttctttttgtaaaaactttatttgctatccaattatatatctcacaaacgttatgtttgggaagtgtttaattgtgcattttgaacccagtcataattgattttaaagggtggggtgcagcgaaatgaaaaacccaattagtaactggtagacagttttacagaaccgcaatattaatgaattcattatgtttattcattcactaatattttgctgatccttggacttgatgtgttttggttgtgctcttcaaaaaatcaaattttagttttcttagtaaatctatgcgtttttgtaactctgtttttatttcagggtaataaatagatgtgcgtttgtctgtgtgtatatatatgtgtccaaactaaggggcatatctctgatttaattttcccatggtaaaacctggcatattatcattaatatttgtagtagttggtaatgttgatattattgattgtggcacttttaaaggattaatttttctttactcatttcggaagagatgaatattagtcatctgtcactttgggtcaggtataagtgattctccctgaatataagcaaatttattctttatgtttaggctggtcaggatatttttatgcagtcagagataaatgaaaggcattgctacagctgaaggacttttctagtggctttatttatgttgtttctggataataaaataacatagatgagcattttagacagatttattaatagacagatttattaagaatgtttaaaatagccttattattaaaaccattagagattttggactaaaaattgaaaaaaaaatcaattttttttcttttaaattctaaataaaataataaaaacaaaccccccagatgttgagaagacatggatgggcctgttgcactctttacctatatgcaaccattttgtttcagacctaattcagtgaacaaaattttttgagaagatacatttaactactttttcaagctttgtagtataaatgcatttcttccaatataagattttcctattataagttgcaaagaatggatcctctgcaaaacccacttgataagggctctactcatttatttttctttcctgctaccccaaactcactgcatacatcaggcatagcttccagggtgagctttgttagtttttctgagtagacttagccatttactatgctagtcacatacttcacttgcctaagcaatggattttggtgttctattgaagagggaatatggtttggaagagtgtctccccctcctctgagttcaatttactagttgagatttgcaagcctgaaatgcttgaagcagctcaggcacgatagcagtgcaagctttaaaatctaggtgtagctgttaatcctttacagaggcacataagtctccaggagtagctcggctagctgtgagcaagatgtatgcttttcatgtactgcgtactcatgggctgagggattattgattttctttcacagttgtaaaaacagcaattggtgatcatcccacacgtacagtacacaccaagttgctttcctatctgtgaagaatctccttgtattctttaatatttaacattgaactttccaacttgctgttttccataaggctcttttcacatagcaattactcaagacagaaaatagccacttactatcttttataaatgaaagaaggttctaagaaacttcttacattcagccatgatagtgaaatttttcattgctggcttgcacgcacatatattgcttgttgtggtgacagagcaaacgttcctatttggatttctcatagtatcaagtcgtttctttctagagagtaaaaccaagcaaactttctgggacaatcataagaaaaaacatggaaaacacttaccaggaagacgagaaaaagcaatcctatatacactgccgctatagctgtaattccattgacagtgaattggagtaatagccctcccccgtctcccaagctctgcgtccagtccacacaaagcccacggcagctgcaggctgagcttgtcctgcttcagatcactcctacactgaggagtgagcgagggagagcattccagtttactgcacacagcccacctccaagtctgaagtttaaagcttcacctcgcagtggctgaagaagggggtgatgtcatagatgggcaggacttagccaagatcttgttcagtgaggtaactggataatcagacagatgagctttgcaaacgctagagggggcgagagcagccaaaatgaagcatcagcctgccaaagctaggatgccatttggtttgtaggcagccctttggaatctcaacattttctaaagtttactacaaggcagtggtagcatacttatgtattttttttaaaaagcatgttagaaagatatttttaagatcacaatagaaaaagacaggctttgtcttatttttaaaccatctgtattgaaaagaagttaaccaaaatcaaattagttttattattcactagctaaaataatgttataattgtggaagatgtatgccagtaatcccaactgtgaatgtttattcaacatatgaataaacagc

SEQ ID NO: 68295 - DNA, 677 bp, Homo sapiens
agaaaaaatagttcatacttttgatagattaaatgtcttggactgttattagttaagatacttttggttgcaagtcattgaagatctaagccttacctgcaaaatcaacaatgggaatccattggttcatgtaactgagaagttaaaatgtatagtacaacttcaggtaaagcttgatacatggcttaaaatatgtcaataagaatacagtttctctctggctctctgtcctgcctttctcattgttggcagcctcctcaggctatatacagtggacctttggcagctctgggatttcctcttaggcaataacagttccacatatcacattcccataacacaatgttcaagggagagaagcgtcctccaaaagcccctgcacggagccctgggggggtcactgtttctcatttgcttaaacttgatcacaggttcattcccgaacctattacatgggtggggagataacgctggtgagcttaagcccaatgcaggagctgcagataagcccagccttactcagacacagaactgagaatggaggacagggcatgatccaaaggaaaatggggtactcttaggttgagaaggaaggagtggatgctaaggatcagctcattttcagaggttttaccatgctgaaacttgggcatattttatacatgtataaacttgaa

SEQ ID NO: 68296 - DNA, 2344 bp, Homo sapiens
aatccaaaataacttgagccattactgtggaattttattttctgattttatctaataaaaaaagagacttttgtcaaaacaacagtaacttgaattattcctgtggatcataactggacaatttggactgatggaaaatgagaatatttattaaaaatgtcaaaataggacaagatcttagaggatactttcttttatataatcatgaggacctgtttgacaaaaatttgctcctctctgacctatcttatgggaagtactccaacaatggataagatgtacttattcttcatcaaagtaaccttttatttgcataaaatagcagtaaataggatagcagtaaaagttctgtaggtttctttttgaagtatgcactacttaaaattatttaaatatcaccttttacctatggaaaaggcaaatatgtatttccttttacatatggaaaaggtcctggcttagacgtgttctgattttatattcttgtaagtcaagatggagagttgggtagagaataagggaacctggtacaaagaatgatgtgtgaaagaagatttttagaactagaacagtgctagattgtatcaatattgtaagctatttatatacagaaactgtttgagacagctatttagtctccttcttttgaacttctgcaacttttcccccttagcattgtgtggttagctatcttgcccttatcttttcaactaaacagatgttacattcctcaaggataggaagacattgtctttggctttcttatgtgcccatccttgccagcccattactttgcagatagtaaatacctagtaaatatttgttaagtgactaattccctgaaactcaccatctttgtcatgtctcagtaagtcattctgtaaatacttcagcatatcacatattaatcattgacatttcagaagcaaagagagagttctgatgatcccaaaattaagtttcatttctttgtaggaagggctcagccttcttcaattttgtgtcccctaacaccttacaaagagcctttcttggaatgggcttttaatatgaagctgttgattgcaaatgtgggttctgttatcatgagaaactgtattgcatccttgcagatagttttatagtcctaatggtctacaggccttttttagccaccatatttttaaacaatccttttattcagatctagtgatattactctagtggcaatgaaaaaaaaaacatggtaagaaagtatagccctgtttctactggatgtagatttaattttcatttaaagtctttcttaccctgctctattttctctatttttgttttctcttggggtttcatctgttcatctgtgggtctgtatttatttatttggcaggtataatctttcctttcctctccctccccctggcatctccttggaagctgctcttactttgtgtcaccctaaagctgatggtgactctgttttctggcttcaaaagcagttttatgcacttttttctctctctctctcccactctctatcttttttgaaatgagctgtctttgattatagtttgacagtgtggtctgactgctaacattgattcccagcagtgaacaactttgtcatattgttcaacattaggtttcgatgtgtcatttaatagactaaaaagccattcccagtaaaatcgaattcctgtgggaatcattgttaaggacgctctcaaaatgaagtaaatatgtaatgctttagaaatttcactggaaaggcatcaggtgactacatttactgaaactaccaatgtcttagctggattttatattctggaaatgcaatttacaacttgcttgcctttatttaggcaaaatgtgattcacaataattaagctttatgagcttcttcacttaggcaggtcaaataatatttttattttgtttttaactgtaagaaaatacttgctctttcttcacatttctatatgtgaacctaactaaattcaggtctgggcccagaagtgcctgtcccatttcaggctagacatgcagtatcactaaaaactaatatttaactgtatgctatagtggtggaaagagcaggccctgaaaccagactgtatgggttcaaatgccacctttggcatttactgactttgtgacttttagtgttatgtaacttatctgtgccttagtattgtatctataaaatggggatagtgcctcctttataggattgttggataagagttaatacacttgtaaaatctgtgcacacttagtgtgcatgaatcatattaagatttcagtattatttgtcatgcttattatgctgttttgtttttttgtagttgacaatgtccaatattt

SEQ ID NO: 68297 - DNA, 3348 bp, Homo sapiens
tccaccttatcctaaccaggttttgtgggctgctttagctgcacttgctcagatggctataaacgtgaggcttagtgtccttaattgctgctcgggttggagagcgcattgatacaagaatgctcaaagactaagccactgtttgtgggatggaaactccaactgctgaactgaatcagatctgccagcatctttagaagaaacatgaaagtatagcagagctgtagctcttcccatatctccaaagcattcacccgtcctgtgtaggtagacatgaaagtttttatttgcaagtaccttctactctttcttgagggctttctctggctcctgaagccaactcagcttggagggagagagggagtagatcagaagtgttggggagttgaaacccaggagatgtccatcaatgattggcaagagtttgtagattaataccctagcttagtttctatcaaactgtagcatgcttaagaatcttgaaaagttgtttaaaaattagtaggttggaggtgaggcccagagtttgcatttcttttttttttttttttttgacttttattttagattcagggagtacacgtgtaagtctattacatgggtaaattgtgtgtcactggggtttgttgtacaaatgatcctgtcacccaggtagtgagcatagtaccctgcagttagtttttaaatcctcactccacttccaccctcccacttctagtaggccccagtgtctgttcttgtctttctatgtgtactcaatgtttagctcccactcatcagtgacaacatgcagtatttagttttctgttcctgtgttaatgcgtttaggatgatggcctttagctgcagcatgtcaactgcatgttgctgcagtggacatgatttcattgtttttttgtggctgtgtactcagaatttgtacttctaataagcttccaaatgatgctaaccttcaaaccacattttgagtagcaaggccctgttgcctcccatttgggataaatatgcagtatagggtatgctgtaggttccttagcaggattgagctccagttgttgataaatgtaaactgtttaataataaacactttattatctcctttggttttctttctgacttccctacttttctatcaatgctctctggcatcagcatttacacaaactgctcaactacaaacactctcatgcttgtctcagtgtcttcttctggtagagaccaacctgagcagatgaccataccaacttctagaatggaaagccctacccagacagtgggactgtctccagtcctccagcctcaggattttggccgacttgaggtcactctcatggatcccttccagaaaagtatcactgggcatgaggtagtccaggttgagagagtgtattgatcttaaagtgtttgctgatgacagcatagctggcattcttccctgggggaattgccaggacccttatttgagaaaaaggtactgtgttctttctctagtgaccatagggcttctaaacttgatatgagccaagattgcccagtattctgggatagattttttttcttaagggttaaaaaaagagagattcaaatcttcaactctaagaaatctatcacacttttgaggatccattagggataagggttagggagtagttagtcaccggcatgctttcactctgaattcctgctcccagctgaattcccttaatgttttctctctaccagctcctaaagttttctctggttctcattaaccccgaatttaaacatggctcctcctgcttcacttcccacagcattactcccataatgctgttgggtatgttagacccttcctgaaggtctgaggttaaaggatggaggttacctagagaacacttaaaattcagtctaagatactaaatactatcactgtgctactaagaattagtatcacagtcactaagttttggcatccatttctgttgccaagcttcccatactggtggctgctgctcatatgagccccaagacctgttatattttctcatcttgttttatttttcttctcagttcaagctgccccctaccagcacctccctgtgtgtctgcacaggctgtagactgtgcaactatggggggcactatttaccatagactgcgatgaaaatagcatcccctagagtttatgcagcttgatagctctctgttctcaaccccaaaagacttagacaccactctcttaaaaccagtggaagacggaattttctattattttattatacacagcaattaaacatcattttctttcaatctgtattttctagaagtgccccaagaatcccacatcagcataaccaaaagtgtcattaatgtattttttccccaaaacaaaatagcagttttctttctgtgaagaattctgtcttccttttaagctcaaattgcatccagcttctaaaattgcaatttctctgcccgcactttctgtttagcccagtgaaggatgacacaggttctatctaggccttaatcaaacaaatcactgtgaggacttctgtcttagctgtgaccctgggccctttgggaattcccgtcccccctaggcccttctggagccagctttttatcttgatatttctctgctttcaacgcaggcttagaaaacctttcaattaaagatgtcatgttggccttaatggaagccgctcttcatacctctcattcccccaaataggctgttttccattggcagtgattcataggagccacagaagagtttgagatttaagtcattctcaaccagttacagaccctaggagcagttacagacgttaggtgacagagttgaatttcagaatccatagcctacactcatgctagtaatggtgagaagtgtaaacatagggataagagacaaggcagtgatctcagaggaacctaaatatagttaccatccctgtaacctttgcataattgttttttcagccttcttctctgtaaaatggggatgataatccctacgttacaggcctgttaaaaagattaaacaaacgaatgtctgtaaagttcttagcatggggtctgacaataataagatatcacaaaaaaactattgtcatcaaacctctaagtctgtgcctctgagggatgtggtatcctgatataggttggtagtcttcctaagtaagttgaatctcaggcagcagaggaaaagtccagtgaaggagaacttgaagattctaaatggatgtgcatagcacaccccttttggcagaacagtgactcaagactgtaataagcagaaattaagggaacatcttcctctggagctcctaggagacttgaaaccagtggcagagtctcaggccc

SEQ ID NO: 68298 - DNA, 671 bp, Homo sapiens
aagtaaatattatcattctcaatataaaatgttatttgcaactgtcaagcaaaaattggatgtcatgtcttgtatctgcattttgtatttcaagacactcctggtgataacataaggagactggcatgcccaggattgtgctgtgtaaacaaatgctggcaaagccctggcttctcttaagcaggtggtcaggtcaaaacactgatggcagcattatagctaaaaatgaaaactaggaagtcgtgaccttaggacctacttttctaccaaagaaaggaagcttgaagttaacaagtttgtgccaaacacttcagtagacatatgttcttttttcagtgttcttttactgtgttaacattttaatgacctcaagtttacttagtaatgaatactttgggggcaaacatccagtagcagattgcttcatttattaccaatgaatttatttattcagtcagtcattgcagagctttatctctgaagaacacatttgaaaagctaaactgatcctctgctcacctggcagtccactgtgagaatataaaacgagtaactataataccaatctacctgtgggcagtttgcaaaggctgatgtcgtgagtgccatatatgagactctttttgaaatctaaaacaataacccagcccagacattttcagctaaagcat

SEQ ID NO: 68299 - DNA, 911 bp, Homo sapiens
gaaagagatgaatccaggatagtttccggttttgggatctgaacaaatgggaaggttatgctgccacttactgaggaggggaagacttattagcagactagccagtttgatgtgtgtttgggggtactgtggggaagtacttaaaggtcacttctttccccttttgtgtccttagtgctttgtggtgactcaggaagttagagtgtgtacttttttcaggtgatctttcatgagctgcctactctgaacttcattggctttgatttccattgcaacctaatttttgaaataccaaataggagtatcattcttctccctgcaaaaatacttatgtgtatgaagattacacaaatggccagttctcagtaaatcatgtgttcaaagttgtggttccatatagtgatgggtttatgtggaaacagacatcctcatcttgcttcatctgctgtgtaatcattaactcatgaagataacaggactgtctggggtcatgggctgtgggacagaatgaagctccattttctacaatggagagaaaatcccaagaatcagtattttcatacacgaaattaaccagcaaaaatcttcaagaacttaatccctttccagtgaatgagtaataaattttttgttcttcttttttcgtattttgtagtcaaaagctcatgtataccgcagggttttacaacactttctgtctttaaatttaaagcagcaataagcagacatgttctgtaaccagatccaaatgttctggtccctgctttaagttgagaaaatctgatttggcaaacaaataaatgagcaacaagaacagcaaaactaacttgacaaaatgggtcatttagtttggaaaggggtttattgtagaatgcctttaaataataaacaacattaaaagacttaaacta

SEQ ID NO: 68300 - DNA, 458 bp, Homo sapiens
gggtggggactcttcctttttggatatttgattaggacttgcggaggagcgtgagagcaaggctttaattaaatttagagaggctcttttgatttatgagagtcaggactcatggtttcatgtgtccagtgaatactcagatcacttaacacagggcccaattgctcatcactttctggagctgtgtcaataaaacaagataacgtggaggaatgcttctcaaagttctcagttggcagtgtgtgtctctgttatctgcagagattacgaaatgcagactctgggtttccatggctggagagactgattttacagatttgaggctgggtatgggaatctgcatttttactaggctcgcttggtgacattgaccacaattatagggccataaaatctgaattcatatctgccacttaggtggatgaccttagataagtaatctattcttgaacttgttg

SEQ ID NO: 68301 - DNA, 1888 bp, Homo sapiens
aaatgttattaatcctaaagaccaggtgatagtttatatattcttgaaggctttaaaaatataattagcctctctgttacaaattgagtccacattcatcttggggctaatttatttcctttacaaaactaacgagtgtttgtctacaggatcagtgaactaaatctaaatgggggccaaaccttcaacttcaccctctggcaactctttttcccattttcagaactcttccaaatcccccgccccagccccagtatttccaattgacttatagaaacagttgcattgttcttttgcccaaatcccaagcattccccagagagctgttttcactttctttagagcacttacagtttatctctgtaagagaatagttttgagtttggcacttagtctgtttctttttcattctaataggaatcgccttagagctagctaagtccctgttagtcagcttcttaagtgctgaccagacttcttccatctgtatagaacactcactttttcacatcagaggtttaatgaaactagaaaagaaaactctttaaaataacaataataatgaaaatctctaatagattcaggcaactttacatatatcttttcaagattgggtcaattttgcaaaaattttgagggttttattttttaatatggcctcaggttagagtcacacaaatcagttaaaaaatatatttctttgagttggaaatacacacttatttcatccctgtacttctatataggggagttatttttaatgagaaaaatttatagctgactgccaatgacacataaaaattagtatgcattattaaaaataaattaaggcagaaagcagccaaagtggactttgttctagagtcttggtaaacagccaacagcagtgctcacttgtcttcatgtgacattaaatagtgcccgtctaaaaagtgattaatagataccgcgggttggaacaggctggcattcgtctgtttcttacagctcctgatacacgttgaatgccctgcatacctatagttcttaagggaatagtcactgttgagacatttagagaagctgatatcagatgagggcaatcttgttttggctattttaccacatctcaagtatacaaagtctacatataaacattacgtaatgccttcagacattgcactgattcaaatagattttaatgagaaaggccaacttttcctgtttcttggtcattcagagacttttagggagcttgaattgtcagtatctcctaatctctcaactatttttttcttttgatttttaatctcactcagttagactgttgggaagagaatacaataggaggattaatggctcagagcagaaatgtttgcttgttggacaataggaagggaatttggtagaagttcttacccttcctgtttacattcagtaatgttgctggtatattgaaaagactgtcaatagtgggtatatatttttttcaacagtaatttccaacatcttgttgttaggtgttcatcaaaataagaaagacggagaaagaagaaaacagagacaaaaagaaaaaagataatggatttgagaagtcaagtcaattcagtcacaatatgggagtaaaggacagattaaaagaagtttcttgtgtgagtgtgtgtgtgtgaatgagtgtgaaaatgcgtgcatgggtacatgtgccttagagtagaggtaattggaagacttgaggagaaattactcacttttcttttaataccaatgaccagacagcttgccaggtgctcactcagatttgtatcatatctttacatactgtcttctggataggtacaactatccccatttttcagatgaggacacagaatcttagagaaatgaagaactagatcaagatctgtttgaa

SEQ ID NO: 68302 - DNA, 1199 bp, Homo sapiens
gttccattatttttggtggaggaaaggaacctggcatattaattggctttgtttttagagatgcaggtgaagccttttcattttgctttctgaaaagaaacttgcaatatgtccttaaattatgtttaattttgagtgtcgacttacaaagaaataaaaactcttcatttttaaaaaatttaaaacaaaaaaaaatttgggggtattgaaccttagaaccaatcactaaaaattctgattttgtgtcgactaaaaattctgattttgtgtcaactaaactgcatatgagatcttcgagtttttaacactgaaacataatagttaattttttaaagtactataaaacagaatatagaaaataaattacactatactatattttctatatttggaagtttacagttgtttgcataattgacaagttcgtttcctggtgcagtcatcagcaggttatacaggatgtatctatctgtctctttcttcagaggacactgtgtgtgtgttgagaatgaaaccgaatgtgggtggtaagaggaaatattaatgaacttttaaatatctctttccttgaaaagactgaaatatgaggtcttaagtaaaataaatcatttaaagtataaaatgcttaaagatccttactttttattaccaagttattagcagactgccatactgaataccttttatgtagttttttttttttttggctaacatttccaaacaactttaaaatatagttattcattaaccgacttgtgactaatctttttcagagagagaggattaactttattcctctccagttttaacgtgaccaataaggtgatatgcaagtgaggatttggggaggtggggaagaattggagagaggtaatagaactgatccttgagtcagtgggatgttggaagtggttttccattactttccttggttctcagaaaaccagggagatagggaggatgttatcaggccctttgaccttctggaagtgactgtggacttagcaaaagctagttggagctaggggaggaaggaggcagatagataaagtaggaagaaataattgttctccctaagcacagaatccaaggtggtgctattaaaacaaacaaaccaaaaatacacacacacacacaaatgcacacacacacgtctgtgaatgtatacagagatggtgcggtggctcgcgcctgtaatc

SEQ ID NO: 68303 - DNA, 2072 bp, Homo sapiens
ttgacgtcagatgcctttaaagtaaaactataagaattattagtcatttgatgagaagtaataaatgttatatagagaaacattacaaaatagagatagactcaggataggggaccatagagcatacaaccatgaacacatatcatttgcttaaattagttaaaacacaaaagcaaaatatttgaaatagtcaaaagaacattttcaattctacctaataatttattggatgaattcttttatttttttaaatagtttactggccgagttgataatatgatctatcctagttattaaccagcagaattttaatttagttttcaaggttctccatggtctaaactcaacatgcccttccaggctcaaattacactcttccagttcaaaggcccatctgaaatgggctgcttctattatgttgcccaggctttcttatctctagctctttgccctgatacctttgtctttctacttggagtacctattctttccatctttaataccccaccttcattaaatgaccctttctaattacttcctgcatgcttcagccagatgtaatctcttctctctgattatcacataacactattttgtgcttctgtggttttcaccttactcatctctgttgtactgacaaatggactgtgagctccgtattttttatcttcacccttatgcattgcgtaattaaaaccttgtacacagtacaggttcagcaaacacacactgaataaattaataagtaggtgaatagttttgttgtttacattcactaacaacccattctgattcatgtttacatggacagaaaaagaatgagttgattattaactaaatttaatgtatgtcatctgtatacctaaattctttgggttaatattaaaaaagtattcttccaagttagcatgaatttgacctatcttttagagtgttcagattggttcactcatgttgacattagtcagttttgaaattcagacataaaggtatacacatatagatttgacatttgagattaacttacttttttccagttagattatggaagagataaacaatgactcagaggaaaatggagaggctatagaggtgaaatactgtaataatgtggctaaacttgcttgagagaagatgagacataagcctgctttgttagtcctttcatagagaaatgactcagcactgttagagaatatgatgaggttacattgttctttcatcacaaactgttgagttaatggtggcatatatagagtatagctctgattcataagacaattggtcattgtgcttctctctttttattttttaaagcaaattagtgctttaaaagagcatagtaatctggttcttttcatgaaaactgatgattaaaaacaaactacgaaaataattttaaatacacctgggtttccaaatggacagaggttgttgaaagtcatttttaagttccttcaaagctacaaagtctatgtgtttctcaaattatcttttgcaaatcttagtaggaattaaacttgtgcaaatccaacccctggctctttttagcctcgtgagagcagagtatgcatcgtgctttcgttttggatgagaaatatacaaactgtgtgttgactggtggaaagcagaacaatggatctcagcaaattgtatcatgcccagctctgacttgagacgcagaatcaattcattttcagtgtcatgacaggatctgagatagaagtgagtctcttgttgccatcatgagaaaagatacgtatgtccacagttttggggagagggagcatgggagctgggtgcttcactgccaacacagcctctgatcacctgatatgttacaaaatcaattttatcttctgctgcatttcatgtgacaattcaaagagcaacatttgtttttctactctttacattctcaacttccatggaggcataattgccatgagttaaagctaggaggagagtgatcactgcacactgatttggatataaaatctatggccatttgaaagggaaaccttcaagagcccacgtaataaatccccgaggaacttaagagagatgaactg

SEQ ID NO: 68304 - DNA, 1514 bp, Homo sapiens
tcagttttgcccttctcttcttctccatgtttaatgttccatggtctacacacctcattgccctccacacaagttagtgttatcgtatattgcgatatgtctgccatcaagtgtgtattcatgatatatccaaggtagaaggcatgtttttctttttccaggcctgtgtggccaagaagcatttctgaatcatgtgaattcattctgcaacctcatctaccagtgttcacccttcccccactactgccctgaaatttcaccattttaagtttattgctttttgtcttgtagtttctaactctgcgaccagcgctcccccacccccagccctgcaactgcaatgcattatgatttcttttaaatttgtttcaatgcctgagcttggggccccaaaactatagactggactcttacagagctgaaggagagagggggaagcgaaggagttcatctgggataaataaaagaaaggaatgtcagggaaggagaaggacccacaatcactatctcacagatttacgtggatgttttacaatgagattaaccatatttagaatcctagacattttatttttgcaatcagtttttctgaaaagaaagaattcttactgtttagctgaaatacagcttttagctgttttttttttttgtaattcagtaacttatgtgatgtttttattgatttccattatctctcattgtttttaacctagtactaaatggaaaacctaggctagcatttatttgtacaacttagtgcatggtttaaggaaaaaggggaaaaaagccttgtttacttgccctataacctagtgcttacctctgaggtttatttaacatggcaggtggtgacgaactgcagcttatgacatctcttgcaatgtaattcaccactcaatgacgaatgcttctgacaaatggaaacctggtattattctaaaacagaaaaaagatcaatatcatttggatatgggatagtaaaaatggcttctctaaacacgtgaaataaattagccctttaaggtgagaccatattataagtggcaaagataaaatagagtggaatttttgttttccttagaatttttttcttgtcagttgtcagagtaaattaatactcttagaagcagtcctattaccatgccaccctgtgctgttgtttttttagtagtttgcattgttagtgctaattaaaaaactatcttggaagttaattgggggtgatactagttagttgtgactgaggacataaccatgttaattatcgattgtaggtcagacaaagggctaggcttttctacctcttgaatcttaactaaggtcatgagtaagttgtttttaaatcataaaattttagtgttagacaattgctagaggacaagcgtaacttcacatttaattagggggcagttggagatgttagtggtgtgttgttgggcagttgccacacgcttctgatgatgtagtaaatcagcagtgaaattaggtgagactcactacatgaatacacgttt

SEQ ID NO: 68305 - DNA, 2285 bp, Homo sapiens
atgtatatgtatctattcagtactaaattattctgtatgaaaagacaagtactgtgaaacttctattaaagtggccacaagtatccctaacatagaagtagtccccctctccgcgccccgccccccccactttttttaagttggctaatttaatgagatatttacattgttatcagtaaccactaaggagttacaaaccattacttctacaggcaatggccagtgtaattaaaccttttaaccttgctagttttcccagtttgccattatcagtcattggtcacagtacatattttttcattattagccacaaactagctatgtgaccttaaaaggttatttaaagtctccagactttatttcccaacccccccaccccaccccatgaaaggaagaaggaggagacaatgatccctgtggtccatttcatctccaaaacccaagaccatggttctgcaacagtttaacaatctggttaacatttgaaagtaaatgaaaacgagagaaaacattgcagctctgccagcaattttctctctctctagttggataaaaactatccaagttgtccctgtttgcaaaggagggtattattatatatatatataatatattatataatatataaaatatatatattatataatatattatatataatatatatcataatatatatcataatatatataatcatatatatatatatttaagagacagggcctttgctctgtcacctaggctgaagtacagtggtgttatcatagctcactgcaacctcggactcctgggctcaagtgatccttcggcatcagcctcctgagtagctaggactacatgtacacaccaccatacccagctaattttttttttttttaattttttgtagagacagggtctcactgtgtttctcaggctagtctcaaattcctagcctcaaaagatcctcctacctcggccttctaaagtattgggatgacagatgtgagtgcctgagcccagctgtgatttatattttaatgaacaaaagattagaataaaatttgtaaaatttttatttctaactatttttcatggcttgacataaaataaatgtgcatttgggcaaatactgcatttcagtgaggcatgtacttccattgtgtgttgaaatgtaagttggcataaaagaaccaacaaaaaagtcattacagttttattatttgttgacagcaagagagaaagaaatattctctcaagatgaacaataatgtcctgttaactgacttaaaaagagcaaagtttaaattgcttattcagagaactctaccttctaatactttgagcttcctggaaaaagaaatgggttcttgataagttatgtgaattgtgcttcgacataaatgtcaatgtttgatcacaagttttttttaccaaatgccaatctgcgaggtcagctagttcaatgagtcattttgcttaataaggaaatttaagtagttgtttctatcctttgttgtcacgttggaaatgcttcaaagagaagctacttgttctgataaaatagaataatatgaactttggaactagacaaaactgaattgagttttgcctttgtcactaaattaactgtgtggtgttgatatgtccttaaaacccttgaagcttttacttcccaatctataaaatagggatgataataccttcttggtagaatgggttttgagatgacttatctactatgtttgttatcccctgccacttggtaataataatggctagcatttattgagtgtttaccatgtttcaggaaacttgtaagcactttgtaagtattaccatatttaattctcatgacaatcttgctgtcatttgaatatttgtcctcctaaaaacttattttgaaatttcatcctgaaggtggaagtattgagagatggggccttaaaaaggttaatgggtcatgagaactctatctcatgaatgaatcaatccattcttgaattaatggattaatgaattactaggttagtagattaatgagttatctcaggagtgacactggtgacttgaaagagagacctgagctagcaagctcagccccctccccacatgatgccttgtcccaccttggaactctgcagaaactccacaccagcaagacggccctcaccagatgcaacccctcaaccttctcagactctgtaactgtaagaaataaattccttgtctttgtaaatttctcagtttcaggtattccattacaaacaacagaaaacagactaagacacgccctacaggtggat

SEQ ID NO: 68306 - DNA, 3327 bp, Homo sapiens
actcctttcagctttagagctgccttaaagattaatttaatctaatttcatattggttataattctggagtttgtaggtaggagagtacaatgaggtttttaagatggcccctgggatgttcttgggcggagaactagtagtagcaggattagtgacaaaaggcaataggtttttgtttgtttgttggttggttaattttttttctgtttgtttactaaaatgcagatttcaccaaagcaagaatatccggaatagtcaggatgtgcttagtcagttacctctgtgggcggatgctccccttgctcttttttcctttccttttattggtaacttgtaatcagctgctactttagtttaatgagaaaaataacagtttacattacatctagattaaagaaactgctagacgaacaggggtgggcaagttgtcaatggcatctaataaatagtagtaagtaattagcacaggtctgatggatttgaaggaaagtaaaaaactagggaagaggaattgtggattggggaaacatagctgtaatttgagaataacacatcaagaaaataagaatgaagcactgaagtcagagatctgtggggactgtgttggggagagggttgggggcatctcgtctgaggaacaaatagagtagaggaacatctcatgctgggtttgtactctgctcaccctgctccactccacctctcaggcttttggttttatcagattgtgtctataacaaagccagataaaagtgacaaagaagtgcagttcaaggttctgctgtccttcccttgtctctgggagttagcaagtcacctttaaatgagaaaacagtgtgaccttacgtacttcacacggccattctgagacaaagttggagaagtgtcatgcatcactgcactcttctaaggggtggaaggaatcaagcatattccagacctaggagggatttcttaggaattcacactgatgtaatttcaaaactcccaagacagccaccacttgtctggcattagctaacctatgacacttcactcaattgcattttgagctcctgacttagttcattcagtaacgtttttgccccaggatgccaaagcaaacactggtcctgaactttgcctcttgaactacattcttcaccatgatgcccttccaaattccctatagatgttttcactactggtgtgtacaggaaggaagttcactttgactaataaccaactctgttatttctagtggagtgatcatttgtctcttctgtccattggcctccctttgattcaagcagtggggtgtgtagaggaagctctgcatccacttgacaagccttttaggtcccaacagcagtggactccttatcagggctactcataaaaggctaaccttccaaaggaaacttgtcagggctcagctgttggcaagatggattaacaagtgcttccagctaatggagtagacattggtgacttaatgagggtagtttgaaatcttagctgtattctcttattctttttttttttttttttgaggatgataaatgagtttagttctttcttagctaagaaatgccaatgatttatttttattattcttatttttattttttattttttagagatatggggccagggtcgggggcagggaaggaagggaagtctcactaggttggccagaatggtctcaaactcctggcctcaaacaatcttttcacctggtccttccaaagtgctgggattacaggtgtgagccaccttgccctgcagaaataccaattattaaaaactcagaggttgtagtgcaacatatttgggagtggtcacaccccatggcctttgattttagtctgaagattgaaaataacctttggattttaccttgacaaggaagttgttcctcagtggacacagacatcatagttggcatagaaacagctgttgggttattcctgggccattgaagacatggcacctggcccagtctgaatggttgttctctcctggttgcttgtttaaataaaggttaagcaaaaattcttttttggttttgatttcaggaagaaataagggagtgactgcaatgttatctgaaaatgagcatttcctgtttcctcaggcatttctttatgacccccattaaagttaatgaataaccaagtgtctgacacagttgagcgtaatatgcctcacctaaggttcccggtggctgcacatttttgtgggaaatgaccttcagttcctgcagatccattattaggcaatctcttagttatagactttatcttcccaaaacattcaaatcacatattagccaaatcacttagataccgtcctaagtgctggaactctttaagtcttgttagcagaaaaggctaaagtttaggtaaataagcagatctgttccacaaatgattcctcaccttaggtatttatgaaaaagctctgataaacttttgaaagcagaaaaagacgttaaaaaatcttactgtgagcctgaaaacataaacataaatcagctaaaagataatttgccttaataggtagtgggcgatgggggaggagagtgatcagggctcaccctggcaaaattgtctctgccggatgtttcaggttcgccttctctccccgtcacctcctcagaatcttaggagaccacataggatcaatccttgttcaaaggcaaaggcaaaaaaagtatgactgcaaatatgtgaagtacgatttggcacggagttcattttgggaccctaagtcctctaggcggtacagctatatattgcaatggactgagtgtttgacacacttgcccagaactcctgcatacaaatgaggagtggcatccttaacctcaggcagttaaatgttccattcccctgaaactaccattttccaaagagctttggaattgtcttagggcctatttaaatgccataggaaaaaagttaatttcatttctttttatggtcccatgtcatttttaacccctagtagtagcagtatttctagctgttaaaagtaagtatttttgagtcacaaatctaacaattgatttgtggcaatttgtttaacctcctagagccacagcttacttatttctggaatggtatgatagtaaaatctaccttatggggcctctctgaggattatggataaagcggttaacacaattccaggcaactagtaagcattcaaaatgtgttactattattactgggattgttgccgccgttgttattaaacaacttgttcacataccttttttcactcgacttggctcagaattctaccagactgttcagaaaaatcaagtgtgtgtttaatgtaca

SEQ ID NO: 68307 - DNA, 993 bp, Homo sapiens
ttgtttttatttatgcactgcctacttcaaaaagtgatttgagggagactacagatcaaattccctttcaaaatagatctcacttctttgggggaagatgaaagggtaagggtgaagcaaggtgacacattttagttgacaatctctagacttgggctgtcatagactagagttggattcagttatctaatttgcaccgccttaattaatgctccaggtctacaggtacatagtgtgaatttaaaagtttgaaatattcagatcaaaatggttataactgtaaccattcacctatcatccatccatccaactctccatccatccatccatccatccaaaagacatttattgatctcctactcagtattaagcacttgtcatattgagtgggtggtgggaggagaggatagagtcaggtgttaacgcatatatgtacacataactacaaattatagtaagagctgtgttaaatatggcaaccattttttaagtctagaatttatttgaggctatgcagtagagaaaataactcatttatttctgggtaagtagtttaaggatcacttttccaaagtgaagtcttttcttaaaaatagaaatttctcatctacaacattcatcatagaaagaatgcagcattgcatcagaactgatgttcttgctcataaaataaacaaaacacaatggtgtctctatctgtagaatgtaggtgttgtaacacatctgcctagaagctagttaaaatgcatgttgttcttatatttcaattagaagtaagcagacttgattgtctaacacaaaaactcagttgctttgatgtatttgtttttgcatatggttcaaattatcatcaaaactgtattatcagtgataatatactaatgcagtaggttgacattaggggctgactagctgactgttgccatatataattaatccaaagtaatgtgatatggcctttaagatgtaaaagaatttacacaaattattttc

SEQ ID NO: 68308 - DNA, 943 bp, Homo sapiens
taatactgctggaaagcaagaacctgacataaaagtccataacgatagctttctaggctctaatcctgtgattccactagaaatatcttttgggtgggcatgacattaaccatcctgtcttacaaatacaatagaatatttaatgatcttccattgtattctggaaaatagactgcattctctttctctatctgcctccctctttctcccttctcttgtcctttctggtactttgccagaaaccgcctgtttctttcctggagtccagtaattgaaggtaattttttggaagatggtttcaattatctaaagccagtggaatgtttaactgccccttgctattcgtgaacttgtttacagtgggatttcagatgaattcagattacatgcaaccagatgttatctgctatggttacttttttttttttttggtgaaggaaaattgtatgagggaggggtctttgatatcatatttagatcaactgccctcaaattcttggaagtgtgcccctgggataaagttttggggtaaacttttgatcccaaccaatgaacatccaaatatgagaatatacattctctgtgtaataaatttaagatcttcccattttctgtgtgtctttatatgatactaatccaaaaaaattgcctcacaaaaatattttgtcatccatctaagttagagataaaacaattataaactgaaagctcattctattcttactctgcctaaacatcacagatttactgtcatgctgcccagataatagaaaataaatgttgtgatatttaacaagaaaaaaaatctgaagtaataaaagtcacctgtgaaacaacaactaaatgctctagtctgtagacagttgaagactaatttccttaactgacagctgaagtgaaggcttagtaagatgtattatttgtaaaggttgaactttaaaat

SEQ ID NO: 68309 - DNA, 700 bp, Homo sapiens
tgggtcagaagggaacctgccaccctgaagggaaagacagaagcctggctggattcaccacttgctaactaaggagcccttgggccttgaatcagcagtagccaggcaatagtcaccatgggccctgggcaagtcccagtactgtgctggcctcgggtctcacccagcatagtcccagtgacggcagctataggggtatttgtgtcatcctccatcccaattccaggcagttcagcatggagagagagactccatttatttggcagagagtaaggggagagaacaagagactgctggtaatctagggaattcttctggctgttacccaagactaccaagatggcacctctatgagtcatcaaaaatcatagcatcactaggcttggaatgcctcctaatgcagttacagctgcagtgaccaaagattagatcacaacattcatttccctttgaatgcttggaaagccttctcagaaaggtcgggtacaaataagcccaaactgcagaggttacaataaatacctaactatttaatattcagtgctcagacattgacaaacagacacaagcaccatggtcatccaggaaaacataacctcaccatatgcactaaataaggcaccagtgaccaatactggagtgacagtgatatgtgacctttcagatggagaattcaaaatagctgttttgaagaagctca

SEQ ID NO: 68310 - DNA, 631 bp, Homo sapiens
caaactccactgatggtaactcagtgtcattgccctgcctagccacagcagaggctgagacatgtagactgtgtttcaggaagaagaaaaagatttgggtgaggaaaaaaacaactcttgaggtatcgtacttgtatgaagcttcttgttcagtttgtgataagcacttaataaatatgaactctcttctttgtgggtaagtgagaatccctggcagcttctgcaaagttgtttcaaaatgcatgccatcctgatgacaggccactcgttgtggccttatggcaaagtcagttgatagggctgccaggcagacagtgagcagaattctttctggactctgttcctgcttgttctttttttcttttgtgttttggaacttcccttgactttggtcccatttagtttcccaatgtctaacttgcatttacccttctttcacagcttgctcacctttagcttctatctgactaggtctttgtgttttcattttgccctctcaacaaactatttctagtccttagctcagtagcttcactgagcaggcccataaactcccttttgccatttccacttcccagtcatatcttgaagacttccaacttaaacacattaatttatgcttgggatgatt

SEQ ID NO: 68311 - DNA, 2185 bp, Homo sapiens
tcaacgcaagttgcacaggtataactactgacaaatggcctccagaagttagagcaggcattgttaatttagggctatatgggttccaagagtcccagccaatgtcagactaggatcggtcaactcctggagttacgacttggcttgtattttgacattttttgtgttcattagttggaggatttgggtggcagtaggaatggaatctctagggtcagcatccctgtagtaggaatttgagtctgaaggaatccttgaatggatatcagtggatctataaaaactttaaaatcacggacaaaaatgtatgggatggggacaagccaataatatggtttaaatatttctaatcttttattttctggtcagggaaggtcttttattagcttctgttagattacgaccaaggatactcgattgaattgcaaataccagaggactaaattactgtaatatagtaaaaatgtgacttaaaacattaaatggattaaggagaaagcaagaaaagagtgaaagtggggaggggagttttcggaggggtggaacttcattggtggtacgggaatatatgtgaccttattatggaaatattctctatcacacacccaccttgaatctgtgtgaagagcagagggcgctttgctttactattatcttttttgctgtgcgatttccaccgtatcacttaatatcttccagttgtttcttcatttgtgttccttgtgttttgctactgacctcccttggagggatgttgtaaggcataaatcattaatgattataaagtgctttggaaatagaaagtattgcttcagtgatagcccagatgcacctaggaattgcagcatgaacagtacaaagcaaaaggcatgttgtcagaattccttttggggctccggatcagccaggccttccgctcacatcagggtgaattagggccatgaatctgaaagtacatctgatactgcttggcttgtacgtgctcttgttacaacattattttgacattttttgtgttcatttgttggaggactttaaacccttttctaaccaaaggaaaccaaagtgcctactgcaagcatttttcaaagatggtgtcactctgattgaggataaaaaattgatctactaaataaaaatgttggaatggcatgtttatcttacttgtttggccagatataagtaaggcagtgattcagaagaaggcttcattagaatgcaccatttatctaatactttgacagtcagtgatatcttctctctccctctgctgtctctctttatgaaaccaaacactgacctgtctttagcctacaatatcagatacaagaaaacagagaccaatggaagtaaataatccatcaagttagtgttaaagataagactagaaactgggtgtttcatctcccagttcagtacttctatatatctgagtattctttgatcatttctaagaagataccaagcagctttaatcaaacattcatccttcctaaaaggacctgagatttttattcaaagattccagaataccagttattcataaagctgcctgtccatgcatttagagtgtgatagagatcaactgtaacatccgtcatgttactacactccaagattgatttctgtggtctacttggtttgatggaaagtcccttcttcccttacagtctacatatctcctttaaatatgacttttatagatcgaggtgaatacatgattaactacattttcctcctattcatttatctatgtatagaaaaatgtgagaaaggagcaggaatctaaataaactcctaaattttcagtcgttgaggtatgcacagttcaaaagagatacttgtagactaaattatccagatgatagtaaaaattccctattttacattccagatgcagatccagcctcagtgatgaatacctaaatataattcccagtccttttatttcttatctttctccccaaggaacaggctcttcctcctactttggaggctcttctctctaatcgttttactagttcatgctcttttctccttggtactgtccaatctatatactctgttagattagaccatcccaactgagaaagcacagtgggatggagaagggagaaggcatggttcatttttgtatggacagttctgagtgattggtagggccagaaaaagctcttctgtgcta

SEQ ID NO: 68312 - DNA, 2116 bp, Homo sapiens
aggggatagtgaatccatacttgatcttaaaaattgagcccacctatacttccagtcatcactctgtggcacattgaagagcatggagcccccacctggttttccaggcctactgtgcacaacagcattcctgtacctttaggctttcttatatctttcagctttctctccttactaagcaaataagatacatttagggaaggagggctaacaagaagacctgtaggggagcaaaatgcttgtgacttgtgcagtttagtcttcacaacaagagagagtagacttatcccctcttatatgttaccggtgaagacattgaggaatagagacctgttttgctcactcagattgtacttttcaggggaaggattcaatgcctggtaggtctgactctaaagccagggtttctcttgaaccagatctcagctctctttgaattcatcaaattggtatgaaggatttattatgcagagaatatttttaccttggacagatagtcagtaattgaagccagattccaaaggtggcaaagacctagataggaatgaaaaccatcttcaagtgttgtatatcctcagagggatttctgaaacattgtgtgttcaccagcagcattagttctcactcaatgtatcagtcatatttttccgcattacaaacaacctctaaaaccaagtagctgacagcaaatagcatgtattgtcttatttacaagactgcgggttggctgtggtttaactgatcaagactgggcttggcctaaccaagctggactcttggcttctgctgggcacaggtcttttccttctttttcatttcaggtacctgtctgaaagggcagtagttatctcggacattctctttccataccagcaaacactttaaaacttcacatctgctcacataccactgactaaagcaagtcagatggccaaagtcaacattgatggggcagggaaatatgttccacccagggtggcaggctctgcaaattcagatggcaaagataagcgaagaattgggaacacttatctaatccagcactctcagaaagtgatctaaaaaaggtgtcacaagagtctaatggtgttactgctcatgtcagacttgaagctatgtcctctgactcaacactggaattttaggaatgcctcacttgatatcttttggaatgtctttgaaaatgagttttaggatgatgtcctccagcagattttaattatatcatataatgtacttttaatcacaaaattgtatccaattatgtattatttttaatcataatcttagtccttcaaattcttttcatctctgtctcaatcagcaatagtgtggctgccattgtataccctatctaaaccatagaatagaagtcttgcccactggaccacccttttttaggcagattccacgtgctaccagcggatgaagtcagacagaactcagaatagagtgtcatggccaaggtctgtcttaagattcaaacatgaaaaggaaagattctccatgccaaatgttcacctcaggggagctgaacactgagaagttttacagaggaattcctagaattttgagggcagtttacaaactcaggccttcagggggcttgactatcactgaagagcaaaagccaatagtcaggggatttgagggctatctttctttcttctacactaagataataagggtgaatgctgctgagacggtgatgacgtgttcagcatgcctgcctctggagaatcatgcacctgtctgtgcctgtgagagcataaaagctccatgagacacaagtggtttacatcctgggagtcagtaacaaagctaagagaccctgtctggtgctgtgtccctgaaaggggtccttcagtctgtcctagtctagggatcctaggacacaggcctttgtcaaaaccccaagccaaggggacctagctgtcattctcctaggtcgtgtttttaagttgatcaaggtcacgtgcatggagtgtctaggccagcagaaactccagagagcagcacagaagtttgtatcctgccctccagtgagagggcttattctcataggcctcaggtggcacagaatcactgcaggatgctaggcagcctcctaggacac

SEQ ID NO: 68313 - DNA, 666 bp, Homo sapiens
tctatgtccctccgactagggcagagtttggataagcatcccattccagccctattctctggttaccttgcgcttttcatggttgacaggatgggaaccctcccaaacagcaggctgcgccggccctaacttatgtgaccggttgtaaaggagaaaaggctaaatcaatagggttataaaagcacataccatgcagaagttcagagaaagcaacaaggaagaacctgaaaagtcaagagcatcaccattatcagagaagtttcacttctaaccccatttacttagcatactgagctccacctttaccatagtgacctcctggtaagtgggtgccaggagctccccctagagtttaaaatgtgccattgtcaatacctcttaacagcctgggggaaaatgcttgtctggcaggcataaggcccagaggagatgggagttcagaagtctacgtattaggttggtgcaaaagtaattgcggcttttgccattcattttgcaccaagctaatacacaattacaagccaaagtagatatctctccctcttccctaagcacccctccacttgaagtgattttgcccacaccacatttgaacaaactcaaactgcccccttcaaaatgatgggatgggggagtggggaaatggttaagtctgtcagctaagct

SEQ ID NO: 68314 - DNA, 1794 bp, Homo sapiens
acacacacacacacacacacacacacacacacacgtagagtcattcattcactcattcattcatttgataggaagttaagtggcatgtagtagacatctgttgtttgtttttgtcaccccaaatctgtttgcttttctcctgacaacaccattctgactttcttttggggaacatacccttgctcccattctcactccaggttcttcagatggggtgagttcatgggtgggcatgtgactcagcctcggccaattcacacgacatattctcctggccatggtggtgcatcagaggtggcaaactctcaagccaaagccagtgacatgcgaaagaactttcactgagactgttgagacagaggccgtctgccctttcctgctgattataacttggaagaagaaagccctggagatcttggccactgatatggtttagctgtgtccccacccaaatctcatcttgaattgtagctcccacaattctcacatgtcgtgggaggggcccggtggtaggtaattgaatgatgggtctttgccatgctgttcttgtgacagtgaataggtctcatgagatctgatgattttataaaggtgagttccctgcacaagttctctttttgcctgtcaccatgtaagacatgccttttaccttctgccatgattgtgaggcctccccagccacgtggaaccatgagtccattaaacctctttcttttatgaattacccagtcttgtgtatgtctttattaacagtgtgtaaacagactaatagagccaccatctctctaccacatggagctccagaatgaacctgatgtataggaaattaagaaagaggggaagatatgggatccttctgacatttgattctaacccccaccctgaccttttcagatacaggagtctatatattgtcttttattttcttaagacagcttaagttttctggaacttgcttctgaacattctgttacgtcatttttaaatacttgccaattatttttattagttactcatcagggagggaaatcaaaccagctcctgtaaaaagaatggaatttcaactatccagagtctcaaatctaaaaataggtggctaactcatgtcagaagtatgaaccctcagttccactaaatcccaatcttcataagtggaagcccaagaatctctattaaaaaattttaaaagcttgctagtttatgatgtatcctgcttagcacctgttcatggtctatgtcccagagatattttgaatatcacatgtaaaggggaaaggaaataggatatatttttcactttctgtaggccagatattttttgaagtacttcagcatattttcatgtaagatatttaagaaaaacttttgcatgcatttcctcagtgttctaggtataatactttagattactggttgctcagtagggaggaaaaaaaaaaaaaacagccctgatctcaaggagcttatagtctatcgcatccaatagaaatttctgcccttaaatgttccacgtctgccctgtccagtacattaaccatggctattgggtatgagaaatgtggctagtgagaaatggatttttaaattgtattaatttgagtagccatatgtggcttgtggctaccgtattgaaatgtaaaggagtgtacatctaggttatttcttcttaaacttgcatgtgcgtatgaatcatctatagatcctgtgaacctatagatctgatttagtaggatttggtgttggggtggtggttctgcgtttctaacaatctcagaagtggctgatccatggacc

SEQ ID NO: 68315 - DNA, 1283 bp, Homo sapiens
ctaacaaaatagcctcgcacttccctatatttcttcaccgttattgtaaggcttttaaaatcccttctggaaacctcaagtttacacatccctctacttaatttttcattgtttatgtgcttcctgtgacgatagctagacagacaaggctgataaaaaagaaagcttgtccttatcaaagacttacgggtaactgtgttaatgtgccttgctttttctaccagtggaagccccctatttcactaagaactcacccatttgcagcatttaaaatggatggaaagttataagccagccaaaatgtccttctaaaagaatgaaatgaatactaatctaattgcccaagaatgcatatgctgggcttggaaaataagccttctacattggttccccctgctggatttgaggatgcactgtcttggaaattgatgaaagcaatatacctggaccgttttatctgaggacatgttactggaatggcaaatccagcattcttctagaaagcatttgctctgtgataaatgtgccaagtgtttcttgagtttgcttccccagggcagaaatactgcaaatagaaaacagtgccgctgagactcaaagagaaaacaaaagcatgccactcagatgtctgttctagggaggggggtagcacacaaggaactaagggtaaaaacccagaagcagtagactaggtaaactgccagactggttgttactattagaaagctggatttcagggtctgaccatggatttccttcttatgcatttacaactattagaaccaattcctcacctttctgtaatttaactgctgtttttctttcccttcttatcttcctcacttcataagtaatctccctacccctactctgtagaagatgtggtaaccagagtactttcaaaggaagcttgtcacctgcaaacttcatggctattgtgaaatgtgttaaaaggtctgtcttttgagggagacagagaagctggcagatttttcctgcttgactcagagtccatttggtgggaggaaagggacagatattggctaagtttttggcacatgctcctgcaccaacttggccttgttaagacagcaagaacagcagaagtgactatttcctccctagagcaaaggccaatgctgtttccttcatggagaaccagaacagggaaaatatcagataatcatgtagtacttgtaaatatgccatttagaacactgaatttaagtggcatgcagagccaccccaggttctcatattatattcaggccaggtgtggtgtc

SEQ ID NO: 68316 - DNA, 752 bp, Homo sapiens
ttctattaggccagacacttaaaacgcttgcaaaactgtaaaacaattctgctcgttccataaaattgttttgttcggaaaatgttatttaaataaaatatatttttatgttaacaggtaatcagtttattattttaagtgaattaataactaagtacagtatttacatttttttctcaatgttaaactctgtgaaagaaaatgaagtcattaaggctaaggctttaaagaggggttgggagatttcaagaggattgcactcacacctgctaaaggtcaaaccacaggatgttgcaatagactcggaaaacaactgaagtcagtcttcgtctgccttcaacatctctcagctgggaataccctaagtaatcaataagaatgggtttgcaatttaggatttctgaccagccattggactaccttcagaaataacttgtggtggaaatcccctattaaaaaaaacctctctgtgcttaccttatgggacactattcagagctgatctgactcagtttacctaagctgcacatcttggtttcctgaataagtggtatttcctttcacctctgtgtcaattttttgacagtaatatggtgaatattgataaatttaactcatgtaaacaaaagctcattggcatctgcaataatttttaagatagtaaagagtacagtgacaaaaatttggcggcactggaaaagccagcctgccctggtctgcactgcctttgaagttacccagcctccactggt

SEQ ID NO: 68317 - DNA, 754 bp, Homo sapiens
aagggacaaatgtcacagagctgagaagccatctctttcgcatgatcccaagatctccagctatgctttatctccagtaagactgatgagaactagctgcttcaaatacaaatgagagcctccttttatcaatctggcaaggtaaattcttgtaaaggtgggcattctccttcaccaaggacaaaacaaaggggaaagaacttcaagtgcaactgcagggatttaggctgaatgtcgagcaaaacctctgtgagtaaatgttatctaccagctggggactgagccaaagcaaaggtcagcggccatctctttcagagagggaatggtgcctaccagattcagttgagagacaaagtcaacatcagttgccaagagcctctgcttggcagccaaagtccagaagatcagtgacaaggagaccaaaggagaaaacatagggagccatggagcagccacacagtgccctccacagcacctcttccttaccctttcacctctctccatcccgatcattcctgggataatcaattagagatgcgaaaaatattgcagttctcaggggaatatcttagggtggattttcaacaacacaacctatgatggtgtagctaaagaaaaaccttggcctctctacctcttccctctccctctctttctccctctctctcccccatcctttcttatcccaggcccatgatacccaagagacaacagaacagattcgtgaaatcaatcacacgggtgaattgcccat

SEQ ID NO: 68318 - DNA, 3332 bp, Homo sapiens
tctcaaataaagcaaaagtgagttataactgtatttcactgtgggcctgggctgtgatttccaccccagggaaagaaggagagagagagagagagagagcgagagagagagagacagagacagagagagagagagagagagagacagagagagagagaagcagaaagagagagagagagagagagagagagagtatagggagacagggataggaggaatagagaaagagaaaggggggaaatattcttatccctctacagacttggctacaggacatggatgtggataaggcccttctcttttcagcccaaaactttgagtgcccaacagtttctttagggctcagcacaattcagataaaagatgggctggaggcagtatgaatgttacctatatgttctttgcctttatagttgatggcacatgtgtatacttttaaccgataactttctcttagagtgttgaatgtgcatttcactgtgatcaacaaactcaaaaaatgaccttgcattgagaaggctaaacggtctccccaactgaggtttgacaaatacttgagcaaaacctctatttctgcacttctcaaggagcttggagcactgggaaatttttaatgaggagtgttatctggactattctcactggtgtgctggtaaataacagtagctttccagggtggggctggggagtcctgatttgtagcatttgccaatttctatggtttaaatagtcctcccatgactaatttcaagctactaatggctcacaaatttcctcaaaattcaacagtcagctctcatgagtcagaatgaactggctcacaccactgaatctattctcatctacctgtgacaaaagaaaatgtaactgttggtcacctgagtattccccctccctattttttttaatgaaatgtcctttttccatcacagccattgcatttgcaagggtcagcccatggcattatccagtagaagcttttactcagggctcaaacaagtagtatggagacccatgaaaagccacccaggccttcctcttgccaattccctttgatttattaaatgcaatgttacccatatggccatgccacaatttggccagtagctctagtttcaaatagattctcaaaattcagagcacaaaattcgtgtgtttgagacttcttctgtcttctttcatcagaggcacctggaagtaatgtgaggatttgtctatggaatggaagaggggcacacatgggaacacagtgggaggaccccaggcctgccttgcctccacctttgagcttgttcatcctcatcctcttttcaaccagtgtagagaggacgagagacagaaaagaatctggggaacctactatcgcatataaacaacttcttttcataattctaacaaaagaggaaactattttcaaaactgggaacccagtattcctttggatcaatatttattctcatttttatgttaaaaaataggggagcaggttcccgggcttcagtttttgtccaggtgactgaatattttctcctttcctttttcaactttttaaagctatgaccaacttgttcttgaccaattgatagggaagtttgtggaaggcagggcagtgacctcatttgctcatagctattgatcgactttaacttgtcctcttgtctttcctataccctctgagtattcagggctggcaatgtggcctttcagtcctggaggctcatagccatgatcatcattaatctgatacctcaaatgccacttctgatgcaaattactttttatatgtgtattggtggacatcagagctgaaaagaagtgtaaaaggaattattaagcaagataatttggctaacacattcctacactgacaccagagtgtcacgttccacacaggagccaagcaaagagcttgggttgtttccacgggataaccagagtctgtgtttgagaagtgttaaatctgatgtgtcgggaccagttcttcttccctggcatgtttttgaggaggtagaacaaaggcccacccaacatgaacaaagagaagaagcccacccagaagaatgcagtcacaaggagccgaaagaaaacactcttctgttgacatttcttctgaaaatcttcatggagtgtagacttggggaaattaccttaaaaatttaataagtctagaaaaggagttatcagaaataaaaatcaggaatctcagcttgtctcttggagaccaaagtctgtctttgaggatgggctctgagttcccatggacatcacctcccacaatgcatgcagcgggcaacatgcttctggctagctttgctgctttctgattaataccataagaaaggaaacatttctccctggaacaactttgtcatcgccttcccttttgaagattttatcaaagcaaacaaagcaaagcaaagctacctctggtgcatcacattgaaggtggtctgaacaaaggaagctgaaagatacagttcatgggctctaaaggccaccctcctgaagcaacccggctcttcctgtttgcctttctcactcgctgctgccagctgggaaactttgccctgtctgggctggttcactcagatttccctgaacatgccctaggatttcagctggagttcactgttccctctccatgttttgttgaaaatgcccttctctgagtatttgtacttaacgcctgcctcacctttgaggttcagctaatgtcccacaattcatgaagctctctcttctgttttttcctggtctgaacatcttcccatcccacaactttttgcctcctaggatttcccctctggctattccccctcagtttcccagccatgttataagcattcctaggtcaggctgggcatagcggcctgtcatccagtgcttcgggaagccaaagtgggaggatagcttgaggccaggaattcgaaactagcctgggcaacataccaagacactttgtctacaaaaaacttagctggacttggtggcatgtgcttatagtaccagctactcaagaggatggcttgagcccaagagtttgaggttttagtgaaccatgatcacacaactgcacttaagccggtgtgataaagtgaaaccctgtctctaaaaaaaataacaatccttaggccctaggtcagaaaccagatcctaatgtatatttttatattctcaacaacctagaaaaatatcgagttcataagaaatgctcagcaaatcttcctacagtggggagataaaaacattgagggtcagagaggttaaaaacattctccaaagatggaaagttaataaatgacagagccggtattcaaatccatattctccaa

SEQ ID NO: 68319 - DNA, 646 bp, Homo sapiens
tgactgctggtatctttataaaggtctgagaacttgtggtaaaaatatcccagtccattgtttccttctgttctgatatttaccagtgactccgatgagctcatttttttagcatccaactcttcctcaccttgctgctcactataaaactcagacgccagtacgctctgcggggcactgcaggatgctctctcctcatgggaaatgccttcagacagaaccaagcagagcaccttgccttgcctggcctgcttgcctccgctatttatagacacttcttgggacgtatgttgcagcaaagtccaactggacttgactctcaagccatgtttatctttatgagtcatcagctcactgaaattttctgactgactctgaaaatcttctgcatcatcggtgttactttcgttaagaaaagagattttaggtagattaaaacattttggttcaaaatggccagcatgctcaggatgaccatatttgttttcactgtcctggaatacctcgggtactgaggactgatccctctgctggtgagttctctcttgtgatgctgaggaagttgttttagggcctgagacgctccacagcatgggatgatcccagtggtcgttctgatccacctccctcctctcctctttaatga

SEQ ID NO: 68320 - DNA, 508 bp, Homo sapiens
caattatagggagataatacttgcataaaatacagaaactatacattaatatacttaatcaacactgtggctggggatggctgccagttgttctccacaaaagaattttcccaaaagcctaggccttcctttacagagtcccaaactgttttctcaaatgtaattatattcaagggcaattttccaaaagtagcagcacacttccccgggctgtggagtacagcacactgtctcctctccctgggtctctgagtcatcatttggacctcagatgactcaagtgtaacagaactcagtccaggtctttggtggggcctctgaaggccatgtggaggctgctttcatcctccaccaaggagttatcaaagtgcttggatttgtttaaattattctactttaaaaatcagcaggttgtcactaatgtaagctatcttgggcctgctcctcagagctcctatctcttctaattggatttttgctaatctcctgtgggttaggaaacttaaat

SEQ ID NO: 68321 - DNA, 1328 bp, Homo sapiens
ttactcttaagtttcagaaatatttttcttcatctcgaactgaatattcttcaaagaatttagcatttgtaaaagttcccatagagtgcctgaacctaaagttatttaacaagcactgacataagagtatttagtgtgccaggcactgctttcaaagctttcacaaagaactcattttattctcataacaacccgatgagttaggtactattatccccattttacccatcaggaagctgaagtgcagggaggttaagtcacccaaggtcatacagccagcaaccagcagagccagcactggattacatagaatttggttccagagttcatgtccttaactgatattctccaccacttctcaaccactaactgtgacagtacattctttctgtttctgtgtaaacaaggaaggagctgggagaaattcgatctgaatatctatgaagattcttggctccacagatcagccgggaaccaacgcagaggttacttggctagagtggacgttaccaaatgtacaacgaaggatgacagaaataattgtacaaggaattgtacattttaattctcttaagaacttccacagttgaagatgaggaaaatgagaggtaaaagaagaaatgatattacaagaaaagtcttttaagtggcaaatacaagtaaatgacacaaaaagctttctaatagcaagctaatcaaaatgactacctaagacccaattttcaaaaaccttttagctgtaagatattaccctggtactctgctcttgaagcaagattagaaaaattatttaaaagaactccagaaatgtgaagatgcattttcatctttctgcagcaattctcaaactagctacaagaagacattccagctgaatgattacttatactaaattctgcacaatttatctctcacacagattctgcatccagtaattatcagcaaccaggcccaattccatggtattgacagtggtatctgtcacgtcttcagacaactccactaccaagggccctgcaacaaatacaaacaggcagagcgtgttttcctatctacagtgacatctagtgttaagaaactaaaacgcagtctgtagaacaacatttattcccattactattgtatttaaatgcatattataaaacaggaatatatatatagctcttaaggtaaacagcttttcccataattgggattgccaattgtcaattgtattatactccaatatttaaaatatctcataagattaacccattgaaaagacacatttgttttgttaaagtgaagaaatcattttgttctccaatagttttgttttaaatgcaaac

SEQ ID NO: 68322 - DNA, 725 bp, Homo sapiens
cttcaaggattaccaaacatgatcctcttcattaaaaatggaaaaaaatataggggcaaagcttatttaatgttcacagaacacagtcaattgccaggctaagtccctactacgaggacacaggatgaaaatgcccgaatctgggatagactcaggagctcctggaccagagcaacagcttggatttggcttccagatcaaataaagccaggaatgggaaaggaaacgggatcaactcttctgcttcaagactgagcccaagccaggtgcaagctgacgtggctaactgcactggaaaggagggtgtggaaacagcagacaggctttatttactcattagtcatccccacagtaaagcaatcatggggctcttggaacttaagcaaggccaggtcatgacttgcctttaagtttgtgattgtcgttttgcttttctccatctgaataatgaacttggcctccaagtccttttccctgcaatacaaataattcagtagtggttagaagagaaaagattattaaaaacaaaacaaaactaaacccatttgttttatttactttttacgttaggagtttattttcaaatggcatctgaggagcaatcccagacacggctcctcccaaatccttactaatataacatgaagatacgcaaaatgatgccaccatcaacaattatggctgatacacagtgtgttgttaaaccctgaaagaatttccaattg

SEQ ID NO: 68323 - DNA, 1327 bp, Homo sapiens
actcatcaagggcttccacagttagatgcagatgtattcgcctccctaccccaagcccagaaagcaagcaacccaagtcttcagtaacacctgcaccctcagtacccagcaaagtggcagaagctccataagtttgtgtcacctcacctgtctcagggcctgaagacaaactcagggagggctagtctcctccccgaaaccatgtcttcctgctgttccttatcctttcctattagaaaaagaaatctgtgcacagcctgtgactccaaccactcctcgctgttctccatgaaatcatgaaagcctccatctcaagtttttgagaaacacccagggaacacagatagtaaaaaattctggaatgggtttttcaggcaatcaccctgacttcattttggcttctgagaacacagctcaccacacagcagtcagctagaggtcagtggcaccatgacctacatccaaatgccaacctcgagcggcagcttgtgagaaactggcacagcctccactccgtcccccatgggctgccagtacggaagtacggatgagccaaggacaacgatgctatcacagccttatgagtctcccatgctaagtgaaatcctcacttgacctctgtctgccacaacaggaggccattaagctgagcctttcattgtcttccctggcctagggaaacagtaataaacctaaaaaattaggcaaagcaccaactcttacggtttacaggttgggatcccagagaagcagacatctgtgggagtatagcaagcagggtgttcattaagttatgtctttgggatcaactcctgggaaaagaaggagactgaggcaggcccaggcagagggagaagtggagctgcagcaccgacccatggacagccttggccaactccacaggcagtcctggggctagcgtggcccttcagagttgccacaggttgggcacagatggccaggcttttatacccctgctttgagcaatcagggactgtgggctgcggtggaaagagctggcagctgaaggctgggccaaccatgctgcagcaacaagccctcaaagacagaggatctgggtggcaagcacggtgcctactgtaccaacctcccctttaaaatgatgctttataggatgcaccacacccaagtggcagcattcaccactacaccaactccccagcagaggcagagaggcctgagctggggctaccgagctagacagaaggcagatactttatttttttcagctgaaaggagaatagcctaacaatcagaagtgcctcagtacaaaatgagttaccttaagatgtgcagaaccattact

SEQ ID NO: 68324 - DNA, 2118 bp, Homo sapiens
ccttagagcaaaaaagtcaaactcttactctaaacagctttagaaataactcaaaagtcacaaaaagcagattctgaaaacactgggttttaatgattacaaaccaaaataatgattccctacttgccaagagaagaaacagatttagatgagtcaaataaggttctggaaatcttttgattttatggccttcggctgccccaatcaggcatcagaactaccaaacattaacctccacaagttgatatgacaaaagcaaaaaggccctatggtaagtcaaatatccaccaacttggtagagaagtcaataaaatcaaatggctctgtgtgaaccttgcctgtcaccttggaggacacatcccatttctacctcattctttgaagtcaaaccaatttaaaaagtaacttttccaaagaaactttctaaacggattaaaaagaggtcattgaaaagggagcacaggctatttttcagtgaatgaagagaaggattctgaaaaagcattacttcgtagaaatatataacaagattaaattttgtgtgtaacactcttcctctctcttaatatcagagtatttcaaacacgtgtaaagcgtccctgacttttttctaggagtcaggactttgtcaaagttttcccatccactctctaacatgaagttaggaactgctaagttatcgattagacattcagggaatcaaaatcatctctaactgaaagattaaaaagtagcatggttaattgttaagagaacttctgagttggtagaaatgaggggttcacctgacagttcgtggtgccccccctcagcactctcaccttccccccaactattttacatcttcatggtaacgttcccttgatgcttttttaaagggggaacaagaacatctcaagttaatacgatggagagagttaatagaatcttctcctttaccaccagggtcctctccagggcaatgtgaacgggacagcagtgcacgaagtcctccaggcccccagaggccacagcctgggcccggtgggccagggaccagccggtgacacttttaagtccaggctggctttgggggagctggaaacaggcttcctctgggtgggggcgcgacgagggggcggggcgcgggcggccccactcacctgcgattcatgggccggaccctcacggccaccttgaccgatgccatcgctcatcccgaaccagcccgcgcggggtcccactagcccagaactccgcggtcgccggcgacgctggctactcagatcgcggctcccgcccacttccctctcgcccccgcccctctgctcccggccggacctggagttccgcggcagccccacctgccaggccactgagcatgcccagaacggctccggcccgcgtgatccatgcgccacggtttggcggcggccgggcggtgcagaggggcggggccgcggggcctggaagcagcctccgggatctgcaagtctggaaaggccacgttgtggaccttggcgcagaggttatgggggcgacccggagcggatggtttcaggaaaactagaacccaccctcatggcctgaacaactggagagaagaggatcgcagcaatttaaagccagcggcaaggatcacagtcctggggtcaggtgaccaaagccagtttttcagcccttaacaagaacctggcttcacccagccaaacatgagttaacgtatccattttacacacgaacaaactgaggcgcagagatgatcacagcttgttggtggcaaactccgctagggccttctctgctaccctaaggaggtccgaccgtatgttttggaccccttaactcgggataccgataaacgaaaattaatagggtgttggatgttttaaatgtgtgcgggaatgtcattatattggctagaatcaaaccttatttagacttgttttgcacttttgtacactttagtaatttttagttttaatcataagggagttaaaggcgaacacaactggtatttttttttttttttttttttttttgagacagggtctcgctcggtcacccaggctggagtgtaatgctgcgatctcggctcactgcaacgtccgcctcccgggttcaagagattctcctgcc

SEQ ID NO: 68325 - DNA, 1150 bp, Homo sapiens
ccaagctataatgggagacgcaaggaatggaggcggaactcctgtttttaagtcctagctccaacactagccttgtcagcctgtaattctgaattactgggcgcctctgaggcttcttgtctcatctgcaaatcaggaacaacggcatagagtggtgaatgcatcaagtgggatgatgtctgcaagtacgcaacccgcttacacaaagaattatctttccataaccttccctggacccctagggccagcagggaatcatagcctccctttgtttctagagcccggaaatcactgggttttccctctgtctggagcagagctgggtgcgaatttgaccaacgggtggcaggaacagccggagcaggatattaaggagcgggcgagcttgccaagcatgcgcagtagcggcgggttggtttgagaagccgccagggagccagcgcggcgacctagctggctggggcaggggaggggcccgccttatatgggagctgcgtggggacaaactgttcgggcccaacgcgcgggtctgagagacagccacgcctgctccgggtcactccggccacctggggggcgtcggcgcgcagactctggccagttcagtattcaaactcttcaggagtgctaacttactcatgacagcgattttctgtatcggggtttcattggtcggtggtttagaaggttttgctcattcattcgttaatgtaattccaacaacctacacgtgtttataagccccctttccatccacgactttgctgtctgacacaaaacggaccatcgcagcccggcagacgctttagacaacaaacagcatgcctggagcttttcaataggaagcagtaaggcttgatcatcacagacgatacggaacgggcactttcttagcagaaaatatttctattggggcgtgaaggaagtttctgaaagggaagattattataagataaggggtttgctcatctcagactttagtgtgcctgctttaaagtgttttgcaaacttgaatgtttaaaggaatcacctggcggtcttgtgaaactgcagcttctaatgggcaagtcagaggggaagcctgagacatggcatttccagcacgttcggggagtgaagatgctgtcggctgccaccctccctgcaagga

SEQ ID NO: 68326 - DNA, 736 bp, Homo sapiens
ttctggtctattttgtcccttttttttttttgttactttaaccaggccataacataaaggttatgccatttgttactgtcaagcttaattaagcccattataattcgttaacccctgtgcttgctttgtaattaacattgattaacacaaacaagtacaaaataggccatcagcactttccagaagtgctgattacaattacattggtaattcaatacggtatagaagatggcaggatagtaacttgcactctgtttacataaggagacaaatgctaccatgcaaaactaagccaagaaacaaaatactttcctcatccaactcactgattaaacccttaccctgttaactcaccctatgactgtgtaaacctccagtaagattattgaaggcacagctccaagtaacttgcttaattgcattcctgggacaaaagagggaagcgcttcaaagctgacagacagatggtagagtgtccagtcacagcaaagcaggccccgaggctcatgacagacaactccagggctgagatctcatttgtagctctgggataaagtccagggtttgatggcagcaggctgaagtgtaaagatgctcaacaatgcgcaccccagagacactgaatctgaaaaagcttagagtgaataaaaatctggaaatgaactctgtctgtctattcaccattccccccataaaaaaattcctatattccggatggtgttcaagttccctttcc

SEQ ID NO: 68327 - DNA, 1016 bp, Homo sapiens
tcacagacaaggaaactcacacatggacagacagagaaagagagacaggaagaggagagaaagaatataacaaagcgctagcatgaatgcaagtagagagaaagtcaatgttttaaaggcaacgagacgttgtcttctgagtctccccagctcaccactccctacaaggctctcagtcctacgggatttacattggggtctttccaaatggcaggctaggtctcaaaacatttccagtgtcaatttgagaaagaacaaatattcataccagatagagagggaaagaacctgctctcttttacatctagagctgcccttgaaaatgtgagtttattaacctcgaaagaggccggggaaagtagaaagggctctgaggacaaagttcagccaagagagacgttgggggcaggttttattggtcatataacctcttcctgcgggaattttatgaggcgctgtcaggcagcagaagccgcctgactgctgggtatcggaggggctaggtttgaaagcatattttctgtagggtcttgatgtatttttaagaaggcaggcaggaattatgtattcctcctggtataggatttctcatttttcttccagcagaagtgggaatggattgctctgagatttgcaagcttcctgtgcattcgggagggtggcagttagaatgacagtaatgacttaggtctcctctgagggtggttccttcattactgggcccctccactgctccccttccccctctgttagtcacagctgtacaccctgcagctagcctgtctctttctgggacagcctgtcagccacacctgctactgccccaaatggggcactagagactgtggggcaaaccctacaggattcctttctccttttaccctggcagcacatgtgcatacacacatcttgtacacgcagacatacaagagaacttgcatttcaaagaacactgtgagcaatttgagaaatgaatagtgaatcctgaaaagggaggtgaggaaatggggagagcc

SEQ ID NO: 68328 - DNA, 1736 bp, Homo sapiens
catgcactttgggaactcccattcagcttggcataaatactaactccttagaataccctagaaaaatctagaccttttgttggaagaaaagagtgggaagggtggtagggaattattttttcgagtgaattgaggcagatgatcttacagatgactgggttctagtcagcatggttgccttatctggtgagagatgagaattgggcagacaccagttctgtctgccctgggccctcaaactgagtagcctctgagattcaagttcatcagcacagtgttggaggacagttcctgcagagccccatgaatcagaggagactcggaggcaggaggaactggctatcctaaaggtgattttaaaccggggtagctagagcccaaagaagggcgaaaccaggactaactgccccatagcatgaggggcagcgcctgtaaaattacataggatttgtaaaggtggaaggcactgttgcgccgggtaaagcttcgcaaggtcgtggtaggggaaatgattcactccccttcactattccctcgcagcatggtcctcacaacccccttctctttccccatttccatttccggactcttctcctgcccgcagggcagacgcacgcgcagagagattgccagccctggctgccagagacccggaagcatcgatcggctctgtgctcggcttctagacttgtcggcgctcgattgaggagcgtggctacgttgcttccggtgcctggctccgtttcctgcttttggttcttacagtagtcggcgtaggccttaggtgggttcgtgcgccttctacctcgctgtttcggttttcctggctcctcggcccttttctcccctgttgcagctgggagcggacgaagcgcgaagctggggtgggtacgcgtttggcccgggtttggatctcggaggggcaggcttgggggtgaggagactgactctggggccgggcatcgcgtggcagctcccttggacttcgttagggggccttgggcgaaggtgcttgtgtctggagaggcgggaggcttgcgcgtacgaagtaaaggatagttaatgtcagtctgctcgtgcgaggcgtggacagttcactgcgctttcaggtgtcttccagcggctcccttttggtggtggcgggtaattcagggtgtccctgtaacaacgcagcccacgatcaaacctcgcatgaaaccctgcaagagcctcccctttgtccccctaccttcactttgacctctgcctcagtcacttccctttcgtcgtctcctttgcgacccctgccccttctccagatttcgatttagggggtcgcaaggctttgagaagcgttacgttttacctgttacctgcacaagtgcagcccctgcttgtaggctcttcccttgtcaatcatccaatgcagttcacatacagtggatgctctgtaaatactgtgagataaaggaatatgtggggcacacaaggaaatcatccaagttcacaatttgcaagtaaaaaccatgtaaaaaatgcaatagtgtggtatatgaggaagacaagtgtagaggagaaagcaagggctgaatttccaggcctgatgcttattagctgtgtgaccttaggcaagttccttacctggtaatagctgttaataatagctactcttaagtgtttaccgctgatgcagaactgtgctagaattcatttagtcttctgagttctattgggtaggttctgttaccattcttatt

SEQ ID NO: 68329 - DNA, 1469 bp, Homo sapiens
ctttcaggggtagtggaaatatctcacttgttttcgtggtaacacgggtatatacatttgtcaaaactcactgaactatgcacttcaaatctgtgcattttataacatgtaagttataccaaaatttaaaaatagatgaaaagtaaatgatacaacttcgtgtaaactgtgacgtgccatcaaaacagaagccagtcttagcttaaggaaatgtgccacctgcgtgcagggatgaggtcatcgatcgacaggggaccagagacggcgctccacccctgcatggtagcagcgtgctcccagccccgcgccgccgggacggcccacgccctgcctcggtttcccccgatggccgccgcttacttgcttcggaactcgtcgagcgcgcgctgcgcctcggtgccctggcgctccagccgggcgcgctcggcctccaggtcccggacgcgctggcggttgctctcgacttggcgggcgagggcgtcctcgggcccggccagctcgcccaggcgctggaaggcatccagctgcctccggagcccggcatggcgctgctcgagggcgcgggcccgctggacgtgggcggccacgcgctcgccgagcccctgcagcgccgccaggctcgttgccccagcccagccctcgtcggccgggcgctcgggctcggcggcgcgcgaagcctcgtcggcgtgctcgtactgctccttgcgggtctggaagacgtagctgcgccggtacatggctgctctggcgcgggcgcgcgggcggcgccgagccggctctccaggaggcccccggcgcagcccgcagcccgctaaataaacaccggaggcccccggcgcgctgctgggacgttccagagccgatcagcagttgggcgccacgctgggcccgggcgcgggagaagaaaagagcagcggcccgctttgtgcggcggattagcggcccatacagctccggggttggaaggttacgctgggcaatgaggtttttgttccgtgattgttcaggcctgttgcttttgattgaatggagggtcaggggacacgggagccatgacgctcttttcactggttccactggggactgtgaaggaatccccaagcgaactctttaaacttggactagctcaagagcccagggcttgtcactttgtctcctcttgcattcaaactcaattgtagaactctttaacaatgccattttttttttctgattacttaagcaattcttttttttttcttttggtcttttttatttccaattgctcggttatgcatgcaattctttttcataatcataacatgacgtttaggacccttctgtatagcagaggttcttaaccatggatgcaaaataaaatggcatgtctccattaagtagtgaggtgtggcgcaagtaatttcttagtaatacccgtgcataaaagcctacaataacttaggagacatgcacggttatgtttttataat

SEQ ID NO: 68330 - DNA, 939 bp, Homo sapiens
catggtcaaatttagtagcagtccaaaattgaaatttactttgctgtctgctatgatggctaggtttacattgtctgtcatcattagaggaaatatatagggacagaacaaaaatacatttattaagaaagagaacagtgcaccagtcagcagaaagactatagttataagacacatgaaaagaaaaagttaattccttggaaaagagctttctattttaagaagatgaacaaaataagagaggtccttaagtgatagctaatgaagacacttcccaggcatcctcaatggctgtggcttttcagatgtcaaccgaaaacaaaatccattacaaagcgtagcatccaagttggatatgggttgcttattttgttctgtggtcagcctttgctgaacatagcagtctaaaccagagccacagagctgtgagtggtccttgtctgtaaaatgcacttggactgtcctcggtgaccctaattgcatgacttggcaagaacaacaattaaataggatattttggaccaaattctctcagagtacattattttctcaaggtaacctgagttttggggtgacacacacagtgtaaccaaaagtgccactttgcgagggtttgctaactgatgtcctcgtaacctccaaaatcaatttcagggcattgcagagtcaacacatcaatgttcccctgcctgcatttggggcacttgctggctgagtcacctgcaggagtgttctggagttgcctcttagtagatcatgagagccaattgctaaattttcaggaattttgcaagctggttgacacctcatcggtagcttgaaattggaaacggtgagagtatctacaccacaagaatgataaacactacaaaggaagacatttctctcctagaaagtcagctgttggccaagcattgtggctcatgcctgtaatccctg

SEQ ID NO: 68331 - DNA, 1618 bp, Homo sapiens
cattatttgtggctcacattctctaaacttcatctgaaaagctgatattccagattccttacatctctccaagatggctagcatcttatacacacaaagatgggggggggttttactcagcaagaaaaatatttattttcctttttttttttaggagaaaaatacttgtctcttcaacctcattaatttttatgatgcgtaaaattttttcattacattagccaaaaagactctggactgaataaagtatagcacccaaaccatttaaaatggcttcctgactgggaagacactgcagtcatctcagggaagtttctggccttgggaaaaacaaatggaactttggccgttcaagaagggaaactcaagaatccaggccttgcgtgctgctcttttttctctgaaagcttttggaagtggagccacactttatttaccgaatatgcacttcttgtttcttgtaaccatggtgctttagttgagtgtgtcttatgtcagactactactgagccaatatttatcattttagaaatttccatgagtcataaaacaaatgtgcaacccgcttgctgtaccttctacgggagtttctttcctagagttctttaaagcaaaaagaaaaaatgctaaacctagaatccaacacttgccgtttatcagaacacttacatactttctccagcatggaggctccttctgtgaaatttgaaaatccattcagctcacatccaaggtgtgctgcctgctgcctgaggtaccctgcctacccaggactccaaaaccctctccagagggccaggtctgggctgagaaagaaaggaggctttagaggtttgcagagaggaagtgactcactggctcaaggggtgggagggaaggctttccacaggatagagaatataaatgagcaagcaattccttccacttccagcatggaaaattttactaggggaccacctcttaatgactgggcctgaatttagtgaccactcacctccactcccccttccaaaaagaagagtaaagaaaaaaaaaaaagcaggaccaattgcaagatgtgatgttgtttgcctcatttacacgtaaggatgttgaagctaatgctgtttgatctcttgtgtcaatcagctccctttgcccagacatggatagttgggagaaccacattaagtctacaatctagaaaactacagcaatttattgcttttgccattaaaaaacaacaacaacaacaacaacaaaaacaagtcctctagagccctgttttgtctagagcccaaggcctagagtttataaatcaaaatttaagagactgcgttagtattactagaacaggatacttcacgaattgctaagactgtgccaggcactcagtatctcttctgtggagtgcaagcatcaccttttagagttaaaagggtcaaattagtcaacatcttgagtttacaggtgaggacaaggagtcccaaaggggtgcaccttgcagaggtcctatggctacttaacagtagggctaggcaagactagaatttgtgtcatccagagcacgagtccccacccctgggccatgaaccagtattggtctgtggcctgttaggaatgcggcgagtgagcatga

SEQ ID NO: 68332 - DNA, 796 bp, Homo sapiens
ctaagagggactaagaaccactggttgagataattgtactactttgtactccattttctcactgtttaactcaagaagcatgctattatctgaaaaacatacataattggtcaacctttaatgttataaaatagtggtatatgatttttactctaccataacgactaatagagaaatcaataatgtcaccatgtggtactgtatccttcccacaaatatacttaaacatatttagccttttcctaaaatagatgccagggcccttggggctgtctgatccatcagcaccaggctatgggcagtaaggaatgttcagaatgtattttctacagcttctatttgttttactttgccaattaacctcctctgtggtgttaagcaagcaacaagacatacctcatttctcttgttcagcctcactcacaagtgctgtgtcatgcggcctgttggtaaagggcttgggatcagatcctgtactcctctgggctcccaaggaacgtctcttcaccttaccccatctgtgggatgaggccagtgataatatctaactgtggcagtcactactggttatctcccaatatccattttctccttcttccttagtaaaggaacaatagtgtcttagctgagcacactgctagtcagagaacagaccatgtttcccagcttcccttgcagccatatgactaagttctggtcaatgagataaaaggagaaatcctatatagtacagggtatgtggtctagaaatatggtatatgtttctggaacccaccctccctccctccctcccttc

SEQ ID NO: 68333 - DNA, 3461 bp, Homo sapiens
tggagcaagcaggcaggcatgtatccttaaatgagcaccattcacttttggactagaaaggaagtctgaatattaagaagtgtaagggccacagggtcctaggcaggcagaaaagcaaagggttccagctgcaggaggatacaggggggttccttctcagttcaggagtgtggtctcggactggcatcttcagcatcacctaggagttgttagaaatgcccattctcaagcatcatcttagaagcagtgagggaaccttggggatggggcacacaaatctagctttgaacaacttttccaggtgattctgatgcatgctaaagaaccactgctctagcccgccaaaaatcatgtctcaggtggtaaaggcttagaactgcacaacttactgtcttttttaaaaagaacgagggtaatgagaaatgggttcctatgttgagtggggcagaacaaaagccacatacaacctagattttacgtagtgccggaaaaaaaaatactgaccatcttgtccaaaagtctcatatttggagaattaaaatagttttggtcgaggccatgatgttctcggtaacctaaattaatttataaaattctttgttccctttatttcccacaaaaacacccgcagcaaaaacgctgggattcatctgggccctctgaaaaccgtgtttccgacgcaaccgcccattagaaaaacacaattccaaattaaaaacccggagaactgagcggcggggctggcgccaccgtcccgggacagcgcggcctttcccagccacacccctgcgcgccgccggcctccttccccggcagttcccaaagataaataaatgctccttgtttttccagacctgaaattaacggtgactcacagagcactctgcatggccacggtcgcctcgggaaggaggaaaaatgtgcagacttttttcccctcacgcgagggcaggacaagccagactgggccaatcaggggagggcggcgggaatcgcaccaaagtaggtaaaaaatgcgggaggcgtccccgctgccgcggcccgcgactccgctcccgtgggtcctcccccagtgcgttccccctcctcgggccctgccctcccaacccccaacatctctctccttccaccactgtgtccctctccctcacctctccccttgcccccacctcccccactaagtgccccctcgcccctccccccacatccccctcctctccccacactgtcccctctccctcacctcttccctcccctctccatcctcctcctcccccaactatgtgcccctcgcctctcccctccaaatccccctccttcccacactctgtacccctctcccccggctctcccctccttttcccctccacggcctcgccccgccccagcggcaggcacacctggccaggtggctgcctccccgcgcgggccatgcctgcacagtgggtggggcgtcaggtggccccgccgaggaggcgaaggaaggccacccctcccccatcatcttttgcccgcccctcgccagcaggagccagcccagtccgccttctagcctcctgcagaccagagaggacgcacccccacccctaaacactttctggtgaggcggaccctgccccgcagccttcagcagatgagggaagctcccctccgagactctggatagccgccgggggggcgttgcctggccggctggttgcgtagcaacggcaggcggtgcgtgacgtgcgcagccgcgttccgtcctgaggcgcgcccgccccggggtaagctcgcgccgccgcgtcagctcagcgctgggtctctcggtcccgcagccgtgaggaggacggtctgcatactcgctgcccgccggctccctcccccgcgtccctgcgaccgccgcggcgaagatggtgagtaggagggaggccgaggcgtgggccgaggcggccgggagcagtgtgtctctggggcgccgcggagtcggggctaagggggtgagccgtgcctcagcccggggagggacccggtccggctgcagtgtccgggctgcgggtgagggggggtctctgggcctccgtctcccgccgtcctggctgggcccccgcgccccggggtggatccgcggctgttgcgcagctcccagctggggcgaggccgccgccctgagcgtggcctctgcgggtgtctccagacccggccttgcaacaactggctggggtcgagcgcccccacccgctctgtgaaatccatccgggggtctgcacaccgaggccggggagtggggggcggggggcgtcggaatccggccaccgtccttgttggcgtgggtttccccagagctggcgctgaggcgcttggtgacttgtgcgcgttccagcccttgaggtctgtccatctcaataaggaagataaagcctttatggaacagtcctagagcacggaatgatcgctaacgagcaggatcctggcatgatttagaacggggtggccttgcagctcctttgtttttttctttttatctggcaatcggcttccagcagcactctcgtcgtgcttgtcaagcttggcagtgtctgttttaacccttccctgcccgatctgtccgtgtatggttagaattttttttctgacctgtagacagttggactctgccagaacttggtgcgcaaggtgtgggcatgatgctgggatgctgatacaaccaaatttaagagctttaaaaaccattaaaatactggagtcaccagaaagtaaacaggtgctcattagtatattctatatgatggacattttgcttaatttacatattttccccctttacactgtcactctaattagctatttaaaaacgtattctcaactgaactatcagttggaacattttgtcgttttcgttagtgtgcacacactgttaccatttttggtcagtgatttgcaggcgtagccttaccagactttgctagaaatattacactgtaattgcatctgtctagaagcagttggtaccagcttatctgcatacaaactgttttcactgtataacagttttggttttcttaagttactacaacttccgtgaacatgcaggcggccccttagtgaaagaaaagataaaccggtagtttcttgatgactgtagatatgtatgtaatagggatttgatactgttcagtttttggttcttctttggtttaatgctgtaagctacaaagtatcagcatcttgagtctttttaatatctaattattagaaatttaataacattttaaatgtatatgctactttatactgaaagacttaatctaggggctttgagttatggtacgcttaagaccattcactctgtgaaagtgctttgaagctgactagggtctgctctagagacttctgatttgacattatgcttttttattgagtggctaatacagactttatttttctgtttgaaaataagagaccaaacattttacctttag

SEQ ID NO: 68334 - DNA, 718 bp, Homo sapiens
gggaggtgcttctttggtgacgagggtcaggacaagggaactttgtgaactgatggcctaggacacatctgaccgtgtgcgagggaatgcaggacaccctccatgcctcccccacctactgctgcatggacccctagccacggcggccaggacctgcctccccagactgtgggcatgtgctacaggaggcgagccccagaagtgatggtcacaaggactccggcccctgactcgagccaccccacccaggtgttggccggccttagcaacagcaaataaacactccccgaacatggcctggcgctggtgctgctgacacggagggaaaacaaggtctggccagcagtgaagtcacctcacagatggaggaaaacaacgctgagacgctgccagctctgccccgacgcctcaaacctgtgctccagcagcaagcctgggttcgccattctgggttgtgcaaccatttttcctgttagagttcctgacctcagcccctaaaatcccttgcttgtacacacagaacctctgaccagtcagtcccttcccacagagagatggacaggtggatggacggacggcaggtggcagggggtgctcccaccctggctgaggccactctggaacgatgtgatcacgaagctctctgcaaggccgccttctttcccgcccaggcctgtcccgtcctctaaatcaccggaggatgggggagggaagggag

SEQ ID NO: 68335 - DNA, 679 bp, Homo sapiens
ctcactctgtcgcctaggctggagtgtagtatgatcttggctcactgcaacctccaccttccaggttcaaatgattctcctgcttcagccacctgagtagccaggactacaggcacatgccaccatgcctggctagtttttgcattctttatagagatggggttttgccatgttgcccaggctggtctcaaactcctgggctcaagcgatccacccgccttggcctcccaaagtgctgggattacagggattagccactgtgcccagcccaaaaaatctagattttagtgaaaaaaaaaaaaaaaattccacttttaaaaggtgactcaattgcttaataacatgaggtcagtgaaacaaattccatgtgaaggccaagttcagctcacacagggcaccagtttggaattcctctcaagacagcctaacagaccttgtttgcttataccctaacagaccttgtttgcttataccttgcccaggatagagaattaaagatttgaattcaagatggtcttttattccaacttttgagtcagcagatgatattcattatcactataaatagtctgtaacttccagtagtcttagtgggcctcctttctgaccagaaagagatcaagtagctgtccatcattcagcttcttcctttaaagttaaactttggttttatattatt

SEQ ID NO: 68336 - DNA, 3817 bp, Homo sapiens
ctcctgaaacaagattttagcaaagaaaaacttgctgtctcaacagaactgttgatcctctatgtgtcattcatctattagttaaaattcccagggctaaaaagacaagaagagtctggggtcccgacacttttaaaaggtgtccctgctacataataaatcaatactccaattcaatcactggcattcaaccatttaaactgagtttgctgctatgtaattattgcagcctgttgagttagggctcatttcattaaagagcataattgctcaaatgtgacttgatttaagatttatttaaaactcttccatcaccaaaaaatactcatataccatgaaccactgtaacttcttaatctctctgtaaatgttcagaggcagattcctaagtatgaaaggtgagagttgttatagtgcctagagctctaaaccctctcctaaaccccaagatccctttctggtttcccctcccccaaccttagcctcctccaggcctccactggcccaagatccctgcaagccggctttgcggtgctccatgtaaaaggaaaacttcacctactaggaggtctgccccggcctttgcttcaacagagagggaaatggcacctccaggacctcagaaccggaagcttctttctggaagggaaagaggttggcatatgatagtgggagtgacctttggcaagttcgtaaacgagtcaagacatcacacagtaagtgacatgctgcagggtcacagatttctctaggtgtcggattaacaggaagttaaatcaaacaaggagtgtgaggagggaggcggggcagtgggagaatgccccccagctgcacagggcggggtaacattcgcagttgttcttcctgggagtgccagacagacgtcctgggtctctggggacacccagttctgaagaggtatctaatgtgagatatgaggccctaccaggcccatttctccaaattcctgaaaatgccatccagatggcccctaccctgaaggttccagcacgcagagtgaatagctgagcagtgacgtgggaggctcctcaggtccctcagagtttcatttccttggtgcttcccagtctctcctaacctctgacctctcagagtaattgccaaattgccttctgtttgtacaaggtcccagcacttcccggcgtggttcccgaccctgtgagtgggtggtgctgtcttcaggccacagataagaaactaggattcagaggggctatgggacctgcgagtaggcggccagtacgtggtccggggtgtagaaccccggctgtgcaacttctgcagccccgcgcccgccgcagtgccggagccaggccccaccttcctcccgtgtccagcaccccccaacaaaagcatcccaactgaacagccaacacttgtggctccttcctacaagtgctgggtctccacagctttcctcgcaaatcgaagctaacaggagccccgatttgcagaccaggaaatggagaccccgaacgaaacaacttggtcggggtcaccctcgccagccggggcactctagagctaaaactcgcgacttatcattcggagaggggtccctgaagcactgcgggcgccccactggaagcgcagaccccggcctgcctcccctaatcagggcgcagcgggagagccggccgggccggggcgggcaccaggccgggtgccagcgcgcttggccggcccggaggtgtccgcttccgcccggggctggcaccgccggcccattcatcgtggccgcgggcggggcgggccgggccccgggcgccctcgtccccccgccgggagccctcgagccaggctccgcgcagcccagccggggaaacggtggccccggccccgccgccagggggagcagggagccgcctcccgcactccgggaagttgccaccgcggccgcccggcgtccgtgccatggacagacccggtccctgcgccgcgagccctgcggccccggcccgccccgtcgggggccgtcccagccccgcgaagcgccagcgggccgcggcccgggaccggcgcgctcggcccgtgggcccccattcaatcccgccctcctcccctcggccggcctccgccgccttccgcccgcaccccacccctccggcccggactccagcccggcaacgtcatccggcggcttcccgaaacttaaccccttcctccgccagctgtgcgccgccccgccccgccccgccgccaactttcttcgcccaacttcggagcgcgctggccggcccgacggccctgccgggagggagggaggcagggagcggtcgccacgtcgcgcccgtctgccgccgcagctccccggacggcgagggccgcggggtccacaccacggggcgcgccctgcctacgccccggtacggcgcttgcccggcacccccgccccgagtccgaccccgaccccgatggtgcacggccgcggcggcaggcggcgggcggcgggcgggccgggggaggggccgccgaggagacgtgtcactcgcggcgcagcgcggccggccccggccccccgacggcccggcccgcgcgcggccgctgcagggcccggccaagtttcttacctgcagccagagacgcgagagggaaagcgagagggcaggagccgccgccttcgcagccgccgcggagccgggagagaggagccggccaagcctccgccaagaaaccgcccccgagcagctgtagacgctgcgaccctgacgccgcccgccccgtctgccgtccgctccggccgctcgctggctgcgtgcgcgcgtgtggagtcgtggcactttctgcctcagagctggcgaacggccccctccgccgggatcgccgcctcctgccttccccacccgggccagccattcatcgagccgcctcttcccattggtccgcaccccgccactctgccggtcgctggccagtcaggacgcgggtggccgagccgcggcggcggccattgggcagagaggagggtctccacctcggccaatgggagaggggaggagctgcggggaggtgaagggggcagggctggggagaggcggggccgagcggcgcggcgctcggccgtgcgcggggcggggcggagcaggaacgccccgcccaccgaggggggggtctccggccagctccgcccactctgggcccgcggcgctcccagcagtctctgactaggatccggctctgcctaggcgggaagcagaaggttcgggtcccggcgaccccgggcctgcgcctctggataccgctgggctgacatggcggtggctgaacagggttgcgcaaccgcgaacagccaaggaagctgctttatttaaacccaactaacttcccccgaagcagcgccccctcgggccgccgggtatgaggacaagctctgctgggggtcagcccagggagagcaagttcttatcatcaaagagattgcaatcagcaccagaaggaatttccttcagtaaatggaggaattggggtggaagagccagaaggtgcacgaggaattgaagcggatgtcatcgccctcgttgttagggagggtacaactgaggcacggtctatttaagatactcaaccaaatcacagccggcagagcaataattacaatccactctgtggcgttttattccatgcgttggggaaggtgagaggttctaacctaagaaaactcatccgtgtcccacaaaacggagcaactggtacttcctcattccctgactttctccccaatatcagccaacactcagtcttcataattagtcaagtctttaaattaaaataattttaggcttgatttttaaccatt

SEQ ID NO: 68337 - DNA, 826 bp, Homo sapiens
tctctaatgttgcagaattcgttttgaggactatgcatgacaatggccatacagaggcaggcacgtagtaggcgctcagccaccatgagcccccttactcgccagctcaattcggttccatttctcccgcttgcctgtgatccttattctgtttctagtcccggggtgagcccaggctggcaccagaccttctttccatgtgagcagggacaagctgacatccagactagtgcttgcctccgaggtgacttctgagtgacaagctgctgcagtgatctcccaagctgtgtattatcatcttgtttcccctttagcttcgagcctcgtcagtctgtggctttcatcagatccagagagggtagaataactggccggcctaacggcggctgagccaggagtggaatcccagcaggaagaactttggacccttgcagttcccgcagcaacccagggctgggtgtgtgggcagatctgggggcttctgctgagtcagactgtgtgggagtgttggggcgggggcgggggcgccgccagatgaaatcaggatgcccagtgaaatttacatttcagataaacaagaaaaagccccttctgtataagtacagtctgtgaaatacttgggccatacttatactaaaaagttatgttgtgtttatctgaaattcaaatttcactgggcatctgacatttttattacctaaatctggcaaccctactctggtgggaacggagaacaaacctcctgggaggtctgggttagagatgagcacagcaatcctcctgcaggcaaaggccagtgtggagccacttgcctgcccccagatgg

SEQ ID NO: 68338 - DNA, 537 bp, Homo sapiens
gtattgacacctagggccagataattctttgttgtggggcagttgtgtgcatggcaggatgcttagcagtgtctctggcctctgcccactagagccaatagtccttccccctctcccaggtgtgacaactcaagtgtctctggacattaccagtgttccctggggagggggtccaatggcccccagttgagcaccactgttgcagccaaaggtgtcgtaaagaatgtgaagacctttttattctgacctccgacgttgctggagagccccaggagggcaaaagtcactgcctatgtccacaccccagagatgttgcaaggatcaaagtgagctcaggtgtgtgagaaaagcaaacacacacaaggtgttactaagcattacccgtctttgatgctgctgatgcattgatagcaatgttgtagtttccatttattcttagatttcataggcagagatgtttaacttaacagatggccagcatggatagtgaatggaattttccctcagcaaaggcagagcggctcatgagactttcag

SEQ ID NO: 68339 - DNA, 1044 bp, Homo sapiens
attttattatgtcaacccattcaaattaatcactagggcctggccctgtgcctagtatgagtaggcatgcaataagtaagtgttgaatcaagccaatggccagcactgagagctgggggcctctactgcccagccatccgaccctcttccccggccatcagtgggagctctggtgttctactaagtccccgtcagctgttccttcttgactcagctctggagcaaactagaaagacaactgcctcaagggttgtttgttctgccttgtggtgaaacctggaagaggttgaccctgagagaaaaattcgctcgtgactggggtgagcaaaggtttgtttctgggaggcgtgcaaagcttcccagggctcacacagggtggagccctccagggacccccagtggcccacccaacttccagaccctgactgcccatgggacagactcaggtgctgtgacctcaccaggacctgccagggatcaaactctcatgcccaaacaaggacggcagccccctggtgctcctgaaagcaggcagtttcctgaacagccacaatgtgacccaagcgatggggcgggagaggaagaacccacgggaagcagggaaatcccttggctggctgagtccggcaaagccgcggggacctctcgggaacctccccattgtgtaacacttccggccagtctccttaggcttccagggcaggcacaggatcaaaattcccaaacctaatacagttatgtttttaaagtgtccataagtcaatggacaaacaatgccccataattaatggcctcagggttgggccctcagcaaaggaagcaaaatcagagctgctcggggtcacccacaggcaagcaggcccctccttagaccaaagggcttctctctcactccccataaggatgttgtccacccaggcccctgggggcccagccactactgaggttacccactcctggctcagaacattctggaattcctcctttggaatggccactagagccccaagtggttctctatactattctcaacatggtgacgac

SEQ ID NO: 68340 - DNA, 586 bp, Homo sapiens
ctctggtatttctcacccatgtgtctatttcctaagattctcaacagctgtgactatcagataataactgccatggtctttattaatcttgattaataagcaactgtagtaacaactctgaaaacaggatgcaggttgaggttttggaagaaacttttaaaaccctggactctgtaaactaggtcatttttaaaaatcagactttctactgttagagtatgtctggtagcagagctttgaaattgcttgggcgtcagttacttggctcttaaatggagtaatgcttacctcatgggctgttgcaacattcagttaaataacagatgacagccaaagcccacatgcccaggtccactctggaggtcacttacagctgctgttggcagtccaggccatgccaagggctctttccagcacctgcatctatctcttcgggtgttctctatgcccctgccccagtacctcccaccccagagtgttcagctcacactcaacacaggctagagaaaccagggcaagactgctcctaggggcagcctccaagcaaggaggactgctaggaggtagtgaaaaggactcttgtgtc

SEQ ID NO: 68341 - DNA, 1255 bp, Homo sapiens
actcaggggaagtagggtgtgtgtgtgtgcgtgcgtgcgtgcatgtgcgtgtgcgtgtgcgtgtgtgtgtgtgtgtgtgtgtgtgatgaaagagagagagagagagcctctccaggccctggccagagaccccttggcctcctcctgcctgcttggagaggcaaggtctctctttttcccagggtcgggtgatggagctgttggggagggagccctggcagcctggtccttgtggagtttggttctgcgtgggcagctgtgtgaaccttgaccgcttcagaccagcttcactggggtagccacttcaaagggcccatgaggatgcctgccccagtccccagcccatccaccctcacccacagcccatgccccatgagaggggactgtgcctggaaagggcctctctgggaaatgatgtctacccctccaggatcaaggggtagggcagtcgggttgcagctggggaggagatgaaggcaggaagtatgctaggtcagtgacccaggcaaatatttggcagatcaatgctcaaggttgacctcaagtgtttaccactgggtcaccaggaagtggcttcttgccactttcacccacgcctcccctcatggcagccttcagggatgagggcttttctggctgtggtcaggggctcacctgtccacctagccccctggcctagagcgccctgccttgcccacctaactggaggtggtcttgggacacatcattttttcctcagagtgagtggtcgtcagaggccagatcccaccaggacagcctcctgccctgtgctgagtcctctcctagggaaaggccagcccactcgctctcccctaaacaaccgggagcacaggtaactcgcctctctccaaccgatgaggacgtcccgcgcccaggctcctgagggagggcgtgggaggaaggtgcgagccagacccacatcctctctgctgctggagggggcccttgcaccggctcagaaaggtgcggagcgttgcctgcagccgagagggaaacagcgcctctccgagcactttgttccacttgctggagggctaaaaatacactggcacagccaaaggcagtccttgagagcccaggggagttggcagtggggaatagctatcctagcacctggcactattaaaggagcatcgcaggattagccaaccccctgggccctgcctgcgcccgtcatccccactctgcactcagttcactcttcctgcagcagagtccgggcttccctgcaccc

SEQ ID NO: 68342 - DNA, 754 bp, Homo sapiens
agccaccacacacacaggcccatgtggagagaaactgaggccgccagccccagcccctagccccacctgagctcctagaaaatcacatccaggccacagcactcacgatggctacaatctgccttgctctctagggttccccaaggcccagctccccgtccctgctgtgtgctccctgggaaggctagcttcaccgcccccccatacacctgcctgggcccagcagggattaacaaacaggccctgggtacagcgcctcctgagcaggacttaacagtgtctgcacaggtcacctgcccagctcccagctccccacccaccccactccagaaaaatggaaaatccagggaccatcccaggcccagctgcgctccaggaagaaaccaggcatgctgccaagaatgacacaaaatggactttgggccgattgcccaagctggactactgcccccaccttcttaggaagggcactctttccggaaccaaggccatagcctggaacaaaaccagatgtctgtagagcaggacatgccaggtgggaggggttgccggggtgtaggaggcacatacttgatgcctctcgcaccctatcagcccaggcaggcagggtgcggggagggaaggagaccccatgtgtaaggactatcatcattctattactgcaggcagctgactgcttctggaggtggacctctgaggcctctggcattcagccccctcatccctgccttcagcaatggggacaaatcgaggt

SEQ ID NO: 68343 - DNA, 1011 bp, Homo sapiens
attctggatacctcaaagacagttaaattctgccgtggtgagcatttattgagcactatctgtgtgccaggcactgtgtggggaaaccacaatccctgcagatcaaggagctcagattctagtgccagaaaaaaatgtaaagagaaagggccaccatgccacccactgaagacggcaagggaagaggccagaaagtgctacgaacaaggaggaaacagctccaagttgttgggcagtcgggcgctgggtctcaaaggagggccacttgcatggacagaaggtacccctcttactgagcactgggggcctggtgggtcccctgtgctctccaggagaagcaggcagaattcctaagccccgttaggccaatgaggaagttgaggcaccgagagtaaggggcatctgcttccccaccagctgacttctattctagaaaggaatgttctgcacaaccccaaaccgtcagctctttctgcttgcaaacttggcaggagtttgcagggaacacaaagaagagagggggaggagcaaggtggatcagccgggctggcttgcccagggcctggcacagaggatggactttgtcccacgtgggtgaggggcgttcacacacaggcgtccacacccccacgttgctccaccaggcagaaggccagattttgtccttgtaattcccagaactgccctgaaacaggactgctcactactgtgcatggtttaaaatgcagtggggggttttggggagttttttcgtttgttttgatacggggtctcactctgtcacccaggctggagtacagtggcatgatcatggctcaccacagcctcaacctcccgggctcaggtgatcctcccatctcagcatcccgagtagctgagactataggcacttgccaccatgccaggctgattttttccatgttttttgtaaagacagggttttaccatattgcccaggctgatccacccaccttagcctcccaaagttctgagattacaggcatgaaccac

SEQ ID NO: 68344 - DNA, 1679 bp, Homo sapiens
gggcctcagctcgtttctggagccagcttttcagccgctcttctctccgttctctcgctctctgagtggagttctctgccttccaccctttgcttctgtcctttgaaaatgtgagcgaagcacagttgcttgtgcaaaccacaccagcctcctgagatcctctcgattttccttctcactgggaatatttttcatcagaatttattctcccaaactaagaaagggacctcatgtccccgctcatctgatgcactgagaacacagcatcattttcccagtattcttgccaagaatacacaacctgaggcttatcatgaggaaacatcaggcagacccaaactgaaggacattctacaagaaaactgcgtggactcttcaaaaatgtcaaggtcaggaaagacaaagaaagcccaaggaactgtcgccgattggaggagattagagacagggcaaccaactgcagcacgtgatctgggatattgtgttgctataaaggacattactgggacagttggtgacatctaaatctgaatacggtctgtagattagctaattgtattgaatcagtgttcgtttcctgacttagtcactgcactgtggctgtgtagcagaatgtcctttactttttaggaattatacactgaagctttgggagatagagggcatcacatctgcaatttactctcttatgattcagaaaaatatatatatttgtacacacagacagagaaaacagtaaggcaaatgtggcaaaaatgttaatatttggggaatcttgatgaagagtttaaaaaaaaatccttttgttctgttcttagaatttttctgtaagtccctttgcttctgacctctgggttaatgcagttgacacaacagcctgactcctaggctgactgctgactaattctttgcttgatgctcttgaccttggactgtgtcctcccccgatttagcccctgtagagacagtgagcaggaagactagtttggtgaataataaatccgctgtcactgccaccatcaccaccaacaggggcagagggacttttgctgagcactcactatgtaagtcaatgctcccataccctgagtgatgtacacagtacttcactcagtcctcacagtagtcttctgaggttgccattacaatccccaatctacagataaagaaactgaggctcagagagatgaactcacttacctaacgtcacagcagctattaagtggcaaggccagaattgacccacaaatctctagaaccccacagtcttacactaatctgccctgacactggtaaggagactgactggctgtactctgttctgatattttctctcctgattctcctttgctgaaataatagaaacaaaaataattgtaccagccataaaaaaatgaaatcctgtcattttcaacaacatggatgaacttggaggacatcatattaagtgaaataagccagacacagagagacaaatactgcatgatctcactcatatgtggaatctaaaaaaaaaaaaaaaaaaaattgatctcatagaagaagagtcagagagtccaacagtggttaccagagcctgggaagggcaggggagaggggaggatggggagaggtcggtcaacaggtacaaattacaattagatgggaggcataaattctggggttctgttacacagtag

SEQ ID NO: 68345 - DNA, 764 bp, Homo sapiens
ctactaaaactacaaaaattagccgggtgcattacgcgtgcctgtaatcccagctactcaggaggctgaggctggagaattgcttgaacccgggaggcggaggttgcagtgagccaagatcgtgccactgcactccagcctgagtgacagagagagactccgtcatacacacacacactcacacacacaaaaacaggatgcagtaaagaagccagctgaaaccagtacatggccaccaaagtgacctctggctgccctcatttttcattactaaatagactcccaccggtgccgtgacagtttacaaataccatggcaatgtaccgtggcaatgacccagaagttaccttatatggttccaggaactctccaccctttttctagaaaattctgaatgactcaccccttcattcgcatataattaacagtgggtataaatagaactccagcaatccaagcggtagctcctgctctgattcctcctccacattgctactgctgcctcacactgccactgttgctcaggactgctctgtggagcagccagtttgctgtacactgctcctctgggctactctgggctactctgtctatgggacagctctgccctgtctgcggagccaccattttgctatacactattgctctaataaacttgctttctttcactgtcaactcactcttgaattctttcttgagcaaagccaataaccctcccaggctaagccccaattttggggttcatctacatcaggctcagagag

SEQ ID NO: 68346 - DNA, 716 bp, Homo sapiens
cctcaaaaggctagatccccaccaccattggtatcttgttgtaactcacatgttcctgaataccaacgagacggagcttctttttgtatgtgtattatccatatatatgtcctttgaagccagcctcaagtccaggaagtcagccaagtcctgggttgtgataatcctcctgcagcctcatctggtttgaacttcccagaagtcctaggaggtgaaccaggcagggataatttcctctttaaacattccagttcctcctgtgggacattgaggctgaggctgcacccaggccacatgcatatgtatttattggcagggctgggcctgagactaggtctcctagcctagaattccctccaaagattcacgagagtccaaagactaacacccatggcccgggtccaaaagttcactaagaggacaggctgaggctacatgatgggggaaggggggagtcagaattagggccaagaactagatctgggaggtcagggagggaaaggagaaacagtgagaaactgtgacgcagcacaacatatatctcagcactgggaatgtctatcttctggcgctgtcggaggagataagtagattatctgtcagcccaacagtctaagcaaagaagaagccaggagttccttccgtcaattcacctaatcttttaacactgcttatcggtggggtcgatgtaactcaaacctcctaaaacaacacgg

SEQ ID NO: 68347 - DNA, 3675 bp, Homo sapiens
aatgtcatgtaactctcttcgctacagatacggacagtttctgtagcctctaaaacaggcaggaaatggccttcataaccattctccaattttgctggaggatcagggtggtggaagtcattttaaaaaccagctgcaatatactgtactaccagagagtggggtgaagcaattgagtccttttacctagctgactccgaatcaagacagctaaaagaatgtaccagaaagaaagaaaaaataaaatgctaccaaaatcccaatccattatctaccctttatggagaaaagtacctttataatgttttacaaagaatcgtggtctcaagtttccactttgttttagtaataaagaactttcaaaaaaaaaaccactctaaacaacaccctcctgtatagaaagctctattttaataattaatgcaatgatacccttgttggaacaatccagccgctttgaaactctggtatttacttactagatgaacaagtttctctatggaggtgcctttaacttctcaagaaatgtgtaagttaagacggctccaaattacattttaagagagccttgtatttttagaggttctttttcatcggtcagaaaaacttacgttgacgattctgcaagaaaggttgctcgcaaaccatgcatcgcaaagctaccgaggcaaatttaaagaaccaatgaaaaagagtggaggctcgtctgaatctttaattggctatgggaatttcaatttattgcataaataatcttttagacctcaagatacacgtgacctagggacagtttacatcaatgggcaagacttaaaaatagacaccaagttcagcaagtatttgagcacctactaaaaattacacaactcccacaacaacgcattttgcgtttctaaagttgtaagcagcatgttcggacgcttgatgcaatttcccaagttgtttgggccccccccccaaaaaagtcttctcagtaaaaggtggggggaaggagggtattttgggggcaacaaaccaaactggtctgtcgcatgttaagtcaatttcacgttcacctactggtcaccacgaagccgaggaaagttttaaaaagaacattccggggtctccagagatcatctctccaagtccgctcggcaccggcgcctgagctggggctaaggtcccgcgtctctggttctgtcctaatagaatccgggacatccacagggattccccggggcagccttcagtgaagaccagggagaggggccgcccgggtctcacgggtgcttcccgcgctggggatggcggcgagcagccacggcctatggacgcgcaagggaaagaatgcagcgaccccggagctcgcagggccgcccgcccaggagtctgaggctgggaggacctcaccttgctgcggtcctcctcctgctgctgcagcaactcgggaaccgcggccatggcgacgcgggactcgagcaggggccgcctggctgtgcgaggaaagaagaagctgggccgccgccgccgccgcctgggcgcctctcgggggcggccacggccccgcctccgccggcctccctgcccgacggcggcaggaggcctccggactccgccaccatcccagctgccccgggagcaggcgagcagggcgccacgtgctcccccagagcagcctcccagtccccgctgccgtccatcttggagccgggcaaagacgccacgtggggcctacccttgctccgctccacgaggaggccgccaaccgcagggccgcgacacggacgggaagcaacggacactctcccagcaagacgcgtctagagaaagaccgcgtttcggtgcggggggaatttattactcagcccgagtccaagatggcagcgagcgctgacgtcaccagatctcgtgagagcagaagggcgcgatttggaggctcccgcgcttcggagacgccggcccttccgctcggagaggtactccctgcctctaactggtggcgcgttggcggaggccgacgaaagcctcgggtggggcgtgagcgccgcggggcattctggacctgctttgccttaggctgtgcctaattcgaaaccaaagcgcgggacggatgaaagtacgggtcgcgagaggttgttcgcgccttgagagttaagcgaagtgtggtggcttccaaggtaccgacacttgccgtaggctgggcttttatttaagtcgtcttttctctaatccagactcctgccacaggggccaccgccgtcctggccccgccaggggtccgcacccacggcggagcgggaggcgactttttgcggtcacagtaatgggacctcagcgccgccaccagctctgaccggcgagcgacgggaccctccaacccgatttccacgtctgtgcaacgggttcattctagacccacggtagagggtgtgaggaccaaatgagaagtatccacacagaatacttagcagagagcctggtgtctaggaattagtcgtcgtctgtcacctaggactgtgtggccgccatgggacgggctccatctttgtgtttttccgtgtctcgcacacgcctcccttcctgggcgtcacattcctgcagattagaaactgggacgtcttgcctcaagctgtctactaattcgcatttagtatgtgtcggtccttcgggtattgagtcttgatttatttataaattttttttggaggcagggtctcgctctgtcgactttcttaagaaagggctctgtccaaacatgtcgaaaaagttcacaattttgatgtgcaatatcattctgatgcagctttcgctttgatggttgttttctctccaataggaatacaaacataaaggccttcgaccgttgcaaatagactaaagtgaaaacaaatctgaatgaagatgaagttatttcagaccatttgcaggcagctcaggagttcaaagttttctgtggaatcagctgcccttgtggctttctctacttcctcttactcatgtggccggaagaaaaaagtgaacccatatgaagaagtggaccaagaaaaatactctaatttagttcagtctgtcttgtcatccagaggcgtcgcccagaccccgggatcggtggaggaagatgctttgctctgtggacccgtgagcaagcataagctgccaaaccaaggtgaggacagacgagtgccacaaaactggtttcctatcttcaatccagagagaagtgataaaccaaatgcaagtgatccttcagttcctttgaaaatccccttgcaaaggaatgtgataccaagtgtgacccgagtccttcagcagaccatgacaaaacaacaggttttcttgttggagaggtggaaacagcggatgattctggaactgggagaagatggctttaaagaatacacttcaagtaattatctcaattctgattctatatgtttgctatgttttctataatagagagcaacggtgtcaaaagaatgaggtttggttttgtttttttaacttactagcaaggaactcccttcagatagtaattaacattaaatagcactttatgtgtattaactcacttgatcctcatggtagtcctgtggagtatagatactgttatccacattttacagatgaaactaaaatagatcaaatatttgactaaataatacataaaattcacttgttttataagctaccaac

SEQ ID NO: 68348 - DNA, 560 bp, Homo sapiens
caggccctcacattcactcaccgctcactcactcaatcacccagagcaacttctagtcctgcaagctgcattcgtggtaggtgccctatacaagtatactgttttttatcttttataccacatttttactgtaccttttctgtgtttagatgcactaatgcttaccattgtgttatagttgccagcagtattcagtacagtaacatgctgtacaggtttgtagcctaggagcaaaggtctgggtgtgtagtaggctatcctacctaggtttgtgtaatatactctatgtttgcacaatgacaaaattgcctaaccatgcatttctcaggacatatccctgtcattaagctacacatgactgtactttgaaatcaggcagtgtgatgcctccgacttcattcttttcactcaagattgctttggctattcggagtcttttgtggttccgtgttaattttaggatttttttttttctatttctgtgaaaaatgatgttggaatttttttttctttttgagacagagtttcacccttgtcgcccaggctgcagtgcaatggca

SEQ ID NO: 68349 - DNA, 592 bp, Homo sapiens
ggctcaagtagggctagatgatttaggatgtcatcacttagatgtctgagggttggcctggtgtcagctggggccatggagatgcctgggcctggtgactctcatcctccagagggctaacctgggctctcattcacgcagcagtagcagaaggattccggacagcagcagaacaagccccagcacacagcatttcacaagcctcggcttgggccgtgctgactaatgtctcgtttgccaaagcaggtcatgtggccaaggcaagaccaaaggatagagaaataaattccacctcttgcagagaggagccaaaaactcacatggcaaagggctgtggaacaggaaagggaacaatgggcccatttttacaacccaccatgctaacagcatgacccaggcaagttatctaaagcttttgagcctcagtgtcctcgtctgtaaatgggtaaaataataactacttcatagggtattcataaagactagaaatagctggcacataacatagtagtagctgttttattgttatcatcataatgaaaaagttcagtccctgctgggcaaactcatatttcccaaactccagtcactc

SEQ ID NO: 68350 - DNA, 2886 bp, Homo sapiens
ttacagcaagaactccattttccaattcagtggtacattctctctaggctgcaaaaaatgctgtggacaaaatgacatttggaaaaggtatctttaaagatacctttaagagcaatagtccccttatgccatttacgctcacataagagactggaatagcaaagcactatgaacagtaatgaatgttgtaaaactccctggtgaggcttaatcaatactgcctatagccgtgtccaccggaagaagctcgttctctgtgaattctagtgggaaagaatgattgaatgatgaacacgttttcactggttgctctatcagatacttaaaagtttctgggaggccttgccttttttacccgaggaagaagtgaaaatgcgtcttgcacaattgcttaactattcccaacgcaagacttctttatatcatttatttcccttgtattactggcgcggaaacttgggtgtaaaagtgatcacaaagattacatggggccaggcgcggtggctcacgcctgtaatcctctcgggaggctgaggcaggagaatcgcttgaatccggtaaggttgcagtgagccgagatcgcgccactgcactccagcctgggcgatagacagagactctgtatcaaaattataataataataataataataatccgagcctgaccagtcgccccacagcgtcaaggtgaaaccaggtgaccgcgactacagcgtttaataatgggtcctcaggcaaaaactccacggatgggaaccccgcgcctctgaagctgcctaacgaggcggtctcctggtggcgcctgccccgccaaaggagcaatgagggggctgcgtttaggcgaagccggtattgggcgaagcttctggatcagtcaggggctcagaagggacgtctgtgggagaggggtcagcacggtatccagaccccgcccggggtgaggttggtactgaactgactgaggggcatggaacccccaccctccaccctggtaaggtgccggggccagtttgggccgggactcctagaatttgaatcgggggtggtctaacgctgtcgcctgcggggtgtgcaggaggcccctagtgaagccaagagttcgtagagcctgggcgccgctctatgctcggctctcgattgctcacgcctggcagcggcgagcggcgcacgcgacggctggggctctgcgctcgaggggtcgagcctgggcagtacaggcggcggtgcgcactctgcggcggcctctgcgcctcgggcgggcgggagagagaggccgcggccgccagcgtggggatgtctaggagctcgaaggtggtgctgggcctctcggtgctgctgacggcggccacagtggccggcgtacatgtgaagcagcagtgggaccagcaggtcggtgtcacgtgaccgtctcttccgggcccgcgcgcgcggcgtcgacctggggcctctcgtggtctctgcccgctcggttcctcagctcctcttcgtgtctttcccccgcggtggcgcggccctgcaccccacgcgtttgcggctgcggccggcggccgctctgctgggctccgggcgctgcagctcccggcgggcgtgtgcagcccgcagattcaggacgacccggctgcccggcttagcgcctttggagctccgcgctgaaggggccttgctccgcacaggcacggcacgcaagcttttggggtgcccagtggctctgttttcaagtcacagccggcccgcagggtgcggacctttccacatctcacttgggccgctagaaaatagaaggtggggaaggagtttcttggggtgcattctgcaagctaccagcctccctcctggcccaaggttggggttaaagcctaatgtgttttacgtgctattgattttatcccatggtaagggagccccccttccccgtactcactctccatgcctttgaccaagataatttggtgagatgtttgcacttctcgtttaaatgaacagtttgctatggaaactagaatctgggaacgatagagataacagtctccagatttttttttttggtacttttatttcaggaaatatccgtgacctgctgatcagcagtgactattctgtcctctcagttcatattttctttcttattcaagttgacagacctttaatgggtgattactgtgtggaagctacctcactaagcaccttgggaatacaaagataaggaaactccactcttccagagtctatcagtgattcacgaccttgctgagaacagggtcattggtgaattttcagaaaacaacttggcagtgattggggttgaacctagttcaccaagggtgaaaataatggactggatgaatcaagagtaaacagtcttttcttgatttgcctacccagacctttggactgtgctatgtgcttgatatacagagatgaagtggatgaggtctttgttcttggtgttcacagactgtggaaattagaagagaggaagcatgtgatggtacaagaattttgacgaggggttgagatgacttaacaatgaaagggcacaggagagatcagagatttgggattaaaatgtgctcctaaggggctggcttttggaatagaggcagaagacttccgcctcttacaaggaaaagtaaaagatgttgatcctgggaaaacttgagatggagtaaaatttagtatgacagatgatctgacgtcagtgaagtgatgtttgaagggtttgggtagggatggattagagcttggctttggaccctaactgaacatcaaatgttcccggaaagtttttacaatgtgactaaggcttggtccccaccccagaccatttaaaccagaatctcctggggatggggacctggttcaacaatgttttaaaagtaacccaga

SEQ ID NO: 68351 - DNA, 1499 bp, Homo sapiens
cagcttcctggcacctgaggagtatggcttgccagccatcatatggtttataccgaaacaggattttcccattaggcaagagactagtaaagatataggtacttgaggaatgcctttgtgtaatataatttgtaaccaagtcagagaaatacatatataactgtgaagagggtcattttctggcatgtggaaatgtttttcttaaaatgggttcaacttcaaatttagtcactgttaacaaattaatagtaacattttcacaggaaatgcagaatttactagttagctggtttttgcttctgagcggtctctgttattgatttcaggttctgcctgaattctcagtggctttccctttgtcctgttgaggacaaattttaagctaccctttgtggtcaggaccctgctaactgtagtttctttgattcccacacaactttgcagttagggtgaacttattcttcacaaacaattcttatccttagggctttgcacagtttttttcttctggaatatgcatctccacagcctccattctccctatacacaaagagaccccttttcacctggccaatttctaatcctaagcctccccctaatataggttgggcctccttttatttaccctcacactgccctgtggtacacagcacattccattccttatgtgtcacagagcatcagcatcacctgagggactaagaaatgtaactcctaggctctgcttcagaaattgatgcattttatctgggctagaatcaagcatatttagaaaaccaagaacaacttgggtgattccaatgcactgtgagcatggagaaccactgtgttgttgtgatcacctgttttctatgcagccctcagggaagtgcaaacctgtgagatcaggcaccattatctgtcttggactttgtattcccagttcctagcccagtgcctggtatgcagagggagctcatattttttgaaagaatgtgtgaagagacctgcctctgggagtcaggaatgtgacaattgggaaatccagcaacaatacctgcttttccagtacctttctcctaaaagttactggatcctacagatcttagtgggcgtatacttggtgttagaagaatagaaatctttctaattcccttccttttccccattttgcaattgtgggttggctgaagaaaagaagacaacatgggaaaggaaaatctgggtgataaacggattaaacctttaggttaccgctgctctagataaacccatgatgtgactttttgtttttctcctaggtcagctgagggaacagctcagttaccttaagggtgataatttttttaggtttacttgttcggattgctcagcagatggcaaggagcagtatgaaaggctgaagctgacatggcagcaagtgagtaaaaagcccttccccaaatccatgagggtggttcccccaggagtttgttggaacgaatatctagaaacttagggatgagcttttgagttgtttg

SEQ ID NO: 68352 - DNA, 2111 bp, Homo sapiens
atgatgttgagggatgaatccaattgacactggacatgtctccggagccaggactgaactgaattcacaataaataatgtagcctcggggtaccagaagggaatggattcaccctctgagagctacaaaagaattttaggaaattctcatctccctggcccttcagacagtggtcattttcttggtcttccaagagaatgacaaagtttcagaaagcctatctgaggaaggtgaagggcagtgagagggtgcacgggtggaaaagccctctcaagagtgacgtgggccttcccctcgagctccccagatggggcgtcccagatggcaccagcgcaatcttgttctcaaccaggatcccggacaaagacctagagatccaagccgacggcaggccaagctctggcccgagactgaggcttctgcttctcaggagatgagagtttaacaataacttcgtggatttcaaaaagaagaaaaaggtctcagggcaccggaaaaggtgtattcgggttgagggcgtgggctcagaatcgggtctacctcgtacgggatgtgagacttcaggcagactgctcggccttttcaaggctttaaatggagctaaagggtatacgacatgacgttcgcccggtgtttaggaatatggggcgtgactttccaagcaggcggctggagccagggagaccacaggccgctgcaacacaaaccagcacctgaacaagcttggtcagccagcggtacacctccgccaaccccagaagccgaacagatgcgccccgaaacgtcatttccgcgcgccaaggggcggggccggtaccgggtgcggaagtcgctccaggggtcactgggaagtgtagttttcgagacagaggcgctcagaaggagggtcacagtagggccaggcactcttctcgggagctcctacgtgttttatgcacgtggttaagaaaaaagagggagaattcaggtgccacagtggccattctccggtgaccggagcgtgttactcagaaacggatccgtcagaggccaatgggagctgccggccttcagggcgcgcctggtggcgccgagcatcctgggaggtgtggtccgggcgctgtgccgaggattcggggtagtgtagtcctggcgccccgctggaggagctccccagctggtggctggagcgaccccttgttctttggtggcgctggtgagtgaggctcccgcgggacccttgccgcagccgtacccttttctgcgcgaaaaggaaggtcccgaaaggctggactatgggctgaatttggggaccgtgcgggtggcgcgggggtggtgattgtggtgggaacgcgctggcgtggcgcaggccgtcctctcccagatgtcttattttgggggtgtgggcgtgcatctccaggggagttgggtgaagcccatccgtgaaactggatggtgatgagtgggggatcgggctctctctcctagggttcttgtgggtggggacaggttcggctttggctgaagtcgggtattgggaaagggagtcgctgatgccataagtccccggttttgggggagttgaataaataagctttttgggggaatggtatttcccaggtggtggaatgggaaccatccctggggccatgtgtccccgaggcattggtcggttgagggctagtctcttggggccacactattcttcggctttgctggagtggaatgaggagcggtctggcttgaccaaacaagccaaggttagactggatctggggtggccattttgccgcgatcttagggtttcactttggttggtcacccccgggttcgggcgttggaggaggaagtctggctgggacgcacaggacaggttttttccaaaggtcccagggaccgtcattgatcgcaagaattacggattcccaggcccctggtgtggccaggctttgggattttacattccatttaagtttttattgcggagaaatttcaaacagccagaagtagatagaactctatagaccagatctccatcacccagattcaacacttaaaaccttatgaccaatcttgattcatctcagaatggacacagagaatccttgcaatccagagttcaccgtcactgc

SEQ ID NO: 68353 - DNA, 1499 bp, Homo sapiens
attctaaataaaaaatatgtaggagaggaagtaattcgcgagcgtcaactagcagctgcccttaggaagctggggtggccagtgggccccacgcaaagggaatcaagaaaaaaggcggatccgccaggcccaaatggcaacgtgcagtcaacaggatccccagacccctcaactctcccaacgtggaccgccccctcgcagcccggatccggaatcccgtttggttgttcccgcccatcaggggctgccaaggacacctgcatcctttcggctggagtaagggaagctcttcccctcctctagccgccctcctcttcctctaaccgcggggcccgggatcgggacccctaatgcatctctgccgcgcccaacccagtcgccagcctctcaccgcctcttgcctcctccttcgccgccgcccgggttaccacagacgcggcgagccgcgccccgcccactgggtgctgggcagatgattggtggagactcagcttcttagcaactagaccggcccctgccgctccgcagggagcctggtacccgcctggagttcctttcccagtgctttcccataggcatctaagaatattccttcacagagttgccaagtgctaaaagttggtttcccaactcagaatgaaggaaccaggcttgtgcgtccgatgggcattgacattctggaaaacaagaataagaagctgtagcggcgcctgtaagtgggccggagcaggcgcagcttggccacctcccgccgaaaggcaaggaaggaccggctgcgacacgaggaagaaggcccctcggcctcagcagagcgctatcctccactggttccccgggttccccggcttgctaccgggctgctccgtgcatctttccccccaggcgtcaggaactgcgccctcatggcggaggtgaaggtgaaggtgcagccgcctgacgcggatccggtcgaaatagaaaacaggtaaaccagtgaggctccggcttggcactccatcaggcgcccagtcatttgggcagctggaccccttctccgggatcccttgggagtggccggagcgggttaggtgagcacgcgggaaaaacgattgcggggttctggacccacttgttccttcccatcctgggagagcagaactcaagaagttcaaaatgggtttgacagcttgcaactttgtgtagctggctggctttgccctgatacttttggggaagttgtgatgacgtgctgccttcctactttgacgcgatcagtgctttgagaggagccctcggctttctttccctgtagaacacttgtgaatacatgttctgatccaggatcgctcttgtcactaagggaacgtctatgacaaaacgtttaggcggagttagggcgcagttggtgattacgaagtaacattaagccaggtggtttcagtgcagtattgaactcaagacttttaggacacccaaagcctctgccacttttatttttatttgtttgtttgtgagacaga

SEQ ID NO: 68354 - DNA, 1034 bp, Homo sapiens
cgtttggaagatgatgtataggcaatgtcccaggttttagtttggtaattcattacattatgcctcataatgtagacgcatgttacgtatatcctttgtatatattaagtatagcatatttaattttttaaaagctgaagcgggaagcagtgaacatgtaaaattatctgggaagtcccaaatctgaaccagcagcagatacggggggcggggctcaggggctcagcctcggtagttcaaaggggttcctttaactctaaaggctgagccctcagagaagtcttccaggcagttttaccagtcaaaattcgaccactagctcagactttaagagaaggcagcgggggagaggcaggaaaacacacagggctttgctagaggggattagacgcctattcaaacttcagccctcagtcctctcccgccgtccctccctccaggctgacttcacggagcagcggcgttgggcgcttaccttctccagctcctttttcacccagccataccagccgtgggtggtcacatccccgcctccgttcccgggaacaatcactgccttgctaggagaagccatgagtgcagcgaggccagagttccccagcgcgggtccagcggagctgagcccagcctgctcccgcagggagcctgcgccgcggcatcctgggagttgtagttgcggggacctgggaggccgggctctttcctccttggcctgccttccgctggctgcgtggggcagccaagaacaaagcctgcgagcttccatcaattgtaaagcaaagcaccctttacttgcctcttactagtgctctcatgtttttcccttatttaagacaggctatgacacggttggggtgtgttatttctttgctagatttactgatatttctataggaaagtttgtttttggtttcaaacatgcagaaaacccatttataacctgggaacgcctgaaatccatattatttttccttctgagtttaaaacagtttttagtagtcagtatcagccctggttgttgtttttcattgctt

SEQ ID NO: 68355 - DNA, 552 bp, Homo sapiens
gaaggccataattttaccttttgaaacactttaacagttttgaagctttcaccaacatcccaatggattcacctgacagaaccaggtaaaccacattactgaagaacaccccatggggctaagcccaagcacattttttcctggctccgggagtgaataccaagtagcaatagtactacagcgttgctgactttctccctaggtttctttctcctccttactgattttgggttttgtttctgattcgcccacagctggcggatttttccccatgaatggcgacaccaattaggaactcgcgggaaaccccgttgctccctttcccctggctggcagcgcggaagccgcacgatgcctggagttcctgtaaaccacgtgaaccagcgggacttcgtcagagctctggcagcctttctcaaaaagtccgggaagctgaaagtccccgaatgggtggacaccgtcaagctggccaagcacaaagagcttcctccctacgttgagaactggttctacacacgagccggttccacagcgcggcacctgtacctccag

SEQ ID NO: 68356 - DNA, 2111 bp, Homo sapiens
ttcttggatgcctagatatgttcttgcataattttatgtttacatcgttttgcttatttttatatgctacagagactacaactctgagtcacagtaatgatgtgttcatgtttgccacttgtcagcgtgtgtaaaaatggttgtggtggctttatacagttgtgttctatcgcgccttttgcagcaacatggatgcatctggaggccatgatcctaaaagaattaacgcagaagcagaaaaccaaatacatgttctcacttgaaagtgggagctaagcattgggcacacatggacacaaaggtgacattaatagacgctggggactactagagtggggagggaggcagggaggggctgaaaaacttgggtactatgctcagtatctgggtgaccagctcattcgaattcgaaacctcatagccaggtaacaaatacgcagtgtaccccctaaatctaaacgttggaattattttttaaaagaaagttatgttccatgtatttctaagcttactctcctaaaatggttgaatattacagttctcaattatttatctccatgtagaaggatgacagggactgtgcgctagtgccagcctccgctgagagcgccaagacattacagcaagcgacggtaggagagcttgtaacgtgaagcaccaccacacctctgtacttcaaacttaaccacagagaccgactcccaaaccagcaagtgcgtaagcgccgccgcgctcaccacccgccccgccccttccgcatgctaatgccttcttccggcagccttagtttcttccaaccagtgcagctccctgttccgcgagcatacgtcatcgttctcgctttccggtagctaaggcgatcagcgggacttcccactgagacgagcggatgtcatattgtatcagggcgaacctctgaggagcgctggctgcgcttaggcaacggtgcggcaggcgccggggttttctgaaacagaaacgtttaggggtggggaaacgtgttccgaggaactctcgttttgaagtgcgacatacacctgtcttgccctgttccaagatggtggcagagcttctctgagtctctcgcttcctccagtccgtcggagaagcgctctttgattggccagtggacagcgccgtggcatgacgcgctggggcgctggccaatcggttgagagctgagctggacttggcggtgggagccggagcctgcttgttgcagctgtgggtgaggacggctctagctaggtgagcggctccggccaggtgagcggggcgcataggtgacggagggccgagggcacgggtatgagtttctgccgggggcgaggtgagcggcttctgggaggaggccttttcttgacagtttagggtagcgggggaatggatgatccgggagtcccctgcggatgtcgtcccgcaccaggccgggaccgatttctggctccagtttccccagaattgcggagtgcgcacacctggaaggacccaagtcccgttttatagttgagaaactcaagactcagacaagtgaaacgacttttgcttcatgacagctggaactggaacccaggtccttggactcccttcaaggattaaacctcacttattcttacatacacatggtcactgtgtcctgagaagttacgagttggcgcgataagggtggttcagattttttggcatattctcctgttatctttccaggcctttcattcattcactaattcatactttcagttatttacctcttcagataccttccccgatactttggtaaaagctatggacccatctccctagaaaaacggcatattccctcatgcgcataacttcagatgattagtggaccttctatagtccccttggattatgtgtccactgctaagaatccagaccctagaagggtgagggaaacaggcagtaggaaaaggagggagcaggtcttaggctgtacatgcttggaaaccattagatggaggcagtagcttctttttttttttttttttttttgagatggagtctcgctctgtcgcccaggctggagtgcagtggcgtgatctcggctcactgcaaccaatgcctcccaaggtcaagcagtcctccctgcc

SEQ ID NO: 68357 - DNA, 4102 bp, Homo sapiens
aacctgccctttgaagctttaaagccaggcattgacttctctctagctatgagaatcctagatagcatcttcttccaactacactgaaaatctgtggtttagtgtagccaccaccttcatcagtgatcttagctaatctgaataacttgcagcagtttctacatcagcacatgctgcttcaccttgtgccattatgttatggagatggcttctttccctaaacctcaggaaccaacctctgccagcttccagctttctcctgcagcttccttacctctctccaccttcataaattgaagagagttgggaccttgctctggattaggccctggcttaagggaatgttgtatctggtttgattttctattcagactactaaaacattctccacatcagcaataaggctgtttcactttcttatcattcacgtgttcacttttaatttccttcaagaactttttctttgcattcacagcttggcagttttggggcaaaaggcctagctttcagctatcttggctttcaacataccttccctactaagattaatgagttttagcttttgatttaaaatgagagatgtgtgactcttcctttcacttgaacacttagagggcattgtagggttattaactggcctcatttcaatattgttgtatctcaggaaataggggaggcccaaggaggaggagagagatgagggaaaggtcagtcagtggagcaacagaatatacacaacatttatcagttaagtttgccatcttatatcagtgcagtttgtagcaccccaaaacaattaaaatggtaacatcaaagatcactgatcacagatcaccatagcagatatataataataatgaaaaagttggaaatattgtgagaattactgaactgtgacacagagacatgaagtgagcacatgatgttagaaaacttgcgccaatagtcttgcttgatgtacgattgccacaaatcttcaatttgttaaaaaatctgcaaataaatgaggcatgtctgtgtttgtttaatgattaacaatccgtcacaaactggataattcatcagcaataactcatccagtttgtgattcatcaatccatcttcgttttgctgcatttcaaaacaagcctcagtcatccatgtatttcatgcctaaacacttcagtaggtgtatcattaacttaagttcagtattgaacgtagttcttcaacttttttggagataaggttatatgcagtgaaatgtgcaaatcctaagtgtgcccttcaaaatgtgtcaagaaccttcctgtcattgctgtgtcagtcattttagaagagtacagtgggctctgtgaccgtgtttgagttgcgcctataacagacaaggttatggcctctcatcctacagcacaacaccccgatcccccaaggaggcagaggagccatccagtttgtcacgcattatcagcactccagcacccagagacgcatccgcgtgaccaccatcgcccgaaagtaagcagccccagtttcctttctgttgaggaactgactgacatttttcccttgaagagatactttaacatttgttagtttgtctttttgattccattgaatggttctcaccagacctcattagcttatttgatcagaggaggaggcatttttggctaacccagttgggcctatgaacacttgcctagaggaatcatctttctgtaggaaatatagttcattaaaagtattaattattattattatcatctggagacagtctcgctctgttgcccaagctggagtacagtggcacaatcacagctcaccacagcctcaacctcccatgctcaagtgatcctcccacttcagcctcccaggtagctgggaccacaggcacctgccaccaaaactagctaatctttttacttttatgcagagagatggtgatctcacattgttgcccaggctggtcttgaacttctaggctcaagcagtcctgccaccttgccctcccaaagtgttgggatttcaggaatgagccactgcacctagcctgtgtttctttttctgaatggatgtctggctttctgatctctcctaaacataagcatggcactaactctggaattgtcagttgggcagatgtacagagtcagctcaggcacatagaagcagcatttgaccaggaggctgcggcagtgttgatggcacggcttggggtgttccgagcggagtcagaggaggggcccgatgtgctccggtggctggaccgacaactcatccgactggtaaattggggacagtggcattaggttcagtcttggtttctgctttactttcgagaagaaaattgtcacttaattattattatatagtgaatcagcaagaatttatcagttgcctaccttatgctgcacgctggacattctgttaaagacgtgttaaatgtgcattttcccctcagagatttacattatagttgggaagaaacaacacgcatggagcatttggagagtgatacaaatctgtgtgggttgagttgacttagatgagtcattttgtgaatgctctggtcttgtatttttcttctaaatctggaaagtggttttggaaatagggatccagcctggtaagtttagggagatgccttttatcagtctggatttaatgagatgagagaagtcacactgtaatttaaatggggaaagtcttttataaagaatacaacaagagagtagaacagtgagggactggctagaaggaagtatagagaagtgggcagccactacttgtggggctgagatagagcaccaaaggaagtgcccttctccccagggctgatccagacctagttgggagggcatggccatggcttggtgagtcttttgcagagaagttaccgtggtgctgtgccaggggaacttactagaaattcactttctagaatttgaagaaaatccaccctccagggtgccagggaaagctgtgtataggaaaatgtctcactggagacatgcagggatgctgcttagctgctggctgccatgttctccaggagctcagcactggggagccacggtgcagcaggacctggcacccgggaagctgctgaatgagcactcgggcgcccaaagctgacgctcacctccagcactctctactgacaacgcttgatatcgtgccagctggcaaaggagaggtagtgaaagggcccatgtccatttcacagcaggcaaagggggtgagtttggagccagcacaaggcaataaatcaataattggcacatgataatcttaccttcctggagagtcacagcatgtgtttgtgatcaaagccaccatggaaaggcccagtagggaaacctgtttcattttgttcagccctctatttgcccttgccatctcatggaaccatttttcaggaagtgtcaacatttcaaacataatttgaaaattgcttctttaggatttcagagggaggatagataagcagagggcccaggtggctaacaaagacttcctgtggaaatgagccttgagtcaggtttttattacagaattaattggagaagggaaggcaaggcttgctgagtggagggctagcaggaatgagcctgcaggagctagctgggtcttttagcttatgctgaggactttggagaaaccagtgtcacaggaggctaggttgtgcagtggggaacagagtcagggaaggtacaccttgattggggagctccttaactttagggagcaagggagacgtggctgtgattgttaagcgggggtttgatgtcagcatgatgcttgtgtttacatttaatatcaccatgtgaggcacattgcagagagaaaaggctattgttgtgaatggaggatttttcaggctcaatggcactgagaccagcatagtggcaggagagatggaggaagcagaaggtttgaaatcaggatgtaaactgaaagaattgataaaacttgatgaaatgattctgtgtaaagtcaaaaaccaaaaagtcagcactgaatgacatttcacacatgggtaactgcatgagtggtgttgaggtagaagatgggaaaggagagcaactttagggtgggagaaagttttttctcttttttt

SEQ ID NO: 68358 - DNA, 1827 bp, Homo sapiens
attctgtgcttattccaagatggcaaacatattctcctggtttttttctaggcttatattaaatagttttagcttttacatttaagtcagcgatccattcagagttaagttttttatctatttctgtagggcagaacatcagtttttaaagggtgggcaaggtgaaaagaaccctgaaggataccagggaaaatgatgtttctgaagccatgaaaggtgcaggtggggtcagtggtggcaaatgctttcgaaaccaagtttgagtgtggctgaaaagtacttaacgttaatttaccgggcctaccttgtgccaagcacatcacacttgctcttaagttgttcagtctattgagggcatcttgctttaaaaaatgtatgcataagacaaaagctggaggtggtcggagtcgaaggagattttttgtttttgagacatgggcacgtttgtatgaaggataaacgtcaataatgaagatgggggaggacttagggtgtcaatgaggggaaaggccactgaggctggaaaaaatagtacccagagcctagtggagggattagctttggcctggaagtatttaaagttcacccagagttccggaaagaaaaatggaggaaaagaagagttgcggggagagacaagcggtatccctgcaaatctgaaaactggaagaggaattggaagtaaccttttcggataccgtctggagcccacgaaggcattacaattttgcaagtgagaagcttctcctctaagttgtcatttagtcctcgtcacgtggtaaaaagtatcgcacgcccacagttctacacccgaaagtccggacacctgagcgactttccgggccagaggccccaaggtgcatcggggcagagccggaagcggacgctgaaaactggcggctccttaatggttccggcggcagggaccgcagcgacgccctcaccggaagtcccgcctctgccgtgggcctgcgagaatcgaggcactcgctggcgtacccatgtatcgaaatgagttcacggcctggtaccggcggatgtcggtggtctacgggatcggcacctggtctgtgttgggctcactgctttactatagccggacaatggcgaagtcgtcaggtagggctcttcggcggggcctgccccggaacacacggccttcgatgagagttccccgggggtcatggaaacaacttccctgtcctttaaatcccaggtttattctgcaaaactaattgaaacgggtgctaacagccgtttgttataatggaatctgcaaagaactagactccaggaattattaataccttgtaaatattgtttcctaaatctgaatcatttactggatagggccgtccccatattcagaattggaggaatctgtgtaaagtgcaaggtggactttcagagactctggccggtgatttttaaagagtgatgcttcagtactactgtccctcatcgtatatggcgagcaatttcagtacttttagcagccaaggcgtattaaaatcttccagttactaagcgcaaagggagaaaagtctctcagctttgaaaaatatgctggaaatctgtagagacattaagttgattagtgtggttgctaggggctgaggggttggggagttggggaatgactgccaaaggtatggattccttttgtggatgaaagtatttttaaattgattgtggtgctggttgcacaaatctgaatatactaaaaacattaaattgtatattttaagtgggttaatcgtatatgttaattatatctcagtaaagttgttgtgtaaaaactatgctgaagattacatttggtgatga

SEQ ID NO: 68359 - DNA, 1026 bp, Homo sapiens
aacagcctggccaacatggtgaaaccccatctctactaaaaatacaaaaattagctgggcatggtggcagcacctgtaatcccagctactcagaagtctgaggcaggagaatcacttgagcctggaaggtggaggttgcagtgagccagaacgagccattgcactccagcctgggtgacagagcgagactctgtctccaaaaaaaaaaaaaaaaaaaaaggtatgactcttatggtggagtatgaagggcttcggggttcattgaacaccaactggtgaattgcagttcaactctggcaggaatcacctggagttagaacagatcctgcaagtttaagggtacgtttcccaaaaagattgcccctatttcaggtgccaaccacacttgggtgtccccaaaccacttgcacttcagaccaactggctacacagtcaggagtatccatgactccctagggttgataatgcactagaatcactcatggaactgaggaaagtgctgtaattatcatttatagttttattataaataatacaaattaggaccagtcaaatgagatatgttaggcaaggtctgcgagagtaccaaacacagagcctctgtgctttctccctgcggaatcagggccattaccctcccagcacatcaatgtgttcagcaaccaggaagctcaatgaagcttcaatgtccagagtctttcctgggatttcatcatgtaagcatgactgattgaatcattggccacaggttgaactcaatctctgtcttctacccctcccacaggttgggctggctcagacatccagtcactattggtctttccagtgaccagctcccaatctgaattgtcttgttagtaaactcaggaataatcaaggagctcatgaataacaaagatactcctgtctcttgagaaattccaagaatttttaaagctccatgccagaaacccagaattaacaaaggccaaagtctttattgtaccataggggtgaacattttgaattccattttaagtatgttaa

SEQ ID NO: 68360 - DNA, 975 bp, Homo sapiens
agggctctggcgggacccagatgtggatggggcagggccgagcgtggggactgggcttttcaatgacgggcggggttacggttgggcagcaggtgggcgtggcaggcataggcggagtcaatctatgagtgggtgggcctatcgccaggccgagagtgggcgtggccgacgtggggtgggtagcagccgaccgagtcggaccggccagttgggcgcgcttccgggtgtcacctccagagggcgccggctgcggagccgccctcagagtcgcgaggccggacgcagcgcggcgccgccccactcgccccagccgccgccatgaaggccgtggtgcagcgcgtcacccgggccagcgtcacaggtcagtcgggcggggccgggcccgggaggagccgcccctgacccccgcgaccggctgtcttgcgtggggggtcttcctgcgccatccttggggccgctgcggcccctccgcgagcctggtccccttcgcgagctcggtccgcgcagccgcgagtccccagggccggcttcggggcagcgcggcggccggagagccccctgcacgtgcccgaccggccccggcgcgcccctggcttccggctctcggcagagggtgcaggaccagcgcgcctcattctcagcacctttgtcctgcgtgcgggatggcggagcctcggagcatctccgtggtccgctcttcagggagtgttgatgaaccacgcttagagcatttccggagcaggcactcctcccttttcactgctgtattttaaatgttcaatttttgcccatttttacgtattccaatttttatggggcttgactcaggatgaaatgcacagatgcggagagttgctccttgggctgagctttgacagttgcgtgcacgtacgtgactggagcctaggctggatgaggggcgccccctgcccaggacgcccctcgccctcgcccgctgaactctgcgcggagggg

SEQ ID NO: 68361 - DNA, 1069 bp, Homo sapiens
ggagagttgtccttctgggtttgctctggttgggcgatcagagtccatagcactgggtgggaaaacatgaaagaaaataagtgaaagtgacatgttcctccagaatagctaaaggtcagcgctcaccccattcaaccactgtattccctagacttagcatgaggcggtttctaaaaatcaaagccacacttagcgtggtaatgtggctttgtaccatgtcaacctagctaagcgggaactacgtttcccagaattccttgcctgtaggtttccggggttagcacacgccacgtgacctgatgcgggcttcgtgaggcggaagtgacgcagtgttgtcgtctcgtaggcttgaaaggtaggtgcccgacattagggactgtcgcagcccggggaattgtccccatctgctggcttaccttgtgggcgtggatcccctctaactttcctaattcccgggcggcccgcgggcctgcggcagattcagctctcaggactccactttcagtttcttccacttctggggcaggctgcttgtcctgccactctcaggccccccaccagacacggcagcaacagctgttcctaagtgttcaactcgctccttcccgcaaatgtagaagctcaaatccctatagcaaattccatattctatgtcattcttaatgcttccgtctctctggttgaatctagattggatacaatcagtgatgcacatttaccagacagaggatgtgcagcgtttactgttgatttctctcttttcctccctatcacctcagtttagttccaggatccacactcctccaccatagtcaggagattcagggaaagttggcagggttcagctttcaagttgacccttgatgaaccatggtcaatcctgttaagaggcgtgaaagccaatcccagccaatgagactggggagaaatcactgaagaacttgtggaaaacagaccctctggataaaagacacgtgtggggaaaaaggggctttttaatgttattctggatgtttcccaaaagtactgctgctgccttgcctccctgacagacactggccttaggatg

SEQ ID NO: 68362 - DNA, 2358 bp, Homo sapiens
tgggaggctgctaggccttgtggggcccctaggccgtgcggagctccaccactgacactgctcaggtcattctgctgaccatgagatggggaagaaccctctaatctgtgtagttgatattgataggattcatcacaatttcttacagatccattgtaccagttgctctcaaccttggctgcacattggttatcacctggtgtgttagatttcatatatatttatgattctctttctgtggaattacacacacacacacacacacaaatatatgagagacagaggttgatttatttaaataattggttcgtgtggctgtggtggctaacaagttcaaactctataagaacttgccaataggctgaaagttcacataagagttgatgtagtcttgagtcccagattcacagagcaggctactaggctgaaaactcagagagaatttctatattgcaatcttgagaccaaattctttcttcctttggaaacctcagtctttctctttaaggccttttactggttggatggaacccactcacattatggaaagtaatttgccttaatccttgtttactggtttaaaggttaattacatctaaaaaatactttcacagcaagcaacatttagactggtgtctgaccaaacaactgggcactgtagtgtagccaagttgacacataaaattggccgtcatatctgattctttaaaaaataccagactggaacccagatgagtcattttgggaatttccagctttctgttactgatttctagtttaattccattttggtctgagagtagacatgtataatttatatccttttaaatttgttatggtatattttatgattcagaatgttgtctatgtttaattttctctgtgagcttgagaagaatgtgtattttccttttttttgattaaatagtctataaatgtccattatatccagttgattgatggcgttcttaagatcaactatgtccttatgattttctgcctgccaaatctattcatttttgatagaggagtgatatggcttggatgttttgtcccctccaaatctcatgttaaaatatgacctccaatgttagaggtgggcatggtaggaggtgttagaatcatgggagtggatccctcatgaatagcttgatgccatccccgtggcaatgagtgagttcttgctctggtagttcatgtgagagctggtagtctaaagaagtctggctcttcctcgttgctctattgtttccttgcttgctctcttgcttcctcttgcctgctctcccttcattgtctaaaccataattgtaagtttcctgaggcccttaccagaatgagatgctggcaccatgcttcctgtacatcctgcagaactgtgagccaattaaacctcttttctttataaattatccagtcttaagtattcctttatggcaatgcaaagagactaacacagaaaattggtgccaagaaatggagcattgctataaggatacttgaaaatgtggattggctttgggactgggtaatgggcagaagttggaagagtttagagggctcagtcacaggggtggaaggttggaagagtttagaggttggaagagtttagagggctcagaagatgacaggaagatgagggaaaatttaaacttcttagagtcttgttactttgttgtgaccaaaatactgatagtaatatagacagtaaaagccaggctgatgaagcctcaaatggaaacaaggtagttattgggaattaaagtaaagatcacctatgttacaccctagcaaagaacttgacgcgttatatccatgccctgggggtcagaggaagtttgaatttaagagtgatgatctagggtatctggcagaagaaatttctaagcagcaaagcatttcagaagtgatctgatggcagtgagtcatggtagaaccactgcactctgacctgggtgacagagtgagaccttgtctcaaaaaaaagagaagttgcgtggctgcatctaacaacctatggtcagatataggaggaaatgaatgatttaaagttgaaacttacaactaaaaggaaagcatagtgtattaatttggaaaattcacagcctggccacatggtagagaaggaaagagcatttttaggagaggaatacaagcaggctgtggctgcaaaacaaccacttgctggagagatttacatgactgaaagggagtcaggtgctaatatccaagacaaggaaaacaaggtctcaaagtcattttagaaaccttcagagcaacccctaccatcacagaacctgaggcctaggaggaaagaatggtttgggaccaggaccagggcaccactgccctgctcta

SEQ ID NO: 68363 - DNA, 783 bp, Homo sapiens
atgaatctcaatcacattatgttgaaaagaagaaggaaggcacgaaaacatcctatatggttttatttgaagttggagaacagtaaaaacaatatctatggtggtagagggtgagggtttgactagaaagaggcacagcaaactttctggaaggtagaggcactgtgtatctggattgcattgaggaatacatggaaatatgtatgcatatttatttctagaggtgaattagcagttaatcaggttagtaatacaggtctagggagagccttcaaatcctctttgaagattccggcgcgctgaccgacgatgctgagaaattccaccaggtggcgctgcgtccgctgacgctttattatcgggcgaaaacgtggaaaacagaagcccactggaggtcttcctagctccccacccccatttcgaccccctgcacctacacacattccacctcttttttgacctgagtatcctcctctcttttcccacctggccatctgccaaaccatccccctagcctggtattactaagaagtgattcaccctctcatttcggagacctaatcagcaggtgggcagtgggtaattttttttttaattctgtttggtgttgcatgtcaggtttcgttggtgatggaaagtcatttgaatgttttagaaaaagagcaatataataaggtttaattctggggaaagcagtacagacacttggcagagcaaagaaataaagctaactggggttctttgttattttttttttatttctttttggcctttttcattttt

SEQ ID NO: 68364 - DNA, 2507 bp, Homo sapiens
atttatttaatgggtgacttggagcagaaaccgaagtgcagtggactgttttcctgggatctgagctgatgataaatgataaataagtcttgggattttagaaggcaggaatcacgaaaaccaacaccaatgaaatccaagtctcctctgctactatctgaagtggaacagaacagaaataaggtctgttttctttccgcttcgctgttctgtttctgtccaaaacaaccgtctctctgacaccttcgaggtgtccctttgtctctttgaggttccctccgtgacactggctactttgtaactctaacactgtcagcaattaattcccaaaggtgaggtccccgtgggaagtgggaaaacccagcgaatcaccagggacccgcctgattccgaaaaggctggatgctggctgggaaccggccccgcagctccggcgtccccgcctgcctgcgcggccttcagctggggttacggagggctcccagcgccgatccaaaccgcgttccaggcggggtgggcgggcccctggccagcgaggccgaagcaaaacaacccgcccaggcgtccagagcgtatccaaccctggagaacctgccccggaaccaagagccgcagccagctcaggcctctcgagtggggcctttccagcccctgcaacagatcccgggatctgtagttgggcggaggggctcgttatgggaaaggggtgcgtgcgcgtttgtgctaaaacaagaaaggcaagaatctccgagaacaaaactctggtcctcgcctggccggggaccgcagaagacaggggcggcagcgccaaggcgggtcaggggccggtccagccaagtttgctccggcttagataaactttctgatggcagtttttcctggttgcagcctgggttccttgtaacagggtaagcgtagcgggtggttgtcaagaggggcggaggctggcggttacagggaatggagggatgggccggacctggggtcgcgcaggcgccttggtcgctgcctccgatccgatcacccccgccccatctcctctgcgagctcaggaaggtggctgggggagggggatggctccctactgccgagggacggcccgaggcaaacacaaagcccttccctcccctcctcctctttcctctcctctcccctcccctcccctcctttctcccccttcctcctcttcctcctcctcctcttgctcctcccgggcggggaaacccagccccgcgctcgtctttggggccaccggtcgcccccgcctccgggacctgcggggagggcccgcgagaggtaaggggcggtggcagcggagaccccaccccctgtgcccgcacctagagagcccggagaggctccgggcacgggcggggctctctggggttccagacgtgggtgctgctgtgcgcactctctccctactccggaggggacttgaggaagacagccagagcgcgtcctcggggatcgtggggaacggaagggggaagggggatcagggagtggggacaaggggcagagtgacattccggagcgcgaggtggccgctggtcccggcagggtcaccgggtgtcctcagctgacctgtgcggggctggggtgagggacagctggagggtgcaggcactatggctcgaggtgcggaggtgcgggtgtgcgtgcgtgtgcaccggacggagtttggtagggacctttgaggagttctacctgcagggctgcctgtggggtgtcaagtgctccctgcgcctgagcgcgcgggtcagacccggtgtcgcacagctttgatccccagcgcggaccccactggtgagtccagccagtgtgcagggcagatgctccgaccggagatttcctcccccgggtggaaaagcaggagggttgttgtgtccgggcagggggcacttgggctgtcgcggtgattgatggctgcgcagcgggcggaggaggagccccggattcctgccgggaagggacggggccactttcccactttgaggcctccccgcccccttctgggcttggcctccacccttggcctgggctcccaccagctcggcgtccacccaccggcggtggcgcgcccctcgaccgcgcggggacagcaggatttgcagaagttcagcttgaaagcctatgatatgttgccaagaaatacagggcaagatcggtcccctgggccctgagaggcgcctgtcttctcagagctcttaaatccctggggctttcctaattccgcagtgtagcggcacttccttgcgcggttttgggcacattggggtttcttaggaacacgctgtcatcggtaaggaaacatcagagtactcttcgaccaaaaggactgtaaatactgaagcaaaaagaaacacttgctgggagtgcaaagggcttactgggaaaaaagaaacacacagggcagcactccatcattaagataaatagtattttaatacaatctttttaacaaaaccaaattgaatgtaaaaaattcatgataagcaaaaatc

SEQ ID NO: 68365 - DNA, 630 bp, Homo sapiens
taaaaatacaaaaattagctgggcctgaaggcatgtgcctgtggtcccagctactcgggaggctgaggtgggagaatcacttgaacctgggggcagaggttgcagtaagccgacattgtgccactccactcagcctgggtgacagagtgaaactctgtctaaaaaaaaagaaccctgcttcattgttcaatgggaacagtcatatccagtctccctcccccacctccccatttgtttgttcccttgcctggtggtttgagagttgacagtggcatgcaacagattgagcaactctggcttcagatgtagtcacgttcactgaatgcagagcttttattaactttttacctaattcaaatgtaggaggatattgtcataagtggatatagaggtgctaattttcctttttgcctcaggttccaatattgcctctggaatactcatgcactcccgtgctttggcacctccagagagagcatcacaggctagggatgggtagggtcccgggacagtgaagggcccttgcttttggaacttgggaagaaggctgttgacaggagcttttgggtttggagacttgctctcagtagttggaggctggagacacggggaaaaccaacctgctatcaa

SEQ ID NO: 68366 - DNA, 836 bp, Homo sapiens
tatctctacaaaaagtttctttaaaaaaaaaaaaaaaaagtatacctagagttcctggggcttggcctccctcccttccccttgccacagtgtgactaaaggtctggagtgaggctgtgttatagaaaggcaggctggagggatgacatcactgaagaattccttggcaagcagtcagtcagccacctttgggtagtccctactttcacctgggtcgctagggttggttaatttttaataccaactgagtgacccatccccttctccaccttgactgagtcctgaaggccccctcaaaagctaggttttagtgccctatttcatggtacaccaaggagtgctctggcaccatctagagcaagccctagtcatctgcatacctgagcgaagtcttccagcccctgctggaccctgttggaaacaatgtatcctctcttggacacagtccatgccttagacctatactccaaggagcacaacctgaccagcctctcccactagacccctcttttatcttctcttgttctcgggcttctcctgccctcagtgcaatagaacttcattaactaaatacaattaaccgagaatgctttattgttcctgttgttctacctgctcactgattagtgaaaaaggccagcactgccatctgtgggctgagaattgtaaagtgacttaatgaagatgaaatgtattcctttctcttcattctcttttacctgtctattttcctcgattctaccctgttctttcaaccctagcagatgcagcttagaagcctgataataataaggataagcaagtcttgctggaaaataactagcatttattgaaag

SEQ ID NO: 68367 - DNA, 2695 bp, Homo sapiens
acactgttgttgagtaagggggctgggaatacagttctttccatatgacttctttctttctcgtaaattagcttgtcttttcaatggaaagttttcatgaccttcaaacttaaaatttttttttaaaatgactgttgggtgagggaaaacctgtgtcaaacagtgatccaagacactttaaaaatttctttcaattcacatagttcgaattgtcaagtctgatcctggaataacatttgtctgtccaacgtgtaaaatattgagtaatacaaagataattatggaaatattcagagaacttccctggacccagacacagagccacctccatttcctcctacctctcttagaaaaaaacaaaaagcattaaaaggagagatgacctgtctccctgggagctggttaagcgaccaggcaaaaaaagtgagatgcatttcttagattcggacttgacctgacaggtcctctagggtgagtcactttttcctatttcagtcaatttggctgtaaaataattacaataacgaggtcttgtttactgagactgaagtccgtgctgcccggcctcatttaacggctagaaagaaaaactgaaggttgtgattagaaagcttctgtagccaacctcatgcagcacggagatgagaatccaggacttgagtacactaagtgtctattaagtcagaactgtgagtagtggaatccaatataattgcttttgctgcttcttttgtgggtttgcacttgtgacctaaagtaaataaaatagcataaaataggaagctggggtgggggcaagaggagaagagattgggccgatgttggtcaaaggatacaaactttcagttcagaaggaggaaaaagtccaagagccgtattgtgcaacacggtgactgtagttaataccaatgtattgcgtatttgaaaattgcggccgggagcggtggctcatgcctgtaatcccagcactttgggaggccgaggcaggtggatcacttgaggtcaggagttcaagaccagcctggccaacatggtaaaaccccacatctaccaaaaaatacaaaaattagccaggcatgatggtgcacgcctgtaatcctggctacttgcaggctgaggcaggagaatcacttgaaccctggaggcggaagctaaagtgagctgagatggtgccactgcactgcagcctgggtgacaaagtaagaccctgtctcgaaaaagaaatacaagcaaacaaacaaaaaaaaaaacgaaaagaaaagaaaattttcgaagacaggagattgtaagtgcacaagtgcactcagaacaaaaaaaagcatatgaggtaatgcatatgttaattagcttcacttagccattctgcaatatgtatacctatatatatcaagatgtcatgttgtataccataaatatatacaatttttactggtcaattaataaaataaaatccttcccccaaaataggaaggttacgttggactaaagaaattaagagaagaggagaggagcggaggggatgggaagggtggggaagggacagtagaggtgggcggggaataggcgacgggggagggcagaggagggaacaggcctgtccttaatccttctcaagctctgtatcttgccaagatctggcctgtggcccggcgcagcaaaagctgggaaaatgccagtgactcaacccagttccattgatcagtgaaatggaaatcggggactctgtgtttcaaccccagtcagccagcccacagccagggtccaggtggcagcctcagctcctggcctcagtggctgtcagtagaatgggttggggagccagcctccagcggtctcacatagcaggcaggcagtgcagcctggagcccagccaggggacgcaggaatcctttctgctttttaaggacagactttgctttaccacagcagtcgctcttggggccacacggaaagccaccactgagtttactataaagtgacagaggctggtgtctctaggagaatgaggaatagtcacttcctgcctttgtccattagcgccgaccaacgcgaccagctccgtttacattctttcagtggtgttgttgaaagggcttggcagctcccaaatgtttgcagtgtccttagtcctatgagggctgccttcttcttcttcttcttctttttttttttttttttttgctagcttttagctagtatctggaaacatctactggacatgttggactcattttctcaagaatccactttacccttcagggaagccaggaaaagaacaagcttccaaccggtacaagtctggaggaatttcacagcctctcaaactacggtaccctttttgtttcttagtctagcctgttactgggatggttttaggatgaagctgctggggtgacatctgtggggaggcatggggaagcgcaggtgaagagaagttatcgttttaaatggtattaaattgctgtcaatattgagtcaaggtgtctaaggttatggtttggggaagaaaactatagctaactatagctactacagaaagatcttaaaccagaactcttttggggccctgaagaacttttttttttttctttcgagacagagtgttactctgtcgctcaggccaaagtgcagtggtgcgatcatggctcactgcagcctcaatctcctgggctcaagtgatcctccctcctgagta

SEQ ID NO: 68368 - DNA, 1015 bp, Homo sapiens
tgtattttcagtagagacagggttttgccatgttggccaggctggtgtcaaactcctgacctcaggtaatccacccaccttggcctcacaaagtgctgggattacgggcgtgagccaccatggccggctcagaacatgtcttctgtgttagaaaatgtgaacactggagcaggggtggaggggggaacaacactccaagtaaatgggttttagaatctttgttttaaaaaaaagtgagagagagagaaaaaaaaaaagagagatgtagtctcgctataatgcccagactggtctcaaactcctgggctcaagagatctccctcctcggcctcccaaagtgctgggattacatgcatgaggcaccatgcccggccagttttggaatctttcatgttgaatttaaccaaaagctgatttcagggaacttgttatatcctcccagctctacattccttctcccgtgtgcttttatcacaggtgctctgttatggcaaaaaggagtggccagggaagtgtgtgtcctaggagggtcaagggatcgaggggagtaggggtcttggtgttccccaagccctgtcctgtgctgatacaatccagacagactggccccttgtcccctgccctttgtgttctgaagttaaaaaaaaagacagttgtgcaactcgagtctgtcctggtctgtttaccaagcactggagcatgtgctcggcatgagtcaagcgatgaacttccagatcatcgactgtttaccggtggctgctggctgacatgcctcctctgcacagctggttctgataagccacacggtagtttgtttgagagtactcagatggtcccacacacatggtgttaggggctcttcctgtcccagaacgtgctcagggagaatcagctggtttctgaaatctcttttccagccttttccctggaaggctcaggaatcagtttcgcagatttattccggctcattgctttctactgcatcagcaggtaaggcctcttcctctcatatggt

SEQ ID NO: 68369 - DNA, 1836 bp, Homo sapiens
aaagtgctgggattacaggcgtgagctaccatgcccggcctctttttcaatattagacattaataattgattccatatcatggaaggtgaggattgaaccttcttgtatggtggtcctctccttagggtgaccatgtagcagcctggtcatatgtcaatgcctgtggggcttttctcctgggtcaggtggtttccccacaagaaaattctccagtatcctacgggcgccgggtgcaaagtggggttaaattttgttgccagcgttctaggagctaagcaggcaaggagcctgtgggttttcagctttccgtctgccagctttcacctcctcccatttccaatgcagtgtctcaacgtcacttttcgctgcctgtgctctgacggctcagggacatggcttctgggtctctccaggagtgaggcgctcatcttctcccttcactcacacctgccagagctcattcctgagcccgctcagacgctgcatagggaatcgattgccttgcttcctgctggcttttccgcctgacattggttaacatctagctttctcctgtctgctgagttttcaagcccgcaaaattttgttaccagttcccattggctgctgtctcctcttccattctttttgttcctatggatgtatgcccttttaaaaattcctttttaaattttctttaattctcattttagtgaggtattggtaggggaaagataggtaatgcagcctgccttgtttaattgaaacctgtagttttaataagaaaaaaaataaataataaaataataaagaaagaaacctgtagttttacatttgaatggtgaatgaacttatacatcctagttagcaaaactgaaaatagattattacaatgataggccagagtcaatgcatctatcttatccagttattattttatataaaaaatttcttatatgaagtcatccaaacatccaagctgtttaattgtaaagtatgctgcctaggatatatcaaaatatatatttactgtgcactttgtcctttccatataatctgaaagaaaagaaacagagcaacaacagatgaaccatcaagctgtttgcttgttttcaatgtggaattttgcaatgatggatgtgaatctgggtcagcactgtttacagagagcacatggtgttttgtttcaatgagcaggaaaatgtttgccattaaatgtggtaaaagcttgtagttttttccaactaagcagtaaaagaaattactctgtgtagaatgataaataaagagttctatgagtcatctttaatgtaggggaaaatgtgcagccgggatagaaacagtgttttactgccggctaaaaataaaatcaaatgcactgaaacagaagtcaataacagcatgtcctagaagcccaagtaactgtggggtttaacgtagttcatgcttttcaaatatacttcttaaaatgatggtgacaaaaatggaaagactatgctgatccttccttctttccttccttccttccttctgtcccctcccctcccctcccaccattatttatctccatacttctaaaaatatgctgatactgctgcttattggtttcttttcctttttcttttcttttttctttttttgagacggtgtctcactgtgttgcccaggctagagtgcagtggcacaatctcagctttccttctccctttctcccctcccctctcttcccttcccttcctttcttttttaaaaacaccatgctggagtgcagtggtgcaatcatggctcactggagcctcaaactcctgggttcaagggatccccctggccttaccctcctaagtagctgggactac

SEQ ID NO: 68370 - DNA, 1412 bp, Homo sapiens
agctaatttttatttctttccttttttttttttttttagtagagagggggtttcgccatgttggccaggttggtctcgaactgctgaactcaagtgatctgcccgccttggcctcccagtgttgggattacaggcgtgagccaccgcgcccggccttctttttgtttttaaacgtggtattgacattttaagatgacatctgcaactcgcaacactgggacaagggattctgggtcataaattctcccattcctcatttactctgcagcaccgggtggctgcgaactccgctcttctgcttgggtttccgcatcaccagcagcttctttccttcccaggtgtcgccgcctgctttctgcagccgctgcctgggaggggttccgaggttctgggcagccacagccccggaggccttacaggagcgacctggcaattcccgccgccggccgccagaggaagctgctttgctgctgtcgttgcccagcaactcgtagcccggaagcagtaccccgtctcgctcggttccgcggcggccacgctccgggagacttccggcagggcgggcgcggggtcttggcgaacggtcttcggaagcggcggcggcgcgatgaccacgctacgggcctttacctgcgacgacctgttccgcttcaacaacatgtgagtgacacgcgcctagggccagccgctcttggccgggcctcgcttcccggccccgccagctccggccccagccgcgccttcccggccggaccccaagcccggacggggacccgcgagaaccaccccccgccggccaacgtgggcgcctccctggggccacagggtccagggagaggtgggcctggagtcgacgcacgccggccttggcgaccttggccgaggtgctcaaactttgtctctggaccctgcgagctggcaggttctggggcagcgctcgggcctccgctcgtggtcgctgtcaggaggcgctggggtgatggggcgagctggagacgcggcctggagcccacgacctgggcttctcgccctgccctactgcttgctggttcgtggccgggccgcgcctcttctgggcagagggcaccgccgacggccaggccgcagagggggcttgcgaggatcggaagctggtcagcagctgttgggatgtgtacatcgtgaagcccacctggtggccgtggttaaattgtatccaaatgaaatgacactgatcactgcgtcccctgcagcagatgctgtctcagtcatggttagtgtttgcaagtttagttactgtagctgcgcaccccggtgtacacacctttcctctgtgaggagtcacggcagatcttaggggaggctcgctgtgcccagagccctggatgcagtttctttggattcgagttaaggccagacctctgatttgcagg

SEQ ID NO: 68371 - DNA, 1292 bp, Homo sapiens
ttaattaacttatgatactatactactcctaccgtctactctcgccctccgctgtcagctgggctaactcctattcagccttcaagtctcagcttaaaggtcatttcctcagcaaaatttactttcaggaccccttcatacgacccccttattcacgcccatggcatattctactttgcctctcggtaacatctagcaaggtcgtctttatacagaaactcgtgttttgagtactgcttgtggccagcgtacgagcgtagcttcccagcgcccagtgcagtgcctggctcagtaaatcttcaccgaaccaccccactccactccccagcaaaaccaccccagaacgaaggccacgccaacgcgggtcgtgctccgcgatgacaagagcccgcgccccaccaccagctgcccttcctctccatctctcagggtgagccttctccccggcgggaacactctctcccaacccgggcaccctcagggctgagggatgcccctttcctaggccacctcctacaaggcccctcgcgatcgcctaccttggccactttgggaatccgctgcttcccggccgcggtggaggccgccatgtctgcagcagtcgacctctggacacctgtccccggcacggacgctagaaatcggctctgagagctcaccgaaaccacaaagctttcagaaaacaaacaggatctcggaaccggaagcggaacttgcaggactgacctttgacctctcgcttgagccgtgacggaggcggcaccgtttccatggtgaccaggctgcgcgtcctccttgcggcagcgcgtggagtgcggcgtcctggagctgcggatgaggtgggtaacgccgtgctgactagcagcgacgcaaggactgcggtgcagggcgtccagggcgcatccccaggtcagcctccggaactgggatgaccaggcgaggacgagtggctctgtcgagccgtggcgccctgcaagggagtaagaacggagctccaatctggatgctcgagggcgggggaagaagggagagcgaggaaactaccattcccagcatgcgacggggcgagctgccgcccttttaggctgcaatgcctcgagcattgcattctagtagtctctgggtccacgccccctcgtttctggtttcgggacagttgtgcccaaataattctaaggtgcccaaataattaactctaaggcttggaattaaaaataacagaaggtactttgaagccagatattaggaaaaaatataaatagagtaactggaaaacaactcagtcttgtgat

SEQ ID NO: 68372 - DNA, 795 bp, Homo sapiens
tctttacaattcactgttctgaggcagagcatgaacatggaaatcttttgtcgcacacacgagtttgccatttatctcacaggaaagatcttataaaagctgaaatttgaatataaagatgagttgctcatttttcttttttatggaaagacaaatgtcctaaatttggtgaccttttctgtgatgacaaggagctgaattcgttcattcggcgtgtactcactgaaaaaatatttactctgcagcaggtgctgaggctacatccagggttggtattcacctggaaaacacccgcatggctggcgtcctggtcagtgccaaactggtgtccttatgtacccactgttaaatatttccactctcacccttggaggcaccagtgaacaaagcagacagaaatctctgccctcacgcagggggcacggtgtgagtaaaatcagtgaattacatagtaactgagagggtgataaaggctgtgggaacacacagcatgggcagcccaggcagtgctgggaggtgtgggtgcacatgtgtgcggggctctcgcatagggagacagtgaagaggggccaagggaacatgccacgtgggcatctggggagcagtagaggcagggggcatggagggcacaggcctcccctgaaggcctggatgctgagggaggcagggcccctggtgagggtgagctggcagtgacgtggctgactcacactttagtcgctggccctggctgatgctccgaggagactggggaggaggccacggtcagcaatgcgcccttagccattcctttag

SEQ ID NO: 68373 - DNA, 1004 bp, Homo sapiens
gatgcggaagggttctcatggagcactcactcctgatcccatgctcaatggtaaatttaatggaagacaacatcaagtatcagtcctaatcagaaccttatagcagtatttcatcctgctgagcatgtatatttcacaaccacctaaagtttctgagtgactcataagtgccctctcctaacatgatgaccaaagcctggggattaataagattttccatgactgctgacaaactggatttccttaccacctgcagattaggagctgcttgtggagcccctatcatgtgttccttgactaaagaagtacagtgctcaggggaggcacacacctagaaggtgcagcccaaattaatttctttctcaggtttgggtccagatgaagacacttcatatccagggactcttcttggcaagatactgtgaaagcaaagagagccttttgcagcaaagtgataacgctgaagtccacgtggcaacactagccagcatgccagcacaaggaagtgcccagttgttggagcaaagacaaaaaagaatccttaggacacagaaaatgatctgaaatacccatttgatttgtggggatggggattaatctttcaaggatgcaatgcagacatcttgatggtccaaagcagggcaatgaacaactgaactctgttccaattcctcacagataacctccagcctccaggattggaatattgccatggatgggcctaccgagaggcaggccacattgaaaatgacaaatgaagaatgtgcgtggcttaacttacccagtttggtcagttattcattctgctaaaaaactgcaagtattgtgttcataacaatgatatggctgtgatttctgtgtccagatttttggcactgcctttatcatgcaagaagtgggtaacttaatacaaaggtctagaattcaaatttctccttgacttcacacatatacctataatgtgaacacaggatgtgtacacagaatataaaaagcatctgcat

SEQ ID NO: 68374 - DNA, 484 bp, Homo sapiens
ctatctgatcagaaattcttatataatgaagctattaatgctaaatcggttaatgttaacattgctccaggtgtctctacttagatgcaaacaaaaaggctaacattatggatataaaaggccaaatgttgccatggattctgtaacctgatagagaggacagccttttcatttgattagggaatgcaatttaaataccagggactgaagccaaacaaacagactttccctccgcaagcctcttgcattcaccctggggtcagtggttggtgaacaaaaggtcagccacacttgccctggaaatgtctggattaattttattacattgtaatggtttgtactttaaatgtaaggataatactaaatttccagttggccattattctcttcttccctttaggctttttgaattaaaatattaagaaagcgatttgctcaattcatcttgtcagaatttatagccaaattcattaaatgtgcaaac

SEQ ID NO: 68375 - DNA, 824 bp, Homo sapiens
agtggagctccagaaataaacaattaaatgattaaataaatggagaacaaatcaagaaaacaacatgaaaatgaaccatgtaccatccaccaccaacacaactcaaaacaagagtgttaagtctactccacgtcaaaactttcagagtaaataatgcattttaggaacttggtcattaaatcttaggttcaaattccacctcccttacttctgacttgtacacacccctgggaatatcccttaacctcagtttgctcatctacaaaatgcagctaaaatcaggactgctagattttaagcccttgctcatgactgtcacccccagtcctgtctttttcatcctcatctcaccttccccttcatgtcagcttgaaccttgctccagactctgtagtgctgcaagcatacccctggacctttgtcctccctcacccagccactgcctgctgtgtccttcctccttccactaagggcctcacaaaaggagtctgactcagggatctgactgtcactgcacaggtcacctgctcatgttatctggctggacccaccactctggtgaaagtgctctggcaaaacctaccaccaaacacctagttgggaaatataacagctcctgtttcattctcaccttccctaagctttctgaagcaactagcactgctgacctttctcaacttcttatttgctttcttccttgacttgctagaaatgactctttcttggtcctctttccacttccctgactttgctttcctggtgacattccctcactctgctgtccttaaggatgtttctgcccacaaggttctagtcttgggcct

SEQ ID NO: 68376 - DNA, 966 bp, Homo sapiens
agtgctgggattacaggcgtgagctaccgtgcctggtctaaaatgattaattttatgttatgtgaatttcacatcaataaaaaaaattaacattcaaacaatgctgcaaagcacttcttgatggtagaataggcttttgcgaaagaggaaactgggtcaaatgggatatacatttcaaagatcattgatctgtattaacaaatgacttttcagaaagattgttccaagttacagtcctatcaaaaatggagacagcttacacagtatactatcatcagagaaaaaagacaacagcaaatttgctaatataatggatgaatatattttaatctctaagtttatatatttagattactagtgaggaataaacactgaaaacattcttatgggtcttggcatttgtccatttgcaatttacatatacatatattttgaacatttatttatcacaatttttctggttaattacacgttttttatgtattatgtatgtaactatttctcctcttataaatttcaaatatttttccagttcattatttactttttacttcaaaggtgatgtgtctgtttctatatttatttattttaggagcagggaaagagaaatggaacaattctttccaaaataaatatttgcaatatgacacacacagacaaagacacagacacatgttgagaaagactagaggatattttacttccactccaggagttcagcataagctataccacgtcaagcctaactggccaaatgcatcctcatcttattagatactatagagtccatggaatcgagagagagtctgcactgtttacaccaggaatatgaccagacagaaataaaacacggtaatccctaacagaagttgtaaagaagcaatgtatgtcttcagttcccctctcttccatgcagttctgaaaacactatcaaagatttcatttaaaaatttttccaaataaccc

SEQ ID NO: 68377 - DNA, 3151 bp, Homo sapiens
ctcagacacattttacaaaaatctagtccctacaaagatcacagtaataaacaaagcaaactgggccactccactagtaagtatatcaacaaaaaacatacacctaaggaaatataaaagaacctctccatgttacaaaactgaggtcatgatgagttcagtgaaatgataaaagaaagttccctaaaataagacctacaccttagagtgaaactacaattttacaaacttgaaaagaatcaactttctcagaatgggaacaatgtactgtgtgctaagaaataacctgatctaggtttacttgattctgcctttataaaatgtagccaacttaatcttgcagacctggacagaacaaaaatttaaacgctaaagcacagaaaaaggctcaaagtatcaaacgctttaaaacacagctcaactctcctttatcaaaaatgtccctgcagtaggtgttaatcagtcactaccaggaactccacacaatgcaacctgtgtattgtgcaacctgtgcgtgcatggtatctacaggaagtagaaaattcagtttaccaagaacgccacacttcactctccacacttcactctcaaaagtcttgaaaacgaatccctgtaacagcaactaatttacatttcatttcaaactgaacaagtcagtgtaacctcaaggtatgtgagattgtgaataacttcacttggcaaaatcaggtgtggtttggtttggcttgggttcttctccccctcagaggtagaatataaatagaaataatcagcaacttctgatctcatgaacaagatctttatttaaaatcttcacacgttaaatcattttatgcaatattctttcaagtgacagacacattagcactaggcgatttttgtgaattttgggactaaaagacacctggaagaaacataaggtgttctttccttcgccaccaaatacacaggtaagtgtgtctatagatagcaaaggtgttttcatcccaaagaaaagttaagacttaggatgtaaaaaaatacagaaaacaaaacatagcctaggcgaaccagctacagatcacatgcagcaggtgacaggaagccttgtggacacctcacacccacaggggcgagcttcatcacaggtcaactccaagcccacctgagctcctcagaacctccacctggcaggccataaaccagaaggtggcagacagcatcactgtcatgccggtaataaaggagaagcagcctccctgaacccaagaaaaccacccctctctccaagcaggaagagaaggccccttcacaccaaggacacaaagaaactgaagcagccagacccaaaataaaaattaaatttaaaaagcagcatgggaagacagatgacaaatctgtgctgggatcgcctggaatctcggtctatatgggggtctcacactcaaaagtaaaaataaaatttaaaagggggatgacagagatgagagcccaattaggtctgtgctgggttcacttggggtctcggtctacttagggtctcagactcaaaaataaaattttaaaaatgaaagggggaggtgacagttcaatgtgtgcacgtgatgaccacttgggatccagttcacttgctgggaggacaggggacaggtacctctgtgcccggcctccaggttctccgggagcgcaggcgcccagcgagaatctgggctaagtttaactcgagggcgacgggagcagtgcccgagggccaggctgcggctttctggaaacaaagccccgggggtccaagcccagatccagggaagggggtcggacgcccacccatccccctccccagcctcccagccaccgacccctgcacagaggagcgccctcccggcaggtgcccctaacccggcgccccgacccccgcgcccggcgcgcgcctcacccagcagcgcccgcaggtgcttcaggcgggtcagcacgtccttcttcgggtccagcaccttctgggtggacttcttcacatccccgtggctccttcgggagaacatcccgcggcaggaagcccgggccccgccggcggggcagtaggcgcctgcgccacgcgaatcaaagcatagggtcgaggccggcgcgtgtcgcgcgggccactcgccgcccccagccccgctgctgccgccgccgccgccgccgccgccgcctcagctgtgtctccaggaaggaggggcgggccggtcacggcgaggggcggggcaggaaggcggtgtcgacggggaaccgaaggccccgccccgcgggaggtgccggccggccccttgggcgctacgcacgcgcacacaggccgaactctcctggcgggacactagcccgtccgcgccaaaacctagcggggacgcgctcagagggccgagaaggcgcctcgaatcacaaaggagcttctctcacgcacacgttgtactacaagtcccgagatgcaccgcgagacagtcctccaatcaggctggcggtcttcggcacgatgggagtcagtgggccggcattgggcacgtcgccccgccctgccgcgggccgcaagtgctcctgggaaatgaagttctccagcaggcgacgcgctgcgacctcttttccagggtcgcagaagcgcagggcggcctctgtccgtcccctgccccggcagcctagatcgcccgtggtttcactctccctcctgcgcgcccaccccattttcctctagtgcaacgtgaaccacacacgcccaaaaatctcagtaagaaaagtgtcaaggcttttcaaatgcaaactatttttaggtttagcttctggattcacacaagggagcgagtcgaagcccctctgaccgtgccgaaatcgcagctctaatttcacactaaaatgagttgctttggcactagggaagagcgtgccccggtgaggagttcagccggcccctaggttcctggaacccaacctcacttggggtatggaggtcgctcgctcagagggctccttgggatcttgcctctttgtaggaagggtgcgttctctgttgtgcaagccacatggcgatccagtagcagaaccagaaatagaacctgagggatctgactcaggcctgtatactttttaaagccaggcgcttattccctggggcaagactttgagctgaaagatggtcaggagattt

SEQ ID NO: 68378 - DNA, 1833 bp, Homo sapiens
tttcatcatttctgtccttctttgtatgtccaaaatgcgttgttcataatttaaaaatgcctgaatacactctggctttgaatcggcccagatacaacccttttctggctctgctttactgtttttacttgttaagagtttttctcaagcatgctggagtgactgatgcctccaagaagcacatactaaagaaataccgaattcgttttctgcaaagttagcaaaaccatcaatttttaaaaagtgttgtttaatctgtggccaacagaaagtttttctctgactttaggtttttttctttctccccagctttaaaaaaaatccattttcagaaaagtgacttatataaacagtccccacctcggagaattccaggatatgctttatccactgggcactaaaaccaagaaaactgatctgggtcatttcaggcttccatcctttgttatttcaagtcaataaaaatagttgggaggaaggtgactcaggatctggcttgctctgtcttcttgattaaaataatggcagattaatttggcttatttgattcctttttatctctttattattcttgctggaaattagataaaatgaccattattcctttctcacctccaatcagttgacttagagcaaaaaaaaattattttcaccagattgatgtgattgcacacaagatttctgaattagatagccctagttttccctcacttcctcaccaaaaattccacccatgaaggtatatttcaaaaatagaaagtgaacacaatgaccatgtgagtttccattaagaagaaagagggctatgattcagcggttgtgcaggcactgattacctaatcaaggccgtaacaactgctgctatttagaggtgataccctgaatcataaaaaattttctcttttgatgttccctctactttagaaatctcagagtgttttaaaatatatatgagaacctcaggtacttctatcaatagtaatcaacagtctgtctttactcagtagaaataatatgtaaaaaatactaatagctaaaattcataaagcccatcatatgtgtgaattactgttacagttttcatggatttatatacagaaaggctctgctcctcatgcagagataaaggccatcagaagatcaaataagttagaagaaggaggcaaaatacatccatattcttccagaaaagagaaaagacaaaaattatcagctgtttttgagtggcttggaattagaaacgatcctggttcttctgcttcagagcaaaacaataagaaaagataggtgaggagccaccagcgtggatgctttcagaatctaaattcaaatgatactttttctctagcaaatcaccaggttctgacatgactgactgtgattcttggcagaggatcaaaccttctgctatgaaaccccagtgagaggtgaaatcccagggcaaaaccccagtgtggggctacaaaaagaaaattggttcccctccgggagggccagggtctggctttgagcaaggcaagccaggcacctagggcgccagatttgaagagaagtaggtaactcactctcatggctgtgcaagggctgacctgcagaattgttccaagtccgactctgagtgccagcaaagtgaagtttccctaaagtattaaacctggagatcccaggggtggagatgaagctgagcctgggtctggaaagtgcttggtggtgggggcatcagtacaagggcacttctggcatctcccgttcatctcaaatgggcctgcatagggaaagttattacaaagtccattctcagccaggtgcggcggctgatacctgtaattctag

SEQ ID NO: 68379 - DNA, 1123 bp, Homo sapiens
aaatctggctcttcacaaactacttaaatgccgccattggctgtactgaatgccaagaaaacacattttctgataccggctacctccaagttggtgggctggggagatttttgtgtgagaaatgtttttaattgtatcttcttgctgaagcatctaaaacctgccagagaggagtgacaaacattcagttaccctgcctgctgcttcctcttttacacaagtatatcatcacttcatttcaggaagggcaaacacttttgtgttagaaaattgcctgataaaagggcttcctccattcactaacctcttggcagaattgtgaccgcagacctatggaaagcatgcagaggaagtggcgtttgaatgccaccctgcttaagggttttcatgcactcacagaaaatccccagaccaaagccctaagtcatctctacttacccagagacacaaacaggcctttccactctccttaatgctaatgctttggaaacactgaagcttcctgcaacactttttgatcattcactttccaaaatctgaatcaacacttctaaggtaacaaagggcatctgcgggttctttttggctttggacaaagtgcaacttcagctactagtttcaaaaagaaaagttctagtgctttttgcctgaaatatgtaactaaatggttgttaaacctacagtaacttattagaaaaatagaagtaaaccatttatagcaaaataaattctggagatggtaaggaatgaaatgtaaaaacaaatctttttttaaaactagaaatacatgtgggcaactttgtttaaaagcacagtaagttacagtctgacgacaaacgagaaaaatatttgcagtagatgtgatagaccacatgtgtctatttctagtgtatatcgaccttaaacatcttgataagaaaatcaccaaatttctaatagaaaaatgggcaaaggttttagtgatctattgtactacatggtgaccacagttaataaaaatgtatagtttaaaattgctaaaagaataggtttttaatgacctctccatgcacaaaaaaatgctaagttgttgaggtaatggatatattaattagcttgagtgaatctttccaacaatgtacac

SEQ ID NO: 68380 - DNA, 1359 bp, Homo sapiens
taaattaaaatcatgaatagtcatgaatgaagggacttgattttaggcctttgaggggagaaaaacagtcaaccatatgtctgagttttaaaaattgtaacatcaaaggttttgaagaaagtttcagagagagaaagagagaaaatatagatagaaaacagtttcctgagtagatgtgcgttttaattttggcttctggctcagtctcttagcagttataggattaggatttggggcaaattctttctcttcgcccaagtttcctgaaatgcaccatggggacaatgataaaggctcgctctgggtgcaggaagaatgcctaatgtggctcggcatatagaaagggctcaatgcataatcccgactatcagtgttcttgttgctgctatggttacagtctcctccccccatgttaactgtagaccctctggccctcacattttgagcgtcaccacgctgccagtaaaggaaatggcctgaaaccctgttctccgatattgttcaggacatagtagcctgtactcactgcctgtttactcaagcgaaagggctcagactgcttcctctaacggttgcagagaagggctgaagctttgtcagctgagcctttgagatctggctggctgtgaatgaataattaaactcctgccaatgcaaaggtactgtgtaaattccttaaagcggcctcctgttttctctgtcgtgctcctggctcacccccgtcatccgatgtgttgttatttagccagaagcctgagtttcaaggctcagacgccaccctttcccttgtcagctgtttctcaatagtagttgtgtgttagctttgccagggaggccctggccaccacagacccggctgagaggggctggataggggcccactcgagctaagtgcagccagttcctgtcttagcggattgcaggaagagccactccagcagaacacaaaacagaggagacagcaagggccttttctgcatattgataccctcatggaaggagggaaggagagccacagtcctgtggaaaacttggcctatttgtataacatcctgctactggagggccagaattcatgggtggagaggtactttaaaacaaacaaagagccactcctgaaagtgtgctaggattgaacagaggccaagtcaaatcccagcgtgttcaggagacattaagtgtgtttcctgtctctacccatcagcggtgccataaaatatttctccaggatttttgaatcctaggatgactggttctcagcacagattcccaaagctcagcctcataggccgttcaagtggaatcacacacaaatagctcagctgtgcagagaaaagagcgcctcttttattgtttgac

SEQ ID NO: 68381 - DNA, 806 bp, Homo sapiens
cccatctttgctttcctccttctgtcacaccctctactcatggatcagcaaactcttttggctttgtcttcaaaacacatccaatatctaaccactttttatatcttaacttctaccttcttgattcaagccacctacattatctccaacaattactcactttctttgactcaaagctagaactctctttttgttgctgctgtgcattctgtcatagtttcacagtcaagttgcgatcaacttggaaaacagagctgcaaagtgtacatatttaagaagtgtcccaaccaccttgatgggtgtcttctttccagccctaagctgcctctgatggcttgtagcagggtgaacaacagtatccctcacctggtgtttggaggctgatatggcattaggtcaaatcagggtaggtgcaaaggtcgtgttctgggtgagcagaatgggacattctattgcagggtttttgtttgttttgtttttgagacgaagtctcactctgtcgcccaagctggaatgtcatggtacgatcttggctcagtgcaacctccgcctctacagtgcaagcaattctcctgcctcagcttcccaagtagctggtactacaggtgcatgccactatgcctggctattttttttgcatttttagtagagatggggtttcatcatgttggccaggctggtctcgaactcccgacctcgtgatctgcctgcctcggcctcccaaagtgctgggattacaggcatgagccaccgtgcccggcctattgcagggatttttaaaaacaaaattctaagcgtgaacccat

SEQ ID NO: 68382 - DNA, 742 bp, Homo sapiens
tttatgatttttgtttgttcatttgttttgttttgtgttttgtttgcttatttgtttgttttttgagacagagtctcactctgttgctcaggctggactgcagtggcccaatctcagcttattggaacctcttcctcccgggttcaagcaattctcgtgcctcagccacctgagtagctgggattacaggcatgcaccaccacgcctggctagtttttgtatttttcgtggagatgggacttctccatgctgcctgggctgctcttgaactcctggcctcaagtgatccgcctgcctcagcctttcaaagtgctggaattacaggcataagccactgcaccaggccaagtttttatagtctttacggacagaataaactacctagctctggactttgtgacatgattttatcagtcacttccttgttttcttgtgtatctgagctttattcagtgccaggactctagggcagaagttaaaaaaaataaactggaaacagtcattgtgcatgcaattgaaaataaacaaaacgttccagtgctctttgtgcagaagatttattaacaagtgttttttgttcgctggtaaatcaggggctgtgacacttctttcctttcaaatggattgctgcaaaagaaattataataattatagctttgagaataatttaataatttgtcaacacttttttccatccaacaaccagaacacaacaacaaatagatgtatttttagaaacaca

SEQ ID NO: 68383 - DNA, 813 bp, Homo sapiens
ttaaaaaaattctctgtgtctttaaactctatttttttttaattaatagcaatgtaattggtccatctatccttgctcaactcagcatgtaccaaacccagcaagagtgaagccagggcttggcatggtctgggcgtgtcccttctagatgctagcaggattccttccaggttatgttgcaagcaacattgcctcattaaatacttgtactgatggggatatcaaagcttgcactccaaaatggaaaccgagctacaattgcaatcgaattttgagaaaatgtagtttttgaacacagtggggatgaacaagaggggctcagaccagagggtattttcttatactccctgaaaaggaggtgtcagatcaccactatagcaatcatcaccataattagctgagacttcctctttagtggttgctcaacaccttcatttgactctgctgctcactctagctgcctgggagttggtgccggcatttcgcaacacagccggtccttgcctaccaaccgcactgtctgccaagccaagaaggtggagaaactgcaggttcatgttacaggctgagccaggggaggtttctgagccctctctagcacttggcctaagcctccagacttctctgtcataccccaatggtgccaaatatccagaaactagcttcctaaagtggctttaacaaaaatcaactttattgaggtttcatttaatgcaataaacagcatccatgttgtaatgggtatgatttcgtgagttttgggaagataaacataaatccatggccataatcaaaatcatggacgcaatcgaa

SEQ ID NO: 68384 - DNA, 484 bp, Homo sapiens
acaattattaccaagaggtattccctatgcccatttaaatcggtgctcataaacttgtcttgggcatacaggccagaagtgcctcatgtgttttttgataaaacgtcctcccgagggcaggcagaaatagcagagcacaggctccgctctgtggggtcatgggtttcagagcagctgataggggaatttgctaggctccgcactttcctaatataacctgccaagttttctcagcaaagtaggcttctggcccaaaggaatgagataaaggcaagttcttaaagaaaaaggattcaaaaaccatagcatccaacgatgaaacaggaaagtgtttctaccgtgtggaggaggtagaagttcacatggcaggatgtactttttatttatgcctcgtaagtcaaacagaacacaaaaaagatttgggaaagtgttattgccaaagagcgacatttttatgaggaaagaaagttcaagggttaactct

SEQ ID NO: 68385 - DNA, 485 bp, Homo sapiens
ttcccgacgttggtgatgataataaaacctgatgctttctatgtgctgggcccacttataaacactaacacatattaacaatcgaatcctaaactaatcctgtgttaacagcctcccactttacatatgaggaaacctggggtgacttgcacacggcttggcagctgggacgtggatagggaatgtacacccaggcagtctggctcccgggctcctgctagaggatcctacaggacattaggagcattgtcccttagagctgtctgcacaaacgtctgcttcccaagcaactagttatcaacttttccctctcgccaacgatactggcacctggaacaatccttagattcagcacggattttcgagtaaggggttggtccactgtcggggctgagcacggctgtttagcatttgagggtttgtctttttttacttggtgttttgtgtcgcttttgagtgctgatataatagaacaagcttagtac

SEQ ID NO: 68386 - DNA, 1013 bp, Homo sapiens
accgcgtcaagggagagaggagagggcaccgagcgcccgcccctccgacgtggtccgccccggcctcacgacgccccgcctctgccacgcctcttccccgccccatgcaggtcttcgtcccgccccccacaaagccggcttccgccccgtccctcagcggcgccccgcccccacggcgtcttgccccgcctcctgcaggcggcccggcgcggtgtttacccgcggtgcatggtggggcggtctccttcggcaaccccggccgaacggccacccagaggctgtgctgagctggcgcagcggcagcagcatgagccggaccctcgcatcggccgtgcccctgtcgagtcccgactactacgagaggctgggccaactccagcacgggctgcgggacaggtaagggcactggggcgggggtggggagtcggcccgcgccgggggtcttccgcgtgccctgccccattttccttcccgctcccccgtccgaggttccccggggcccaggcccgcgcgcaacgccccccaggctcccagtggggcctggaggacagtgtttactagagccaccccctgtattgggggtgggagcggagagaggtgagagaccgcccccgccccgtcaatagcagctaaagcctggtctacggtttgaggatgcggccgcgtcacagaatttgcccagaagtgaaggtgggagttcttctgcctgtcactctccatcaagccttgtgagtttctcttgtccccttttacacgccccctccccactctcttcaaattgccatcccgccgtgacagctgcactgcatcaatgatgacaagtcctggaacgcagacggttgtgtgtgtgtgtgtcaaacatgtgcccccgtttaaactcaggagacttttaggggtagcgagggctggctagatttccagcgaagggatgaaatttccagctagagaagtccagcttccagagggttcatgatgcctttgattaagatatgaaagatgggaaccactgaaaa

SEQ ID NO: 68387 - DNA, 573 bp, Homo sapiens
ttgcttctgcagaaaatcttgtgtattagccaccagagggactgttctttgataatttcactcacttagctatttaactaatttaattcatccaaattaaacttgctttcaagccaaaagcatagttgacttacttattataagaaatgtacctgctgaatgggctagaatttgctgatgactggtcagtgcattttcccagcagggcagtctgttaagaaaccaaatatagatgcaaaggtcaaaacaaaggaattgggtagtttaatgacatcattgcggtacggtggcaaccaagaaaggcaagttgctgaaaggtctttctatcaaactagtcagaggccttagaatcaaaggattccaatgactcatctcactttattcaagtcctggaaaaaaatagggttaggtcaggcacaagtaataacaattaagatttattgaggaaggttctgaactgtacctagacttactttcttttccagagattttattatgaaatttttcaaacatacagaaaagtaaaaggaatcatagggtggacatccatatacacaccgcccagattgtact

SEQ ID NO: 68388 - DNA, 717 bp, Homo sapiens
aaatacttatacatctaacatataaggatttaaaatactatcatttaacataatcaacaaaattcttcagtttatctaatacctagtccttgtcagtttgccttgcttatctgaaaaattgtttttctgcgtttgttttgtttgaatcagagttcaaataaggtccacatattacaattggctatgtctctgaaacctcttttaattttgtgacattccctccctcctttttttatgctattgatttgttggaggaattgggtcacttaccctggagaatttacatgctctatttggttggtatgtttaaccagttcctctttactctttattacctgtaaactggtggttagatccaaatatgtgattaagttccaggccagttattttagcaagaaaatgtcatgggtggtgctgatatttaaaaccgggcagcacataatgttttgttaccccatggttagtgatactaagaccgatctgtgggttcaaatgtcgaaaggttgatgacttcaggacagaagtttactattatgtaattttcacaaaattatgaccatttcctagatacatcattaatttggacttacaaaatggtgacttttctaatttgatcatttcttctgcatttattggaagaacttttccttgtcagctacttggtgactctgaaatgtattttttgaccacaaaagcaggataaatgctttattctat

SEQ ID NO: 68389 - DNA, 2107 bp, Homo sapiens
agggggcaataaatactgcctgtgaggtaactcggcgaaatactttcacagaggcctcatgaggtgagcatttagcatcgtgtgtgatgtgtgtcaaaccaagaggggattcagggagacttccaggcttgagcaaacggacaaatatacctcctcttccagacctctcctttcatatggaaaaaattcgtttgggaccaccagaaaacaaaagataaaagtatcgtgttagaacaaggatggattaaaaatgacctttgcttgaactgaaacagaagctatgtgcataagtgacttaactcctctgtaacttggctttcttatcatttacacgagggtgctaacagtaccctcacaaggttcaagtgaagattacataggacaatcccttagtcaatgtcttggtacactgtaaaggctcagtaaatgctggaaaatcatattagcaactattttatacccgtaattgtagctggaagattgtattggatgctaaataccggctagattccattcggtaactatcataattatttatttgcataacaatcaaattattggtgcaaagcagccattattactgtaaaatgctttaaaatgctccttttgatagtccaggtacgtactgcagcacaaaactaggagaaaccaggaaatggaagtaacgagtaagtttggatgcttcgattctaccctagattgagacgggtgagcatagaggcaaaaaaagacattttcttccaaacaagaggtgaccaaacgggcaagggagacctcctcccgggcatgcagagcgcagcgattctgtgcccagggagccggagggctggggctgggagatcccggcggagccccggcagagcagtcgcccgtgagcccccgcaactcagacgcgctcggcctcgcgctccggggctgggaccaccgagggcgagctgcagccttcgccacccggtccgccgccggactccgcctcccacaaacagcccggcaaggcccttttccgccgctccctcatccagcgaagcctccttcccagcttccccggcggcggcgccgtgacgtcacttccgttctccagcgcgcacgtgggaggaagtgctggtgccctctgccgctgctcccgtctctttggttacgctcgtcagccggtcggccgccgcctccagccgtgtgccgctatgggagtcccggcgttcttccgctggctcagccgcaagtacccgtccatcatagtcaactgcgtggaagagaaggtgaggaggcgccaggcggccgccacactcgagcccgggcccccggcacgtctaggccgcggcccatgggctccgccgcctgcccccggggagccttgccggagctcgcgccctgctgccagcctcgcgagcagtcgcagccccacacgcgatgggacgcgggctgtgggattcagcaccccgggggcgaggaattcaggaccctcggcggggcaagggcctatagggttccgaactcgcaggagggtcgctcctcccctactcgctttttcccggcaccggaaggccccgcccactgctttgtttcctctccagaccgcgcattttgggtctcggaagaggttcagaggctgttgttgagcaatgcatgccaggtcagctgagctagcgggttatggatgcacggattcggaggccagctttttgacaaccttgtaaaggaatccctggcggcgaccttttcgttgtttaccaattgtgccggaaaggttttctcctagtgttcaggaccatttgttgttctggttagattggacgctgaaagcagtatgtcaggtccaggatgagcgctatagaattctgagaagttacccttctctgtgtgccctgactactgaacggggtgggtgcttgttgaaaatttcaagattactggatgtacttgagcagtacaatttttgttgttagttaatacgtaagtagatttttggccattattgagttttgtttttattgttttcgtcattccatgcggattcgattttgtgctcttaattagaatttctggattggaaacgttcagaggcacatcacgcgtacctcactccttagtttttgaaggcagtgcttgc

SEQ ID NO: 68390 - DNA, 2078 bp, Homo sapiens
ccacaggcgagaacaagcagcaaagggcggatgagatttttcatctgcagctttgaattgatacctttaagtattgagctattcttttgttaggacagaacacgttattccattagaagagaacattttggggtggtggaagtgttccacgtcctgtgtggggtgacagttacacgcatgtcacatcagcagtctgaggagggaggggagaagggccgggctggataccttcagcctcttcatcgcactccaggcaccaagtgcaagggcagggagttttcattatttagggaatgcagccctggtgtagaggacacctcgcggagacatctcgagtcccgcaggtgtctgagctgcgctgcgcgccccagccgggaagccttttcttatccaaccgcgccgccccgcggaaagcctgggtactgcagacgccctcaccggcccaccgacagctggttttgaagcgggggcttagaaaagtaaaggggacagtgtttggagccacgatgcctttgatgtgaggcggttccacccaacaatcaacgaatcaagctggaactgcaggccctacttttgttggggggaggaccttaaggaatgtcacccccttgtcccctaccctctgccccacgcccagcctctcagaaggcaccaggcgtgagtagagtgcgaggcgtccacaccctcgtgtcccttccattcccggacacctttgcaccctagccgaggcctcagcacggagtgagggttgcctggggtgccctgctgtgtgtggggcgttcttgcctcccgggccctgaccccacggtctgggtcggcgaggcgtctctccctggcgtctggactgtgcgcctgccccgcttccaggcgacgaacggcaggagccgggggtccggcgggacccggatccagggcgggcggaaggcgagggtctctccttcccggaacccccgccccggaaacctgcaaccaaaccgggtccctcctccgcatcgctcccgcgctcccgggccgcctccccacgcgggcacccactctccgggccctcgcagcaccgccctctccgcgtccacccgcgcggccgacgccgccaggggccctgagatcgcggagacagcgcgccctggcgcctggtggggccctcccagtggccagagcgctcctggaccagtcggctgtggtctgtgcccaaacacgatggaaaccggggctgggacgggcggtggtacgcacgtggaggagaagaggcatggcgggaaaaccacagccgaacacaggtcgactcgcacctcccaggcacccgccgccgtctgactcgcggctctccccaaggttccgactcgccgccacctcttggcaccactcaccgggctccgacccgggccgcgagtccgctgatgcgcagctgcctccggcggctcccgggctctgcccggacccgcgcgcagagacgctcgggaacgctgggctcgggcgcctcctggcggcggcagcacgcggcacacgctcggttctccggcccgagggggcgcgtggagcgtacgcgggatccgcgcgcgggcctgggctgctggcccacatttccccgcttgctcggatggcggcgctgaggcctattcgcctctttattaataacgatgcctcgggagggaaaaaatagagcctttaaaaatcagagtgcgagagaggagtgtgtgtgtgtgtgtgtgtgtgtgtgtgtgtgtgtgtctcggggcgttggtgaaagcaataaaactcagatcgcttccttggcgagatagcggcggctataatgcgccggggggatcaggggtttatttgcagatcctggataaaagatgatatatcgacacggtttagagtgtcactgcgcttggcctctcagggagccacaagtacatatttcctgaaataccgcccagcacagtatctaatccgcccgccacttaacaccgggaggggaacttcagcagcgcacaagcgcgctcccggtttcctggttctgggtggggagagcccaaatgagaaggatctggtatgcctagacgccccctcccctggcctttgtcttcagtcca

SEQ ID NO: 68391 - DNA, 526 bp, Homo sapiens
cattcctgcttgttactacagcatggctcctacgaagagcgccaaaacctgcagggaagttgtgctttggatgaacctcttacttcttgggcatggaagtcctttcaccaagaacagagacagcccttgccaaatctaaactcaccgggcctatgttatttcaggtgaaaacactgtgtttgttccaggcacaaacacatacaggtgactcatcaggttctaagatggaacataatgacacaagagtaccaggcacaaaaccatgctctcaagccactcagaaggcactttagatgatgaaaaccaaacagaagctgagtgaccaacctccccacccccatcacactcagcaggctgagcagagtcacagaacacacacacctgggtggaacagatggcaccccggtgctattgttattttacagtctggctgaatggcaagctgaactgtcaaggacaatatgtagactattgcagttaaacaggggattgtgtctcccaagaaaggattccaccatctcggtgg

SEQ ID NO: 68392 - DNA, 1687 bp, Homo sapiens
gtgcacgccaacatgcccagctaatttttgtatttttagtaaagatggggtttcaccatgttggccatgctggtctcgaactcctgatatcaagtgatccacctgcctcagcctcacaaagtgccgggattacaggcatgagccacggtgcccgacccaccagaatatctgttgcttttgatgggctcagttttgtggagaattgtgaaagtctatgtggaggaaggatctcaggtggaaaagaggaagaaatgacattggcgagctggctaggactgagggtacatgatggagagagtatgcaggagttgactgaatccagaaaagttttggatttggcttaattcaggcaggaagtcagcccctgaagcagacgtgtgactaaacgaagtgtgaaatgcaggagaggctcagggcagagatgacattgggaacccaagaaaggggctggagagcccagatggcaggcagtggaggcctttcctgggtattcccactgggaaaaaaaaggaaggaaataagagactcaagcgactttgaggagagagcgactgttttagtgtggagatgctgaagaccagcatttcaagcttggggagctggatgggtgggaggtggcggggtcaatagaggggaacctgtggaatgagatgatctggggggaaacacctgtgcgaatggcaggggataatgtgtaagaaggacagggtgcttgtccctcagggactctggtctaatggagtctttccagggctgagtgccagaaaatagacccaggctctgccccaggtttccggccggctgcacttcaccatgtgccctgttggactctgacctcctgttctcacaccgagacattttagccatggtcagtgtttatttaagttacttccccttgagttcactggcacaaaacactgcccggtaggcaagtactgcctgtgccccatgaggtctgggacagtgcccgcgggtgtgcgtccaggggcatcaggagtgcaatgtccaggctctctgctccgtgcagaggctcctgcagagccagagcgctacgagggggaaggggaacgtctggtttacattttaattttaaagatactattcaaatgcggtaccgttttttcagatccgaactcaattttgcccgtttcatattaaattagtcatctcatagtttgcattctgttttgtcatttggaattttaaacacaaataaaaactccacgtggtcccatggagacagaactgaaataactcaaagtttgcatcttcacctctctaggcatcctgctatcattttttatttggaatccaccattcatggtgaatctgcagcatcccagggcttgtcttgtgattgcacctgaaggaaaggcagctcagacaacacagccatagaaacccacttttgaaacagcctgagtccacatgagtcaggtgccggctgtagaactgagaattctctgaattaacttctgaataggatgcaatgtttattaaaggatctgtaataaaaagatgctattttgaaacttacatttatttatataagattataacttatcagtaatcatcatgaattatttagacctttgatcaacaaaatattttttttctagagaggaggattttattcctgatctctttaagaattgctggaccatgataataaaaagcagaaaagttt

SEQ ID NO: 68393 - DNA, 3055 bp, Homo sapiens
aacagtgtgcattaaaacgtgaaaggaaatagagtatgcaagtacatgcatgtgtgtacttcgcacactgttatctattttaggctcaaatagatgtatctatggttgagaaattcccattaaatattggggcgaggttcagatgctgtagatatttgtttacattttatcaaatgctttcttacatgtgaacccctcaatctctgagaaatcacctaagggaagccatggatctgcctcctccaggtttcattattgcatggaatgtgaggggatttctgtcttaattaatgcataagccagctcttctgagtttgggtggatatccttgaggagaaaggtagctaaaattagcagcctctactctcttctgtgttccttataaaaaaaaagagaaactgtctcatctttaagaatggaccagttatgaacttccaacctttccattaatgctttgaagcaatgatggtgctggctgatgtgcttaagtaggaccattaaatttgggaaataatgagaggaaataaacagaaagagtaacttgaaactggacgatcctggcttagaagatatgacttgttcttaggtttatttaccttttctaggattttgggaaaagagaagggccttgcagagcccctcttattaataacccctgcccaacccccctacttttccagatcctttccctttctaaggagaggtcctgcaggacgcctaccagagccatgcatcagacagtggcttctgcccagtcacggctgggtgggtgtggccagcttatgggaaagttcacgtaagaggttgatttaatctctccagttttaaaatgtggaatggtatggtctgaatggctttgaattagaataaggtctaaactgatttgagagcaaggcctggatttgaaagggagagtgatgaaatcaaagaatgtcagagccaagtaatgttagagatttaacaagaactgcatgtattccctgttatgtgcatgtaggtatgagtgtatgtgtgttatgagtgtgtatgtgtctatatgtatgtgtgtgtttgtgtctgttggggagagaaatgggataaaaaggatcagaatctcacgtagacttttcctaagtcattttccccccaaagtctcatttgtccacctctatgaaacttacttggctgagaactgctgccaaatgatccattttctaatgtgttagtaatcactacatgaatcctcttgagaaagagctgggccaggagaacttaatgacttccaaggtcacacagcaaatccagggccgagcctggttccccgctcctgttccaggctcctcccatgccaccacatcatcaggcttgacatatgttcgccttttctcctttggatctcagctcacagggacatccacagccagatacgaattatcacctgaaggcattaattttttattattaacttgataccaaaggaaacacatgtaaaaaagtgaatgctttgttcctaagtgcatttctctccataatttcagtgagttctgtgtgggtgacagtttttaataaaattcctctccagctgctcatatgagaaagtctagaaacattgacctttagtcactggatgactgagctgtttactctggctgtggacgaggtttgggtgtagagtcctctgtcttcctgcctgtgctggagtgggataatttggaggcagtgactcaggcttctgtggggacttacttagtataacaacttttctggggctaggaagaccacttataatattttccaaagagggcaagaaaacaaaatttcatgggaaattttaagaatgaaagttttgtgcatgtgagccttggaaaactatgcacaaatagtacccattaatttctgttttctttgtgtaattgagaattcatgtaacaacttactagctgcacatttggtgaccccttatgttaatagctgcttttctgttcttttggaatggagatcacattccacctgctcttggactgggtcattccatgatgtctcaatagatgatttgtttcccacttccctgcaccacagcactggcctcctcttcacctacctaccctttattttgccttctccaatccactcttaccctggaagctaggattgtctttctgaaataaggatatgagcagctccccattggttttagaatctagcccaaactcatcatgactcatggggcctgtgggatccggccaccatcatcacctctggcctcatctagccctgctgtctccttaccctgtgtgagcttctgtctttctggacaactctctgtttcttggacttgccaccttctgttagaacgttgcctgtagctctctttcctctctgagcctagccacagcagattgcttcgctggtccagttcttcatccctccctttattcatatgtgggcaatggcatcagcatgagcagagtacatttctctgactcttggctttgatcatgaacaggtgagttgctttcgtcaattgtatatgggtggaagtgatagtgtccaagccaaagccttcagaggttttgaaggtttccacctgcactgctgagcctctgccatcactccaagcagaatttgtcctgggaagctgctgccccctcactctgtgacccagaatgaacccatgtgcagaagagaagccccgaccttagtagggtgacagcatcagttggacccatagcttaaagcagagctgccaagcagaacccagcctacgtcagccaactagctgatccccagccaacctgaggacacataagcaataataagtgttatcttaggccactgagttttgaggtagttcattacgtagtcaaagtcaatgaatatgttggccaatgctgactttgcaggttgcagtttgaccacctcatttttgctaggaaaccttcttggatctacctccatgcctctcttaagtctgtgatgattgccacttgtatgtgcccccatagagaacttatccaactctattgtgtctttcctccagacaaaggcacagatctcacctgtcttatgcgactgc

SEQ ID NO: 68394 - DNA, 3105 bp, Homo sapiens
gagggagaggacattcctggcaaaagacacacttaaataaaggcaaaatagggaaaccgttttgacatagagaggcatcaaagggcctacagaagacaccaagaaagacatgcaggaccttgggaaaaagatctggaatgtgatttcaaaggactctgaattcctttcttatcctatgaactttccttttatcccattaaaggtttcgtttccttttgcttttgtttggtggggaataatttgcatgtttgtattgttttgttatatggaatggaagacagaaaggaagcaagaaggatggtgtgaaatggtcagatttgatctttaaggatagtactctaataaccagagttgtggaagggatggaagctgacagactagaggtggggaaagttgggaggaatttacaaaagtcagcaccagagggaatgagactgcaccaggccacagcaacaagaatgtcaggtccagtgggcttggatgaggcctaacttactgccctctatgtccccaataatctaaacagggcctggcacacagaaggtgctcagcgacatttgctgaaggaatgaacgacggaaatgtaaagtagggaggaagggggagagatctcaagtttgttcatatcaggaaaatagctctgaataatactgaattctatataaaaaatgtaatgcattctgtatcagagtttccaaaaaatatttttaaaaactatgttgctgcttaaaccagctctgacgggaagttgaaagtattgcttataagccacaattttataggaatcttatatgtactattgaagtaatgtggataatgtaaggagatttttctgaatgtagatcacattatttttctgggtacttgccttattctaacactaccttcattctttgttccttcttccttttcaaggggttaatagtctgcaaagaatctattaaatgcatttatggaaacttctcattatgaaatgcttcttaggaatccacccagggaataatttgggactttttttttaattcaattacttctttttcctctaggtaggaagcagttgggaagggttatactgaactacaggaattaactctgaatccaaattttgaagtgtgttagtggcggcaaacttccttctccgaacattggtatgactcagtattaaagtgctgggctcctggatgataagaagtctgtgtgtgggggtgaccattgtatgtacatgttcggttaatcattacaggcttctctgcttatcaccacagtggtgctcaccacaggccagcaagaggaatgatggatttctcccgagttcttggcaggaactgagctccactggttttattctgaagctgctaacagagagcctcccacccttgcccttatcactttttattcttctacatccttgaaattaatgagacaatgagttggttgtggtgaccgtttccaggcctgtggctgctaagctagcgtccaagtctggctgagaggtgggaggactacggccaggagatgttgggtttcactacatgatgcaatgctctaatttgctgaatcatagttcctaatttcctggaatccaagaaacatggccttgtttacccccgtttgtacttagattcaagggctggacatttaaagatcacctgtcagtcaatccgcctccttaaactaagatctccaaagcaagatgtgccattttgtaaaaacttctatccaagtttaacaggcagaaagaaaagtgaacatatcataaatgtaccacccagtgatttttcacaagccaagcacatcctgtaaccagcacccaaatcgagacgaacaccaccagccccttggaaaccaccggctatttcccttccagccaacgactttaccctccccaagatcccaaccatctagccagcagcatgattcatttttggactctaaataattggaatcacatcatattgactcttctgtgactggcttctttttctcaacttttatctttgcaagattcaaccatatttttgtgcttatagctcactcttttttcattgcggtatactatcactttgtgctactatactattatttattcattctaaaggtattgtttttatgctctaaatttctgggagaggagtttttgccacaccccaatacattcagactttgaatcataattttaaatcctcttttattattattattatctttgctgtctcctacatccaattattctaatgaacttctaatgatttcatggcttcatctcccttctcatcagattcatttacaaacatcacccaagagcacggatctgaccacatccctttccactgaaacttctcctgctgcagtcttctcacccaggcactcctcatcctccctggcttggtcctttcctgtatcttgcctaattcgctttgaaagcacaggatctactttttctttctgggactgcatcattatttccccagccctaggcatatgttgaagggtttcttcagtctagaagtttcttttccccccatatacagtgtcagacactgctaacccatccttgaagacccagttcatattatacagtcccagctctggtctccagtttgcctgtttcaaagtcggctctgtagggctctgccccttccgcttccccgtgagctagcaggcgtctgagggcctcgggtttgctcccagcctctctcacctttgcccccagatatttgctccgtgagaatagcctggatcttctctaacccatcgtttcttcttttattttcacatttcctgattacgttctgtctctttttccaggaaaaatgtctgtgggatggcatgcctttcgagggctgtgtgtcacagagagatgagtgaggaggagaaacctattctgatgcccagttcgagaggattctcatccagacttgttctcctctgaaagctctcactgactgtaccttcttagtgttgttctccaggtagaatgaggagaagagcgctgtgcacatgagtagctgaaatgcctttaaatcccatcacaatcctgcaagcttaatgtgctcagaggtggccaaagggaagaggaggaagcacagccactggagaggagag

SEQ ID NO: 68395 - DNA, 702 bp, Homo sapiens
gacacaatgatggagaaatgtcaaatggacaaaggaagcaatggaaagagctcccaatggccaaagctggaataattagaccaacaaaataaataaaacaatatgggactataacccagagtataaaataaatattcatgattccatattgatataaaaataataaaataaatgaataaatggggtaggagacaaaggtctctgcagaaattcccaaatcatttatgcacaaattctgccctccaggaggtaaagtataactccccgctcctgaagactagactgcatgtagtgactttcttccaaaaagcaaggtatgaaaagaggggaaaaggaaacttacagtggagaagccggacaaacaccacctcagccaggtaatcaaggtcaatgccaatagtcatgagtcatgctgatacaagctgaacattctctaatccaaatgctccaacatctgaaacattttgagtgccaacatggtgccacaagcagaaaattctacacctgacctcatgtggcagattgaagtcaaaacacagtcaaaactttgtttcatgcccaaaattattttaaaattttataaaattacctttaaactatgggtatatagtgtatatgaaacataaatacatttcctgttgagacttgggtctcactcccaagattatgtatatgcaaatatttctatatctgagcaaattc

SEQ ID NO: 68396 - DNA, 987 bp, Homo sapiens
gacattacaaatttgtccataaatctaatgcgggacagagtaaccttcctgcagcaacaagagagacaaattctagaatgtgtttttctacttctaaagtaaataaataatgctaagcaaaaagcaaagcaaaaccaaaaacaaaactaggaccatggaagtaaatgcaaagtcaacttcgcgatttaggaaggtcaagctgtttgaagaatttaggaaatgtatttaagctgactgtaagtctggaatgctcagtcaggagttaataactgacagagcttgagatactcacaatggctctgtaagtttcctctagagccctccctccacaacagggcagcccaacttctcttgcacaccttccaatgtccatcaccagggatgaaagagtgggctggggaacatgtgagttactgaggtggaaaatggggagatagcataaggcagataataagaaaagatctaatgcattccctttattcccagaatttcagagttttgcccttagcctgacctgtcataagtatgcagagaatacattcatttctatgactgcagttttagtgagactcacaaaatataaaaagccctggactgggagtcaggaggccactgttccagctctgccttggcagggattaggcctgtagcagctctggttacacaatccacacatgttgcagtttctctctaagttgtgaacgaaatgattaaaacacccctaattggctttaaaagttttgctctctgatcttcctctcaccccttcccttggtggtaccatgaggaaagaactaaaactcatgtttcccttaattgtggatttcttcccatgttgtgcctaggagcagcataaccaaaaaaaaaaatcaagtgtctgttggggtgacaataaactcagcagcaaggatgatggtaagccttttacaattacagtgtctggagatagcagcatggagcgctaatgtcaagacaattgaaaagtca

SEQ ID NO: 68397 - DNA, 2221 bp, Homo sapiens
aatgacaaggccctggcccccagagattctggttcagtggtctggggtcaggcctgagaattcatgtttcttaaaggctctaggtgactctgcacaaggggtttccgtcatatcagctggacgctctgaggctctccggagcagaatgaggtgctaaggtgttgtgtctaaacgcatggcttggtcaagtgtcccagtgcagtgatcctcagagggtcagatgcagcgaaagtgaaaatgagcatgtgggttatccagacaccccaagtttatcaccctgtctgggccagggtgcatgacgctcactcctgcaaaacagagtgagcaggcagggctgtttcttccccctgcagctgggaagccccagccagcctgctccattgaactttcagctcccggagttggctcattccctcccagagaaaacagccctattataaacatacaaacttgagttggggcgggggtcacaggctcttgcctaagtccatcctgcaaaattgacttttctgtcaatgagaacacagctctgcttttacctctcctgtgtgctttggcagtttctgcttggctgtaaaatttatccaaggaaaactggcatttatcttgggttcacttgtactcagcaaaactgataaacagatgggggctggccaggccacgggcaatttggttagcactttacaaaatacaaatgtcatcctttatttttacagggattatttattgtgaattaggaagttattggtctgttatattctaacaggatcattcactccagttaagggatccatgtccctattataaagtggtggggggtgtcctgggtggaagagactttctggcattgttggcaataaaggaataaaatggccctgctgggtttgcgtatgcacacacagggcacttatctgtgaagactgtgaaaaaagaaagaagcaaagaaagaaatcaacaagatttgatggggaagcttgcaaaggagatcagaattcagatcaaatgtcccaccccagtgtctctggagttttttttcttttgtgtcccagctaaaggcactgggaggatcagagacctcatcccagctctgtttactttgggaacaatcgttggtgtatgaataataatgcctccctctgaccatgactaattgaattgcagcctgcgggcagtggggaggggctttgccgggccagtccatcacggcgtttctcaagtagccaccgacagtgatggatgcagcggcgcttcccagagtgcatcctcgaacacctaagagcaggggtatgaacctgcattccgagtttctattagccggggcctggcagagaggacgggaatggcggcagttaaagatgagttggttgattaaaaggaagaggagaggcagcccttttcctaacctcctcctcccacacctgattttaagcaagttttgttcatggggacaaatgagaaaatattcatcgtgtgaccatgcaggcctcagtggggccacctctgctgaggccgtgcctgttaaaagtactgggcttgtttggggtgcagtgggaaccctggcttggaaaacaaaaaaggcaaaacagccaaagatttgtcctgttagaggatgtttagaagccaacaaatgaggtagaagaggagacagaaagacaagagagaagtaggggcagttggaaacggagtctatggccatgtctataatccaacaatggatcacacagggaccctaacatttggtcgtcctgttgtctgcgctgtgtttacacagcagaaccatgcagctggggccctgggctcagtcggactttgttctcacagcatgaaggtgacccctggtgaactgcgatccgggaagcttgtgcagcccagcagtctctatggtggtctggacacaggggaagtcgtccaattacagggtcactgctttctatctcagtcggatttagtccgggccaaaccccagattggcacctttttatgagagctgtgcacgccaccctggctccttttggtggcagaggctggctgaaactccaggcggattttggaggcagatgctggctttaagggagctttggttggcctgctcctcttggaaagccctgataaaagcattcggggcaggggctatacttctcttgtatctaaaatcctgaaattttaaatccctccaaacagtttcttataacttttttgttagcttactatgctttaaaaa

SEQ ID NO: 68398 - DNA, 1651 bp, Homo sapiens
aatgctgggcgaatgaagttaaaactccatgatgaacatggagaaaagcacccatccttttggaagagttttagcttggcaaggaaactggcaagttttgctttaatgtagatagtggtacctgcattctcaaccagagctccattccaacatggccccggagaagctctgtacagcggagccctcacatcatctgcactatatgtacacttggtcaggctgtgtaaactttgacatgtgggtgtcaatctttctcatatttgcagatggctttatcagagcgtgattagtttccagaacaaatttgagcaaaagaaaacattacctacagtatgtaagccaacagaccagctagttttcagatttgtctatttacatgggcactagatgttttgctaaggctctctaacactgatggtaattgaacagtgccagtgtgttagtggaagctgatgagttgtaaaggttttataaacaactagggtggatttggccacagcctttctagtaatgtttgttaatctccctgagcaagtgtgcacctaacacaatgtaaatactccagaatttggaggtgtcaatagtgtaacttttactgtttgtaaaatcattctttgatatcatcagtaagtttactgaatgtcccatggccaaatataataaaaccttaagtaagcgcttacagagaaataagggaaaacatgtgttttatttttaccccgctgcatgtttgttaaaggatcaccgtagactgataaatagagtcatgactgtgcctgtgtgtagatttccatctggatttcagttaaggctagttttactctatgctgaggaggaaaagtatctttacaattattagatggctagtttacctatttcactgagaaagacttaccttagaactttcagggaaaatctttactgatctcaaattatcagcaaattcaaaatttctttaagattaatttcaagtagaattgagggtgtgggtgtagctggtaaaatctgtgttcagaaattcttgtgcacacacctgtttttgggtgtggctgtgctttccaatgatgtcaaatcccattattcctcagctcccttgttaaccgctagagggcggatccatttccaagggtttcctgggcaagagggaaaatccttctgaacatcaaaagaaaaatagttaaaagttttctgttttttttctctttttccctttttttttctgtgaagagtctcatccccacccaccccctgcattgttgatgtctgtgaaaactttgggaatatgcagtgtcctagtgcatctgataagactacagccccggaggttaacaagcagcccctctggctgcagtattgatgcagaggaaatgaaatggcggtgacattttaaagaggaatttgtgaaccacagatatgagcatggctagcgcagcatagtggcacataaaatcaatacaaataacccgaaccttaataccttgatccagggaagagactagctttatcagacgccaggcggggagcggccggtgggccacctgcgctgggtgtgctattgacctactctggagaggcgttaagccaaccacaattaggaggatttcttttttagagatgccttttgctagagagaattttctggggaaatgtg

SEQ ID NO: 68399 - DNA, 571 bp, Homo sapiens
gaagaaaatattaaatcctaaatttataagtatttttatctcactatgtaaaaaataacgtttgtgtgtttcataatattcatgatataataatatacttgtatgtataaaataaatacatgtacctatgttacggtacatgctcctcttgaaacttatatagagtacttaacaaaaaccactggagataaccaccttgcagaagacctcctccagatacaaatttccattactcactcacgcacatactcaggtattctgaaatttgaactttggaaagaggcaaatagtactgctgctctgcaaagtacaaggtaatctgaaattgccagcttgatgtaatcaaggctgactttcacttggctttgtgtgcatttgagtttctccctacttctgctttacctgcacaaataacaccagtctggatgcaatagggatattggcttcactatcaaggaatgtgtctcacttttaattgaatatcttattcaggaatgtacaccatatgctctgttgcctaccagctgaactgaagaaatcacaacaaaatctaatgtcaattgtcttatag

SEQ ID NO: 68400 - DNA, 518 bp, Homo sapiens
agatttttgcaagaacaatatttttcttaacagaaaagaaaatgaaacagtaagttatcttaaaagtgagggcatgctctgtgcaggatctagattttatgcaaaaaaaacccctaaaaaataaaaaataaaaataaagcaagagtgcttgcagaggttccaggacaggcttcccgcatgcacaagctggaggcatgctgacctgcttttcagccggcatagggtgtttaaaaattgaatgagtcatcagcatttagaaatcaagatacttggcacatatatcgggcacctcctgtgaaatctgtccacccagcccacaccaattcaactcccaagtcccaggcctgggtccacctcaatgagcttggggtgctctgtccacaggacacggtctccactactccccactgtgctgtctatactgtcacctggagttggaagcattttgttatctaactgtgggtatcaggcaccaacttcctcctttgcctccttaggacaaggaccacatggcccct

SEQ ID NO: 68401 - DNA, 1628 bp, Homo sapiens
cttgaggcagggctgagaataatctccattagccactgataggagctgatggataaacaccccacctccttctcctctggcagatgtcttggaggcatgccatgcctactggggactctccgagaggtccccattagcactgagcccagttttccacagtggtaacccgatgatgacaaacccttcatggctgcctcctcttcctttcctgtgtcacttccccaccctccctggtgcatcctgggactacctcccacataaacttctggtccttgtttcagagtttcctttcagggacactaaacccaaagcgctgcctaaggtgctaactgacaatcaatcttcaggactcagcttagaagtcacctcttcctgcacactttctttgatctcctttcaccaacaccaatgtttggatcaggagtcttttctgcaggctctcttaccacacagaaggtgaccagtgttgttcattaacaaatgacgtgtccctcggtaacaatcaaatgcagggagtgagatgtgaagccaccatgcggtccccacacagctttctacagaagcatctctccagatccaatctgccctggcctcacctctgattaggactgggtcccctttggaggtcacactgattgattagtgctctctggggacagttctattgacaatgtggctcttctcagaaaagcacagcaaaaacaacctttcagattgaggccagcttccattgctcaatgttagatatttttcctggaaatatctgttggagaagggatattaactaccaataaaagtcatttctcaaaccacagtggacacatggacccaagcacacaatggactgtgaactccaacctttgaaagtcaagcctctgcttcagcatttggccctgtccatgatgaaattatttcctttcccccaggaacttgaactggtaaagtgacctccatgtttaacgtatccaggcaaaaaaggcactaagtctctataattcaaagatcaaaagtacctaaaatagatcttcattggtttgaacttgaaggaattttacctccaaactcagattaatttcttggcctgaacccaaagtaaatgggcttgtcttctttgcattttaaggtaaatgtctcttgcatatctgcaatagttcagggtagcaaatagctgataagccactgagaggttcattagtcattttcagaaggtggctccagcaggaggtccatgggctgagcagtgcaggcaagcacaccggaactgaagctacctgaacagagagtgtgtttcccagaaacaaactggaacaagaaaaaaatactccacagtgaaaggtgaagcatggtttctgggatctttggaaaaagaaagattccttgaaagccatatggctcaggaccattggaaaaagcgctttgagggcttggctaaaggtggaaggggctgagattctaggtggacagcaaactggaaaagccattggccaaacccctcgatgagcagtgactccctgagcttctcatgcagatgcagaggtgaaatcaagccaagagggccctgatggtgacatgcttcacttgtgttctctggcacatagatgcatgaaatggggcaccagtgctgggtt

SEQ ID NO: 68402 - DNA, 520 bp, Homo sapiens
atttgtttgccatggctgtgtaacaaattctacaaactgggtgggttaaagcacgaaaattttatgtctcacagtttcagaggctgaagtctgagatgtaggtgttgcagggtgggttccttctaagaacccactccatgcctccccccagcttctggtgttttgctggcaatctcggactttcctgggcttgtagacccatcagcccggcctctgcccacggttgcacatggcgtcctccctgcatgttgtcaccttggagtgggcctaccctattccattatgacatcatcttaagtaaacacatctgcaacgacataaggtcctctttccacataaggtcacattctgaggtaccagggttatgccttcaacatttagaagtggagtggggcacagttcagcccacaaccatgggtgtggtagtgtgtttgtatgtgtgcgcagccaccctcaccctttctccaccccgcctcctcagagatgccacacccacttctcagactccactcttctctcc

SEQ ID NO: 68403 - DNA, 2090 bp, Homo sapiens
caagtatttgaagattttcctcttatctttctgttattaatttctatttttattacattgcagtcagagaacacactctctatgatttcaattcttataattttttgagatttgttttattgcccgggatatggccaaaattggtattgattgatggtgttcaccttttctctttttcttggtcaatctagttaaaggtttgtcagtatgttgattttcacagaactaacttatggttttgataaacaacataaagatgttggagagcaaggaggcattggaaataaaccaaaagctgagttttcattttggccacatgctcttcataattgtttatttttggtttgaaataaataaataaacaaataaataaagggtttttatgtatgatgcttgtgctctaagtaattcgggcaagagtgacaccactgcctgcctatcagcacttgcaaagaaaaaccaattactgtcagcccccttcaaaaaaatgtatctgctaaaattgcttgatgacatggaaatccacactgaggtgcttatacccaggggcaaccaagtctcccctgcagctggggcctataaccatatttccttcatttcacaaaaatcaaaagtttaggaaccacgaggaaggagcaagaataaacaccactacaaacctcaaaccaacagcgctgagagattacagcagcctcaccctgccatttggggctagagactgctcacatttattctgtggtcagcgtccattggaaagcaacgcagcacacaccacggctgtgtttgagctgatattcactaacactgaactaactgcattccaatccaaagacttcgcaagtgccctctttcttaactgggaatctggcagaatgttatatttaaatatcaaacgttgttaatcatgtcagcggtactttagtttggataaaatgtctttcctattgtagctaattgcttgaatatctgcagactgatatactctttgtagacatttatgctgtcctctttttataactttatttcattttctcttcatttctggtgttgactcaaagggcctttatcacctcatgctgataatctgtgctttatggccgctggtgtgattgggagcagttgaagccgcgtgcaataatacacacatataaatatttgaacaggaaaaagaaggtctgtctgatgtagaccaaggaagaaatgcatttaaacaaataatgccactagagggaccttgactctgaaccacgaataggcagggtcagacttggaagggcaccctctcattgcccggcttgtacgggtgggcgctagtgccacggcccattttaaaaagcaggttcttccaggccccatggcacagggagccgagctgggtccatgccagcaggcttatgacgtcattgttgtagcttgcttatttggtcaggatcactaaaataattccctttgagaagaataaatttgctcttgcagaaagttaaagacctgagaggttttaattagtttaccctgccctcgcctttggtcgccaaacgttattgcagagttcaaagaacatgatgttgtgtgtctccctttcccatttttgcgtgggggccttttccccctttttagcacctcctgtgaatagttgaaaatgagtggcaaaatgacattcgacttagaaagtaagagcaccaggaagcaaaactggaggcaaacacagcagctaatttcaccaggcatagctggtgctgtccgcggttgtccctgacagcgcggccgacacagaaccacctgtgtttgctcactagctttccccaatctgcgagaaaatggcccgggccggtcacatggcagccagataggccaggcaccatgggaatacaaaagccggagcttttagcagagttaatcattaatgcgccttttctttgtcccattcaggagtgctgacagggctttgatagcctgtatttgccatcagccggctgcagtcctagccaggtactaatgagacccctggctccaggctccctggcagagcccagagcccagcctggacccaggtgctgccatcaacctgaagcctgcctgccccctgagct

SEQ ID NO: 68404 - DNA, 834 bp, Homo sapiens
agtccctgtctctaaaatataaaaataataaaaagtttaataatactaaataaaattacttctcaagtaaaaaaatacagagaagctctgtggtatcgctaaccacacacaaaaaaaataaataaaaatataaacaattttaaaggtcaagtgagctcttccgtagcagctcttcaaatggcatgtagatttcactggccacagcccagctcccccagcctaaaccaggcccatagcatacttgagccaccctggggatagctgccctgagggctcagagtaaacaggtaaacagctgtgccatgcttttcagtgcaagggacctaggtgagcaggcagaggtcaatgtccacaccccagtttcatcaacaactcactggccacctaaggtcacccaaatgcctttttatctgaatctacaaaaaaaaaaaaaaagaggcagaataggccatgatggaaaaggccatactctttctgaataggagagagaagtgcctgggaatgatacagggagaagagagagggaattgaaatagcagtcatggctagtaaagctgcatgtataaatggttctttggtatccttttagaaatctagtacctactggcggctatctgcttccccagcatgtgagcagctgcatgaggctccagctcaggttagtggagtcagtaaccccagcctgtgggcagctctgtgtctgcagggacctgtgcaccctcagccctgtgagaggcaggaagcgaaaaccacctaagcagtagaagataccttttagacctgtcttgctgaatttctacaaccaccaggagaggaaagccgaacagaaactgc

SEQ ID NO: 68405 - DNA, 1350 bp, Homo sapiens
agattcagaatccatatctccctttccaaaatgttctctggcagaagtcattctgtaggacaaactggaatcaaaagagttatgaaaattgtacaatgggatgaaggggcttcccctgttggggaatagatagctgacatgctggatggggccagggttcaaacaaaggcccctgttgagtgggagcaggtacaagacagatggtttgttaaacattgccagcatgcttgcgcagtgccgtgcggcggtcagagcctggataatggtcaccagggcattgtgtagcagcgcattggctaatttcagcccagctaaagctattgcttatctttgttggttttgcaaagattaaggcagtttctctgctttgaatgcaccacagctgcccagcaaagcattcctgaagttttgtctgaattcccactgctaagaggggccaagcaaaaggtggctcgtgcaaggacttgttttaagctcatatgtgaagttgcttctcctcaactaatctggaccactcttgactcttacttctgggcaaaaccctctagagttacaggggccttctttctcagtgagtcctttcctgtgtggttcgaaatgcatctgctggggatttatatttcctagatttatatttcctattgggattgattcatttgctacttttgtggaaaaaggtaaacaccattgtaaattccatccggtgaatcatggggaggcggtggttccaattaaacgtgtttgctttcggaagggggcccttggcttcttatctttatgtacagaagaaaatagagctcaaccgggcctctgcagccaatggaaacgcacctggcccagtcagctgctaggctgagtctctgctgctctgggctccaactcgctcctctcggttgtttgcagacaaagggagagtagctgcgggtcatgcagaggggacagtccccttggctctgcctatagtcccaaagcaaagcagggggtgcagctactatctgggtatgttaggaaagggtgatggctgatcggtttagtatttccaacagttcaaatgtctttatcttcttttaaaggtagtgcatatctatccccacctaattgaaccagtgctgtatttacttcaggcagccccctctgcctaaattagatcatttctagctataaaatcaagaaagtgtgcccagcagattaagccctaaaagtggacttgttaactacatctacagaagcaaagagagcaagagaatttttatatactctccctctctccctctctctctcttttctctctctctctccctctctccctctctccctctctctctgcctctctccctctctccctctctc

SEQ ID NO: 68406 - DNA, 5411 bp, Homo sapiens
aggctggtctcgaactcctgacctcaggcgatccgtgcgcctcggcctcccaaagtgctgggattacaggcatgagccactgtgcctggcctagaaacattcttcaactggagttggaatttttgctttagaaggaaagctccagagactttattaaaacaaaaaccaaaagataaagaaagttgagaagatcctatgtccttcatggcaggggccagtgctatcagggatttggaaatggagtatacagtggaagtaagcactcctgtgttttcctttggccaaaggcataaattctcagtctgtcttctatatttatgagcccatcagcctaagaacaatatcaagactatgtaggcatagagctttggaagtatctgaggctctgggtaagttctaatatcctctccatgcagttgacagtgtgccctgggatgggtcatttgatctttcaggatctcaacttccatatctgtgcagtggtgaacaagacccatctcacaaatatgtcaaggtaggatgggataggaaatgggaaactgtcacagatgcgataaggctcttgacagtggagaagatgtggtttagaatgcctttcactgttttctcaaccctgggtcattcttaaccttcctaaggctctggttgcaaagtgcaggcgatgaccctaaccctatgaaatgcaggccgttcactcctggggtcccatggcatgtggctcagagtgactcagaaatgctagagggcccagtggagtctttctttctagaaaagccttggatcttggagaggccctggtctctggttccacttggaccttccacaagtgtgtagtcctaggtgggttatatcacccctctgtgcttcacttactgcatctgcttcacttacttctctgattctatgcttaagaatccggacttggctacttcatcctcttcgttactctggttgactcaggaacaggtgctagaagcttcatgagccatgtgctcctaatgagcgctcactgcccgccctcagagtttgccagcaatcccagccccaagcagctgaccctacaccctaatctcaccttcagctttcagttctcctgttggcgagccctggagcaggcggaagaaacagccatcttattgggtgccacttcccaatgtcaatcggatctcctttaaactcagctatggtctgcttcattttgaacttagggtaaaattcaagacagttcagcaaagaaaatggatgaaggacgcaaccctttaattcagttcacaacccctgagggtggacagtggccagccacatgctggcccctggaaggagtgaaggaagtcgaacactgtctagcaaaacaaagcacatttggaaaataaatgtcatttaggatacaactaccaggtgcacacttctctttatgtttcagttcactctgccttgtactttaagacacgtttcctccgctacattgacccacctcccacctcggccgaggaaagcagatgccacgtagaatgacggtgattcctgcaagctctatgagtcagggacatatggtgtccccacgttccatgtttactcttgtacctggagagattagtcagccagaagcacagaatcagcctgaatgccatctggcccttccctggagcaggctgaaggtgaaaagtcagccctgcataccttgatagctaggtgagggctgtcaccaatgggggtggaagtatcatctcatgttgtacccactggcagactcatttcttctgagcaagggagaactgcattctggagaaaggacactggccattcaggctgcaattcgggttccccagccctcctgtgccgtcctcttcccagccatgagacacccgctcctgaagatcccctttcccgtggtcagccggaggcccgggaatgagtctaagagtcattggtattctgtgttttagctggtgctttgtcaatgaaaacattctggactttggccccacatctgcctgcttttcagctctggtcctgaggtcttgggtaaccttcccaacctccctaaatctccctttctttgtttgttaaatgacaatcctcatagggttgttgcctaggattaacttatctgagataatctatgtaaagcacctggatttaggagaaatgcaataaaagttagttcccttcccccttgccttggattacatggttttattctcttctgccagagattccttggggaaaggaaagcgattgtgtaatttgctgtaatcctaagtgacgaagtaaagttcttatcaaaataattttgatgtcccattggcatgtctgggccacggaaataatgacatgatgaaaattaagttgacgctattggctgacagaaagagcttagctagtcagtacaaagatagctagactggcacccaaggagccccggatcttcccaacaaggagaaaaattacacccagctctctggggaggcactggacttttgtaggcctacaagttctcttgagtcaccagcattccaggttcactccctgggggctctctaatctgtgagacctggctatggttcttagcccaccagccccaggagaaagacagtttggcagtggattttataaccaatcccatacatggagcttttccataatttatcttggggcaatatattaagccacaagttacgaagttccaaattatgaaactgtctctactgaatttccaccagcccaatgggtgtcattgtaggatttatatttttttctgggaagaatcatgttgtctttaaaaaataaaaaataaaaaaaaagaaagcctctgcttcgaatagctatctctcttgcagccgtgcactgctggctgcacaaggtcctgggtgctgttctctgggtcaacttccctgagtctgtttggagaaattgtgacatctaaccaacttcagagaaatcgatgagggctggaagggtggactttgttcccctgtggtgttctaatgaatattttcaggcttaaataactgcccaaaaatcaaaatcattgatttttccaaagggcagatacaagcagatggccccatcataaaggtacttccaatggttttccagcactcactctttattcttcatgttgaacaactgcaattctggagactgaagaatggaaaggaggaggctgggtacagtggctccctgctctaatcccagctatttgggaggctgaggcaggaggatcacttgaacccagaagtttgagaccagcctaggcaacatagagagatctcatctctacaataaatttaaaaactaaccaggtgtggtggcacacgcctgtggtcccatctactcaggaggctaggatgggaggatcacttgagcctgagaggcagaggttgcagtgggctgtgattgcatcactgtactccagcctgggtgacagagcaagaccctgtctcactacaaaaaaaaaaaaaaaaaaaagtaaaagaaagaaagaggaaggaaggaaaagtcctgaggttgcctactgtggcacatgcaaagggcagagggcatctttttgcagcaaaagctgtccagttatagaaggcatcttggaagccttatgcccttgagtgcagcctccttggtgagtccctgagtcaggtggatccccatgatcggactctagggtttggcttgtgtttccgcaccagcaaagagttgctgtgaccaggaccgttatgtgcatgcagaacaagagtggcgccagagtccaaaataaaaccgtgctggagcagtgccagagtgcataagcacagtctctccttgtagccaaggtgggaaccacagctgggtaaagaaagggtttcagagtggagaagagtgggctccagccctgaccggatctctcctggatgagttcccattgtcttacttacttcaaggttcgatttttttcatccataaaatggaatgacaatgtctctgggggctgtggaatttcagcatatgttcaacgtgttatgagaacaaggatagaggcagtttacttgttcctatggagaaacaaggaaaaggaatttggggccgggcatagtggctcacacctgtaatcccagcactttgagaagccaaggcaggagaattgcttgagcccaggagtttgagaccagcctgggtaacatagtgagaccccatttgctacaaaatataaacatgggagaggtgggacactcctatagtcacagctactcaggagactgaggggaggatcatttgtgtgcaggagattgaggctgcagtcaactatggctgtgccactgcactccagccagggcaaaggagccaggctgtgtttctaaaaaaagaggaagaaagagagcagtgggtgagggggagagagatagagagagagaaagagagagagagagagaatgaaaaagaaaggaagggagtgagggagggagggaggaaaggaaggaaggaaagaaggaaggaaggaactaaagaaggaaggaaagaaggaaggaggaagttggggaagcacagcctgtgaaatttgggaaagattttttgcctcaaatcccggggcacttttccatgtcggatgtgaacacccagccctacttctgttgtgatccttagcattgaaacctgcctccccaagaagagaaatttttattttgagcattgagctattctagagaaaccactattaatgacgaaaaatcacatttgagccatgagcaacatcttgggcctttggtagtcccagacatgagacttggggaaggtggtttgggggttacttttccagggtaaatcccttgtcctccagaattgccattcagacataattaatattctccctgcttcttctttccagaaaaaaaaaaaacccaacacatgcttacacttacttgttgggcctaattgttgtccaaattagtcctactttttcagataaattgtgtctttagaaaagtgttgaaattgggtggagctcttgagcaccctttgtggccggtctttcaccctgacattggcatgtgtggtaccggccacccatgacacatctcctgccctcctgccctgaaaaggttcaaagtcacagacacactgaatcagagcgctaaaagggctatagaaaacctgcaataggctgggcacagtggcttatgcctgtaatcccaacactttgggaggccgaggcgggtggatcacttgaggtcaggagtttgacaccagcctggccaacgtggtaaaaccctgtctctactaaaaatacaaaaattagctgggtgtggtggcatgtataatcccagctactcgggaggctggggcaggagaattgcttgaaccctggaggtgaagtttgccgtgagctgagatcacgccattgcattccagcctggacaacagagcaagactctgtcaaa

SEQ ID NO: 68407 - DNA, 5042 bp, Homo sapiens
ccgccccccgcccccatcggagtcagctggaatgcagttattatgtttctggaacaagggcagcccttcgattctatcaggactgaggaggaggaagggaaacagagtgacgcggaggccacccattctttctcctccccagaggaaaaggagttcgagctccttttgagataccgggtcggagaaggtgcagctcgggctggagcagggtggacgagtgttcgaagaggagaaagtgcaggctgggggagcgaaacgaaaatcctgaggtcactaaatgagataaaagtgtctccagggccgtgccagcacatcctagccaccactggtgtcaccagcatcccgccccccattctagccccctctgttgtcccccattaagactggtgggcgtggctgcctgggtcccgctcccaccgcagcggggtcgcgctcccagtcttgacccaaggccgtctgcctgttcgcccggccctcctctgcgcggtgcccagcgggctcatccggacggggccgaccttggcacctgcaggagaaaccctggactcgccagtgttaccggagacgggagagcgatggggagggcgggagaggaatacagctgacagagcccatggcgactggggtgggataggtcgggtccggtgtgaactggctgcctagggtcggttccctgcgctttctagaatttgtgggggaaaagcaagaatgaccgtccctctgcctcgtgctcttttcgatctctcccccgacccccagtgacatttagcaggcattttcctttcgtggccttctccactaagacccttggaagtcctatgtcagcgaagtgagcgttgggaggggacgagaagaaccccccggagggccaacccgggttccgcgtttggcgcatctcggcagccggagctcgccaaaccgggacagccccacggacccgcggggactgggggctcggccggctgctctgacgacctcggcgcgcccgatcggccccggctgcctggccccgggtacccgggcacacgccgccttcccggagcccgagcacccgctccggctctcgcagcctgagcccaaggaaggctgctctgcaggtccccgggccactcgcggggagcccgagccagcccgccagccagcggctagggcctcacccaggaatgaggaaagggagtgctgctttatttcggaagcaggtccgactctgtgaacacctagatagagggaggcatttaatttttatatgcacatatatatatattgcaacgtgatttgtcctaggtagagttatttgtgcctcaactttgatacatttcatggtagaattaaaggacaaggttcgtgcctggggtgggggcggaagagaatagtgaaggggcagtttagatgttttttcttttctaaatgattcaatttaagcaaacacttgggggctccaggccgctgtaattccaaagacaattttctcttgttttaatttgatttgcattttttcaacgttgataatactcaatttcatggctgaatacacatgtaaacacggttaggtcgtgtttttcgccacttgcaccaaacagaatgtcgcttgtctcggtgccatgggaggttacacgccgcgtcctcaaaatatctgcaagtttctcctaaattatttttcaaaacttggcctggaaatttgtctgagcttcagaggtgacgaactaaaatatatctaaactgaatatatctactgaactagccaaggtgtgggaagacctgcacagacattgcaaaaaggaaggcagtaaaggaaacaaattcctatttgatatagaatcaatcctatttttacccggcattatttttctatattgtattaatagttttaaacaatccaaaaataacaaagaaattatcttctcccagaaatgtttttaatgtggatttcattgctagaaagacaagcattgagaaatatatagctatacctttataaggagaggtttaattaccactattgagctattttatcaaacataaaaattagaagaaaatgcaaggtgaaattgagaaataagcgttagtcatatcaaaactgatattcaacaaaatagcactgccaatgacaatgaaagtaggatggtgtgacctgcctgtgagcagctaccacaaaactgtaatgcaagcatatcacacattgttttgccctcaggacacaaactagacagacattgtgcaaagaaatgtttggcacctaataaatttattaaaactccaaatacattttatactccatttacgaaactgtgctggaaaaagtgaggacacacttttttggtttgtccaagaataccttatgtaataaaatggctgtctaatttccagagctacccttcatttagaaatatatatttatctgcttgctattgactaatgtggaatattcaatactgtgagcaatatttctatctcaaatcttaagaatttacaaactacaatgtttgttttattttaaaaatccttaaaaatgaaaagaatccgtgaaaattctaaatcctaaaaaataaaatagatctgtgagacttcttaaaatgctttatgctccaggctggctgataataggtaactgtattttaaattgaggtgatctaatttgaaaaatatcttttatcacgtgaaaggcatttaggcaaacaagaaaaaattccatttgaaagacaacagactttgaaagagaaagtcgcttaatttttttaaaaaacacactcgtggcaggccgactgtccaatgtctgcaagaaaactgttcttcaccatttggcttttaaaaaaagaattattaaattttaaattataattgttaggatttgtactaaggttttctattgttttggaagactggccattatgcctactttattttacacaaatagatggcagagtacgcgcgctcctcacaattgcttcacagcaaacccattcttagagatggagctaatgaagggggctaattgtaacacacagtctattcagagaatgcaaatgttggacaatagagtacatctttccctttttctattagtaattgaggagtaaatggagatcttgttaaggatcttagaagtttgatcgtcactgagtgagtttgccattttaatttgctttcatccccaaaacagatctgtattgagacatggctacctcagccagaagcagagctgctgcacctcagacagaatctgtcctccaccctcaacttcattgaactgggtctgagctgcagcaggaaacagggagaagggctggggtgggggaagggaggcaagggaggaatggtcgggaaagtctctggaaagcattctagacaggtggggacttccagatgtggtatggttgggggcttgggaacttgggagggtgtgcaccttgggagagtcatgagtcctaggaagaagtcacagaacccaccccaacccctgcaaaacgtccagcagctgggagtggggaggcgcttagctaagggtgtcatacagggatagtgatctgcctgttctttcatgatgaccaagagcccagaggcctgagcctgaggtagggaaggggtgtgtgtgtgtgtgtgtgtgtgtgtgtgtgtgtgtgtcatgtggtgtgtgagagagaggaggcagggaaggaggagagagattgtggaatgcaagggagaaatcatgcagttacttttagttgtttactgagcaagggcaaaatctaaaccgcgcttgccacaatcaatgaaaggatcgcctcagcttccagagttgagctccctaaatgagtctggcattctgataactgcaggtgagcacctgagatcaactccttcccactgctcgatgctgggaagagatagggatgcatttgttcctgagctctgggaagggagaggcaagagggggatttaattgtctgcctgggtgaatcgaaatgtcctttaaagcacagaaatcaagagagattggcctttaattggtaaactttgctgattgggggaggtggtaattaaaatggaaagaggacaaaatacagattggctactgcttcccccactgtctcgcccccataaacagcccccaaaattggtattctcctcccctctggccatctttacaaggctcagcacacaatctgattgtgggtaattgtgtcattcttgtgtcccaaccttagtctaacactcagttgtccagtttggagtgagaatacaattttatctagaactctgttcacttccaagagttggccatacacatgccaacacgtgaggagctggccttagaatccaattgtctgcctgtctctgaaatgccgaaatggaagatgctaagtctgcagggaatctcacaccactaaaaatggacaggccagggaacttagcttcccggatattgaaaagtaaaggagacctccaagccaagcctgagccctgatttgaggaggtctagtgctcatttccactctgtgtccccggagcctggcacaagcttggcaactgttcacatgcacactcagatgcactctgctggagtggtgctcttgtatgcgatgggcctactgggtcctgggcagcatcctccctccctgagggctgcaggttgatgtgcctaggccagcatcctattcaggggcaaaccccagaggcaggtgtttatggagatctgcattggcatatatgtgaggggtgggagggggaggcttgccgcgggggctggggccagggcgtgctggggaccagctgtgggcggtgtatgcattccagctatgctgtcacctgggttgtcaggccaccaggtgcaggtcagggggaggtcagaggcaagagcctcttaggacattcctagcccttgctcccagaatccctcggtagggaataaggcagacaggctgtagctcagaaatgatttggctatgtgggttgttttaaacttatatgtcagcccttagtctctgcccctgacattttctctcttgtctggcattttctccttctaatcacaatgtaagagcctgcttgctgcctcctac

SEQ ID NO: 68408 - DNA, 6267 bp, Homo sapiens
ggaaagctgatttactgattaaaaaataaactaggacccaaccatttaaagaagcagagattgaaccacataagcaagtagaactaaaaaacagtaaacaattctcgtcacaaagttataatgctgcattacacgccagtatttttcccttacacatatgtttgtgaggctgaaatattctctctcaataaatttaatgatgtttaagtcaagaaagtatagtattgccagcatcatctcctgacactgctgggaatattgctgcctctgattaacaagagagggttaaaccccaggcacttgccctggtgggaagtgagacctctagctttgcatgaatgaatgtaacttaatttgttgcttcttttagcactcccagctatcagttgtgttatctaacagtgaaatatcaccccttctttagagagagattgaggacaagtaagtcaatgctttttaatgtgaacctgcggggggcggggggagtggtgacaatgacatctgaccagtccatgtgaatgttggcagtgagctcagagctctgacaaacagcaactaacgtaaaaaataagcacactggtgtgaaggtatgcttgtaaaaactccctgtcctctctaccttttcatgagtggtactttagcacaaggtggcagcttcttctgcagaggatacaaatgatctggactaggccccaagggtgcagggactgagggggaggggagaataggcatcacctccagtctagcaagagggactgccacggaattacagcttgtaaaataagcctccatcagtctcccaggagacagccggcctcaacttgggtgttccctgcttgttagcctcagtcataattggtctctcctcccatcccacgttgttggttttctgtgtgtggcttttggtgtgagcgtgttaggtcatcaacaaatacaatagcgggagggggcaactggggacacacatgattgttttagagaagaaaggagaaaagggataagagagtgggcaggaaggctgtgaacagaatggggaagatggcccaggatttaggcttccgaggcaccccctggagtgctccagggtagggaactccctgggagttttgttaaagggagaagaggcctgctgggagctggggaccctgctgagctccgctgaggacattcatccattcaacgctatttttgtttgcttgtctctgggggtgcctgtaacatcctgcccacatccggtgcctctcatcaaaaaagaatttttcaaaaaatcccaatcagggtgatttgctctagaaaggccacgtgtgtggagctgaagacctaaagaacagcccaggaccctggcgggggtagggtgtgggtcacaggccttcatcctttttccatccattgttaaaatagattctcactatcttgtctctccatcccccatctccttttacctcttctcagaggaaagctggggatagcggctacagtaaatttctgatctaaagttaactataaagcctagagtggagatgtcttcgcatttaaggaaggttgaagatacagtgcattgtttttgctcagaaggggaaagataaagataagatccctagacccttgagtctttatttactgtaaaaagaacatttgactgggaaggaaagagcaagaagtgtaattaagtcaagtcgcaaattttggggattgattatttttttctgtttgtatgtttcaaagttttacattttactcgacaacccctggctggcctggttgccatggtgctgcctccagggctggtgtccatgctgtcccccacccagtaggatttcaggtctgaaatcttgttcttttgctacagcagggacagcaaactggagctaatggcactagggtgtgcgtgggggtggaggtggtctattctgtatggcaggacttgatgcctacgactttgcggacataagccagaacgggctgcttgcaactccaggttcatggtgtttgggaggaaaatgtttcctttcctgcgctctcttgcggggtgaaggtgcatagtcagaaaaggccttgctgctcttttgaaacataactggtgtctgcacattccagatctcatctcggccacccctccctccaagccagggccacctccagacccccggatgtgtagaagcatgcactgccccgaagaaaacgcgttgcccccaggtaacttcaggtacctcctagggctaacgcctccttctatgccatattgagccttatctcttgcttcttcccgcccccctcccacattaaaaggcccccaaagcattgaggagcggcttctctttatgaagctggggagaaggcgggcgataaagattgggcgtttaaattggccatttggaagattacatctcttcagcgagggtctttctttcaaaactcgcactgaattaagggtcatggctactccgtacccggctctcaaaggcacggcacctttgaattaggttgcggagtggcctgggcgaggggacccggggccatcaaaggcccgagggaaggccgtggggcgacacccgtctaatgacaagtaattgaaggattcgacgccgcgcattaccagcggaacgggaggcattaattatttaaaaacgattagccttgccgtgtgtcctgcaggcgtcccatcatgttcagcgaagataaccagccacccgaggcgagccggggctcggagggcggcgggcgcgctccccagcaggcttcgggtgcggtggacacgggcgcacagcccaaggcaccagggaaggagaggaggggccaccaagggtccccacacaggaaggtgactacataacactgaccctgctgaacaacgaaacagatttctgcccacttgggttcgaagtctggtgactgcggcgcagatgggaaaagctttccggtcgggggtggtgggcaatttccatgtgccagttccctgtcgcatcagaccaaagacccaaagtaacccagccaggcacgggcctctcacagtgcctgctacccaggcgtttaaagaaaagaccccagagagaatgtggatctggcgtgggggcagggattgggggggggcgctggtagacacctggggaaatacaactttatgaggtttcaaggggcagcagcagaactactatttttccgaggtccacgcctttccgcaggcggcggaaagacgcggctggttctgttgggtcctacaaactcgcgtcctccggaattcccgagggcaagcccggcacgcgcgagcgtgctcctgcccgtggaaggggggaaatcggcgactgggttgcagggagaatgcgatgataaatggccctgcgtctgctttctgactttctctcctggacccagctcgtaaccccagaggctccccaacctgcctgccgccaagcacggctgtgcgcaaaaggccaccagccgcttcctgcagccagagctaaggttcactcgcctcttagaaaggcgcggcccctcccctgctgctgcttgatgacgatccccatcgtctcctcggcctgcctgtgtccgagaaagagttgagactggactcgaacccctgcgcgccaaggggagggcgtcaccatgctccggcctcagcctcttcaaactcccatgcaccacgcacatcattttctgctgacccccacactagattctggggccaagggggttccccacaccccaccctccactgttctctggaaacatgctgctctcagatcgaatccccagacccgagccgctcgaggggcctgtgtggcttcctcggggccctaccaaactcctctaactgagctcagagcctaagcggtctgagtttgcaactctacgacccctcatccttccaagtcatgcactttccgaaccccctgcaaaaaaacccaacgccttgagtctcagttggctgagcttaccaccagccaagcccgcccgggcgtccgagccctggaagggagaaggactggctgggggaggggcggtgagcggacaggagtggggtgcggacgctgaggaggggagccgggcgcggtccccgggtgggcgcgctccctacctgcggcggccggcgggccggctggcgggcgggctgcggagcgtccagctcgcggagggaggaggccgactgctccgagccgaggcatccccgcatttatttgagctcaaaccaagcgactgttgactttagcacacaaagcaaagatttcactgcccgctagtttaaaaatgaatattttaccaagatatcgatcagcgttataaaattcagttaagtacaatgggatcctggcaaaaaaaaaaaaaaaagaataataaaggaggggggaggcaatataatatctgtgcaaatttgctgaagtgtgacgtggcatggaaagtttaccctcctggaattcggatctagaatgtttttttcggttgtttacagactttgtttattcacagatcatggttgcttaaaccggcgcgcggaaagcgtggggaaaaaaggaaaaaaaggaggggggagagtctctgcaccccacaatgagtagagttggggaaagcgcgcagtggcgatttgtgagctcgttatctcggaacccgggctaggggagggatttaagcgggaggggggcgtgaaagacacaagaagcacagaaaagcctccgaaagcgcctgctccccgacatcctttttatgtattcggacagaactatatcttatcggccgggatcagtgaaggggggcgcgctaagtagtttaaaacgaccctcgcacaatgggcgtgccatacgaaacatagcaggttagggcagcgctttcagcctccattgtcccccactcggcccccggccctgcctctcggctccttcgccacgggagccttttatgtgataatgaaacacatttcaggccgggctcacgacgtgtgtgtccttgctaggaggagagacggcctgattgctggctgtggcctccggatccccccctccccaatttctcttccttgtgttcttcgggacaatgtggcatgttaagaaagggatttggtggcgggaggggggcagtggcgggtgggaggcggaggcgatgccaaacccccctcaagcgcgtgggaaggccaggcttgttggggaaggcggcggggtgggggatggggtggcagagaccccagcaaggtagcactcaaagacagtctccaggtctggggcgtagctggaacactccaggttaggatggtcaagaagcccaaagatctaatcttgaaaaaaggagcctgagcttagaaacctgaggcaaaaagtcctagcctccaggctttcggagtgtttttacccaccgcaagccactgcgcgcgggagtggctcccaagtctgcctgacccgcgacgacactgatcctgccctcgcccagccagcagatgtcctgggcaaaaccaacaccagactcccctttgcgctgtcggccttggttttcactgccgttggccgtccttttaggccagcgaggtcgtctggggggagaggcagcatggtgtataagaattcactctgggatttttcgttatacttttagagtccttgaaggctcacaaaatacctgcataacccctggaccctgcaaacctggattgccaacctcacctaacttacaagaagatttgcaagagccttgagttttggagggagatggggagcaaatttgccgacagtggcatcttcactactgtcatggtccattggccagacaccccttacctcctcctcactcccaaatataccctatttttaaaaaacagacttggattgttaccctgacttaccctttcaaaccaattccaggagaagatcttctaaatgtttccctacaccaagtgtctcgccatttctgggttagtaaggtctttctgggttagaaaggtctgccatggttgtgcacaatacctgctccagggagaagggtgggaaagggtggcaccctgtgtacagaggaggctggaagatccaggcagagtcccaattccaccactgttcacagtggtgaacaggcaaagtgctgcaccacaaatttgcaagtttgatccaggctcattgacctgaagggaggcccaagatcagaagtacagcaaaaacatgtgaaattgaggcttcccccaagagaagcaagctgtggggcccaagagaccacaacaacagggcacattcaaacagccaaggtggaaaattgtgatatgtggagagtgatcttctactggctttaaaaata

SEQ ID NO: 68409 - DNA, 4433 bp, Homo sapiens
ttcctgtttttaaacaatagtacaaccctctggttctgttaaaactacatggttttacaccgagtcactcacaaaatttttttttttttttaagtaagacttccctgcaacaacagcaatggaggagaacaacaacaacaaaaaaatcagaatctgcaggtgcttgaagaagcaggagtctacacagtagtggaaaccggaggcttttttttaactttatattctttcccgttttcctccttatatagaacgtggggtatctgtgtggccctctgtttgggacggaacggctgcagcgggtgaagaagactgctgtcttgggggtgttggggtgggggtgttatggatttcttctcccttgcgtctctgcaacaccgtctccccaaagtctcgacccccacttgctctctcacttgtcctcgatccggggtgccagagttagccgggcctgaagccgtcgtcttcttaagaggagttcataatgggccgggagtacaccccctggtagtaggaggtatctgcggccaggggcgaggcgtccaggcccgttttgttcgtgaccgggcccatggccaagctgccaggcatgggggaaccgtagccggggtagtgcatcacctgttcgtaggccttgaggtccattttgtggggttggtggtggtggtggctgtggtggtgctgctgctccgaggacatgaggttgttgatggagaacgggtggttgaaggcgtagtggtgttccggcttcaggtgggcctcaggcggcaggcccgggtggtggggcgggcccagcaggtgggccgcggcctgctgctgctgcccgggagagggcgccggctctggggggctcagcgccgcagccggcgtccccttcagctctcccaggccccctcgcttgtgctcctggcacggggaggcgctcgagtgaggcgactcggtgcccgccggagtctcggaggccggcccggcggcctccccgagttgagcctgtgaggcctgggctccggcggccgccttcttgccgctgccggcggcgcctgcggcctccttcagcgccagctgcttctcgcacttgaagcgcttctggcggcgcaggtagcagccgttctcgaacatgttgcccgagtcagggtgcagggtccagaaggagcccttgccgggcttgtcgggcgagcggggcaccttcaggaaacagtcgttgaaggagagcgagtggcggatggagttctgccagcgctgctggttctgccggtagaaggggaagaggtccatgatccactggtagatctcgctcagcgtcagcatcttgttggggctctgctggatggccatggtgatgagcgagatgtacgagtagggcggctttgcgtgcgtgtagctgcgcctgtaggtcttggggtcgcgggcgcggctcaggcccgcctgcccgtacatggggctcatggagttcatgttggcgtagggggccaggccgcccatggccccggccgcctgccccccgagcgggctcaggctgggactcaagtgcggccccatgcccgccacgccggccgccccggccgagccgcccatgcccgccatggcgcccgcgccgggggacatccccgccagggacgggctcatgccagcgcccacgtacgacgacatgttcatggagcccgcgctcatgttgcccgagccgctgcccatggcggccgccgacatgctcatgtacgtgttcatgccgttcatccccaggccggcgttcatgttgctcacggaggagtagccctgcggacagagccccgggagggaggcgacagcgttagcaccgcggctggagggtgcccagacctcccacccaccgcccaggcctccgcgtccggggaggcctccggggagccctttcgtccccgatggcccagtctccggactccgagtctgtttcattcagggagagtcatgatcgatcgcccttgggaaggtggcgagcggattgctgcttgggcatgtggcccgttcctagcccttctccacctcgcccagattctagaacaggggtcccatggagtactcccaagccagcaccccaaatacattcccctaccccagagtctccccaaactctcccaccagcatactgagctggcgccgaggcccgaagtccccggacgccacctccggtcgcagcaagcaacctgcgggacaacgcgcggggcgcctcgggctgcctccagcgaagactgtcccgggccccctctgtccggtctccctccagggaccccctcccttgtcccagggaaactgcaaggcagtgcctgtgcggagtgcgggggcggctggaggcactgaacggggcaatagggaaagaaccgagacctgaaccacacgcggctgagctttgcaggcaaaaactttctttctctttgtccactagtctttgactctgcctccacttcagcccccaactcctacccatcttctcctcctcagctccccaccccctcgccggccgacctcccacccctccccagccgcgcgctgccaaacataactctgttaggatagtgcgtggctcggccacgaagaggatttggaggcgccgcaagtcaatatttgatcacaaagttaatattatctcaaggctaacagtgtgtcgtataaaaaagagacccatttgattccaaggagggcggaaaaggcggctgcccagaaaggctggggttgtggggcggggtgggggggtgccagcgagggaagcggtcctgaggttggggaaggagcgagcgccgccgctccacttccccctggaaaagacgagcgcttacctcgggctctgcatagtagctgctccagtcggacggctcgtgcccttccatcttcaccgctcccagcatactggaagccgagtgcatggcagtttaaaatttaacagccacaacaaacgaccagcaatcaccccccacccccaccctcttttaaaaaaaagtcagccaaagcaccgtcccctcctccctccctctctcgcgctccctctccctgggctccactccctctctctccctgggcaggccggaggcggtagttggaagtgggcgggaggtgggggggggcgaggagcggaggaggcccaggccagcgccccgcggtagggagcacccgccgccgccgcgctcacgggctgccgggtggcggctgaggttggcagtgccgagctgccccgaggcggcgggaagcgcgcggcgcgggggctagtgggggggtggggaggaggaggaggaaggaggaggaggaggcggtggtggtggtggaggaggaggaggaggaggaggaggaggaggaggaggaggaggtgtggaccgcggagcggacaagtgccgcagtgacgtgggaggctggtgatatagcgcggcgcgctggcgcgggcctccaatccccagacccggggcagcccatttgaataatcagctcacacctaggtgagaggtagccgcagccggcgctccgcacctgcccctcagcgcctgccgtccgccccaccgccgcggcgccccgcactcctgggcgggccaggggagcgggctgggcgggcgatcgggcacgcgggatccctggtcgagccccctttcctcccgggtccacagcgagtcccctgaggaaggagggacctgggaggaaaccaccctctggggcggctccggcctccagcccccgccccgtctcatcgcgccgggcgcccggtgcgcctgtcggagggcgcgtccagcctcagtgcccggcagatccctatgaaagccggatttatttatgccgggtttcttcgctctcagtgctcattctctgtcaaaacagcaagtccatgacagccaatttgcaaagcgctgtcctatttagaaaaactacgtacacacctttaactcgcccgctgctgctcctgcgaggcccctccctgttacagttcagacccggaacggcctcgggagaagcgcggggcgcacggtctggccgcctcggctctccgactcctcagacaccggccgccagggacccgcagtggggcggccggcgcctggcgcaagcagcccctctagcagcggccgacggttgggaggctgagatttgtctctgatattcaggccggcgtgtttcaaggttacttttcagtcacaaccgaggtgcccacagcatttcgtaactaaaacaaacagggcaggaggtggggagggaggggtgaggagagaagaatccaggaatcaatgatggggcatatggagttgacttcaagagcgtctctgtcctctctgtcttccagagggactgcttaatagaaattagaaactccagcaatcgtatacttttatttccccagcagctcttgggttcaaaaattgtcttctgttctgggttagcctgtgagcccagatttggagtggggggatattgcaggtgtttgg

SEQ ID NO: 68410 - DNA, 1184 bp, Homo sapiens
ctccgcaggcctgggcagacacacacgcacacacacacacaccgcacccccaaaactcaaaagaatgttatggttgacctagtctgtgcgtgtgctgtatgagagtatttgtgagcttatgtgggtgcccacttccctttctattttgctcctgggtggaaatttggtcccagaaattattccaggaacagaaggagcgagctggagggccgcaggagaagggggcgctacacttccaaggagcggactttggaagcccccacctccaccacagcactattggtggccggggtcagggacaccagagagcgctcggcgggggcttccacagtgacagggcgccccctgtcggccgccaggcccgcgggaccgacccgagtcctcatttacccccgcgatcccaaccccgcagctccggcaccggagcaccttctcccccgctctcccagtctctccgaaaacgccttcggggggactcggcctttttggagccccaacccctaggttctgcgcgaacccaaaacggcctcctgcaccctggcgaggttctgggagctccggtagggtagggctggatgacgcctcctagagtctcggagcagccgctcccgcaccctcccggcacgcctgcccatgggaatgcgagcggggtctacggttagctttaggtagctgggagcgggacaccaacgggctgcgaaggaagcagggacgttcagacagcctggggttcgcgttcccttccagctcagcggtctttggagctcctccttcccggagttctgatttctaaagggctatccagagttctggctcaggcttgaatgctgaagattgctcccggagtttctctccaggaaaaagttcgcggggacctcgggctgcagatgtttctcccaatccctctttagtctaccctcatgtagggccgagacctacagagcccttccctttccattttgttaggtcaccgccggcttctataataaagctgctttataactgaggactgtgcttggggttagcatgctatttttattttggatgttgcctcaatggcaaagtcataagactcgagttcaaatccaggcctcctctgctctccctgggaagaaaacacccaggccatccaggtctcctaggccttcatcttgctggaacaatctgcgttcccctagcaaaag

SEQ ID NO: 68411 - DNA, 711 bp, Homo sapiens
cccaagcttggaagtaaaaaccttggaattgctaagcatgaatgtgcttatctagggtcactgagcaaccatcagaagccccaaacagtgttgacattcggcaaaggctgggtatcccagactcggtcacctgaaatggaaaatactttctcaccagcaaaagtatagataccttttggttaaacgagattgaagtcacacctttgtgagaggaatagcacagccaaaatttagggggcccacctggtgattctgaacattttatttggacaagttgcatactttttaaacgcaggctcttgaaaaattcctttagaaatgtcaaggtgactggtgtattaaaaaagtgagccagagcaaacaaaggtgacattcttttaattctttccctgctgggtcattttctccttgctgtcatctctgcgtacggccatcgtccataatggaccctcgacctgctcagaggttcacacttgagggaaattgcaaagtagaggaaattttgacccagaggcctcttcacctcttcccaccaaagctccagcagaggctcaaacttaaagctaggaagtgagagaaccaaatcatgctggcaaattttctctgctacatcttccaaaaacatggtgataaggacaggagtcaccaaaggtgttgttcccggcatctttcatcatccactggggaagaggctcctgctcggggaccctg

SEQ ID NO: 68412 - DNA, 823 bp, Homo sapiens
cgttttctggctactggatgtgtttttctattgcacagatttgcaggcgctttaaatgagaatgtgtgccccggcacttactaagcacatcagcgaaagcttcacagcgcaccatcagccaggcctgctgctgctagaccctctgccagacactgagaaggaagacgtttgtgccctaggtcaaaggcaaaccctgggtcctagggaatgtcattgaggtttgcttaagtaaaatgttttcatttaggttatctatgccaataaaatgatgcaaaattcataaaagcaggtggaagcaaaatcgtgtctgaatgtaggaccctcttctagttcccttttgaagcagccgcttaggccgtctgcaattaagccgatttgacagtagagggcagcagagggtgccgtttcagggttcattcggccgcacaggcacaagctccctaccggctcggcctcagccggaggccctggcagagctaacaatggccggctccgccaaggcgcgagcaatgagctggataaagtctcaagcgacccccagctcaggcctgatggagaagctggttatgtgcacagcctctaactctgaccaacagcaggttaggtcagaggcaggactaaggggagacacattcccggtgtttcttttccttgtcggcatgtccagggtgtggggcagctgccggataaccccaattggggttatcgtggtgttcaggcttccctgtccctcctgcaagcagcgagcagtaccttgagcctgcagggaacatatgaagatgaagaacctcatcttctaactcctccagctcccagaaagctt

SEQ ID NO: 68413 - DNA, 1665 bp, Homo sapiens
cctctcccacagggccattttggattgaggagctaatctgcaccaagttttcagaagtggtaagcagtatggcagtgtgagatagaatatccattggaagaggaatgtatcagttagcaggcagaaatgctgcttcccaaagagcagggtcagtggggtcattgtggaaagcggctgctagcttgagcaagcagcccacactccccaacaacacatgcattccacactcaattctgcatgtgtgtctatgtgtgtctgcattactgtgagagtgtcacatgtgtgtgtgtgtgtgcctgtgtgtttgtgtatttgtgtgcatgcttatgtgttcaattcataggagctatgaagaaataagaaacaaatgggagggaagtttctaaaatgaaagctaaagagataatcccaggctttggtgaacatgtttgaaattctttgctcttctgacccacgtcagcagggtgactgggcaggagaaggtaatacttcaaagaggaagagtttccttgtggacatccaagaaacactgaccaaagcactatgggaataaaggaaaatgataaatggatagaaagtcctgaaaggcacacagagatgtagagatgtgcacttttccaagtggagaggaatgccgattgcataaatacctgataagatagttcctggacagtctcatcctgttccagaacatagggcaactcatgaattccaaagaagccactcacccatgagtcaggggcacagacacctgacaatagatgtctgcttttcttgccaagcttctctccaccctggcttattcttctctggagagcttactctctgacctcagggacaggaatataaaaccaggggagtcaaacgcagcatcctgttgccctggcctagaaaatagaccttgatgtacttgtcgccctagcatgagtgatcagaagtcttccccaggatttttctaccagtatacagacaagagtgtccaaggctgacaagaagatctgccagccaccatgcctccagactcccagtaagcccacctggaaggaacaaagctaatactcagtcagctattgctgtgtaacaagtcaccccaacatctagtgtcttacaacaacggcatgctcatctttccttattcttcattctgtggtggaggggcagctcttctgctggtcttcctttggctcctcatgaggctactaagcacccaggccctaagcacatgagcttattgagcctctgcttgcatcatgtcactgatgtgtgattggccagagcaagtcatatggccaagcccagagccagactaaaagtggacaccacgagtcatgatgaatcaggatccatcattgtgaccattgaccgcagcaaagttcagatgctcctggtggcatcaaagttcatggttctggggtctctttcttgtgtcaccaccatgtgaagatccttgattgatgaagaccagcagacatcagagattactctcattccataatgcagggaaatatttctagccaggaagatagggaagagagaataccttgtttattcaatctgcaggaagtgtttactgagaagatatcaaaaccttatctagaataaaaagaaggattacacaccttaccagtattcaagtagctcaccatctgagaaaataagccattc

SEQ ID NO: 68414 - DNA, 2565 bp, Homo sapiens
aggagccccagacaccagattagggaaactggactttatcctaagacaataatagaaagccacaaagaggaatatagaagggtggggtcaccttaattcaggcaaaagttgggagtagcttcaccaaggggtggtggtagcagaaattatgatgaaggaaagtgaccaattcaagaaacagaaaatagaattgccggagtttggagatgaattgattggattgaggtcttgagtactggggaacattcatatagaggtgagcagttttaaggcccaagatactgagctatgatgaccattttgagttgaaggtagctgtggtcacaaacactgcctcagtgggtgagaaaaggggttgtgcttcttatttgcactcccaagtaagcattcatagctattaattaaatggacgagcaagtaaataagcaaatgaatggatgcatccaggtgcatccagtccagtgacagttttatgtgatgagtatagagacagagcaaggctggcatgccaacaggggacccagcaaagtgtcagagagaagccatgggagtggatgtcaccagaaggggactgtgaggaggaaacgacactgaggtcaggaacttaaccagacaggcactgaagaagcagacagaggaagggagctcgtgaaggaggagagaggtgggaggagagccaggagtcagataacttcgaatgctacagagacaccagtgaaggcagaactgagatggggccatgaggtttggtaacaaggagattgctgatgatctgtgtgcaaataactacggcaaggcaacagagtcttgttcttccaatatgtcccttggtccataagcgctgagaggaagtgacaatctgtgagtagaaaccaagtgaaaggagtgttagtgcactcttctttagaagagagcaaggcagagcctgtgagagaaaaatgtctttgtctcttgtctctctttgtctggctcaaggtaatgtaattgcctcagacttcccagggaagcaagtggctcccacgttcctaagcaaaggccaagccatagaacaagggcagaggccgccactgggaatgtttgtgttgttaattttttgtagttgaatcatatcgggaaaattgtttccaagttgctcaaacatggatagagaagctaatgttttgctggaggttggcatttttccctgatgacatcacatgccttgtgtcaccagttaagggatcatcagtaaagcaagtggtcaacgctatgcaaccacaaaaatatgcttctcctcaaaagataataataaaatatgtagaaacaaaatcggttctaacagggagactccttggtgaacttaaccatctagtcactatataccaagggcacgtcttaaaaacaaaacaggaaagcaaacaaacacaaaaacaactctgctcctaaccagcatttatcatttagcatacgtgggttttaagaaaatactgaaagagattagctctagagaggtgaaatgcaaatgcaggaggaaaacaatccagggttaggaatgataccatatgtctgaataagaatcatttccaaaaaccattctcctgtgacttcctatatttctttgtttctggcctgcataagagaatgttttcttaagagcaaacatgtaaaatgaaacaggaatgactattggctgaccacgaaattttctcccaacaagtgcatgcactgggactcgagattcttcaactaaacccgagtgttacaccatgagatcatgaagccaataaaacatttgctgcatgctaactatgccaaatctcacttttccagagatacgaggatggaataaaaagagaaaaataagcaaatgttgaaatggaaccatgtgttctatgtgcaaagcagaaaatctgaacagtgcaaggagggtggagaatcacagggcctgtggggttgagaacaagatggcagcacagggagccactcaagcatattcttctgcttgacattataccagcctgattcacaccagtcactggtgacgagtggtcactagtaagcacaaacattttttctggaatttacttccccaaattaatatttttttttccaaattaatattttttaaatgctttatttttttggctttcatgatgtcatgatgtctccattttgcttcaatcttactggccacttcttctcatctcccttgctgtcctctacctctcttcgtcttccaaatgcagaatacaaaatgccaccttctccttttgttctaaacatgcttcctggctgacctcatgcactccactggtttttagacatcctgtaaaagttggcaagttctcaactcatatctctgagattacctcttcctggacttcagataccttatatgacaaaatgtggttgttattcttgagacacctttgatgtcagtaaatcctactcactttatcttccaaatagatgtgaagcgggccgctgcatctgcaccactgatccaagacatcatcatctctctcttgggtgacagagtggattctgcttgtgcttcttgctcctctacaatctaatcacccctct

SEQ ID NO: 68415 - DNA, 1014 bp, Homo sapiens
aggctgatttatttattggtctttcctggaaagaggatttggattcatttatcagttctactgtttgcttatgtgggtatttttggtgattttaagttaggtaatgactacttggtgtttataaattctttcctctaacttcctttggttcattttgttgtacaattcttcattcttaagcaacttttggttaatatatttttaaacatttctcctcattaacaaaaatattgaatgctatgggttttctttataattttggaccaacatatagtgttctcattgtctttaacttctaacaaagccataattttagttgtcatgtctagcttaacctaaggtttttttttaagttattatttttaacttggggtggttatattggtgatagaggaaggggacacgggaaattttacttttattttctaattgtattagtcaaggttctccagagaaacagaaccaatcggcctgagaacaaagagagttcaggttgcaagttccagtctgagtccaaaggccagaaccaggagagctgatggcatcagtcccagaccaagagccggaggaagccagtatcccagcgcaagcagccaggcagacagaacaaactccttccccggcctttttgttctatttgggttctctgtggttggactggaagatgcacacccttattgggtagggcaatcttctctactcagtctatcaattcaaatgtgagtctcatctagaaactccctctcagatatacccagaaataaaaccccatggcccagttcagttgacacataaagttaactattacactagtttaattgcactgtgattagagaataccactctttgaggctttcttgaaatttcctttggctctaaaacatgatcaatttttgccaatgtttcatgagcatttgcaaaatgtattctctcatcagcaaaaatgctaaaagtatctcttaaataaagtatgctaatgcagtttttaagtgatctgcatttttatttatattt

SEQ ID NO: 68416 - DNA, 2612 bp, Homo sapiens
gggtcaggcacaattttatatgctggagacacaaacctaaaaggaccctaacctaaaaggcagaccccacaaacctaaaaggcagaacagctgcctttcaaagctaaagtctcgcatttttaaaaggccttggagctgcattaatgttcttctaatttttctaggtatgaatcttcatacttttctaggtatgaatcgaccctgtgacaccaggatggttctttgtcagcctccttgtctataaaatcagaaataatggtacctcccccaataagttatgtgaaacaaattaaaggggcttattatacaggaaacaaaagcagcacagcatccaaactactgagcgtgcagtaaatcaacgcattcccacttccattccatccacgctgatttagatcaatccaagtatcactgccttggggttcaaaaggccatgttagttcacaaagccccgaaaatgctctttcacactctctgctcagcctccaacgtgtctttttaataatccaaactttccacctacttaactgaagtgtgtggggggagagggtgcgggggggaaggggtggcctatactaaatagcccaactgttttccacttgtcctgaaatctgagaccaagattctcttaggaatgcaagcaaagggagccgacgggacgccaagaaagcacaggttaaactacctcacttcatctagccccatttctctcctggcttttcaattaattattcagcctcagaccagcagatggagctgaaaatgttgtctaaagaaatgaggtttttcttttaatttacaagctatagtttctcatgcctccacactgaatggttacatcctgttgagcctgttcgtaaagttcagtaaaaatccagttctcattccagaacagctgaatcgtagctatgaacgcggaagaacagagtcccaaccccagccgggcccgggtttcccggggcccctcaagcctcagggcagtggagagccgccgtcacgcccccgcctcccccacgtcccaccctcgccccagtctcctcccacttttagctacttttcccatctgactaaaactggcttcctccgtgtccaccaagatgtcgcctctaagtggcctaactcctaaagagcgcgatcggctcaagcactccgccacgcggtttccacggggcgcggccggcgttgccctcgccgtggcctcaagcattgcggcgccccacatgttgccagacggaaggcctcggcggggtcaggcagctgctgctggccgtgactacatcactggtgacgtttcacgagacttttaactgaaatcactccaatacaggcgcatgcgggacgaggggaaagcatctcacccgaccccacacaccttcccctccctctccagcctagcggcctccgctcagcggaaaaaaaagcagacgctactccccgctctaggtgcgggacctaagaggtttggcccaatcaggcatcccacctaaccagacgggccggagtctgtggcccggttggaccaacgaaaactctagggcggatttgccgggatttctgggaaagtgacactcccggaagctaccgcctcttataagccacacatgggcggagttagccttccggcccgcagtcccactggctgacttcgctgcccgtcacgggaatgcgggagagggcggcgccggggcgctcgcgtctgcgtggagaccggctggccgcgcgcgggaagccgcggaactgcgccggaaagtcccccggctctggggccccggtgacccagagtaagcctccaagaaggaggaggaggagagaaaggcggctcttcccgtgcccctaccagaggcttcggtgggcccaccttgtgacctccgcggccggcccctcagtggaactgcgtcccacgcggggggcgtcccgaccgtgggggccgcggcccgcgctgaccctggacgtcgccgcgcaggtacgttgccgtcccccggcggtctgacccccgagacagcccctagtgcataccccacgccctcctccattgtcgagaatgagacacggctgtgcctttgtccacgtggtagagttgccgccgcggtgaggctctcgcctgtgcaaaaagcgtggcagcgaattctcatcaacgaggggaggcgcgtcccctcacagcgcagctctcgggtctgaggagggccgggcagggcgtgcgtctgtctaggtttgaattaaaggcgactcacaggaaataaggccatgccactgtggtagcttttcccgtccatctccggacactcgacggtgtgggtcgtgcgaggaggcggcagtcttcacagcctcttactctagtcctcacggtcaggttctttttctgatttgacacagacagcgggactgacgacctcataggtagctgaaaaccgtaagtggagatggtccttctatggtgtgtgggggcgtggccagttgttagattgtgtttggaaagacagccaggggcggagaagaggggcatttctgagatgatggggggactggtgccatggagggaggaggagtgaggtggagatcgggaattccagccaaagagaaatggggtccctgggagaaaattcccactctag

SEQ ID NO: 68417 - DNA, 1131 bp, Homo sapiens
actaaaaatagaaaaattagctgggcgtggtggcaggcgcctgtaatcccagctactcaggaagctgaggcaggacaatcgcttgaacccaggaggcggaggttgtagtcagccaagatcgcgccactgcattccagtctgggcgacagagcgagactccgtaacaaaaaacaaacaaacaaacaaaaaatcttaaacatcaccaacgagccttgtgagaaatggtttaacgttgtgataccttgcccaattttaaggcaggtaaaggtgtgtgttaaaactcaactcttgaactgaaccccagctgccctttagggcatgcttaatttgatgtggactgtaacctcttttgcagcattgtagagatttggaatctgcacattaggaagagaccccacgaggcggtggcgttctttctcgttcggagctcacacccctcctggggagccctctcccaacccgggctcccggtaagcgcggtcgccgctcctctgagggctgctcttccctcgcttctgagccgaggcccccgcgacacgaacgccacgcccgaagcgctcttgccaggacgtactgaccgagggtaggctgcccagccgggtggtaacgttgaggaaaggacagcagcttcgcaaaggagctgggtaaaaccacgcccagaccccgctggccaccagcccgagaccaagacgcaggcggtggcgccggtttctcactcaaccgcaggttccagcatccccgatacggccgacgtcattaccctgcgaccgctcaggacacttctgaggactcttttgacagctagtaatcgcgcggtggcgcgaccacgtgactccggcgccctagccccgccctccgtctccaaggagccctggaaggagctataccagcggctccagaaggcggggagaggcggggccggactccgggacagccaatgggcgaggagtgccgcccagcctgacccaccggccgctccctcacgagcctgtgggcgtgcgccggctgtgcaggtgaggggcagcgagggcgcctagtgggcagggcgccggcgttgcgcgtgcgtcagtgttcttccttgtgcagtttagaatttgatacatttctttccagtctatttctatagatttg

SEQ ID NO: 68418 - DNA, 2980 bp, Homo sapiens
gaaaggtagtggagaaagaaaacactttgtaattgaataagcattaaactagaatgtgatacccatcacaggcaatccattaagagactgcaaagacagaacgaaatctcactcttttgtgcagccaagcaatctattacacacattttcaagataaacaataactagctctcaagggaacttggcagcatttttcatcacacacagttcatctaacctgatatttgggatgatcctctgtgttagccaattggctttatctagaggaaaaagaaacttgtatctttatgatatgagataattttgtaagttggagcaaagggcccactgaagttaggctcctactcccccattaaaactgggagacaggggcattaactcccttgatacttaaagagatggctcctaggtcctagaaaaagacatatctaggttataaagcgcacaaaaaggcctaactagtcttcaaaaggatttatatatttcaaagagaggaaaaagtacttacactaattaccaattttctaaaagtaaatgttcgaagaaaaagggagggaaatctcatattttcaacaggaagtagtaaaccttattttaaatttgtatttgtcctgacagtccccaaacattacaaactcaacgtgtcggtaagacaaggctgagttaactgctggccacagtaagggacagcatgacctggcaaagctttaccaatggctgggagcaaaaggcaaggtcagtttattgagaactggaagtctgactcaaggaaggtgtttcaaagcgggctttagttagtattgagcaagaattggtggaaacagcaagatttcgaggagtcagcgaatcttagggaatcaattgtgctttccccgaagagtggatgggtctctggggaagttctgtagtgaacaaagctttcgcccgaatgggaactcctggaaataaagccctgcagtaaagacggcagggtgcggtcccggctcctggcgcgccgagccccccagcagggcgggggcaccgcggaagaagcgccccagaggagagcgccgcgccgagccccgcctggcgccagttctccagcgcccgtggaggcatctgcgcccctagtagccaaggtgagtaccagctccaagcccggctttccgcgaggtccctcgcgtggccaccgtgccctaagggtgcgctcggcctcggggacgtgagcagctcttagtgggaagccagctgcaggccctgaccgcaggctgctggggcccggaagcgctggcgccttgcggccagaagcccggaatggacgcgaaagtgaccacgcgaatctgacgctcacgtgacttttcgcgactggccccgcccccctgtggcgtgccgcagcgcagacgtcgctgtctcctgcgcaggcgcaggccttggctcgcggcgggtgacgcaatgcggcgggtgacgcaatccggcgtcgccagtcagtcgcgcggccagatcaggtaactgcccgaaccgctccgccgcccgacgtgtggctcagccccttcctcagccccgccaggggcggggccggccgcgggaggggaggggcctgcagcgaccaatcggcggtgcccgcgcagggtgctacgccacgcccagccgggccggccgttcctaccggcctggtccagcggacagcggctgcagcgggggcgccggctgggaggtgagtgcgcggcccgtaggcctggctccggcccctcgccgcccgccgccgcctctttgtccgcgcgccccggctgctctgtggacctgcgcgtctcggggatgcgggagcgggggcagggggcggcccgagggcctgatccacgcggccccggatgcccgcgtcgggaggcggcgcgtcgggccgaggaggggcttctctgtggctgcagtagtttgttctctgggtcgtctttggagtggccgagcggcgtccgggcgctggggcggccaagtggcgcgggaagggtgggaggtgccgtgagggcggcgaggacagcggcggatttaagccccactggaaaccccggcccttgtggccgtggactgggctgcgggtagcagcgtctcctggaagggctctggccccgtgagcctcggggattcaggggccgccgacgttggtgcagatgccgggcgcactgggaggcggccggaatgccaatgagattcggcggatacgcagctgtcaccggccgcagactgccctgtcgccacctccagtgcctgcactccagtagccaagcaacataggaaatcgcgctcagaacccactttgttgattgagaaatcaggtctcctcgagggccctgttggcagaggtctggggaagtcagggcatcaggctgagagagccctctgcagtcttgtttccccaggctggggctgggaccactgaaaccccagtggctctataagagccccactcttatagatcccttccttaggctttgtcagtgttctcacagttttactggggcgtctccttcaggcgacattgatcaagcctcataggtacctgtttacagcggaactcccagagggcagtcttttccatgtttgagggactgctagttgtggggagcggtctcattgatgagactggagaaggggagaggggtgggactagtttatcagggaagatgatgacaactttttttctagacacgttgaatccgaggtgacatctgtggtctggccgaaggaggctagaaggaaggcatgtgctttggatggatggaaacaggaatcaaagaggaaggtagattcaggagctgaagggcagggagaaaacacattcagggagtttgtggcaaagcagcagaaatgacgatggggtgacggtatctggaggccttaggtggggttggtgaaatttgcatgcccgctgcagtggaaagatttaggggctaaagatagccctttgcctttggcaaggctgaggggaagagtgtgttgagtagtctga

SEQ ID NO: 68419 - DNA, 2347 bp, Homo sapiens
gaaaacctctttcccaaaaggagtgttctcctgagacaagcaccaagtgctgtcaagctttttcctctgccagttacagactctcccacagggaagcacttcctgacttgaaataatgttgtaacattaaaataacctcctggcatgaggtactatgacattaaattttattagagtgaattttaaatgttttgtgaatcaaaacatttaaaaggagttagtgtggcgctagcacttgatggtactgtcataacttttaaatgcaaaacaaaacataattcatagctatatctcctacacatcacatgagaaatttagaaaccagctgtgataaacgtcctctgagaggttcctgaggacagggacccttatcttcttgcatttttgcagcctttatgcatttctgcagttatgcgtactgcatgcaacttgtccttaagcatttcctaaagacgtatcaatagcggtaaagtattataatttatagccaaaagaatgaagttggcaaaacaagctaagagcccattatgtctgtcttctgaaatagagtctgaactgaatgtgtacagaaataaaatcgtgtctagtcatgcaatgggttaagtatctgctcttggtaacagcaaaggatctttcactttcaaaagaaaacaacgaaacaggcacacacaaaatttctgcctttctcatcctaaacagctgaatcattcacatattcaacagcccagaattcttccgggctgtcagtgcgggctctgctttttgagaggttggaatttaaaatcctccttaggagagcacggaagaattacaggaaattaaagggattcccaaaggacgcctgacttaaacagcagcagcgttaccgttaatcaaacaggaggctctggctatcaatcaatctccggagaaggaaaaatactatgctgagaaaatatattcgttcattagtcaagtatttactaaaggtgtactcggcgcaaggcccctggagagaggccaacaagcacaccagctctggatccctcgccggaccgccccctccccggcggggcccacctgcaggcgggacgcccccaggtgcgcgttccaggcgccgggggcggcccccgcacccacccctccggctccaccccggcgcgcctcacccggaccggtctcaggagcgatacgggcttcagcgtggcgaaatgcaccaatacgactcgctacgcactgagaagggggccccacgcgcgccccgagctaccgcgcccgcgggcctcagggagccgctgaccttctaggtcgtgggacccccgcaccaacccgggccagggcgaggggggcgatctggggtctccagagggcgcgtgaggctgacagccccccccccagagtgttctaggggcttcgtggggcgcttggggagctctgggggtcctaggggttctctgaaaggcgcgtgggggctgagggtccctgtgagactctggggattctaagggggcgtgttaggggatccggagagcgtgtgggggctgaggaaccctggggagttctgccggccctagggggtctctaaagtgcgcgtgggggctgagagcccctgggaggatgcggggtttccagggaccctgggggggcctgtggggtctctggagggcgcgtgcggactgagggcccctgggcgtcctgggggctccagggggcgctgggggaccctacaggatttctggagggcgcctgcaggctgagggcccctagacgtggtctgagggccccagaggttgcgtgggggactcggggggtcagcctgaaaggaagggggccaagtacggagaccccccccccccagggcacgcacggtctggcgctcacccaaacagccctcggaggaaggagtgggaggccttgactcgcttctcggcctccgccatcagctgtactgcctcacgctccttccccgcgttgtccatgtcgcccgccgcggccgccacagccccctcagccggctcgctgtgcgcccaggcgccttaaccctccctctggcggccgcagggacgcaggcgcaggcgcgacgcgcgaggcctttcgggagctgtagtccgggtcctgtcatggcggcggggattcgcgagccgcctactacagttcccaggaggccccggggcggggtgtgtgtgagccgagcttgcgcaccgctagctcccaggacgtcggcgcagggggcgtgacccccccaaaggggtcctgggccaaggtgaactttaattttgtatgtatgcagaaatggaaaaatgatccgtggcctctagtaaagatcacctcctcagtaagactcgcatggcaatgggatggatgaagg

SEQ ID NO: 68420 - DNA, 1415 bp, Homo sapiens
agatacaaaaattctgaagaaaacattagtaaacataccacgcacaaaaatctagatggattatggacgtaaatgggaaatgctaaactttaagaatttcagaaaaaatatttaaaagtagctttatgaccttgatttcctaaataagacataaaaaatgcaaaccacaagaaagaaaaatcaatacattctttccattaagattaagaatattttttcatcaacatgccataaataaaatgaaaagacaaccacaacccagaggatgacatttgcaagaaggataaataaatcctacaaatcaattgaagacaaccaaacagaaaaatgggcaaaagatttgaacttgaagacttaattacagatttcaacagactcttggccctcttccgcttttgctgctcattgcttcagtgggaaaagcatctgcttacagaaaaccagacagatcgcaggagaaggtggaagcaggagtgtcgcagcctgcagaatccacctgctttttctttgctttcaaaatggaacctgatgactatttaagagctggtaaacagatattgtgttgtggaaaacgtctgcagaaaggagaccaaaggctggatgaggacgatgacctccccacaagcccctccactctgggcatccttggcctcttgtgacacgctctcactttttaagccttgtgatttctcatgtttctgtgtctggaaagagaaaatgtaccctgggacctttggagcgatgccagcttggagccatctgtagcaccgccttgtttgctgactttctgtgcgcctgctgctggcctgctccccagaatcagaaggcatttccagccaagatcagccatgttcttctgctgctgccctgggggcgagggctcagggctgcagtgggagctgctgctggcagcatggactgtgctcccctacccctgccctgcagccacagttgggagattcctcaagcaggcacagactgctgaccattccttcctgggccatgtttggagggtgcccagcagcaggtgggtcgcaaatagatttgctttctgcctgggttatctccaggtcagcagccagcctagaacaggattatttaggggacaaagaagagcttgtcaaatagtgctacatgcaaaaaaaaaaaaaaaaaaaaaaaatagagtggagagaagaaaccaaccgagatcagccgtgttgtttacagaggattatttgtttccccagaatgatcagaaaatttcagatagcagatgtcggctgatgaagagagtgtcacagtgtgaccctttcccagcaccaatgccatatctactggtgaaggagtgatgaagaactacagccaggaagctccctgtctgcaggttcctcagcccacataagcagagcctgctgggataaaacacatcatca

SEQ ID NO: 68421 - DNA, 580 bp, Homo sapiens
tataggcgtgagctaccgcacccacccagctgatgcaattagaacagaatgttcataatcattggggaaacctcatcattctttctacgccaccccacatctctatggcttttctgaatttagcatgtccctgagctctgaccctagtgtggggagccctatttcttcccagcacacacacaacactgtgactcacacacatttttgtgagtgtgtctgagattcccaataccaaattcacattgagtgactcactagaggactcacaggacttagcctagagtcattctcatggctgtgatatgacagcaatgggacacagggcaaaaccagcaaaggcaaaaggtgcatggcgctaggtcaggagaaaaccagccaggagcttccagagttctctctcggtgccgtcacacagagcacgctcaattcccccagaagtgagctgtggcagtatgtgtcacaaggaagctccttaagacccagcagccagggtttttaccggggactggtcatgaaggtagtctctgcctggcacgtgccaaaattccagactcccagaggatagcaggggttcaatgtc

SEQ ID NO: 68422 - DNA, 2289 bp, Homo sapiens
cttccagcttcacccatgtctctgcaaaggacatgatctcattcctttttatggctgcacagtattccatcgtgtatatgtaccattctttatccaatctatcattgatgggcatttgggttgattccatgtctttgctattgtgccacaatgaacatatgagtgcatgtatctttataatagaatgatttatattcctttgggtatataaccagtaatgggattgctgagtcaaacggtatttctggttctaaatctttgaggaatcaccactctgtcttccacagtcattgaactaatttacatttccaccaacagtgtaaaagcattcctacttctctgcattctcagcagtatctgtttttttttttttttggactttttaataaaaagtggaaatgcattttgcattcacataacgtcagttctgtttcgtttcatggacaatgaagtataacttacagactatagaaagcagagacactctcatatttttacttatgtgaataaaagttgggcccatctgctccctctcctttctttaacaatagcactactgagctgtgattttgcccagtatcatcccccaggagaccagttcccagcctcttggcagctgggtgtggccgagtgagtcatctctggccagggagatgagagcaaaggactgcagccacagaggctttgagctccattgcccataccctgcttttcttatgaagagaatttattctcatcccagtggtatcactgaaaagctaaaggctgggaagatgaatggaagggcccgtgctttggacattctgttcccatgaatcatatttgcttgggaaattaagcaggaacgagagcattttggaaaacatgcttcagtttcactttcaaaacaggaacagagaaaaagtaaaaacgagagaggaaaaccagctgtgatggctaaattttttgtgccaacttggctaggccatggtgccagttgtttggtgaagcaccaatctgtgtgttgtcatgagggtgttttgtagatattgttaacatgtacaatcggttgattttcagtgaagaaaataaccttagataatgtggctggactccattcaattagttgaaggacttaagggcaaaaactgagatttccagaagaagaatgaagtctgttttagactgtaacatatcctgcctgcctgacaaatcctggacttgccaggccccacaatcacataaacagattccttaaaataaatctttttacatatatatgtgtgtgtatatatatatatatatatacacacacacacacacattctcttaataaatataaatatatcttaatatatgtacataatatatatgtatacatttcatgttatatatgtataattgtatatttatgtgcacataatatatatcctattggtacaatctctttatatatatatagatgtgtgtgcgtatatatatcctgttggctctgtttctctggagaaaccaagttgatacatgtattagtctgttctcacactgctataaagaaatacctgagactgggtaatttataaaggaaagagttttaattgactcacagttccacgtggctgaggaagcctcaagaaacttatgaccatggcagaaggtgaaggggaagcaaggatgttcttcacacagcagcaggagacagtgtatgtaaagaagaaactgtcaaacatttacaaaaccattagattgcatgagaactcaccatcataaagatagcatggggaaaactgcacccatggtccaatcacctcccaccaggtccctccctcaacacggggattatggagattacaattcaagatgagatttgagtgtggacacagccaaaccatatcaatacactgactaattcagcaagaagagacagacttccctatgaacttaaggactgggaccaatttgatacaaagcacaatgtggttctgaaggctggcagagagggagatgaggacgaaccttgattcaatttctcttgcaggggccactgaaaaagtgagagacacgtgagctattgctgaattagaaaacactgactgggactatctaaagtgaaattagccagacacaaaaagacaaataccgcatgttctcacttatatgtgggagctaaaaagtctgatcacatggaagcagagagtggaaagatagataccagagactgggaagggtgagtcactgaagggggaggatgaagagaagtgggttacagggtacaaatgtacagttagatagaagaaacacatctgatgtttg

SEQ ID NO: 68423 - DNA, 553 bp, Homo sapiens
gtcttggtacacgtggttcggcccagctccacgtccaagaagtagttcaccccagctacgatctacacatgtgaaagagcaggaggcagggacagcacgttctgtcagtttcttacacacacaggcacttcactgtgaccgggtcactgggcttgcctggggcttcaagcctaccttcatgagctgcccacattgtcacctgcaaggcacacaagccacctcctcctgccagctggcagggatgccatgccccaggcctccccggtaacttgtttctctatgccaatgccaaggattaactgaattccgctacctatgacccagggggcagggacactggatctattctaggaaggttctcatgtgatgatgaaatttcggcaaacttccagttcctggcattcagtccacagagcatctcattcctgccatttaacccagaggtatttttcctcatttctcactaggagatgagatgctcacatacattgatgttttaggccaataaacattgcttcccacgtgcttccattccaggtgtgattttcaaggc

SEQ ID NO: 68424 - DNA, 1689 bp, Homo sapiens
tgccaggctcacgtgtggcccctgcggagagtattctgggaggaggatgagccgcatggcctagatctcatcttgagcagcatcaagcccacccagagtcagcatagtctccatccacacctgctagaccctgggaaatggcacggtcgtggcacagacccagctgctgctgcaggttaaaagaggccgaggggacaggacagggctgaactcatgcactcatggcccaggagcgtcctagggcacgaaggccgtcaacagacagggaaagctgaatgagtctgagcattagatcatgaatgtgtcagtgctgattttcaaaatggaatagtgattatgtgcgatattgcccttgtttttaggaaaaacacactgaagtgtttactttcaaaagattcaggcaaaaaatgcatatacagtacatatacacacacccatattcacattcggaaagtgagctggggggaacaaacagggcaaaatgttaacatctgtgctaacatctgagggatctgggtgaaagatctacagggatgccctgtgctattttgcagctgctctgtaagtctgaaattacgggagaataaaaagttaaaagaaacaaaagtgcttaaaaattatttggtggaagaacaaggaggcagccagatgaggggctctgtttttccttctcctgcgtattcagcagcgcacccggagcccagcgtcccaggaggtcgggacagagctgtgtgggacgtcctgtgcctgcccccgcgctgcggcgcagctcgagctggctcctggaagctgatcttaggcgccgggcgcggacctgacgtgtccgtgcggttccaggccaggccagactcagggcattcccggacacgcccgccaagggctcgggggtgacagcgaagaccgggaacagggtccgggtgagaagcccaggcgccggagaggagcagcacggggtccgggagcagcgcggggggaggctgggacggcggggccggggcttcggaccctgcggggggcggcacgcacctgcttgcgggcgcgcaccacctgcagcgcgcggctgtggtacatgtcgttgctggctttgttgtactcgccgacggcaaagtccagtgcacgccgcacaccctcctcctccacgctggcgtccatggggcctcccactaggcgcggcggcttgccgggactggagccggccgcggggctcacggccagggccacggccaggatggccagcaggagcagcggggcgcgcaggggcccggccatggtcggctaggacgcgggacgcggggagtggggcgcaggcgagaggctggagctagatagagaggacccgctgcgataccgaggcgaggccgtgagccccgcgaggccggcgactgcggttttatcccttccggccttcgccgccccaccccaccgcggcctgcactcccttttccggaacgcctcgtccctcccacctcccttctccctccccgcctcccctgcctctccccgcctcccctgcctctccccgcctccaggtccctccctatcagtctcctcccatcccagcctcccctgcccctccaggcttccctgtccttccccatccatccccttccctcccctcccagcccctcccggcctctcctctcccttcccgcctcccctctccctcccctcctcccctggccccccagt

SEQ ID NO: 68425 - DNA, 867 bp, Homo sapiens
ctggggcctagtcaacatgacctgcctctgccaatcaggcacctgccctcagcttacaagacacctgtgatatgaggtggccatggctgctgggaacccattctgtgatgatggtggtcctgggcagctggccctgggttctgtggggatccgcagcagagtttctaaggaaagcacccagtgttcagtgtcagaggtgcatcttcagccagcagctgaaacagaggtacttctaccaggccagtttttgggctgctgatggctgcactgcttcctagcctggctcccctgtctccttcaagattcagtgagctttccagaacacatttttgtttgtttgtttacattccccagtcattagctattgcatacaactatgaagccaggataaaaccacagagcatctcagtgagagcccaggtcccatctgtgctggtgccagccctgaagctggactcagattgggccatcacaggcatggggattttcctgtaatgcgatccctttgaactttgcatatttattttgccttgagtgactgttggcttgcaaccaatgccaaaaatcgagtcatgtcatgattgctgaacctttgcttacactctgaggcacagaatccagccccatgactcagcaaggtggacaggtgtcaggtccaagtatctttgcatccatggtcatgacctgaggaacactgtctgcaccataatcttactcttttctatctgcactccgatggccccatttgaaccagtttgtttcttatggcatcttattaaaactcaaaagcagcagtacaaaaaaaatgagaaaactttgaaatgtctttttcaaaaatccaagattgtccagtgttcttattattca

SEQ ID NO: 68426 - DNA, 3410 bp, Homo sapiens
tccagtctctcggggtcatgtaaaggacctggagaatatggcattatcacattactaaatatctttgtattattaaaacatcatttatcacaaaaaaaatttcaaaggtaaagcagggttagggactaaagtcccaagacaacaaagatgctatctcctgcaggaatttcaatgatcaggtgctttatagctgtaagtgtgttttgtttattgtaaaacaaaattctgaaactaatttatcaatgctaaaacaaataaacaaactcaaaagcttccttctttgtccttaaattcgtgtgctcagtagctctttggagtgttctgtcatctttgttggtggtggtgagatgtgctgcaagtgaacttggaaggttaaaaacaaaaatgacaataaaatctcaaaggcaaacaaaagaacgcaggtctccttttttcctactttcagctttagttcctggttctaatcaagttagagccaatcccagtcaagtcttagcaaatcctcttatctaattcatgaatctcattatacctaattcatgttgtaacaactcctgcactgggaaaaaaaatgtctgaattaacaaaaatagaaggaccatctgtgactgtgtgagcccaccatcagcgccacagtcccgtgtgactggtttttgtaggacgtgtctttatctgtgtgtgcagaaatcataagccatattataccaacaaaagaaagcaaaccactgatgtgactgtcgttaggtgaaaatgttgctcaatgcaaggctacccttggactcctactggggcacacatctcagactaagggtattttggcggtagccatgccaggccagcagagggcagctcctcaacttccccttccagtcaccgagtcctcagcagtcttgctctacacatccccttcgtggtccccttcttccattcccaccgccatcccagttcaggcctttatcagtgatcacctggacttcagcaagggcctcctccccagcccatcctgcccatggccacacaggctgcgttcaaagtgagcttcctaataggcattctggactatgctgcttgtcagattcgtctttcagtggctttagctgccttcgatatgtgctttaaacttgttatctgagcaaataaaagtacttcaacctcatgactttcctcatccccactagcacccaaaaactcctatgaccctgaaataagagccatcctaaatgcctctctctctctcctctctccccaacttctttcttgtgataaccttttcacctaacatgacattaccaaaaatgttatttcagtatgactaatgaatgactaaattcattcatgaattcctcaggaaaaaacctttccctggcctccttgaagtctgccctctgtgccttttctatgcattttcatgatgactgttattatataaatatccttctgtcacatcaattctcagactctttaatcatctcttttccaatctaggctgacagattcttcagcatagggagagatggtgtccaaagctctttctacaaactttaccactcaatctggaacataagtatgctgaaatgtgtctgttaaaatgaatgaatggattctctgaaagtactttattatttcagtagaagtttagaaagatgttttctgctctgttagaatgagattatagtacaggaaggggggtaaagacagatggaaacttcaatattaagacatttctgtgcatacaatttttgagatgcattattccaattaatgattaaaaaaagaaatagaataagagccaaattcttcttctgcttttagccaaatatccaaagttctctatgttagatgacctcaagtttactgtgatctgttctcagcatttgcagaagctgggagttttgcttcattttgttacagatgaggtggcaggaacagctgagtcggagtctgcttttcacggattgctgtcacaaaacatccaaaatgtccttatctcaatgcctgggagtgtagggcctgatccccagcctaaactcctttctaagtgggtagaagccagcataatgaaggagagccagatttcctgaaaaccttttatgcagtaaaaggtaataaagccccccaatacttggggctgaaactcacaattatttattatttctcacagtctccagggctgacagcctgggcagttcttctgttggtatcccctggctcctacatgtgctgtagccactggtgttgaccaggctggagggcccaagttggccccatggccatgctggcaggtggtatggctgttggtcggggtacctccgtgtgcccaagtagcctctcatcttccaggacgctgatccaggactctccacaacactgtggtctcagtgttgcaagggagtgaaggtgggggctgtaacctatactggggctcaggagcctgcccagttcattgtcccccactgtccattcatcaaaggcagccacgggaatgcccaggttcaggggttgggaaagagacttcttctctcaacaggaggcatggcattgtaaaggccctggagctcatggggggtcctgaaccagacgatctgccacagcacagaccgcatcagtacaagtaacttgtattgatctagactagtgctagcttgagactgagacaaaattagagagattcacagtaacatcaacagttgccataaaggcaacaggcttggaacaaagcagtggataaagagaaaagcccttgcctttgctctgtagcagggactgtcctgagacatgtatgtgtagatgtgctcatgggcactggtgaggggagactcgatttcatcctgagcctgatcctgaaacatggtcagcccacagtgccccagggaaaagactgaccggagacagaactgtgatggaaagttcagtgctggaatcagtgaggccagggcagggctgtgaggcagtgggatgaagaggggcaaagataccacctgcagctgccatgaaagggagcatttctctacatccatgaatggagtcgttgaaggagcccaggctgcccgtatcctctatggccaccacttgtgggttccagctcctctgagctctcagtctgtaaaacgccatatgcagagaacaagtgcatctgtgtgtgtaaggcatcacagacaaaaaagtgaaatcttctagatttttagaagcactgggaaaccagtggtccttagtccaaaatcatctggttctgatgcttttggagtaagaagtctccctgggtatagagtgtgctgctggggtgtggcatgaggaccactgcctttgaatgactggtgatctcacgatgctttaacggggtggggaggtgcagcttgcagaaagtggccctctcaggatggactggaataatggggaaaagactatgatat

SEQ ID NO: 68427 - DNA, 1915 bp, Homo sapiens
acttgggaggctgaggtgggaggatctcttaagcccatgagtttaaggccagcttgggcaatgtagtaagacttcccccatctctaaaaataaaaatgaaaacaactaagtacacaatcataaggcagtttcagcatcatcaatacaagtttattacactttattgatcatgatgaatataggcagattctctgcccagcttccctcttcagtgtgcacttgcagctcctgagcagtatttcacacctcagcaattatcttattatcattacagcctcacatccttcctgccccgattagtcccacaggcctgttctttacctgctcaattatccagctcttagctctgctcagacatattttcagtgtctttttatctccaccttccagattttctgctcttctggggccatcctttttattttttctaaaaaagttagtatctgttatttataacccaccctcctgacaatttcaggatgttttttctttgcaatgatgaaagcttagattaggattttgaggagcatcattttttacccttcttaaaaactatctctgggaacatttttctctgaatgagtttgctcttcaagcatctaagtcaggcctcagtgtccattaacttgttttctacaaagaagattgccttttataaatcactaattatattacttgtcatgtcattgctatttatgtttcttgtttttgtttttgttcttgattttgggcagtcctcttctgctgaagtgtataaagcattattttaccttgagagtcaggtgcatgacaggtgacaattagacattctttatcccctactgaggcgggtgaggagggtcatcccactgcactgactcgcattgaactcatttccttgggaacttcagggcaagactagacagtgttttccaaaggtgagatggggaaagcatgagagaaggaggttaggaatggaagtggtatctgtgtggatggggacacttggctgccagcaacttgtataacacagggttatggaattctgcctcacccagtgatgcagtgactttgtaattttggcccacagagcttgatcatggagtcttggagttagacaggaaattggaactcctgccaagccctggatttttgcagcctctctagaactatctgccaggaggctggccaatcagctcttgtttgagccctttcaggtggccttggacctttgatgtgttggaaacagagtgtgtcagaacaggccaacagcaaggacatggtattgattgatattcagaaaagcagggaacccccattgcccaatacaagggaaaagaggtgaggagggaaagactgggggtgaggcttcaggtcgggggctggaggttgaagaagttaatgcatgggtgtcttgactccatagcgaattcagagtcagagttgaccactaagaattaattgagcctagttagtaggaggctagagggataaaaataaatatttaaaaataaaagagaaatctgcataagaaaagacagaaaaattaacagatagctttagagacccagctgaagttgggggtgattttgtggctctaatttgtacagttatggggttttctccaaaattagtgaccataacccagggtaggaattttttaggggcagaaggaaaatagtacaaagggaatcaaaagtgcttatgatttattaatttaaatgattgacaattcagtatagtctaggtaagaaaagaagaaaagtcctggagcatttgaagatggaaaacccaagatagcaagtaaccaggtacctcaacgagatcacaaaaaaattgtacaagaatgtgagaaagaaaaagccaggaagatagatgcttcttcaaagggcagtacattgggtttgtgatatcttaagtggagccatgctgagtg

SEQ ID NO: 68428 - DNA, 1704 bp, Homo sapiens
tcagaacacctgcacctgagctctacatggttgggcttcctcacagcatggcagctgggttcccagggtggggagagaaagagaggaagacatacaccttttatgaactggcctcacaagccatgcagcatcatttccacagaattctattggtcaaagcagccacaacgtcccaccgagttttgagggagggaacataggccccacatcttgatggggagtagcaaggtttcgaaagagcgagtggacccagaaattttgctgtgtcacttttagaaaataaaatctaccacaggtagttaacacatgatgaagtaaaccttgatcaatggggagcaaaagcaatggaaaatctttttccttgccttctcctggaaggctgtcctgagaaagagatttggcagcatccacccacagtagtagttaccccctgcatgatgagtcatggccaatacttctgacactccattctaaggtcatacttccagataaactattcacacataaggctttgtcccagacattgcttttggggaatcataagctcaggcagttagtaccgggtgtgtccctggtgagcagtcttgggattagtttttaaggctgggtaagtcaccacccaggcatcactaaggatcctgctcatagttattggctgtgataacattggcacaggcagcatcatttagtaaggctgtggctgattgacatgaggtacagattgaaggttcagagcaatgggtttgcttgttaggagggtgggtaagcagtgtggggtagtggtaaaggtaaaatttgggtagtcagttggctttttgaaactgaattaggagccttggaagaggtaggctcagataccccaactgtcaactccaggcatgtctgaaggactgaaggctcatcccctgaagctgcaaggtacacacccccatatttttcctgggttaaaggtcgggaccctcatagagatgaataggaactggaaacacagaataaaaacttgatgtgaatgagcctggaaatctgacctctagagctccctgaatccttcatgctggtagatgaagtccacagctctgacggaagggaacagcctctccttgtgtggcagtggagaggggaggacttgtcaatatgcagtactcatccatggactggaactgaacttcagtcagggacgctggagttagtcctggccctgtgttgggacagctcattgaatctcaggcaccaggacatgcatgggtgaggcggaggtgttgaaactgcgctggcatggaagcgaggaaggctttagactcctagggaagcccagagagcactccctccactgagcagcaggggagcccgagagcagacactggcgtggcactggctgtcctcggaagctggggtcaatggagagagacgctgctgagggccagtggaagggtttgtgtagtagccaaggccagaagcgagtagggaatgatttatcataatgggcagcgaagccagaaagacaaccaggtatgctgatcagcaaagatctgtggcgacagctcacaggggatagaacggaaattaactcactgtttcctcactgatcagttcacagacccagagtccagcatggccaagggaaggacagatcccttaaggcaggatctgcaaagcctccccagcgtaggtggtggctacccctgcagtccatccgcactgtgc

SEQ ID NO: 68429 - DNA, 639 bp, Homo sapiens
ctacaatctcttcgagatcaaagcagtgacaatacttcctaactcattctatgagaccagcattacattaataccaaaagacattacaagaaaagagagctacagaccaacatcgcataaccatagaagcaaaaccttgataaactattagtaaatttaatccaacaatgtttaaaaagaattctacagcgtaagtaagtgagatttatctcaatatcaaagtttgtttcaacatttaaaaatcaatgaatgtaatccatcacatcaacaagttaaacaagaaaaaatcccatgattacatcattagagaaaaaacacgacaaagtccaacatccattcatgataaaaactctcattaaactaggaatagatgacaactccatcaattgaataaagaatatctacataagacctacaactaacatcacacttaatgctgataaactagaaactttcccactaagatcaggagcttctggaactagtaagtgattctatcaaggttgcaggacacaaggttaggatatacaaccactttcccatataccactaatgaaccagtggaatttgaaattgaaagcacactttcactcagaaaatgaaacatttagggataaatctgtcaaaatatgtacaagg

SEQ ID NO: 68430 - DNA, 460 bp, Homo sapiens
ttctcctccagtcttgtctggattttagctggagttttttgtctgttaaggtagagtagtgtttcactgaccatttcattgtccagtgtctttcttcttatctcacgtctcaaagatcactcaagcctgtgtgcctccacgtgagcagctcagacatcccctgggcaaccagccaccctgggagcactgtcctggcatgtgcagctgccggctctgcaggccctcttccctcattccatcacgttcccattggaaaccccccgttgtcagagaaagcagaagcagatgtgagccaggcagctctcctgtgctttgttaagtagcttccagcaatatgagccaagggccaagcgacctgggcggccacattggccttttccttcttttctttgttttttttgtttgtttgtttgttcggtttggtttggtttttaatagagacagggtttcaccatgttgg

SEQ ID NO: 68431 - DNA, 915 bp, Homo sapiens
tttcttataaagggttctgaccacagccggaaggtagtcttcctgcaggctgggaagcacagcttctggcaaagaccaaagtcaagcacttttaagaaaaataggtggggggaggagctttatgccaaatgagttggctaaacatgcatattcaacaggttacagaaggagctgtgaatattcataacaaggatcctgatgcacacatatagaacatgtatgtcacatatgatccatgttcgccttggggtggagacttaacatttaaatgcatgactgttaggccctatatatcaaaaggtcttttcaggacacaaaggcgctcaagtgtgaagcctctgtaaaccatccagaaccagtccacagttggtggtctcttctctggagaaagttaccgaaatcagcctgttgttcaatcaaagctgtagtcacagtttgtgaaacctggggtcaatgtccagtggagctgcaattgtttcaacattgcttatcccaaagccaatgcttgttcagctgctagagaaaaagaaaaacctcatgacagaacatggtttattcttacagtgtaggggtgagtgatttaacccttgactctcatggccttaggccctgtttatacttcagcaatttattgccacacagagtcagtcccttcagtcttatgatctctattttaacattcgtgctggtcagttgtttctaaaccacaagagggaggggagaaatgaagggtgtctgacctcctgccctgtcatggctgggaactcagtttttatgtttttttctgggatcctttggccaagagagggtctgttcagttggtgagaagtctaggactttatttttagtttacacaacaaagggtgattggagacccaagtgagacagtgtttgggaaactacaaaaaggggtaa

SEQ ID NO: 68432 - DNA, 861 bp, Homo sapiens
caggggcttcccaacctcccggccacacctagaacactcctgaaagagggaggaggtgggcaatgccagcccccgctgtgcccacccattttcctactaaaggcaggtgggaagggtctgcctggtgccaccacagcgatccctgcccatgttttctctcctcaggttggcttagtgccagctctgccactgggcctatgctctgaggacaggaacgtaccctgcccagggcatgcccagcagctgtcagaaactgcagctccctgctgccttgggcagaggccctggcaactcccctggcctggcagcttcacatctgcaccccattgcacactggtcctcgggcacccggacaggactttgccccatgcacacagccagtagatgctcagaaacacggggctgcagcagaaaagcagggtgatcgcaggatcaccagacaaggagatggaggaaactcaaatccatctccccgaggaggctggggcccgggtttttaagggttctggagctcgatagctggaaggggcagcgtgatgtcacagcacagggagaggaagaagctgtattttcgtgatgatcctgttcctccgtggggggtttccaaactggttgctggaattgggatctgaaaaacatcttgggccagcagcagcctgattcaagcttaattatgagtatctttctgtccagaacctggcatgcaattcttgtcaaccttaggggacagtttcatttgccttcctgtgaccatgtgtcctggggcctgctcagcacctggtatcatcaggccctgcccgcccctgcctcacctccagcttctacgtctggaagctccctacctgtctcaggcatggccca

SEQ ID NO: 68433 - DNA, 2272 bp, Homo sapiens
ggctaattgttttactttctgtagagaaaacatcttgctacattgtccaggctggtcttgaacttctggcctcaagcagtcttcccaccttagccttccaaagtgcaccctgagatgagcaggcatgagcaaccatgtctagccccactcatctgctgaacatttgtgtgggagggggaaatgggagtgattacttaatcagtacaaggtaaacaccttgcttttatggggtgatgaaacagttttgaaagcagagagagttggtggttgcccaacattgtgaatacactaaatatcactgaactgtgcactttaaagtggttaattgtatgttatgcgaatttcacctcaactaaaaaaaaaagttgacagtgacaagaatgttctaaacttggattgcggtaattactgcaaaactggccattatactaaaaatcactgatttgaacattttaagtaggttaattttatggtatgtgaattacatctcaataaagatgttaaaaaaaaacaaaaacaaaacaaagtcagtgactccaccatgcaaactgccactccaatggctaggacacccttcaacccaagtgattttctttaagtgacctaaagtcttccaacacaatagaaatgaagtacttgtacaataaagcagggctggttacaagtaaatgacagaaacgcttctgacagtgtgaaccccaaagagagacaaagcatatggaaaggtggatggtgaagatgtgtggctgccagccctgagagctgccctcactgcactctggtactgagtccaacagggactgcctgccttaaaggaagctgatgccatcacccaccccactcccaggagagaagagtccctctagggaaggtacattgtgttttcacctcatgaccttcattataaacagtaacaatcttgccaaaacgctactttttccttgcctaacatcattctacctaaggcagattttcctcatctgtcttgactccaacattgtgacctctactttaccacactgcagcttatatttttaaaatcttgatgtggtaatctgattcagagctggtggcaccccatttaaatacctggttgccccttcacacaatagttagaggctcaattatgtcccaaacaaaaagtccagccaggactgaaagccacggggcttacagccagaaaggaggccaaaagtccattgacaaagatttgtgtcccaatgctgcgggatctaccataccagtaacactctcctaaagctggagaagaatttagaggccactcagtctactgttcccaaaggcagccaactcctggatgggctacatcaagatgacctgggccagagattctgctttggtaggtacagggtgggcctgcgaactctttcatcggttgttcctcatgtgcagctggacaccactaactctatgcagctcccttcccagtcagacttcaccaacacctcctcaacctcacctgatcagcatccagcctccactggaaagttctgtggtcacgtattagaaatactagcttaaatttaaacaaaactccttgagctgcactgtccaatagaactttctgcaacgatggaaatacaatagctactagccatgtgtggttcctgagcacttgaaatggagttagcttgttatataaatgaggtaagcacagctcctggacccctgctctgggtgccacacttattttagcccaaggtccattaacttttcggcaggccctcatcagtgttgcttcctgtaaactcacagttaaccacaattcttctgtcttttctcggtgtctgcctccctcttactctttttttaacttaaataaagaacactgtatcgatccctatccattttcactgacaaagcattgcaggttcccaacctgtgctgacacatccaggaacgctggcaacttagttcccaggcgcagtttgagaaatcagtttgtttgccccaatctctcggaagagcctggagggatgcccatctccatgaggacatctgcaccctgaaattgcctacactctctgaaggcaagagcacaaccacagtgatgcaacaggatttgacaactgctgttggctgggccatgatttacacaatcttctgtagattcaccagccaatttggcagattttgaagggtatcctctaactctgcacacaggacattagggccttgggtcctgaactgaagtcccaacaagcagactccaagagatcaaaattcacctgtgattgttgtggaaaacctg

SEQ ID NO: 68434 - DNA, 2299 bp, Homo sapiens
gaacaaatatttccagtatttctatcaaatataagtcaatcagtcccacaacttcaagcttggtctatggggcctcttgattctccctgaaacttaaaagttatgaaattcaggacacagaattgaaaagtgaattttaagtatcttatattgaaatctatgcttacgaatcatgattcagtttttagctaacaaaacacagcattcttatattctgaaagatgggagaggaggcaaagggcaaaacctgatatttcttaggtgtcaacaactacagtttcctatgtttctccatccctatcaggaaaaactgccaggctgaattctcacaaaaattgcctacaatgtcactactgttctccactctttccaagaaccgcggtgaggactggtcacgcagcgtgaggggggcaggtgcagaagagcaagtgtagaagccatctcttcgccggataacgaggcaggaccccagcatctcgtgggacctcctcccttcgggaaattgcgagcggggaaccaggaacacgcagggccccggccaagtagctgtgctcagggggatcatttaagccaaaggaaggacagcgcgaggggagcgagggaaaggcgaggaagcaaccgctatgcagggtggggcaggagtgagggagggaaggcaaaggagcggcgcgaggcggtctcgggtccggagagccgaggacaacgcggcgactgggcgcagggtgcacccgaacctgaaagacctggcaggtacatccgccttgtcggagcctgcttcctcggaaaaatgagtttttcttggggatgaaacgagaggactctgacaacgcgctcggcaccgcatccccaggttactgttactgccgtcgccgctgtccaagagggtcgccctccactcctagcggcccggctccagcgcccagtctgggagtccgccctacctgccgtccttagcctccggggcctggccatcatcgtctgtgacgacctgcggccgcaggggccggcgctgtcgcagcccgtccgcctcgctcatggtacgggcgccagcctcacccgcagaaaccacctcacactgagcggcgccggctcagactccaggcccgccctcccccgtacgcggaaatgacgttgcgcccagggaccattccgcagcgttctccccgccccttccggcctcatgggcgggaggtccccggcgcgtcgttgctcggcgctctgaggctaattctgaccgcccggaagtggggctcggaacccgctcagagatagcaccgggagctgccggggtccccgcctgtctcggactccggggcccagaacgcgagtggttcaacctcgggctcgtctagcccagtgcctgcgcatgccgccttcgtctcacgtttctgaggacggggatgctcatgacgcacttgggaattgctagcacgagatgttggccacttttatcgttggagaggatagcgctgtttattcagtgtcagcgaccctgctcttacaggcagcgtcaaaaataatgcattcacacccttggaacgaagtcacctctgcctgaaaattacatccttccccgactcagccggttaaggggaaaacttgggctagaaaatgtttccctctggttaaggccagatgttgagtattaaatctttttgtgacgattacaacagacatttgataaagtttattaagttttgataaagtttattaagttttgataaagtttattaaggattacccttaagtaaagtccaggtagaagtagaaattatcactaacaaagtttaagaaagcatagagaggcattgttctttcaacagtattgcaggaaaccagaaatgttcccaggtgctgggagacgatggtgggcaaatcacagacaaggcccctccttatagaaattaaactagtgggaaagatgactttaatcagatcatcatcataaaatagacgtaaaattatcaaacgtaataattgcttcaaaagggaagagctgaatcttgtgagagcatttgagattcaaagaggaatcgaatctggaggaagtgacaggcagaagaaatcaaagcccgttaccagtggcacgaggaattatctctggaaaagccatgttcaaaatgcagtgttaagaaataatttcctcttggaggcttttacctttttaaatgctagatggcactagaattccatgtgaatgctttttatttattcattcaaagagcggaagaaccagcttgagggaagtggagagctgtgcaaatccagttctccagagatcccaggtaataattcaggc

SEQ ID NO: 68435 - DNA, 472 bp, Homo sapiens
gcaaagaagtcataatgtcaagtagaaaagccagaactgtacccccaaaagagcaggtacctctgcagacctggccctggcacaggatatctgggagcaggttggatagccagtctgtttgctctgcaaaaatttctttgtggaatagcagaggggtgttgcagcgatgccaaataaacatagaacaggatcctagaagctggagaaggaggaacccttggccagaagccctggagcagctctgtttgttaattatttctgtagtaaccaagggaacattggtgagcaccccacagagtaaccacaggtcagcatcaaagtaagcaagtagctggctggcagtatttcacagcatctttgcttttcttcccaaatctgcagtttgagagaggcggcttgccctgggaactctgctggtagggcatcatgcagcatggtccagaatccctttcttttttgtcacaacctctgt

SEQ ID NO: 68436 - DNA, 750 bp, Homo sapiens
acacctgagaaactgtcctcgtctccgtcctctctgaccctcctgatcacatctggacatgtcaccgggcaggggtccctaccagctctctcccacatcccagccttaccagcatagcctttccatggcaactgaaaatgctgtttgtaaagcactgaaacaaattctcaatcttgcaatgcgtcaatttaaagagagcatttaagtaaataatggaataacggcacatagaagtgcagggaggaaggtgacatctgggacacactgtgacacagggtggcctcccagcgggagggcaagcctgaccccaagccactgggcagggcaggagaagccagtctgcccagcagtgccctggcatggggtcagtgtgtgtccaggtcacgccaggccaggcagtgtgcctggatggacctggcattgcaacacctaggtgctcccgccccttcccagacccagccaccaagaagctggcagactcgaaacaaagcgtggccttggtaaaggccattctagtccctcattctgcattcccccagcatgtcgctgtgcagtgggaaccacaggtcagattcgtccaaagagtcccagcgcagcacacagcctgcacactccagagcacactctggcacacacgcgtggcggctgcagagctggcttgagtgctatgaccaagcccgtgaggatacatgaggctggacattttctcataaactctctgtaatggggctggacggtgtccccaccaga

SEQ ID NO: 68437 - DNA, 870 bp, Homo sapiens
tgtggaatggcgttttccttcatcattcagtgtttggctcctcattcagggccacctgcccagggcatgcctccccaggcacaggcaggtcaaatcccacatccttagtttttcttttctcctctaaccagagcccaggatgcagtcagcttctaagaaagccttgtaggactaaagtaccaggccagactccagagaagctctgtcctcattcctgttaacgcctggttttcccttcgacctcagcacttggcctttggcccaagtcttgtctctggaaaggaagttctttcccttccagacacaaagcccagctcacatgactgcgggaaccaggtgtcaatgcctgaagaactctggaagctcctgcaggctggcagcccaggacaagagcacactgggggactggagtcctggaagccagccccgagaacagctggtgccctggcagaacattcgcccctggctggacagacttgtttacctcctgggagaaagccacagaagtgagtcctttcccttgtggaatttggaaaggggtgtaggttttaacattctgtaaacattcactttcccctgtggttaaaaaaaaaaccacaggagatttttcaggtcccactccaagtttgcacaccccacatgccctctgttccgtctctctgaatggctctaccagagcccattcggctgccacagacacagcacaacacagggcagccaacttcacacagaacgctccagagcctggacgcaggttgggggtccttctatttatcaggctttcctgggagtccacacaacattccagattaacacctggaggagagtaagccctggaggggaagttcacagacacagccacacaggtgg

SEQ ID NO: 68438 - DNA, 780 bp, Homo sapiens
gggggtcctcctctccaagccctgcagccagccagcacgaggtccaacctcgctgcccagttacaatgctgaaaacagctctagaatccagtgagtactcaataaatagcagctacatcattatcacggctattcttacttgctagtgcgttcgggctgtcatctccctgtgcctactttacagtcatctccattgtgataattaccctgggtgtacagatgggaaagtcacacccggggagattagggagctgcacaaggtcacaggccagcagcaggatggtactgaactagaactagaacgggcctctttctgctgaccctgcaccccagaggacctggggaagcagggattgcaaatcctccacttgcagggtaaaggccatgggcacccgtcccagggctgcatctgcctgtgctgacccagcgtcacctgtgcctaaggtcacggtggggaccagagtcgggaggtttcccttgccaggtcacctgggattgtaacacacagacttcctcacaccctgcaagcttcctgcatcggcaccagcgtcccaacctctaccagccccacggggtttctttaaagggcccaggctgctagtctggacattgatcttccagctgaggaggcctgcaaccatcctaggcacctcgagtgctgtggcacgaggcccatgggcagaaaagcactgtgttcagtggcagtgatgtgtctgtcaggaggacaaccagtgccaatgtctaggggctttcctcagagaaaggaagaagaaaacctca

SEQ ID NO: 68439 - DNA, 702 bp, Homo sapiens
agatagctaaatctccaaacaagctggcatgataagggagctccttccactttcacctttacaacaaaagtagctttgaaataaccagtccactttttgttctccatgtctgcatccttcagccccttctgtctataaaaccatcctcctctgttcagctcatcaaacattccttctgttttatggaatggggtgtttcccaattctataatcacgaataaagtgaagtaaggtctttaaactaaatttgtcctaattttgccctttgacatgagtcatccccatcgggccctgtccaaagtcctgactcacagactctgcgaggaatataaaattgttgttatcttgtgtcactaaacttaggggtggtttgatgtacatcaatagtaactaggacagaattcagttacatacggcccttgttttacagatgaggaaacatgcaaagtacagtacagggaaagcaagaaatcaacccgagtcatgattctaaagacacctggagccacgaaactgtgttgcgccatccacagcccatcatttgcttgctgtttgtttaatagggccaaggccaggacactaatcccaattctgttttagaagtgccttcatctgccctggtttgaggcgtacaggccagtggttctcaagcccgagtgtcctctggagcatctgaagggctcgttataaacacaggtgtca

SEQ ID NO: 68440 - DNA, 2377 bp, Homo sapiens
cccaggaggtccgccccactgtcttatctgagtggggctgcaagtgtgcacaggccaactgtgaatgttccccatgaccttggcctcacaagtccagagcaggtcactttccacctctgtccttgggcaagctgctctagtctccttcaagggcacattgccccaactctgcaaaccaaagggtttggtttttttcccactagttcaagggcacttgctgctgactcaatgttaaagaaaacacttatctagtaagtgactcattttaattaaaccagcaaagtaatatacaatttcggggagtgggggaggtccaaagttccttccaatttctttgaaaaataactgcaagacactatctataattgtatgactatttctgaagttatctaaaatcgctactgcttatgggtcaccagtaagcgctgggtctgctgcacaccttgcagcactcagcctaacctctgagcatgactgcccccatcctcacaatgaggagactgagggctgggggggcagaacaacaaggacaactgagggaggagttggagaaaatggggccctggtgaccctgccataaagacccgcaggtcctttcttaaacactcccaaatccagcaagctggttatgaccacccttctggtctgcatccctctgatcaacaccgtgtctgccagcccctccccgcaggccccacacccaggcccaccctgcatccggagcccacctcgcacttggcacccaccctgcgtggccagccctgcctgcagttcagggcctccccctcggtgcccagtcagcgccttaggtgggggcgagggtgctgtgtacgacccccagccccaaatcttagcagagcagcagggcctctgctcagcaagttccaaacaactgaccaccagtcaactgtttggggccgacgtcagaccccgcgggtccaaagcaggccccaggtcgctggggtgcagttctctgaggccgagaacgagaacggggaggccgccgttacttccttcccgtccacaggccccaggccccaggcccgcagcgaagaaataactggttccagctgccacgccgagtttcctcctccccaggtcgcccgccacagctctgtttgtttacgtgggcagggcttgtccccaggctgatccccgggcaccgcagcccgcagtgacaaccgccaccgctttgtttttccctccaccccggtatgggaacgggaaagtcccgactccggggcgctcgggtgtagcccgcggctccccgccggctcttgctcagcggcgctatgcacccggtaacgcaactctggagtccgccgagcgaggagccgcgccgagcaaggccagcagcggggcgtcccaagcggccgccgggtccccgcgggcgccggcccgagctgggcacgtggatctggggcccgatgggatgagggacggggtgacgtggagccactgcttagagcgggcggggcggacggaataccggaggaggggcccctgcagggctgcgatccgcgctgcccggggacggctgccgctggcgagaggctccgagtcccctcgggacccaagagttgggggcgtcctgggtctcccgaagcccactcaccagagacatttaactggcctcccaggaaccagccgatcttgccagtgctgaagtcgcagtcccagacggtgtggtagggggtgtcccacacgagagtgtcccgcgccagaggcccccagaaggcggccggctcccgggctgcctgtgcactcagcgcgggatacgagcctggctgtgctgctgctgctgcaactgcgggagcgctgcccgagggtcccgaggccgccctgcgcggcgcgctcaccccgcacggcggccgcgcgggctgccccgagagccctcgcaggctgcccagcagcctcccgacgccgcggcccagggtgcgcgccgccatctaggcaggctacctgagctctctgtgctcccagagtgggtgcctcacgcccggggcgccccgtggagtctccgcgggccccgcccctgctccgcccttccgccaccatccattcctccagggccccctcccggagcccgcccgggtcccaccccttcttctgctgcccgggagagggggggccgcttaggaagaggggagcagcgtggggaaggggtgcaggggagcgcggggcggagcagggtcccaggccctggcccaggcgctgcgctccggtgagtctgcggtcccacccggatgttcctcgagtcggcctgttttggtttcagtttgcacgctctcctgcaagccccgacagcttcttcgagctgccagaggcacgtgcggcccaggaccccaggacgcaggctcagggcctggggcgaggg

SEQ ID NO: 68441 - DNA, 1069 bp, Homo sapiens
ccacacccaggcagaggcaccggcagcagcagggtttccactgtgcctgaaagaccaggggccacctgccctcatggctttgtcctgtagtttcatcgtccagcagaagcctgaaccagtccccacacacatggagggccaggggtcctgatgcctgctggtagcccaccctgtcccctgagtggtcttggagccaggtgcactgcttgagtcatcacgcagatattgctcggttgcttgttttgcagcaatcacctggtttcttgatccctccatgataagaggctacaagggggagagggaaaccagggaacagcctttggctagatctgagctgtcggcccctttgctctgtcctgagaaggcaaaggtcactaaaactgccatcgcatctctgcctaccgcctcaggaacttcttgggcttcccagcctctcagctcaaactcaggtgtgaaggtttatgatgcagtcacagctttgagcagagaccacaggcaggggaggaattagtctgcaaaggtgctgatcgctagggctggacatggctttcccagagaccagtttctgtgggtcccaaagagagatgaaacatggccccagccctgaaaacaccagcgaggacccaagaggatgtgtatctattgatgaggaactaatagcattagtcaaatttcttaccgggctgaatgttgagaaattgtaaagctggccaacactgccccctggctctgtaactgatgctgctttccagcctatctaagcaatctgtcaaatcttccacaggacaagccaaccagaagaactcacgcattccttaagatcatatcgccatcaaaggaagcccaggagcatttccctaataatgagccctctcagaataacctttgtctccttagtaaattaatcaacacagattgactatggccaagacagtgtgatagtcctgaactcggggaattctggatgaggatatgagaaatctgttcgccctcgcaaagatacatactccatcaagacggactgggtacaggaagtgtatagatgatagatagatagatgatagataga

SEQ ID NO: 68442 - DNA, 1530 bp, Homo sapiens
ccagagtcctgccaacttatcttcacttcctggcttccttatcatccccatggattttttatgcatcccttgtaaaaaaaaaaataaaaaggaaaaaataaaaataaaaatttaaattcagcaatgaagtaaatttccttcttattgttctctaaatcccactagaattgtccttgtcagtgcctatctctggggcctacaggagaggcaggtaggtaactcccaccttaggggtttaaagcaggtgtctgaccccgggtcacatccagcaaaggtgtttaggatgacacagtgattggcattgggcccactttcccctaggctgcggtctcgcagatgccagtaagtgccctcccccacctgtttgtgcaatttcagatgagccagtttgggtcactgcctacaatgctccctctagtgtttcagtccttgagagcaaagtcaggacatatctatgattggaacctccagtgcccaggatagggctgcttggtagctgttcaaaaactgttcgctgagcaaaaaacttcctccatctaaacctaaaatgccaccatgatcctcctaactaattaccccgtgcccggaggtactcatctgtgactcattcccacaatctgtgatccctgcctgttggtttctggcgacagcaaacagggcaacaagggtggagcatcctgagagtgctgggtctcagcagcggagactctttgagcaccaaaaatctaagggacagaaaagccactcggcaggttgttcatggcagaaccaagcccggggccagccctcctgactcagatggaggggctcactgtccccaggggtcgctgctcagcactgccctgtttcctattaccaagtgccctaaattgtatggtttctaaaaattctaacagcattcaacacttggatgctgttaatgcaatgatgtcatttcacccttaaatcccaaatacatatttagcatgcatagcccggtgagacttccacacagcctagacagtctctgtgaaaaatgaggcaaccatccagttgctgcaagctttgttattaattaaaaataataagaacggttctggacctgaatctcagtaaactgacgttgctttgctttggaaatggctgcctcggtggggacaccctgggattcccccacctcctacaacacctcgagccgtgcgatcccgggggcccttccttacccaggagccagggcgcgcaggagcccagcaggccgccctcggcggagttgagcacggagtctggcagcgggatgcagtggcgcaccatggccccgtacagcccgtactcggccatcacgctgctgccgccccagcgcttctcccgcttgcgccatttggccctgcggttttgaaaccagacctggttggaggcaggagaagcagaaggcacacagaagagacagtgaagaggggcgcctggaggagcggaggcggcgtcccagggctcggatcttctctcccgagcatgatcccatgctatttctgaaggaaatagctcccgagggcc

SEQ ID NO: 68443 - DNA, 2111 bp, Homo sapiens
ccttaggtcaggagttcgagaccagcctgaccaacagggcgaaacctcgtcactactaaaggtacaaaaattagccaggcgtggtggcgcacacctgtaatcccagctactcaggaagctgaggcaacagaatcgcttgaacccgggaggcagaggttgcagtgagctgagaccacatcactgcactccagcctgggtgagaacctgttaaaaaaaaaaataagaaaatggggtcaagaaacggtgggaggagggcagatttcatgaacctgcctgctatgatgtggctgcatttccatcatgcattgtcctaaaaaaagaaaaagaaaaaaataaaatgtagacgtggagggatgggggaaattgcacaggccggtccaggctgtgaggctgccccctaccagggacgacgagggccagctccgccgcgccgtaaggaaactggccaagggaaccccttgaatctggcgagggcccgccatgagacgctcggggaaccagactgccgagcccccctctctgggccgacgccagcccggctgtggactggagaaaaccgcaaggccacctgcagaaagaaaagaaggccatcgcgcctacgcagctgagcacccatactccgcccgcgcctgcgcaactgggtcccccgacccccacctcctctcccgcctgcgcatgcgcggctgggtgcgcccccccgcccagcctgtgacgccacgtgcatggggcggagcccaggccctagggaatcgtggggtcgtatcccgcgggtggaggccggggtggcgccggccggggcgggggagcccaaaagaccggctgccgcctgctccccggaaaagggcactcgtctccgtgggtgtggcggagcgcgcggtgcatggtaagcggcgggccggggcgctggcgggggcggccggggatcaccgactgtaggcgggcctcccccacgcgggcgcgctgcgctccggaggacggcctcggggtcactcgcaccccgggtcccacctcctgctgccttcctgtccaggctccattagggctccctggatgtctgggctccgctgaccggtggggggcaagtccagtgttttgggccacagggcgggccaaatagcaggggcctgtagccccagggggccccagccctgctgcgttcattcattcagcccgcttttgcggacccgcccccagtctgcgtcagggacagacccctccgccctggatgagcccggcggggaagcttcgcgtagcagtttctgggaaacaggtaggatcaggccgctcggacaggactgagggtgtaaggacgattcaccctggcattggggtggtgtcccgaggagctcataggtggtcagggcggttctgcccgagctgacctgtgagccgcgaatgccctggaccgagggagggagagccccctaggtggacagactagactccttcagtggaaaacattcaacagccaggagagcgtggaagaggaaggagagatgggagggcccaggggagcgtggaagggagggtgtttttattataagtgcacctgtaagtgcaaagtgcaaaggaagcagccgccgggaagtgcctgggcagctctgggtgtccctccaggcacctgtattccagccttacctgcgcgaagccacacatcccacgtcacacaggatacggggaagtcagccatagcctgcaggcggggaatctgaaacctcgcgcaggagttccttgggagaggtggattacaaggactcttcctcccacccgctgtgcaagagccatgggcggccggtagtcatttttgaaggacctggcaagcactgtacaaatctcaaaattgctttttgtccccctccccttgccttggagagagtggctggctagtgtgtgtgtcgtctgcctcctgaaggttcgggtaaaggaccagggaggtgggcagccctttgtgtcaggagatctggaagcgcctcccctcccaccgcctcctgtgtaaaggaaacagcaggtggtgttgacgggcggttcacgcaccggtttttgccaaggagagaaaaacctactgaaacccaccaggaggatgagtggaagtttctaatgtgcttcatttt

SEQ ID NO: 68444 - DNA, 542 bp, Homo sapiens
ttcagtaaaacctcgtggctggtgacttgctgttgattccagttcctgctggaaggcaggtcctgccttgcactggcccacgttgtctcagactcagccactctgccctaccctgcagccctggctacaggaggcctcctgtgacctgcaggtggctgccctgtacccatgggagggatcagctcactgaatgtggagtctctctgactcaccctgcacagcccaggaagccagattagggcggaaaaaggtattcagagtttgctgaggctagtggtggtcaggctgtgtgggaactctggagggggttgcagagtcactatcatggtgagatcatcagaatgtatggcctgtggtacggataagaacactactgttttaaataagctgacacggtgccggctctctgggccctgcagcctccggcgggtctctgtgctgacaaagctaccactgactgggcctgggtggaaggtgggtggtcaaggtggaaggccaccaataaaccacccctcagtgtatttttcaagaacttttttttt

SEQ ID NO: 68445 - DNA, 2373 bp, Homo sapiens
ggggaagccgagggacagccataacacccccgggacagtaggtctgggcggcaccactgggaactctggacttgagtgtgtttgcctcttccttgggtatgaatgtgtgagttcacccagaggcctgctctcctcacacattgtgtggtttggggttaatgatggagggagacacctcctcatagacggcaggtgcccacctttcagggagtctcccagcatgggcggatgccgggcatgagctgctgtaaactatttgtggctgtgctgcttgagtgacgtctctgtcgtgtgggtgccaagtgcttgtgtagaaactgtgttctgagcccccttttctggacaccaactgtgtcctgtgaatgtatcgctactgtgagctgttcccgcctagccagggccatgtcttaggtgcagctgtgccacgggtcagctgagccacagtcccagaaccaagctctcggtgtctcgggccaccatccgcccacctcgggctgaccccacctcctccatggacagtgtgagccccgggccgtgcatcctgctcagtgtggcgtcagtgtcggggctgagccccttgagctgcttcagtgaatgtacagtgcccggcacgagctgaacctcatgtgttccactcccaataaaaggttgacaggggcttctccttctctgggattcctctcgttgagcgacagtagcatttgcccacctggcacctgagatccctgtttactaaaccttagaaaagctgccaaagggggtggcgtatttccagtcctgtcgacatccctctcgaggacacagcagtggagggcccctgggggctggggctggtgaagggtctggctggtggccccggccctcccagcgtctgttgagcacagctcctcctgtgccaggccagcagcccacagcacggccaggtgaggcctgggcacataacctcgagtgagctgcaagtccccatgtcattctgttcagcaaggatctggttttggtctggaagcgtcccaaaggtgtcgcatgccagggaaactgcagaccagcccacatcccgagtgcttgtgcctgaagccccccccaaccaactgtcacaggaggacaggatctggccctagggcctcccagggctgcagcgaatgctgatggagccacgtggtggaggcctgcacagagcaggaaaggacaaaagacaaaaagaggaacagtttcctccctcccgcctgggctgggtccccaccagcgcctttacttccataatatccaccagcttaaatatttaaagaactccggaggctgagaatcagacgcatgaaggtaaagccaaaatcaatttggtccatttaaagaaggtcggtgacctcatgcctgaaaaaggcaaacaactggaagttttccaaaagtgcaccaaataagtcatggaatatttctgggcccggcaaagtatgcaagtcatttctctctgagtgtcttttgtgataatgaagtaggctctcatttgtcaaaaatagctacacgtgcacatcgtaaaagaagcaaactagggttgcttgaaaattctgttccctcaggatgtgtgcattgacaagctcagacaggtctcacacgccccacatgccaccccagcccgcgtaccccacatcacttagcacccattgctgcccactgagctgcctcagtcctgcagtccccgtgtttggatggcaggatcccagggcagtgagtttcagggcataagcagacgttgccacgttgccttcaatcctactggacaagcatcggtgctggcctcccccatgtcctaacagctacagccagtttaatctttgccattctggcagatttaaaaaaatgataactggtagttttaatatgcatggatctaattcatcgggtatatctaagttgtatttccgtgaaacatctgttcatatcccttgccgattttctataagattgtcatcatttttttgttaattgtagatctttatttattaaggaaattatcccattatgatagaacgtgtccaaaaatttatctttttgtgacttctaggtttcatgtcataattaggaaggcttctccacagagatagttttaaaagttaaccaaaaggtatttttatattttagtttcttaacttttgttaagaaactaaacgtgcctggccttgttttttaattaattaattactttatttatttatttttgagatagaatctccctttgtcacccaggctggagtgcagtggtgcaatctgggctcactgcagcctccacctcccaggttcaagcagttgtcctgcatcatcctcctgagtagctgggattacaggcacccgctactgtgcccggctgatttttgtatcttt

SEQ ID NO: 68446 - DNA, 1367 bp, Homo sapiens
tgcgccaccacactccagcctgggcgacagagcgagactcagaaaaaaagaattgaatttctgacccatgctgcaacatggtgaaccttggaaacattatgctaaggtgaaaaaagctagacacaaaggactctgtagtctatgattccatttatgtgaaatggcccgtccacagagacagattggtggttgccaggagctggggttgggagaaggaagagtaactgactgactggtgcgcagggcttttgaaaaagtttaacacttagattatggtgctgctcacacaactccataaatatactgtaaaccatggacttgtgcacttaaacaggcagctttctggtataaaaattacatctcagtaaagcagtttgaaaaatgaagactcgaactctagaaggcaacagtctgaaaacaataggtttcctccagaaagttccgctgaggtaaagctcattctagtctgagagcagatgaccttctcttgtcttttcaaaccttagacttcagtgttgtccttgcctcaccttagaccctgagaggagcatcagacctgctcgttcgctggtgaacccaagtccagcaggtgctgccctggtgcgggggtccctcagccacctgttgagtgacgggaggttgcctctaaaaaggagaggaattgaaatcctcacactggggatattggtcctcctccacacccccaccccggcatttcctagtgcagccagcgatcctcctgttttctcagtgggtgtgcctggcctggactccacccaagccaaacagccgaggtgaaatggttgggcagagcaaacaggcttttgccaggagccttgctttacttccccttggacaaatcacactgggcttaaagcctccactggaattcctcctgctgctgtgaggcccagagtggccacatcccctgcctgatggggtcttgagtcactagctctctctgggttttaccttgacctagtgaatgtttttctaagaatattttattattgaggtatcattttcatataatagtgaaggggtgggttgcccctccacacctgtgggtgtttctcattaggtggaacaagagacttggaaaagaaagagacacagagacaaagtagagagaaagaaaaaagggggcccaggggaccagcgttcagcatacggaagatcccaccagcctctgagttcccttagtatttattgatcattcttgggtgtttctcggagagggggatgtggcagggtcataggataatagtggagagaaggtcagcaggtaaacacgtgaacaatggtctctgcatcatgaacaaggtaaagaattaagtgctgtgctttagatatacatacacataaac

SEQ ID NO: 68447 - DNA, 3043 bp, Homo sapiens
cggtaaatatttcaggctttgcaggccatgcagtctctgttttggctgctcacctctgctgccgaagagtgacagaaacttagacaactgtaaatgaatgagagaagctgtgtcccaacttgatttatggacactgaaattcaaatttcatatcattttaacaccatgattacttggatttttttttcaatcatttaaaaatgtaaaaggtattcctagcttgagagccgtacaaaaacaggcaggggatcagatccagaggctcctgtgctcagtgccccgttttaggcaggaagagcagccagctcggggcacttctgcactaggcaggctctcaggagcggcttcgcagagaaccagggccggccacacggagctccagcatcctgcctgctccaggaggcagcttcctcaggatgagtccaggtagggacccacaccactcccaagggaaacaccgaagggccagaggagggagacagccaggctgggaagggcttgagagtgcccgattggtgtccacagctcctccctgcccagcaggcagctcccaagctccctgattacgggcttcctctgtctccctccggcctccctgacatcagtactgctccctgctcgcctggtccctttggaatccacacatcaggatgcccactggttttggcccagtgtttgccttcaccctggttacctcctcaagtctgtctttgctctgcccatgcccagcctgaggacctgccaggaaggggtctgggttgggggtgtaggattcttgtcttttttgtgaggtagtggtttgcaggaagggtgccgggctcagacctccatctggggagtggagtctgcagcctgtggaggctctgaggagggcccaggaggcaggaggacctgtgtggagtctactgcagggcccccagcaacaggaccccaagagcagtagccacaggttggaagagggatgtgcatccccacaaggaacaaaacacaatggctgggcgcggtggctcatgcctgtaatccctgcactttgggaggctgaggtgggtggatcacctgaggtcaggagtttgagaccagcctggccaacatgatgaaaccccgtctctactaaaaatacaaaaaattagccaggtgcagtggtgggtgcctgcaattccagctactcaggaagctgaggcaggagaaccgcttgaacctgggaggtggaggtcgcaatgagcctagatcatgccaaaaaaaaaaaaaatgcaaggcaagtcctgagccggtggcccccggcctcctcctgggaagactggctgctgggcagattccttgtagcttgtggagaaggcctgggtgtcgctggtaccactggccttaacgaaggacctagagccctgttgggtgtggggagggccaggaggcattagataaggtagggaggaagatggtggacggcccatgaccgtgggatgtgggaccccgcaggcccatggcccaggtccagggaggtctgtcacacccacagatgctgcccacaggtggtggttgccaagtgtgcccatagtacactgtcacacttgcatacaccagactgcaatgaagagcttctccagaccccactcctcacagcccctccagttgcatgcagcgggaggttcagccactgtccttcctaacagggtagaggtctgacgcctgagggctttggggaacaggatgtgctcttttgggctggtccctcacacagcattactcatccatgtgggagagcgaagtcgtaggtgactcatccttgtgttggtgtgaatatgccacagtgtatttatccattccagtgatgacagacgtttgcatcatttccagtttgggactgttctgaatagggctgttctgaacgttcttgtacttgccttggggtgagcataagtattcatttctgttgggtgttttctttggagtagaattgctgggtcatagggaggcatttgttcagtgaacactgccagtttttcaaagggattgtactaacctataaggagttgtgttgatgtggaaactgaaggcgctgagaagcacattagggttagtgggtgacatcagggacacccccaaactgatattgagggggtccaacttgaggtgttcaggaccatttcacaggtgtcccaaaggacaggggctccagctgacactgtcagtcctgacaagaaaggactgaaatagaatctccggcatttgctgtaggatttggatttgaggggctgtgaaaggggagaatattggaaatgccaggctgggagtctggagatggagagcagcatgctttgatgcaactgtgggccgtagtgacacaggctgaggaaggagtcagagcccaggcagtctggcatgctgggcaagtcccaccggttcagagaaggggcaagggtttgaatgccttcccctccagaactcgtgttgaatttcgattgctggtgtaatggtattgggaggtggcgcctttaagaggcgattaagccatgagagctgcacccttatggtgggtttaatgccttactgagagggctttgggagtgggttctctcttggcttttcaccttctgccatgtaagcatgcagccttcctcccctccggaggacgcaccgtgcaaaagacaccatggaagaagcaaagagcctcaccaggccccaaacctgccggcatcttgactgcacactgagaaggacactccatccttagacttttcagcctccagaaccgtgaggttgtagtagtccatttttgcattgctctaaatacttgagactgggtaatttataaagaaaagaggtttaattggctcatagttctgcaggctgtatagcaagcgtagtaccgatatctgctcagcctctggggaggcctcaggaatcttacaatcatggtggaaggcgaaggggaaggcaggcagatcacatggccagagcagaagcaaggggtggggcgcacacttttaaacaaccagatttcgtgaaaactcactatcttaagaacagcatcaaggagatggtgcta

SEQ ID NO: 68448 - DNA, 2742 bp, Homo sapiens
accttggctgtttcccttattagctgtgtgggcttagggaagagttaacttctctgtggctcaccttctccattgtcaagcgggggtaatagcaggctatttgcagggatcaggagttaatacgtgtacactgcaagtaatgatcaataagtgtcagcgcctccattctttgccaggtgtgcaccacagctgggggattaaactttaccacaccacagcagataacatatttgcataacttgctttttgtcttcttaagctttccttgaactcaattccccagagtggtagaagtggtcatagggcactatcatttttatgacttctgaattgccagatcaccctcagagagattgcatcagtgttcggagcttgcagccaagctcgaccccacagccctgccatctgtgcccgaagttcgatcttgttggctccagaatccctaggacatagtgcaggagtgaatcccgagctggagctgggtgggctgtggggtcattccagattgattaacctccgacctctgaagtctgcagctggaaggggctccaggtaagaagataactttgaagcatcacaccaggaaacctactgcacctggactttcatgacatttcctgcgggcaatttttacctccacgaaattcagtaacctttgcagccccttcagcccaagaccaccaggagcaaacctgtggtccacaaaatcgggtgtactgacccactgcaatgagggagcgcctcccaagaacgaagggaaaggcagagtttgaaggggttgagggaaggcagagtttaggtgacctttacatgaagcagggttcccacaggctgaggccagcaggactgtgttccgcggggccaagtgtgggaagctgtgtgcagacgccccctatctggagctgcagcctggattgggatgacagaggctaagtctcggttagtggctgagctccccggccagacgggcatgtttccttctccctgctgtaatctcaaagcggacagcgtctgccaggtggtttcgggaacagggtttctccgagggctagggggctgcggtccctccgaggcggggtcgtggtggcatttggctgtggctgcctcgcgccctcgggaacgggcgtctccagctcgctggcagctggttttctccacgtctgtcatcggcctggagtggcaagcaaatagctggtattttcagagccgccctgccccggacagagaagaccgggcccagcaggcgttggtggatgcctttcaagctgtaatcagtttccccgaacgtgtaccaggtctcggccacagcccgagcccagcgcgctcccgcggggcacctggtgacccggtgcagggcgggagggccggtcccaggaacccgagggccggagggcagggcccccttcccgcaccgtccccgggctggcaggagcggccacgacggcacgctccgaggccccgggtcccttgccccctccagtcgctcccactttctgccgggcttgcccaacgagggggcaaacaccacgctcaggtggcgtggacaggtcgctgccgcctcggactacaccagagatctcagctatgagcctggacgcccgccccgccctcccgaggccccgccccgccccccgaggccccgccccggcgcggcgcgcaggcgcggtccatcccgcccgcagagccgcagtgccgggcgccagagcagcggcgccagagcagctgcaccatcccggcgttcgcgtgtgccgccgctttcctcctccatctcttttcctccgcctccgccggcgcgatggcgaagccgctgacggacagcgagaagcggaagcagatcagcgtgcgcggcctggcggggctaggcgacgtggccgaggtgcggaagagcttcaaccggcacttgcacttcacgctggtcaaggaccgcaatgtggccacgccccgcgactacttcttcgcgctggcgcacacggtgcgcgaccacctcgtgggccgctggatccgcacgcagcagcactactacgagcgcgaccccaaggtgaggcgctgccccgccctgtgcgcccgtgcccgctgagagggcgccggtcccggagccgcgccagcgggggtctctgcggggcggcccgtcgggcgttacctgcgcccctagccggccggcggccaggcacagccgactggggagtcgcctggaagccgcagtcggcggggcccgggcgtcccctgcgcagggccgcggccacgggtccgccccactgggagcccgcgcctggcggggtccgccgtcccccgcagatgatgctgagcccgggagcctggcggacgttcccggtctctttctggccgtgcgcttccgcgctggctgcagagccggtgctccccgcccctgcctccagccactctttgttttcctgcagcagcctgtgggagaaaatgggactggaaccaggcctgggcagccttgtgggttggaatggggtgagctcggtaatctgcagggaattgtgagacttttttttgtgtacgctgcttagaagaaaatcactgaagatgcctgcttcacgcagggaggggtacgaagctcagagatggagatggagccctcgaagaaggctctgtcttagaggttcccacacctcccttggagaaatttgcttgggttgaagttgacagagatcatcttactaattgttactttttatatcttgcaaaaatttgtttgagtagtgaaacaaagtcact

SEQ ID NO: 68449 - DNA, 347 bp, Homo sapiens
tctggaggggctgggagcccccgctccaaggcctggctggtggaacgtggtgcccactggcctctggctggctcagtggcctgtgttcctgtgtcttatcagggccagctctgtccatagtgcctgggtggcagggagggacactctgccctgtgagtcactctgtgcccatgtaggaaccagtagagggcggctggtctgaggcatgctggcaccgacagaatcgaatacacaaaaggagagttgctgtgctttcctggggacaggaggggaccggtttcagaccagatctgcctgtagaatgaggctcttcatcttggtgaaagcagccgcccaactcttttttt

SEQ ID NO: 68450 - DNA, 483 bp, Homo sapiens
aggtgattggtatttggtgtactgttcgtgttgatcatattttcatctatttttgagctttatgtttttctattatttgcctggttgtgtaggctttgcatgtgataaactctgttaaaaaaaaaaaagtggagggcctggcttgaacccaggaggtggaggttgcagtgagccaagattgcaccattgcattccagcctgggcaacagagcgaaactctgtctcaaaaaaaaaaaaacaaaaacaaaaacaaaaaacaggctggctttaggctacttaacacttgttatgtcatattgcaagaagggaccatggtagaaagatcaatggcccagttcaatcccaggcggcagggcctccttagagcagagctgctgagcagggaggttaagggatcgtgttggcattttcaggctgaagcaggtgagtccagttctccaaccagcgctccctgagcagggaagccctgttcatggttgcaca

SEQ ID NO: 68451 - DNA, 3520 bp, Homo sapiens
gagcaccctgaatgctcactgccacggctggggcccaacaaggcactcacctcgctcacagaggcgccgcaccagatttgtcgccacgctaggaaaaaagaaaaacagcttagttgagttatgataaaattgtttgagatgatatgggccttatgctggaaagtgctcagaggagccatggggtctgtgaagctactggagtttcaggacagagtgggggaaatggagatccctctagcactgggggtgacctggctgccccaccatcagctgacccctgcaatgagggctgtacccacagccagtcagcttgtccccgaggtgtgtcctgctgcctctcactgcccgtacactcccattggccgggccgcctgtcggctgggggtggccagcgtctgcctgcacctctcctggagcccaccacacccagggcctcttgccatcccaggaccacacctggtggaccacgcagacggccaaagggatggctggtgccccccacccactcctctcctgatgcttcccagcctacaagaggccattcaggtgttgggagaagggctgccccgaagggaaaggcagcagaaagggaatggcagtgaaggtctggggactggggccctgagagcagaggttcccgcagagacgtggacctcgcatcagcagagatgactcaggctgcccacaaagggagtgtggaagtacctcctgtcctggcctctgtgagaagcaaaccacccactgtgccctccctcagctctgaagacgcttcttcctcagagccaagtctccctagggagacccctcgacctccactgcctatgtctgtcctgagccacttcctggacgaggagctcagatcctttggagtctctttgtaacttcccctcctgcctctgccatggggatgggagcgaggctggtcgggactaatggtgccacagggtttgcagggatggtggactctctagatccaggcatgggagtcaccaggaatactgactcccactaaaggctgcctcctgctggggtcccttacccagtgcccagagagtggccccagatgtacacggggttgtcaccacttcttgctttgatccagtcaaaaacgtggagtgcgtcataggtcatgccccgctcagatggcgttcccactgagtcaccccaacctgggagggagaaacggcaggacggggaggtcaaaggcagctcacaaaacctggacaaacacacctccccaagggggcccagggccaggaggagacagggaggggcccgcttggcccacccttccagagtccacagacccacccaggccactgggcagagcaagcagtggggagaacgggcacaaccccacatccccaccagccctggggaaggcagcccagcagcaaccctgccctgcccctgctgactgcacaaaccagacatcccctcacagggtcactctaagttggtgagctgcacatttgaatggcaactaacagcaagctgagttaacagaacagatcacagagcttcagagctggcaccggcatcctcaggccagggctgggacttgccccaccctcttgggcaggggagtgagctcacttctccctctctctttcttaacaggcaagctagtgaggtctaaggcagtgaaagcctctgccaccaccatcctcagctctacacttctcccccatcccccagcagcatccatgtgtcccactccgagccctgacgagcagcagtgcagatggcgtggtcagatgagcagcccccggggccgctggctggacaccaacctcctcaacgccgaaggcttggtcaggggcaggacagggagtggagtccggaggctcccagaacagggagggcatttctgggttcaaggcaaccatgacccaggaaggggaaaggggctgtttccccttagggtctaattagcatcttgtttccataacagaaaacactaccatctctgccccccaaaattacaacctcccaagggtccctcccccagtctccagcaaaggtggagtgcaattatctttccagcagcccagcagtgagtcatcatcagatgatctgaaagcaccacaaaggtcagaaagagcaggttgtgcagtgtaagcaaacagttagtgcagaacttgctgtttcccgactcagacactagaggagggaggaggccatgcagagggctagggccaggctgggaggcaggggtatggggacatgagacagaaagaaaagaacagagacagggacaggagacagagacagacaggaagactgagagacaggaacagagaggcacagagacaggcaagaagactgacagggacagacagacaggcacagagacagggacaggaggcagaaggatgcggacaaagaggcagatgcagtgagagagacagagggacagtcggagatggagctggcagtcttggtgccaattagaaacgtagactccacgagaactgaaacagaaagtgctgcgtgggatttcatttcctgacagaagtgcggggagatgaatgggaagaagccactcattctccctctcctaaggtctctagcatgcagcagaagagaaccagtgtcaacatggagagaaggagagggcaaaccacttccttgctcctcattctggagtttttcccagcccacaactgtcatcctgatggaactttcttccctgtggttggcagcatggtggcccccaaaagtgtccatgacctaatccctggaacttgtgaacgcgttgggtcacatggctggggaatgaaaggtatggaaggaatgaaagctactaactgcttgccttgagatgggggtgatcctggacaagctgggtgggcccaaaataaccacaagggtcctcatcagagaaaaagggagaggagtcagggtcagagccagatgacctgggactcaatcacagaagggctgtgagccaaggaacacaggtggctggaaagggcagccaggcattctccctgagagccctgctcccaccctgattccagcctgggggctgcagattctgaatttctgacctccagaactgcaagacgctacatgtgtgctggtttaaagcactgtttgtggtaacatgttatagcagcaagagagaattaacacaacccccacatccaggtgacagcctctctcctttgtccctcccatatctcctcttggtctgaggatagacacgccacctgcccccacaagaaggtgaaggcagccagccacgttgccatcaactctttaatctctccagctgaggactacatggtggaatacactttttgaaatttttgagacagggtctcgctctgtcactcaggctggagtgcggtggcatgatcttggctcactgcaacctccgcctcctgggctcaagctttcctcccacctcagcctcctgagtagctgggattacaggcacctgccaccaggctcagctacttttttttgtatttttagtagaggcggggttttgccacgctgcccaggcttatct

SEQ ID NO: 68452 - DNA, 565 bp, Homo sapiens
actatgtgcaaaccaatctagccacagagtgaccccagagcccctgcctcatcctgttctaatgctgtcagcacctgcctctcaggctgtccttcacagaacacccaccgtgtgcgagccccgttgttctcaaacctcgaacccacagatgcggccctttccttggagcctcgcttgtaggactgttcccagggccatgtgcccagagcctctgcctttgacctcatgggcttgatacttctgcacctttctcctcccacatctccaaaagtaaatacacagcgtgaaaaaacacacaaggtccaagttcactcaaggagactacaatacctacaaggccagcacaaaattccacagaaaccaaagtactgtgtatctggatttttttaagggtataaaaaactaatttgttttaaaaaagaaaaaaggcctcatttttttttaaaggtactatatttttcagtggtcatcttttccaagggcagctaggctcctggaatgcacaactgacaaggcatctccaacatgatggcttcagctgacttctcatgttgtcaacattttt

SEQ ID NO: 68453 - DNA, 2105 bp, Homo sapiens
attcatcttctacccaataacccaaaggttattgaacgccaataaccaaacgactcaggactgcgagatgattcccaaggaggcgaacttgtgcggacagatttcaagtaccacgaaccatcaccagcagagcgaagggcaggtttccctccgacggctgcgatgctccgagtccctccttcccctagcaccccgccgcccactgagcccttccccaaaggtccccgagttctgagcgacgcacgcccccgaccctagttaccggggagagccgccgagggcccaaggcgccagtaaggctccgcgcacgcagcccagcccgaggggcgcccgcccgggcgctcggtgtggggcctgatgcagagcaggaggaggaggtccgagtgggccccagcgctctcagggtctggcgccggcccctctgcctcccgcctctgctgtgcctggcgtccagggatcttccaaggactccccaccccctaccctgctctcccacgcggggtcatgacttcgggcggcgccaagcccccagcgtaagggtccccccggcttccccgggaaagggtcggggtgcaaggctaggccaggagtgcctggcgagagggccggagcaggacacagggggtcagcggcagggcagggcgctcccgccgcggtgcctggggaagggagcgggggtggggctgccgcgggccaaatgcgggacacaggcgcggacgggggcggccgcggatcgggcggacggccactctgggaggggctgggaggtaccgcggccccctgcgggacgcacctgcgcaaagtgagggaccggccccccccccccccccgctccgcgcgaagcctcacctgcccagcgcccgcttcattcccgcgtcggctgcgcagcgcggctcagccgccgccgggcccgtcaggcgtaggttctgcttcaggcggcagtcggcgtccagcgccgcggcggccgagccggaggaggacgagcccgcggcggcgcagcgctcatgctccaaggcgacgggctcggtccgcttcctcatcccgcggccgacagggccagccgccgacggcgcccgctggcctgcgccgcagtgccgccgctcacagccgccgccacccagagcccggagcccggaacccgccgctcctcacatcccagcccaggccgctgcgccggctacgaaccagcggcgggggcccgccagccaggccggccaatcagcgccgggctcccgccggctctgccctacccccctcccccggccccgccccggccacctcctctctagttccaaggagcgcgcgcccagcatccctggcgccacccgcagccattttgtgggagggtgggcgaagctgcagcggcgcgtcatctgcagggcagggctctgggctccatccgcaggctgcagctgtgctcgcccgggcgctcggtgtgaggagcacccgctcccggtcgtgcccgaaaggggtggcccagcgaggcagagccgcagcgctgggctcctcgtgcttctgtgaacggaaaaccagaggtagcaaatagcagttccgttctcgtgattcttaattctttttccacaaggacattacctttaaaagtatgctttccggtcgtcagtttttaatttgaagtaaatgtatatactcagtgtttacttttgggccgaacatcaggaaatgaactgcttgaaaaatttactttttaaaaacctgtgttagattttagatttttataaagcaattaagactacctgatgggaggaaaatccatttcaaagataaattcgcccttatgaaacccaaatttagtactaattcaacccatcctagaaagagaaaaggaaagaataaagggctgtttcacaaatttagttttataactttggctttcttcaatatggcattagttttacagatgatctataacaaagagagatatttgcttattccaaagtaacgttagaaatttcagcatttgtcactttgaaaactattggcaattgataaaggtcaattggaaatgcgtttagaaattcaacagctttttatattagttttttctttttttttttttttttttttgagacggagtctcgctctcg

SEQ ID NO: 68454 - DNA, 891 bp, Homo sapiens
gagagtttcattttaatatcaaacagaaaacccgcactgcaaaactgaaacccttgcgtcctaccaatgcacaccaagtttttgggcctttcctcttaacctcaaagtgctcttttcttgaacctaaacgagaatgaatgaatcaaaaggaaaatgacaaggaagctgcggggcgtgcatttatttccagctctgctgcccgtagagtcccccggcccactgcctgagaactggaaaagccgtctctgctcagccgaggggttctgccatctccggggcggggacctcaccttggaaagacccctcccactccgcccctcttggaatgcggctgagcggtggatgtcccttttcgggcgccgtaggcgcgttcctattggctagctttgttcggcgccaaagcgcggagcggaggccgaggcgagagcctggcgctgtaggactagaacgaaaggagtgaggcgccgagagcccagataccattttggcgtgagagctggtggttggcaaggccgcgggagtgggaagcgtccgccatgttctgcgaaaaagccatggaactgatccgcgagctgcatcgcgcgcccgaagggcaactgcctgccttcaacgtgaggggcgggtagacttggacggggcatgccggcgttgggccctgggctctggggcggggcggctccccgtcagggttcactttcgcaccttgttccctccgagctccggaaaacttgggaagcagcaaaacaaaattcaggaggaaagagaaagcattcatgcttacgctacccagcgatttggtgaatttcctcatctgagcaaattttgcattttagcagttttccttggacagatttgttccggtcccttaaaatatttacaggttgcctgata

SEQ ID NO: 68455 - DNA, 2426 bp, Homo sapiens
accgcaatgccactatcatacctaacaaaatcaacaggattttcccaagtgtctcaaacatatattcttacagttgatttgtttgaaccagcatccaaactgttcaggatgcccttggctgttattcctctcacatctttcaaccacaaacacctctcccaaatccccatagcccatgcctttttaaagaaatcagacccactgttttgtggaatgttccacatccggatctatctgcttgcttccccagggtgtcatctaatgagctcctccatccttaacatttcctgaaaacctgagttagcatcaaagtctagtttgctgcagcctcaacattttttttttttgcaggtggtgctgtgtcctccgcacacctcactcaggaggcactggtgtctttaggactcatcagcgggctcaggtggtggatggccacttttcctaacctttgtcttcagccgcttatcttcttgatgtgtttgaagctgtggaaacagcttgagaatgaggacagacactgggtgtccagcagaaagtgtccatggtgagttatatgtccagccagacatgttcctatggtgagctatgtgtccagccagacatgttcctctatgcctcatccacaccacctagcccagagcagggacatggctgcttccacccaacacagactttagtgttgcagttctgcttcagcagtctggatccttcaggtagatgagccatgtgggtgtgaattactgataaccctgctggtaacgggaaagccaccatcccccaaaggaagccagactgtgtgctcacaaatgacactgtgggttgggttgaggaaaacaagaggaaagggatgggtaagaaaaggccaccttcgaggtcccttccggcctaagatgcctgaaatctccaaggaaaaatgtgaaagcaatcctgatactgggttatttcttaggctggcagaagaggtcgggcaagtcctctgagcttgacacgagtgtgtgtgcactaccgtctgtcagctctgatcctgtacaaaggtttctgtaaactgctggaaggaaccccaacctggttggggcagagaacactgaaattgctgggtgaaaaacagcctcctgcgagcccttcccttcgctgctctagatctagacatcaagttcaaggatgtaagacacggcagcttggctgacttttctcagcacacaggaatctgcctgctttgtccagcaccacagctggaagctcaggtcagtttccctgacatttactgagacaaaagttgaacaaaaaatggccctggcattcaaggatcatggtccaaggggtgctgtttactttggcagaaatcccagggcaatgccctctatccaagctatgtttctgcacagtcagcccacgtaaccgcctgtgtggggaggcctcattagggcatccactgactcacacagaaaagcctggaaagacagtaaaactgctcacaggactaaggaatacagaccagtgctactccctgccctgcatggtcagcggcctgcctggcctgcagcccagcccagggcaaagggaatggcggggcaccctgtctggagttgggggttcccggggtacagggcactgactgggagccactgaccctgcccacacctcaccagtgggatccagtgcagcctgatgacttcctgggatggcttcatgcctcctacaaggggacacacgcaatgctgccaccctggtccttctacaacagggggagctggggggcgctggcagcctgaagagggctctcggcattcagccgggctccagcctctcctccccagtcacctgcatccctgcaccctgaaacactagctcctttcatcactgcctcctcaaaggccatggcagcatcctgcactccctacacctgcaccgtacatgcctggctgctaaggatcccgcagtttgctccctacacgtccatcaatgcctccggccttcctctttcctgaagcacatgacacccccctgttctaactttgcccctctttgccttccctcttcctttcagcctgcccatgtgaggcagtttggaaatgtggcttcaaatttctttgacactcttcccttcaggtctgtgtcccttctccttgaatctggtaggcttgtgacagctctgatcaatagaatgtggtggaagggatgctttgtgactttgaggctggcctgaactcagtgaggaaatcccagccctgtttttgggaccacatgtccttagtgccctaagccaccaggtgagacagttgactatcttcagccgccatgctgtaaggaagcccagccacgctgaggcctgctgcaacccctccgagactgtcctcagctgagctcctccagcccagacgcatcagtgacgcttcatatgatttcagacccagccttcaagtgtc

SEQ ID NO: 68456 - DNA, 2302 bp, Homo sapiens
acagaactggggagcacaaggccggggagcacagggctggggaacacagggtcagggagcacagagctgggcttcaggccctgaccaagggtggcagcagaagacacttgccagccagggcaccttggctgtcagctgctgctggagaggccctgcccactgacctgcagtgtttgatcaaatgacatgagtgctgccctttagtgactggtgggcacttgataaatgttaccaaaacgtacactaacatgggcagggctggggtcagctccctggcaagagtgctgatgcccagaatccagtgtccaatttccctgcagcacagttgtgtgcacactcacagcatcagctgggacagcaaagataaggagtcagcgaacagccatgctcctgctgccagggtcaacagagagaggccaaggtcacatgccagggttcacagcagcgggatcttcctgacccatgcaaagacaaccctggataaacagaggttggcaatgctgactccacagccacggagaaccagcaacctggcccatacctcgctgtgaggccgcagggcccctgagcggccaaggcaggcagctcaggtctgggcaagtcccagctcctgccacttgtggcctcgcggtctatagggtgaactaaacacctgctactaagggggcgatgactgaaaaggccaggcgctccatacggagactgctgcttactcactacacgctgtaatactgccaccaaggacaccagaactaccgtcccatgtatgtacaggtgcccagaatcccagtttcatgctgctcaaaccctatttccagaggcgcctagctgcaaatcggccttcccctccctccctacttggaaatacaaccaatgcaaatgacagaacactgaggggagaaagccgccctaactctccccagggagcccacagcgtgtgagccgcccacccaaagccctctgtttagactccccaaagcctctgtgtgagggcagaggcaaggacaccccttctctatcatccttccacagacccacggggcggaggaaagaaacggagctttccctgaactctcaggaccaagacattcatccagcactgccactgcacacccctgcgggttcccgggggctcccaggcctgcgcaggcgcctcagtgcagcctcacaacaagcagctcactgtaataatacacactgtttacctgcgcagttcagaggcctcttcagtttcttcttcatgcaaactgaattattaatactccttggtattccacatctgcataaaatgtttgcatgtcaaaatcaccagaaaatctggccagcattcagcagctggctacaaaattgagggcaatattccagataaaaagcaacagtttctcttagtttcatttttggaaactggaatgagtaggctctcaataatcctaatgctataaagcttaatttaagatacaaacataaactttgccaccaagtgaaagaaaatcctgttttcatccagaggggaaaagcctgtccccaaacaaactggatgctgccccagagacatatgacgttgtcatcgctctgcaggacagtgcagccctctggaggccggaggagaaggtgttggtttgcatttaatttagttaatttatgcacagtgacgagggaatttaagctatgccccccagaatccaccgggcattaagggcagagaagagattcatgaccactcggaggcagcctaggtgtgccaatcacctagggacccagagtgtccgtaacgggaagccattcccaacaaggatctctgtaaatcctgctcgcccagaaagaacagggctgaggcagccctttgagggtgttcctttttaatctggaaagatgttataaccccaataaaacactgaagccagtgcctaccttccagctgaacagacctcagtgctacttccaatggccttgccagcaggaatcaaccttcacactccggcagttctgagctattaggattaacttccgctttaagtgttttcatggttttcgcttatttttcaaaatttttgctatttatttattttgcaggcacagacccaaaatatctcaacaatcaagtttgaaaagctatccctttttttttttatcaaataaggtttaagaagcttttttattgtttcagtcccaaaaatctaaaaataagcttatacctcatttaagtgttaatacttactttccctacaaagtagatttttagactaaaaactacaaagataccaaatgttaaaactgtcctagaacacctttctgtggtctc

SEQ ID NO: 68457 - DNA, 1068 bp, Homo sapiens
tagccaataacagaaatagaagaaatgagagaactagaagagcacatttgcagctaccactgtaatagctgtaataagacaagaatcatccgtgtatgatcaaaaacaatgggaggagtgacactgtgcacaccagcagggcaggaagctctagggggtcagacgttcccacagaaactactgagcaactgcaatcaactatttcaaaactctggaatcatttcagatccttatgggcctgctaccatccctgttcctcagcccttgttcctgctgccctagagctggatgacagcagcctgcactcctggggtgtctggctggtgccagagtgggcagtggggaccctgtcctccaaagcatgggctcagggttttggttggtctagtggttcctttagggaatgaagcagactttgccttgcattcagccttcctgggctacagaagcttccctcaaaagcatctatcagaatatataaagggatgggaataccttttgggaagggagaaactttgtcaggtcactggctgactgtgaagaacagaaacttcagtcactgcacacaggaaagattacacaatttgaagaatgaagaaaaatgaacagagtctaaaggtcaagtgtacaatcatacacatcagaggagaccaagaagaagaatggggcagaaaaaacattcacagaaaaaatggccaaaaacttctcaaatctgatgaaagacatgcatatttggatccaaaaggtaagaaacccaaaaagaatattcttaaagagatccacactgagactcattatagccatatggtcaaaccttaaaggcaaatagagaattctgaaagcagccaaccagcagccctcgaagatgctctatggagtagccattcttttgtttcttcacttctctaataaacttgctttcactaaaaaaaaaaaaaaaaaaaaaaaaaaaaaaaaaaaaaaaaaaaaaaaaaaagcctgggcgtggtggctcatgcctataatcccagcactttgggaggctgaggcgggcggatcatttgaggtcatgagttcgagaccaacctg

SEQ ID NO: 68458 - DNA, 1505 bp, Homo sapiens
aaatcacttgcccttctccaaggccccgccagcttcatgggtctcttcctgaacctcctccctagttccagggcttggcctaagtctcacagagcagaaagaaacgtggccacccttcctcacgtgagtcctgtgcaaacatacagccccacacagagctcctaacaatggggcatcagtacccaggcacgatcgatgattatgaacccaacgcgatcagagactcccacatggtgtgtgtgactgcgcgcacaggcgggaggaaaggggcgaatctgcaaaacgagtacaacagataaaattcgcaacagacttctacaccctttcaatcaaccgtcccaagcgccacgaacgcgggtcccgctccgtggggggccgcagccacactggcaggagggaatcctgggcctcgaccagacgccggcggcgtcaggagaaacggcccgcgctgggcaggcggcgggcaccgcgtagctcattaccacggggggccccggccaaggccgcccgcctcaggccgagccttggggctgtgctggacccgggccctcgttcgcacggcgcccgcgccgccgccgtcgggaaaccgggttttcaagcgttcggcccagcgggcgctgtattttagggcgtgacccccgccccgccctcgagggcgaccggaagagcaggcaccacagcagatgcgccgagtctgcgccccgcaccgcgaggagcacccgaggccgcgctcccggagccgggtctggtgactaaggcgcgggtcgcgacgcaggggcggccccggactctcgaccccaccagccgcctgaatgtcccgccggacgcccgggccggctcacctgggaggcgcctccgccgtccgcccgcgcggggccaggagcgcggcaccacccccgtaccgccggccgctctttgtgtctggaggccgcgacgcaacactcctcccggcctcgaggcaccgccccctcggtgtcccggcgcagtgggcgaacagggggcggggcgagcgaacgggagagggggcgggtcgggtccgggattgcggggcggggtgggggcaaggcggcctccgcaaatctcagggcggctctggccagtttggagcctggggtgacccttggagctgacctcgctggtccctgtcggagccctgcgcgctgcggagcttggcggttcgcagctctcggggtagcatcttctggaaacaagcccggaggccggccaggcaggggtaataccccaaacccaccactgaggaaaccgcgacttaaaacctaggtcgtcacgtttccaccgcatattaaatcaatacgggttgagcatccctaatccaaacatctgaaatccgaaatgcttcaaaatctgaaagtttttgagcgctgacctgatgctcaaaggaaatgcacattggagcacttcttttttcttcttttaactttcttttcttttgagaaaggctgtcacttctgctgcccagcctgggatgcagtggcgcggtcatg

SEQ ID NO: 68459 - DNA, 2630 bp, Homo sapiens
ggactcagcttactaataacacacaggtaaatatgtaacatctgcagcgagagatactggaggcaatatggcacagggtggcacccctgaggtggaggccaacaagttaaaagtgtggaatgcctcagtaaagtcatgaagacagactttaaaaatgtctactgattccggcattttgggaatgcctagtgatccagcaagtctatttcagtctagcggtgaagataaagcgacattacgatggatttagtaataaataggaggtagagacaaggagataacgggtatagatttctccgggaaaacatggctgtcaagagagacaggcaacatctacagcaggaagaatagcccaaagggaggcatcctttttacagcttttttaaaactatagggcaaacatgaatatgcggcaggagtggaatgcagctaaaaagaaaacggatgaggtagtggaagatccagggacacaaaaactaactgatgaagcatgaagaggacggggcgctcaggtttggatgaattagcttttgaaagtgagttttccacatctgataaatccttccctttccccttgaagctgaaggtagagaaagggaagccggggtggactggggctggaacacgggaaggtctgaaagcgcctccgcgcgtgtagaggggcagtgccgcggaggagcgcctcaggaagggcatgccctcgcagcacgggcttttgctgtgtcacgtgtcagaaagccacggtgaccaccaccccgccagggaggccagaagaagttctgcggcgacaattctctaaagcagggcttaagtccaggctcggtactgacagccgtgtcccttcttgggtcaacactggggctaactctaccatgtctcctcccagcaaccccgaaagtcgcatgggggacacgaccctctgtcgagctccacaccgacagtctgaccgggggcgggaccagcgcctggtctcgcggctttgctgtcgcctcccgcgcccacgggcacctccgccaccgtggcagccgtcacggagcccttccgcgtcccgagcgccaaggcacctgcgagcagccgctccagggctcgagattgggtgacaagcggccgccaggccagggaaagcagacccgcagggcccgcgcgcctccagccacctccgcacccgcacgctccacaggtttcaaccagcaagagcggcccgcggcgccggggtggaagtggggtcaaggggaggtgagcgtgcaggacggggcggggcgcactgaccccgcccagaggagcgccatgggtggggacgttacctccaacatgcctctcctgctcgccccggccgtgtcgatgagagtgttgtccaagtcaaagaaaaccgcccgcacgcggctcagccccatagcgccggccgctggcgcgaaccgtagccttgccaccgccgcctgcgcatgcgcaaggcggactgcccagagagacgtgggaggagccgcgaagtcaccagaccatctcccggcgcgggtggaattcccgcgatctgtctcattccctgcgccgccgagaaaagtgagatcccgcgagactcccagggtatggtctctcaagagccctggaaacgtgtgtcggcgccgccggatgcggcgacttctcagtggctgtggctggcgttggtccgaagcgtggtgttcttccctggtgtctttctgcttatctctttcctccctgggccctccggcgcgagggaccgtcatcacctccccgagagaggttgtccgcgctgccaggcgctgggcagcaggctctccgggtggccgggcgggcggcgcggagacgtcggcgggcctgatgtctgccttgagcgcccgcggtcctagcctgcctgtacgcgcaggtcactgtaggtgatctggggacgggggaaggtggagcctgcgccttcccgcctcgcgccatttgcggccttcgccggggtggaatccctgtctgcctgggcccgcgccagcacgtttctgaaggatgtgacttgggtctcttacaacccgtttagtacctgtgccctaagacggaggggctgtgtagtggctgccccatgttttgcccttcctgattgttttcctgaaaccttgcgttctcaggtctttggatgccttttactcggttgttttcaggcatagcaagaggttgagggacgtcgaccgccttttaaacccgcggaagggctgtagcaactcttgtctcctagtgctggcagaacggggatcgtaacactaatctctaatctttgtctctcttgggtacctttactgtaatttggatatgtggtcatcattagtgaccagaaattgactgtcaggtacaggccaattacctgattttgtttagccagtgagctaagtggttttttttattttttaatttatttttatttttattttcgagatggagtcttgctctgtcacccagtctggcgtgtagtggcacgatcttggctcactgcaacctccgcctcccgggttcaagcaattctccggcttcagcctcctgagtagctgggattacaggcgcatgccaccaccccccggctaatttttgtatttttagtagagacggagtttcaccatgttggccaggctggttct

SEQ ID NO: 68460 - DNA, 1916 bp, Homo sapiens
gtcttcaggcagtagcttaagtctctcaaccaactgtccactaaagaatccctaagtgcccccatgaggtgtaaaccctttggagatataccagctttttgggaggaacccgtgtatatctttctcttattgatttatgattttctttttggaggcaggatctcgctgtgttacccaggctagcgtgcagtgcagccaacatagctggttacagcctccacctcctggactcaactgactgggcctcccaagtagctgaggccacaggcatgggacaccacgccccgctaatttttttatttttctaatttcatgtagagacagggtcttgctgtgctgcccaggctgctctggaactcctggcctcccaaagtgctgggactacaggcatgagccacactgctcagcctgatttatgactttacctgaaattcctgtctccctgaattgtataaaattaacctgcaagcctgaccatctcgggcactttcacaggacctcttgaggctgaataacctgggccacagtcactcatactgactaggaataaacctttttaaatatattttggcagaacccggattttgccgtcattagcaaggccccagggaagaggccacctgggtccccacagccacctcacctcccgcggacgctgccccacgcagatccccccccccccccaccaaaacacgtctagacgtgcccgtgcgaggacatttggtcccggcctacactcctatccgcggaagatcgtcccaaggcggggtgctcccaacccaaagcagcggcccttccccaaaacacgcgggcgaagtcctcccctgtcccgcctcccacaataaagtctggagcatcagagtcggagggaacccgagtcggacctagcccatccgtctcatggctgtaacccccaccccaccagtggaccctggctgtggccgagtccccctccacctccggccaaaagacccccgtggcagctcgctaggccgctggcccgtccccacccgaggagcggcgaccctggcacaagaggacctgggttgctcggcgcccctgtgaaatccgggctgttcaccgcccgagccgccactacacgcaaccgggaacggagactgagtggcggcccagacccggggcgctcggcaagccgcagccccaccgcccacttcaaggcgcggcctgggtctccgcccctccccagaacgcggagacgccgggcctggaggagcgcgcgctacggccccagcagcgccctcacgtcccaggccttcccggcccttcttcctgcgccggaagggcgcgctgcagagagggacccgcaggagcgcagctcaccggggcggctgagggcgaaccgaggcggtgaggtcaccgatggtggaccacgcatctcacggctcgctgacgcccagggatctggaacgctctgcgccgcccgggactacactacccagaatcctcagcgcggccgggactacgctacccagcatcctcggcgcggcccggaggctatgcgaccctgcgcgtcgcatcccctcggtggactacactccccagagtcctcgggagtcgtccaggtacacgccccagaatattggtcatagcggtccacccgggactgcgcgacccggaatccttggaaggacttctcggaaggactcctctctgacaggtggggcgagcctatggtcgtttggacgtggagggatcctttcagaaccggcgatttcttttatttaggtagccctatacatacattaagcatattttcccatttctatgatataggtaaataattttcccactgtcttttgattatgggtatgtcttttttttttcttttgtttcttttttttgctatgtagtacttttgatctctgattttcctacggattttgtggttttatcat

SEQ ID NO: 68461 - DNA, 873 bp, Homo sapiens
accaaccgacgtaaagccggtgagccgctcggggaggagagaggatcggcgggcggcgggcggggaagggggcgcagacaggcaagggccggggaccgcgagggcaagggcacctgggagcccgcagaggggcggctgagggagaaacctcaggcatggccgggccaccaggaaaacacggccgcgggatcccaccgccacagacacgagggcggtcccgcggcgccccgcctgggacgccggaaggccctcggcacccaccaagacctgcctcacgagcccctggtcccgccaccggggccccgaagcgaccacagccacaaactcaacgccagggccacatcgctcgtgattctcgtccatcctccgacccggtcccgctccgggagaccggcgcgcccccaccgtgggacgctttcccagggccaggcggcccgaccacgtgccacgcaaacgccgtcgtccgcaccggtcgcgactcggcaagggagcgggcggagagctgactcgcggcggaggggggtcactcgccggacggaacgctgcgcgcagccatcgctcgctgtcagccgcgtcccaacccgctaggacgctgggccctgccggcgggatcctccccttactcggaaaggggaggcgccggccacagtaggcgacgagccgcgctcggccaccaccgcggtggccggcggaaccctcgctctccccccgtcaccccgtcgagggggaagctgaggagggttcctctgcaagcgagtcgctactgcagcgctaccataacggagagagagacagaggcggcaggccgggggatcccgtaccccaaggcacacctcttggatcgctagagaaggctttctcaccgaggatggg

SEQ ID NO: 68462 - DNA, 911 bp, Homo sapiens
cccaccccgtccacccgcctcttttcttcagaggcaaagcacctccgagtaaacccacacacgaccggtcggaggcagaacggtagcccctcggcggccggccggcgcacgcgtcaccagcccaagcccaccgcgatcgctcacagggcccgtgcgcacccgccagaggggagcaccggacgtgcgctcgccggaccaggcgggcgcccttccccgcgtgggaggggcgcgtctcgtctcactcaaccgcctcgaaccccacaccgacgagctccctcaggacccacgcgcggacaccgaggcgccgaccggaggagggggcgctgggggtgggaacgacacaccaccgctcggcctcgggaacctgagggacaacccggagcgctccaggagcaccgcaaaggcccagggggagccaacgctcgcgcaaactccccgggagggcagcacgacgggccggcgggacagcacccccaccgctgcggaggggggccgcccgcaagtcgacaaccacaggaggcgagagcgaggggtgcctgccgcgtcagaggaccccccgacccaccccgcgaggcagaaggcgggggcgggacagcgaggtcaggccgggttccgcaccccatgccttcccaacgcaccacccgcaggcgaggaagaggagagacaaggggcccccgcgggcgggacgagaagaagggtcccattcgccacgaatgtccgcccctcgcccgtcgcggctcggacacggccagggagagcatgacatcaccatattctattcttacaagagtgctgccacgtaagtgtcaatgaatgtttgtgaaataaatgagggactaaaggagtgatcgaacaaataaaaataagttatctgtgtgtattgtatgtgtgaataagattttgagtttggc

SEQ ID NO: 68463 - DNA, 1102 bp, Homo sapiens
ttcttcctgacccctgagcctgtaacacgcgccaccataactctccacctccgcccacattcccacagcactcgcgacatccgcgggcctcaacatgtctcttcattccattttagggtatttcctgtttgtttcctgcacacacagtcgcgcgaggcacagccctgagtgacctgcgcgggagtggcccgcgcttcaagatgcgccgccgcaggccggggagggcagcctgagccgcttcccgcccccgcggggaccgtcgccagcccgcatctctagcgagaggaggttccacagcgcgcccggcagccccgccaccgtcagcacctgcgcctcgggcgggctttccccacctctgggaggcacgaatcctcaggggctcctcgagagggcgccagggagcagatgcatgcggacacctttcggccctctgcagccgccgtagctcctccctcacgccccgccccccccccccctcccggcagaaacctggaagtggaaatctcgggcattcaccgtttgggtgaagacggaggcgggttctggacagacgtaggctgtcagggagtgtttacttcgcctccacttctgttcctccctgccctggtgctgctccaggtcacatactcgtcctgagccggcttcagcctgtccgcgcagaagtctcccggagccatggcctagtactcttatgtgaagtctagcaagctcgtgctcaagggaaccgaggtgaagagctgggtcctgcagctctggtgggagcctcctcagttcttttcggatgcactccacccccgcgaatccggtggaagccgtggtgcagagagccggctttgtggcctcccaggcttcgctctgaccctgtctgggctggacggaggccggaccgcggttcctggcgcctgtgcagagaggggcagcctcccgtgctgacgaccctggaaacaggatagacgggcgggtgacccgtggccccgtacccacgagtttgggtcccctgaggcatctctccaggcctctgcctggtgggtctgcgttagtctgatcttgtagttcattataataacttcctttattagggattattcttttctccattgtc

SEQ ID NO: 68464 - DNA, 422 bp, Homo sapiens
gtggctcacgcctttaatcccagctactcgggaggctgaggcaggagaatgccttgaacccgggaggcggagcttgcactcagccgagattgtgccactgcactccagcccgggcggcagagcgagactccgtctcaaaaaaaaaaaaaaaaaaaccagcaaattccaaaaataaccgctagaggggagtatctcctcttgtgagtcattgatctagccattaagagagtcatgaaaacatcatgcttgtctcctggatcacccagctctttatgacacaaatggagctacatcataagcacagatagtttacccagactcaactacatgtgctcagaaaaaaaggaatttaaaggaaataagacttgggatgggtttttttctttttttcttactttttaaatcaactttgttttgccttt

SEQ ID NO: 68465 - DNA, 1670 bp, Homo sapiens
gttggcatattgagggacattcaataaatatttaaggagtgaataaacaattggatacccaataaatgcatgtatgaataaacacattcttagttattcggaatatgaggatttgcggagagtggacagcaggggattgaggagaccggctgggactgggaaatgggcattcgggtcgcatgcccaccgcagtggcccagagcccctgtccggaccgctaacaagttgcttagcaacccgccgcccggccctcggccaccgctagagggcgagcgggcggggagacgtgcacgcgcgcgcgcgtgcgtgcaagcgtgtgtgcgcgcgtgcgcggcgcgggcttgggagggagcacgtcacttcctgttgccttaggggaacgtggctttccctgcagagccggtgtctccgcctgcgtccctgctgcagcaaccggagctggagtcggatcccgaacgcaccctcgccatggactcggccctcagcgatccgcataacggcagtgccgaggcaggcggccccaccaacagcactacgcggccgccttccacgcccgagggcatcgcgctggcctacggcagcctcctgctcatggcgctgctgcccatcttcttcggcgccctgcgctccgtacgctgcgcccgcggcaaggtagggtcagcgggaaaaccgggcactttccacccccataccgaacacggccgacatggacccttcctaggcgggacagacacctctccccggacactgactcttcccagccctgatcaccaccgttccctctgtctcgggcccacattccggggctggcatttcctaccccgggatctgggcaccgacccccgaccagggtatgataccttccccaataggaacttgcttctgctcccgacccggaccctgacacttccctccctgtgcatcatgccgcggctgggaacgctgtcagcccgtcccccactgcgactcgggcactgattgttctgagcctgttgggcccaggcagatcagccccatcatgtatacctgatggatactggtcctcacaacttactgaatggtacaatttcgtgtcattccctgttaggaaccctgcctcagcccaccgcagggccctttctaccatccagacccatccctagactctgactcctgtctcactggaatctatggcaccttatgtgctcacctagatcccccacacctggcccttgcccctgcctcaaaaacaatgatctcttagagcccagtttttcacatcactttctggaaccatcccagtcagctggctcctcagaagctggcatcttggtgcctctactttccaactaggcatggacgtcttattttcctggtttcctctcttaactaccatccaaccttggacatggcctagtcaaaacctagaccttgttcctaacctgtaacccttttcccacccagcctttgaccctatctcaaagtagcccttctccccatacccccaagacaatccccccaccaaactgggcctgtctgctgggccactgttggcccctcttgtgagactgggccagactccatccctggccttcctcaacatctgtcctattggataactaggaggactccagcacatttcaccttctgcttctccctcccccttccctgccccacttcttccctatatt

SEQ ID NO: 68466 - DNA, 2656 bp, Homo sapiens
gattttgcctactcctacatttcccatagtgcctggtacataggcacttgataagcatttgggcagacacggtgtgacatagtatgatgcggtgaggtgctgggtcattgtagtcccaggccaaagcaaaatcctgggcccctctcattgttctaggtagagaaatgggactttctgctgtcacttgagagtattggccacacccttggtctccaatgattgctccaagatggaacaccaggttggggaccaggacccagtctcctgttagttcactgccctgctgcttccctgccactctctaaccccagctttctcccacagggatcttcattgccttgctgctgcgctttgacatcaggtgagtgagtgagggcctgccccagcatgggcttctccagggattctccagtggccttcaggagcccagagaaggtacctcaggagaccagaccctccacccccacagcagccagagcaattctgattttatctgcattttgcatcttgaagttctaagtatttgaagagcctgtggtcaaaaaattgttttaagaatcataggccaagagatttaaacccacaagggcctggtggtactcacagtgctttctcactgtgtgaccttgacaagtggcctgaccttcctgagcctctggtttctcatcttgagttaataacaagagttcctaccatgaaaatctggagagagtgctgagcacacactgacctcagtcgctcttggttgaatcctggttgcagtcatcatcatcatcttttatcagcctagcgtcaggtcaccatgtctcagctgctctagctgttccctgccctctctttactcagacatttttcagtctgttgtagacagtgagcacgagggggagaaggtgggcaacttaggtcagcgtttaaaacacaagaaaggtcttatccaagttaatgcacctatgcaatgggacttgccgtcagcagggggcgccagcaacagctccatcattttatgccccgtcatccctgtgagggctggcaatgttgcacttaactttgaggtggtttgtgaacttctcttgatttcctcatgcctgatagttgcaaaagcagtaataacagtgacagtggtaatgagaaacttactaccagcatcattgaaatccagtttccatgtgaaacttaggtttttcccactcacatacacctgggttatttgtgtagtgccacttcaaaccttaggagcatatgggctcacagtcacctttggaagagacctggccagtctgtaagtagagggatgtctgtgccagccgtctctactcctggctgttcagaggtaatacaaagtgaaacccataagaagcccccaggctatttgctggagacagattcaactgccagcaccctcagagacagagtctcattttttagcctgggctcacagcataagcagctcctcagctgatttccagaatcagtgcaacattcccaaagggagtcacttgtatcccagttctcaagataggtgagttctcaaggtacttgcagccgaaggcttagaagcacccaggacaaggagagaagggggtcagaagcactcattcattccacaaatgttaattgagtccatagtactggctgggcacatcccaggtgctggggacatgcagaggttacggagctggcattggagagggaagtcacgtaatggcaatgccgggctgtatatgattcatctgttctgaagctgatcttggatgaatcacctccaggaagccactggcatttattcatgcagccagcatctagttagtaccacaaataggctattgaactattacgtccactgcacttaaaagtagtaacttatctttgcagtttctgtatctgtgtttctcaaagcatgatccaacggtatgagattcacctcagatgtttttttcaaaatgcagattcctgggccctgctctagagctattagatcagactccctgggggtgggacctagaatcctgcattttttcacaagctttccagatgatttttatgctgactaaagtcttacagccactgttataagttgcagcatttgatattcataactaccaaggagatgagctcattttcccattttgcagatgagtaaactgaggctaagagaaggaaagcaacttgtccagagacacatagctgggggcagtatcagcgtgcacacccacctccagactcccagcccagagctcagtcacccccccacaacctctagggtcttccccagctccctcagaaggggtattactagttcagtccctatatctaaccctcctcctctttcttcacaccttccctgcagcttgaagaagaatacccacacctacttctacaccagctttgcagcctacatcttcggcctgggccttaccatcttcatcatgcacatcttcaagcatgctcaggtgggcaggacggtatcagagtgtcaggaatgcctcactgcaaatagagggacttacagagggatttatttgtaaatgcaagcagtccagagataggcactccccactggtgttggagcagtcatgtctgtgattctcttggccttccatttgtggttgcaagatggctgccactgctctaggcagcatgggcacgttagaggcaa

SEQ ID NO: 68467 - DNA, 2149 bp, Homo sapiens
ctactcaggaggctgaggtgggagaatcacttgaacccaagaggcggaggttgcagtgagccaagattgcaccaccgcactccagcctgggggacagagtgagactccgtctcaaaaaaaaaaaaattattcagtgaaagtggatcatcataaataaagatcttcatcctggtctctgtgttgaggaagaggagggggttggtcttggtgtctcaggggtggcagaggtagaaaaaaagtccacgtttaagtgcacctgcacaattgaaacccgtgttcaagtttcaaatgtatcttaagatttacttaatcgttgtaacaacactttgaggtacctacatcattcttacgatggggaaactgaggcagagaccgtaagggcgggcccagggggcatgtgaacccagagtgtctggcttccaagactcgtattcaccgtggtgccgtttgacatgatcaggataatggatccctggttccttttgggggcagcattggagaagggggtttggcaccgtcagtctgacagcagggctggctcctgcagtgtgaatgaagcggtcttgtgctcgactgtgaaggggggttaggacctgcttcccagggcgggtccagctttctgagggaaagccttcagagcctccatcaggccggcaccaggtaccagttaagcactgggcagggaacagaagtggtcaaacgccgcttgccgcgacttgaaactgctgaataaatggataatgtcaagcgctatggcttagggcagtagtacctccggttcctacgatcgtgtctggggtccctgaggagcaaggcaagagtcggccattcaggaggtcagagttcagctgttcttgcacaagcagggaagctgagtcaccccaaacacgggcaagactagcggtggtatcaaatggctatcaggggcggggcctcaggggcctgcccctgcctccccgccctgcgtttggattccctccagcattccgggccagggcgcgggaggcggaggccgaggagaggacgggaggaggctgcatcctgccctggtgcgtcaggaagggccgagcgagcgggaaggaaagcaccaccccccacccccgccgcggccacacctgggttctccaggcgggcaggggggcccccgggccggcgcctggctccagcaagtctgggccgcctccccgcgccgccccgcgggggccgccagatgggctgcccgcccgccagctcagcgacgcaggcaggaaacgccggccgggctgccaggaacgcgcgcaggggagggggcgggcccggccgggccacgcccgccggaggggaaggaggggccaagcaccgcccggcggggactggtgagctccaagagcctgcgatcccggtccctgcctttactagatgggtttccttgggtaggtcgttttacttctctgtgcctcactttccctacctgtaaagcggggctgcctgtctccgctctttttcccttttctcttttatttgtgcagcagggtttcactctgtcgcccaggctgaagtgcagtggcgcgatcacggcccactgcaacctcgacctcctgggctcaagcgatcctcccacctcaggtgggaatataggtgtgtcccaccacgcctggcttttttttttttcccctagttgaaacggcggttctcactcttgctcaggctggtctcgaactcaggctcaagcaatcttcccacctcggcctcccaaagtgctgggattagaggcgtgagccaccgcgccgtgcctcagctattttcgtgtgaccgtgtgatctcaggacactttctttcccttctcttccttggttttcttacctgaaaaatggggtgaacaattgaacctccctcaaccatgggctaagcctttgttttcctctccaccgtagccccaacacttggcccattgcctgaaacatgaaggcactcagtatttgttgtaagagtgactataaaggtttgggacaatcctgagggcctggctacagcaggcacttcataaatggacacaaattatcaaattacctagagtctaatgtttaccaacctgcggcttcaggcaagtgacttcccatctctgagcttcactttcctcgtctacataatggctgtgaggattaagtaa

SEQ ID NO: 68468 - DNA, 3532 bp, Homo sapiens
tgattattatttaaacaccaagcagatattaaatattagggctcagagagggcatgcgacccgcctgaattcactcagctgcagagctggaaagagaactcaggcctttttccccacgctggaaggggtagctggggcggagaggtggggggagcggtgaagaaaccccaagcggcccaagctgtgggtctgggttgggagactcgcaggtgtggggcggggaggtaaggtgacccttgctcagcgaccgcgcccgcaagaaacgcattcccaggcctcccgcccggggtctgcaggtgacgggctggggggagcacgggaactagctagaccagtttgtcgtctccatggcgaccgcccgcgcggcgccagcctgacagtccgtccgggttttatgaatgggtgacgtcacaggcctggcgtctaacggtctgagccgctggttcagacgctgacacagaccggcccgggaagggaggggggagactgtagctccgcagctgccgcgccgtgggagggagaccctgctctgaggtctttgagaagaaaatttaaaaagcagccaaaaatgggaaaaaacattaaaaaatcacgaactgttgcaggttcaggaaatttttgcaaggagctgcaaattcaaggtggaatcgaatgcagcctcactccactgcgctctatctagttcacttcccagccacccagccccaaacttactagactttcccgaattaattgctcccacccgggagggatctgggtaggccctccgggtctcaggaacacgaacagcaacattatttaggaattgagaaagcccaggggagcagatgtaaaggagcgcccgctttaaatttcggtcctgatatttgtagatcagggtccgagaagcatcttccaagagggtccggaaacccaggctctctgggctatccagagccagccgcttctccgttcgggcctcaatttctctcatctgtgaaatggagctggagaagtgagaaagtgaatatgggaaaaactgattcctgaggtcttttcattataaggcaatgcctgcttagcttccttgcctccttccagaggagcccagtgcggccctcgcctctacccgctgccctgcccggtgccctgccaccgacccacccttgctgttctgaaacccgggtcgtctttccacactgcgagcaggcactagacgagcaggaggctggacctaggagcgcgggtcacgcccccatgccgcccattggctgcttttgaacgttctgagcccgcccctccgggggccgtggcgtgtttataaaagacaagctgtggctccgcactctcattccacgttcttaactgttccattttccgtatctgcttcgggcttccacctcatttttttcgctttgcccattctgtttcagccagtcgccaagaatcatgaaagtcgccagtggcagcaccgccaccgccgccgcgggccccagctgcgcgctgaaggccggcaagacagcgagcggtgcgggcgaggtggtgcgctgtctgtctgagcagagcgtggccatctcgcgctgcgccgggggcgccggggcgcgcctgcctgccctgctggacgagcagcaggtaaacgtgctgctctacgacatgaacggctgttactcacgcctcaaggagctggtgcccaccctgccccagaaccgcaaggtgagcaaggtggagattctccagcacgtcatcgactacatcagggaccttcagttggagctgaactcggaatccgaagttggaacccccgggggccgagggctgccggtccgggctccgctcagcaccctcaacggcgagatcagcgccctgacggccgaggtgagatccagatccgaccactagatcatccttataccgacggggaaacggaggccagagagggcgtgggcgcttgcaccacttccgtcccatccttgcgggtacctggctatgcgggggtgcctaaggagcctggaaaaagcgctcccccgtcgtgcttcctggggaagggggcgttcgctgcgctcggagcggcgtcccttccaacccgccggtctcatttcttctcgttttcacaggcggcatgcgttcctgcggacgatcgcatcttgtgtcgctgaagcgcctcccccagggaccggcggaccccagccatccagggggcaagaggaattacgtgctctgtgggtctcccccaacgcgcctcgccggatctgagggagaacaagaccgatcggcggccactgcgcccttaactgcatccagcctggggctgaggctgaggcactggcgaggagagggcgctcctctctgcacacctactagtcaccagagactttagggggtgggattccactcgtgtgtttctattttttgaaaagcagacattttaaaaaatggtcacgtttggtgcttctcagatttctgaggaaattgctttgtattgtatattacaatgatcaccgactgaaaatattgttttacaatagttctgtggggctgtttttttgttattaaacaaataatttagatggtggtaaagttgtagtgacttcttgggttgaggggaggggcctgggctgggggttgacccctgaccctcttcacagctggttctgggaggagaattggagggctacatctggattgttgctcttaccggcctgaatgagtgtttccggtgtctttaaagtctattcttcccccaccatccctgcccatttccctgctccccagtgttataaaactaaatactccagacctctggggtttctcacagtgatcattgggccatctagatcacctggggaggttgttaaaatgcagatgaacctgccagggccccctctgtattgggagtattgagcaagccatttaagttggagaacctggccgctggaccacccacttccttgccaagatgtggataaagtgagacccagtggaaagggacttgcttagggccatagcttgtgagaggcagtgattctatcaccccattccccagttggaggtgcctcccccaacagcctacctctgggttccagcaggcagccctggggctcctggctcatccaagtgggtgagcaagttggcagggccaggctgggcacagctgccgagacacctgctctgggtccagactcggcctcctcactctggcctggctctgtcggcagttcaaacaaatctcccccaccaaccccggggctcctgcgtaggatctgaggagtggacgagtctcattacccagctcctgagcaggaaaaatatgtcattggcaagggtctaagaatcttcctggacatgtatgtggatttctactcaggggagcatgtatgagtgtctacgcctgtgtatgtaacaggagtaagctgatcttcccccactactcccacagtggggatgggccaactgttcacatataggcttgggggagggggtgtaagtaggagtatgcttgggggtgtgtgcagaagggcaaatgagagcacatgtgttctgcagataagtgtgg

SEQ ID NO: 68469 - DNA, 1378 bp, Homo sapiens
cctgggcctctgcgggtctggagtgaaggtggggacagctgtgtttgggcaaacccttcctcaaaagttcacgtggcaactccctgggctatcgttaggtcctgggggcaccaaccctcaaggattgctgccaggtaaacccccctgtattacatatggagaaactgagtcccaggaatgacaaagaacttgtcccagacaggtaagggctattaatatattttgtcaataaacaatagaataaaatcaatagcccttagcaccagaagcctggctctgctcaactgaaccctttacaaaaacgatttcatggatccctgtggggctaaaggcaagactgtgatcccagttttacagcagaaggaacaagctcagagaggggatgaacaaaaaatcaaatgaaagattatgatttgagcactaacattaagccaggtacaccccctccacagtttatggattttatcgaagaacccagtacttgcaggcgaattatgttctttgctacctcctccccaccggctgctgtattacagtactaacctcacggaatgtagtacagaataaatgaaataaagtaagtgtgtaaaacgtttagcacagtgcttggcacagaatgtttcatagttataaattattattgtcgcctgtgagtccttggagtgtcctcggaggcacacgtgtgcacgcacgcactctcacgtgtgggcccccgcctgcaagcccacccacggggtctgagcgggttccccctcgcgtactccgacatgcagggcctttttccaggggaggaaggggctgcggcgggggcctgggccacctcccccgccattcaggcacactctggattccacgtttccctctgttcccctttggcccagacccagcccatctggaggccggctccgcggcggcctgggagcgtttccatcagctgggcccgaggaatgcggagctatttaacctgagcatccccaggtgtacggaggcgcctggctgtctggggcccgcagcctttggcacagccgcgctagacaaacagcgcgccgcccccgccctgcccctccgcccccagctgcagccgggcctgggaaccggcgggcgccggcggcttgcataagaggctccgggcctcgcagagggaggggggacagaggccaccggtgtgtgtgcatgtaacacacaaaaccctgctcctttggaaatcattaactccttaacccctcctggacaggacgaagccaggagctggggtggaagatgccgagaaacccgaggaccaagtttcttgggcactggactctgcctttccggggctgtactgttaattttatttaagaaatacagagagcttattgtgtgctgggcaccatgctaa

SEQ ID NO: 68470 - DNA, 980 bp, Homo sapiens
tttttatatatttagtagagacggggtttcaccatgttgcccaggctggcctcgaactcctgacctcaggtgatcagccctcctcaacctcccaaagtgctgggattacaggcgtgagccaccacacccgacccatgccagtcactcttattgagcaccaggaactgccagccagagagagctccctgctgcccagtgtcacacacagcagggcttcctggtggcaggcaggtctcacatcctagcatggctgccggaaagaaaggaggtgagtcacagggccaggccaggagctgggcgaggctggggccagggtccaggcaggcgccactttccaggaaagggaagggaagaggaaaccagaaggccaggaggagcacagggaggggcgagggtgcccttatctccctggacctgccctggctggtgctgcttcctgctgcaactcttgcaaaacctcgttcccaacgctgtcctcaagcagggtgccccaggccagtacagggttgcatcaaggccttgtgcaaggggggttaaagggaggacagtggctgggagcaaaggcagggcaagaggcaaggcaaatgcgggttctaggcccagtgccacttctggttgggcacctgcttcacctcctgggctcttaggatccccagcatttttttttttttttttgagacggagtctcactctgttgccaacctctgcctcctgggttcaagcaattctcctgcctcagcccctccagtagctgagtctaccggtgtgcaccacgacgcccagcaatttttgtatttttagtagagacagggtttctacatgttggccaggttggtctcgaactactgacctcaggtgatccacctgccttggcctcccaaattgttgggattacaggtgtgagccactgcaccctgccatccccagcattttttttttttttttttttttgagacagagtctccctctcttgctagcct

SEQ ID NO: 68471 - DNA, 651 bp, Homo sapiens
gcctcccaaagtgctgagattacaggcgtgaaccaccgggcccggcctgttgttgttttaatagagacggggtcttgcatggttgcccaggctggcctcaaaatcctgggctcaagcaatcctcccgcctctgcctcccaaagcactgggattacaggcgtgagccaccctgtccggcccggtttttgggtttgagaccctaaaatctctgggcggcagagaagagctgggaagcgggccagcgctttccagagcacctggtctcatgcagctgcaaacgcaggcgctgtgcccgcccccgtcttcctttggccaccagcgccccctcccgggcagagcccgggctatgccaccgtgggcgagaaaggcggcctggttgcggcgagaggcggaggctgatgccttggtggcctctagtggacgccttgggaactgcagtcagagctgcaagcgtgttaggagagtgaagagttctgcgcacatgtaaaccctcagccccttctctcaggccccctttggctaccgtttcccccattctctcatcctctttcctcttccttgcttgtgacaaccccctatgagcctcattccctccctttttttttttttttttctgagatggagtctcgctctgtcgcccaggctggagtg

SEQ ID NO: 68472 - DNA, 1447 bp, Homo sapiens
aaataaataaataaataaaagagcgagtgaagacatttctggaagcacatggagaatgtgaggaagggacttgaacggctatggctaggggcaggagctgaggacacatcgtgggggaaggcgtgagtgggaggctggaggctttggtcttgaaccaaacaagatggcgattctaagctccagagagcccatacaagctctgaatccagtacctaagggttggaagtgtagctgtttttctggtgagtagggtagaggatggaggacattggggaaagtggccccccggcgagagaggtcgtgtgcactgagcgggagcagcttgagctggggctggctctcaggtcgcatcctgtggccaccagggggcagtgaagcccactccgaaaagcgggcggggcggggcggggcggggcgcctggggcatgtcccacctccaggcctgccctccagctggagctcctgaccgcttttcccagacccctcctggaccgctggacgcggccacgcgggactccgagagtgcagcacctcctctcttctcctggagagcccgggggaatgccgagtccatccccgcggtcaccctcaacatccagtcctcctccactgcttctaggttatctcattcaattgcccatcacacccattttgtagaggggaaagctggggcacagagagagtaggtaactcactcactggaagccacggctcgagaaatgacgacccgggacacaaatctggctgtccatcctcaaaaccggagcattcatgaaaccatggcttcctcactgatctccttgtttccactctgcttcccctccggaaccttctccacccatcagccagagttttgggggctctcgggctgtatcactccctaacttaccacctttctctggctgtcactgccctcaggatcaagttcagtcctctcaccccaccctctgtcatcatcttaaacccagcagcgccctctctcttagctctggacacaccagcttttcagcctgaagacaatgcctgctcatctggtgcatttactgcttcttccccaggcccactctcctgcctccccacttaattttaagttaaccgtgatgcactcttcaggccctggctctcatgtcaattcctccagggagccctccctgactcctgattcccagacgagctcagatcgcacttactatgagtctcttgggttgcactggcttcaaacatgcacttcatttttgtatctataatggcatcactattctaaaaatctgtcatccttgagtctctctgaagctatctctactccatctgaaatcctgtgggatgtgccttaaaaatctgaagtctgaccccttcttacctccttctctactaagtccttcatgtcttggtagaagaccaaaccgcttcctcatggtcgttgctttttcctcctttgcccttactg

SEQ ID NO: 68473 - DNA, 1130 bp, Homo sapiens
ccatctctacaaaaaaaaatttgaaaattagccaggcttggtggcactcacatgtaatttcagctgctcaagagactgaggcaggaggatcacttgagcccaggaatttgaagctgcagttatctatcacactactgcattccagcctgggtgacggggcaagaccctcttaaaaaacaaataaatactctgacctatgtcttgtctcctgtacaggagaggaaggaatgctacacagaggccaagaagaatctggactggccttgctgggttggctaatttaaaaatttttttgtagagacagggtctcactttgttgcccaggctgatcttgaactcctgaccttaagcaacccatcccccacccgcaaagtattgagattacagggtgtgaactgccactttgtttttcttttgttataggaatgtcagtcacagaaccttctgatgggtgaggaaaggcatcacacctttcccccacaccctacagcagctagagccgtgcttatgtctgtctcttccactagaatgaatgcttgtaaaggcaaaggttttgtttgaagaagtccccagtgcccaggactatgtctgtgtagagcagagctcagtaaacacttgccaagtggctgtgtctcccactagaatgtcagctcctgagggcagagactgtgtctgtcctgttcacatgcagccccagtgcccagcacacagcatgtacccagtaaaaccctgtcaccgtacaggtggataaattcaggcccagaaggaaggaaggacttgtccaaggccctcccctgagggcagcagagccaggaccagtacccagctctccagcggcccctcctttccccatcccggagcacacaagagcccaggctctttgttcactgagtaaacacagtttattactgaactgcactttcaccttcacacagactatttcaaagagctggaacaagtgtggggtgggggttgggggaggggcagatgcccctcaggagccaggaccctcggccagcttccctggaccagggcaggggagggagcatcaggccgtccaatctccgggcaccagctctccacgtgcacgcgcactgcaagccagcagctcctcacacataaatacagac

SEQ ID NO: 68474 - DNA, 836 bp, Homo sapiens
agaaaaatcttagaaatttagctgagtgtgttggcatgcacctatagtcccagctactcaggagactgaagtgggagaattgcttgaggctgggaggttgaaactgcagtgagctgtgacagcaccactgcactccagccagggcgacagaatgagaccccgtctcaaaaaaaaaaaaaaaaaaagggaagccatttttaagccccagtatgtttggcagcaaaccccatattctgagccagggccatggccctgggtctgtcaaggagggtaaagtagcctgaggccatcagctgaatgaataagcactggctcctgccagctgaggggaactggtgccacaggaaaaggatgtgacgaagaccaggagggaaagtgaaacccttccgtcctggcttcagtgaggaacaagcatgcctgtgccagacgaacccttccttcctcttgggtgactctggagggcccaggcccattgcttccttcctgcttggttatttcaggaaagaggtaggtggagaagaggaagaggctactagcagccaggaaaagtgccagggacaccagaactgtaccttgttctgtccttctcacatccctgcattggcaggctgtgagtcacctgcagagtcaccttatgctcctggcctcagtttccctgagggagaggctgataaatgtgtgctgaatagacaaacatggccttgctagaagatcgctgggagatggtaggaagggggtagggcaaacggagaggccttatcactcttttggcagggagttgcaggcggagactcggaagaagtgaggtttgtggttggaatccacttcctctggtt

SEQ ID NO: 68475 - DNA, 2124 bp, Homo sapiens
tgtaaaggtcttagaattgtgcatggcacatagttaactttgagtaaatgtctggtttattgttcttactagtagaccatggctcagcttgtgtctcggagccttctctatggcttacaagggcctgcagggttttctcagcttcacctagggccaggctgcttcattcctcacatgccatgttctgttcagactcaggacctttgcccacactggtgcttctaccaagctctgtcccacttatctctgaggtcttaatccacaggtcactttctcaaggagcctagctgctcacttcttcccccatctgaccatgggctctgtcccctaggccttgcccagtgctgggtccagagaaggtgctgaagagtctggctgagtgttggacagagaggagggaagagaagaaaggccagttcccactctcttcatccctttcctcactgcctggcaaaactagaaagaggccccaatatagcaggtgattatgcaaggtgtccagtattctccagacactttctctcaggataaggaaaggggacaggaagcttatgggaaagttctagaaaaggcatcttttgcactgtgctgaggcaacaggcaggaatggggtagcaatctccaaaaactaggacttctttctgaggtctttgaccccaagtgctccatagtccaaagcagcttctccttcctcctctccacccaaagctatggcgactcccttgtctgatgcagatcagtgctggatgctgtggggaagagagtactgggctgacagtcagtggatgtggattttgtttcccagttccatcgctgatttgcaggtgagtcctttcccctgcctgagactctgggaaagtatgggcctttccccaactgtcaaatgaagtgggaatcatctcaaagggctccgtctagggctacagcataaggagaatgaaagtaactcatgcagacagatgagtgactaccagggttctctctctcaggggtatccaaaagatccagtaattagtgtgtaaattgagaagcaacattctgaagtaggagaacttgttgccacaaaggagtctgatccttctccacctcaaagcccgctgggcattgctctgaacctgcaggattccaggggaagagagcaataggcacatctatgaccaggcagactcctgggcaaggctagatctttccacgctctagctcctgtggcctcgacctcttcaccccagcaccgcctccaactagtccagacaagtcccaagtattttcagccacctttatctgatcagaaatgtttggaattccacagcagaaggcaacagctctggaggatttggggaagggagcaaatccctgcaacacccttctctccccactgtacagatgaatgctcacaccccatgtaaccaaaaactcagggctgaaggcacccacggtgttgcatttccttctattctgtgatgtgatggaactgggaaacaaaacccacatccactgactgtcagcctcatactcttctctgcagcatccaacattgatctgcaccagacaagggagtgggttccttcttgttttctaccctattcatttctgccccagtccattacccctttaaggtgcagaacagtaagatgcctgagatggtgagaagagggctagggtactttgcctgatgtcgagggagggggcacccagaggtgtgctgttcacagtcaatacccagagcaccaccaccaggaggcctggaagcaactcactgtcccacttgatgtggcctgtggaccaccagaaatttcagagcgtcacagagatgtgtggttcgatcctgagcaggtaagaaactgaggcccagaggaagtgaagggatacctccaaggcttcatacagggacagagcacagcctggtctcaggcctccctaccctggagtgagacagtgtggcttccaaccctagttctgtgactacctggttgcaggacctggagcaagacactttccccctccaagcctggtgttccggctgcaaaatgaaaacagctgtacttacttcacaggcctagcagcagagttcaatggtccatggtaagcgttctgtaaatgttagctgctgctgctgctgttgtt

SEQ ID NO: 68476 - DNA, 8685 bp, Homo sapiens
tctcactatgttgcccaggctagtctcaaacttctggcctcaagcattcctcctacctcagcctcccaagtgctgggattacaggcataagccatcatgcaaggcaaacatatgtttgattattaattaatctgggtgatgagtttacaagtgatgattttcctatttttaaaattgtacatatgcattagatattctctgttgtatttatgataaatttctttaaaaaaaaaaagtgtactgaaacagtgcaatactctgagccagaactgtaacaactaactcaacatatgcagtgtccgaagggttaagcctgtttctctgcctgtgggtgggagggcaggcagcagctggggcacagtgggagttcctggctccagctggctccagcctggatcaagcaccacgcccaggaactggcacctgtagggggggcttctggacaggtggcacctgtagcccttggtgacctgatacatgtgagaggctgggcccagtcagatgggtggtgggcttctgtcagagcccctccatctggtaaggaagtttgctggtggcagcttggagctggtgagaaggggaagagggtctaggacacaggatgggggtggggaaggaagtgggtgggctgggctcagataccaagggagggtggtgggattagcacctgctgagaatgagattaggtttcttgggaagggctcatctatctaatgctccccgaaagctgtctccctgtggcttttctctgctggacagatggtgtctgagctgcctcttggagggcgggctccttgagggggtggtggaggtggagtgtgacctgctgcctgctttccagaggaccttgaggccctgggacttcttgtcttccaacaatagtaataaggattagagctaactcttactgaaggtttaccatatgccaggcattgtcctaagcccttcatacaaattaccctcatttagttttcacagcacccaactgcctatcatctagacagtaggcttacattgaaggaaactaaggcttggcaaagtcaaacacttgctcaaagtcaaacagtaagcagggcctggtggcgtacctataatcccaggaagatagaggcgggaggatcacttgagcccaggagttcgagacaagcacaggcaacatagtgagacctcatctcaaaacaacaacaaaaacaaaacagtaagcaaactaggacttgaatgcaggcagttcaactccacagccctagcaggaaatcactatcagccaaggcatcttccccttattaaatggcagtaaggactttccagtttcttaagccaaaaacctggactcctttctctctcacctcttatccagcaaacatcagcaaatccagttggtccaaccttcaaattgtattgaagctctgaccactgctcgccacttccaccacccatccaccctggtataaactgctgttatcacccacctggcttctcactggtctcctgctcccgctcttacccatagagtttgttctccacatcagagagatccttctaaaacctgtcacttctttgcttaaaaatcctccatgcctttccactgcccttaaagcaaggtcccatgtggccctacaagacctggcccctggtgacgtctcagacctgattcctaccactggcttactctactctggccatactggccaacttgctgtactttaaatatgttggagagtctttttttgtacttgctttattttttaatttttttgaaacaaggtcttgctctgtcagccagactagagtggagggacaggatcatagctcactgcagcctcaaactcctggatttaagccatcttcctgcctcagtgtcccgagtagctagctaggactacagacatgcaccactatgcccaactaaactctggctttgtcgctctggctgatctcaaactctcagcatcaagtgatcctcctgccttggcctcccaaagtgttgggattataggcgtgagccactgcatctggcttttttttgttttacggcttgctgttctctatgcctacaacactattcccccatatatccgcacagctcatgccctcactgcattcagatccaatgtcactttatcagagaggccttcctaactaccctacccttccttttcccatccctaatcccttttctctgctttatttttccctatatcactaaatactacctcacatgttatttattttttagaggtgggttgtcactatgttgcccaggttggtctcgaactcctgggctcaagcaatactcccacttcagcttcccaaagtgctagaattaaaggcgagagccaccatgcctagccctgacatgttaatttacttaaaatctgtcacccaccttggaatgtccactgggtgagaatagggactttggttcgttcagactgtatgtccaacctttagctcagtccctgatatatgacaggaatgcaataaatacttgttaatgaacaaatgaatgaatgaccaatatccctcaggaaatgactcagactcaaaggggagtaaggctgcctgagtgtccttggctttcacagccctgatgacctttggtaccccatggcagcggtcaacgtccttccctattatgaaatgtcctgggtgcatagcatcaccactgtgtcatctacttgtgcctgcacccatgcaaacacacagggacacaaagctggaaaagggctggttttgagaaggagtaagcctgggcagttgaaacccaggttcggtgtactctagggcacttacttctaggtgactgtccttgccactgctggcgtaccaaggtctcccagtcatatgcccatgcactgtatacattttggcatttattctcatgaataaagtgtcattagaggccagacactgctggctaacgcctgtaatcgcagcactttgggacgtcaaggtgggaggactgcttgagcccaggagttagagaccagtctggacaacacagtgagaccttgtctctactaaaaatttaaaaataagctagtcggccgggtgtggtggctcacacctgtaatcctagcactttgggaagccgaggcgggtggatcatctgaggtcaggagttcgagacgagcctggccaacgtggtcaaactctgtctctaccaaaaatacaaaaattagctgggcatggtggtgggtgactgtaatcccagctactcgggaggctgaggcaggagaatcacttgaatccaggaggcggaggctgcagtgagccgagatcaagccactccagcctgggcaacagagcaagactctatctcaaaaaaaaaaaaaaaaaaaaaattagctaggcatgatggcatgtgcctatattttagcttcactattttcacatgtaaaatggatgtcacagggcatatggctccttggaatattacatgagataacatatttaaatcattcagcagtatacttagcacccatggagtgctcaatggatggtagctctgtagatcagctctcaatagagggacaggccattagataagcttggggaaggcttcctggaaaagactggcttggtactggactttggagcctggatagaatatacatgaatgttggctggaaggagcctattcaaatggaagagggaagaggacaggctttggatgctggcagtttgctgtgtaatctttaacaggtgactttcttttttttttttttagacggagtctcgctctgtcacccaggctggagtgcagtggcacgatcttgactcactgcaacctccacctcccgggttcatgccattctcctgccttagcctcccaagtagctgggactgcaggtgcccgccaccacgcccggctaattttttgtatttttagtagagacggggtttcaccgtgttagccaggatggtctcaaactcctgacctcatgatctgcccacctcatcctcccaaagtgctgggattacaggcgtgagccactgtgcccggcctaacaggtgactttacctctcaaagtctcagttttcttctctgtagaatgtggataccactagagcatacctcataaaactgttgggaggattaatgaggtgctatactgataagtggaaaccactgaacagaatcctcagcatgtgctgttgctgtttttttttttttgagacggagtctcgctttgttgcccaggctggagtgcagtggcacaatctcagctcactgcaatctccacctcccgggctcaagcagttttcctgcctcagcctcctgagtaactgggatgataggcacacgccatcatgcctggctaatttttgtatttttagtagagatggggtttcaccatgttggccaggctagtcttaaacttctgacctcaagtgatctgcctgcctcggcctcccaaagtgctgggatgacaggcgtgaaccatcgtgcccagcctggtgatcctttaaaaatgtatgtcggactgtcatttcttggttcaaaaccctccaatgactcttttttctgagacaggattttgctctgtcgcccaggttggagttctgtgagatgtgttcatagctcactgcagccatgaactcccaggctcaagtgatcctcccaccttagcctcctgagtagccaagattattggcatgtgccaccatgcctgacaaattttttgtagagatggaggtctcactgtactgctcaggctgatgttgaattcctgggctcaagtgatcctcccacctcagactcccaaagttttgggattacaggcatgagctactggacccagtcgattttccttctttttttttttggagacggtctcgctttgtcacctaggctggggtatagtggtgtgaacatggctcactgcaaccttgacctcctggactcaagtgtttctcccatctcagcctcccgagtagctgggaatacaggtgcgaaacaccacacccggctaatttttgtatttttttgtagagacagagtttcgccatgttgcccaggctggtctcaaactcctaagctcaagcaatctgcctgcctcagcctcctaaagtgctcagattacaggcatgagccaccacacctgcccttttttgcttttcaattagtgagtcaaggggagatctccaatatatctccaatagtgtggtggctggtctgctctgaaatgtaagcagtttttttttgtccccttgaccagactctaaaagtcttaaggtcaaaaagtccacaaataacgttttgtttacccatcctacagtgctaggcctaagcctcggacttaggcaaaggagatcagaagggtcatatggctaaatgtaggtggacaagagggagtcggggagggccttcctgtgaatcctcctgcctctcaaggacgctctgttcccttagcttgagaagccttgaggaaagctttttccatgaacaagcttttaaaaaccttttagctctttaaaagcagcaagtaccattccagtcatgaccctgcagacaggtggaacacccatactccagcctcattctgaagagacttgcagagcaggaaggaaggggtaatgactttcagttccagtaatgtatctagaagcagcagctgattcagctagatgatgtcaccttcccaaacctcctgaccagcagctgagatggtaaaagcaggaaacaggggatactcagctggctaagtccgaacatgcctctggcaaaggcctacagtaaccccaggctctggaggcatcctcctgaagatgaggagaaagagtcctctcagctgggagtacagtaggtgtccttcaagaccctcaaaccaagatgcttctccaactctccttttgctaagcagctttctgcatatcctgaaccaacaatccttcatttattccaagagtggagcaggggaaagaagcctggctttagagccagcccaatctaggtccaaatccaggattcaccacgtaaagctgcaggaccctggcatgcaacttcacttatccaaaccttagtttctttactggaaaagaaagtagggctaatggaccatttagcacacagtctaggtgagggaattaaatgagaaaatgcatgtagagtacctgacatgggctaggtgctcaataaatggtagtcaaccattatcccattggatctctgcagaggagatttgaaagatcacctccatctataacacaaaaggaaacaaaggtaccaactagacccaacagtgtcaaagctgagtaactgagttggcccatgcatatagttgcttcctagatattccattactcagtttcattttctgtacagcatttaacccaatccctgaaataatcttgtttgtttctcgggctagctgtctctcccattaaagtaagagttctacaagagcaatgtccttgaccttatcttgtttatcttagcatcttcagcatgtagcacagggcctggcacatagttggtgctcaataaacatttgccgaatcgccaaatgaatagcacctgggatggccaaaagctaaactgacaatggccccacacttaactcctcccctcactattagttgaaggctctggctcccatttcagaagctgccattgccacctgggaatcagcagcccaaccagtggccagcatgggcattagtccctgggcacgacctatctattgggataccagggctgccaaggagggccttggaatcctccccctggcacttgaagatcctacaaacctggttctagctgacctttttggctttattacctaatgaaagagacccctccacatatgcctaaaatttgactgccactgcccacgggtctcttcttgagagttggtctcagcctgcaaatcttaacccacattgactctcctactgggagctacagcccctcttttctccgctttgtggtaaggctcggtgtaaacctcacctcttctgtgaagtccttccctcatttggcatttagcatttattgttggcttttacaagatctcctttcatgtatattatgtcttttctctctaattcaactggaagtatcttgagagcagaactgggtttccaatggcaatatctcaattaataaaccttctacagaaaagactccttgaaacaaagttagctaggtccagagaggactggagaggggtctaggctcctccctgctggaccagcccctttggcaaaaagaggagatcgtgttgcctcaatccaggagcccagctgatgaggcaggaagggagccagcaaatcctagactattaggtgcagtctgggacaatcccaaggtcatctatgtaattagattttttttttttggagacggagtcttgctctgtcgccaggccggagtgcagtggtgtgatctcagctcactgcaacctccgcctcctgggttcaagcgattctcctgcctcagcctcctgagtagctgggattacaggcacgcgccaccacacctggctaattttttgtattttagcagagacagggtttcaccatgttggccaagacggtcttgatctcctgacctcatgatctgcccaccttgccctcccaaagtgctgggattacaggcgtgagccaccacgcccggcctgtagttagatttttaaaaaaccatcattttaaatgaatctgggcaatatttagttataaagaatggcataaaaactgctcagttcaaaggacttttgtaacatacatttgtgtgaactaattttacttttggctcgtcttcttacccatattttcctttcacccgactcccttagctacattatccttttggttgtatgaattttcctaagttgcttccaactctttgtaaaacagagcaaggttccaataaaaaataagattggtccagttttcttttaagtggtacagtggtatatataaaaaatgatgttccaaacaactcattataacaattaagaataagtggcaaaaataatgcatgtaaatcactgaatacagtgcttggcacttaatgagcattcaaaagtaggatgaaagaacactattaattctcattagcttctcttctctgggcctcagttttttcatgtcttaggttttgttcatttgtttaataatttattcaaaaagtattcactgaatgtttactacctgcaaagaacagctgcagacactggagatacaatgatgaacaaaccaaacgccctataatcatggggcttatattctaatagaagagacagacaaaaacaagtacacaaacaaaaagaaaattccaggtagaggctgttgctatgacaaaactacaagaagactggagagggatttagaaatagcatggctactttaaactgaaggtcaaggaaagtctctcagaggaggtgaccagcaagctgaaccaaatgtaggcctcagaaaggaaatactaggggcagaacatttcaggcagagaaaagagcaactacaaaggcccttgggcaggaagaagttatgccaggatccagaagcagcaaggaacccatgcggcttgagtggagtaagggagagacagaatgatggaggggcagccaggaccagatcacacaggcctcagaggttggtaagaagtctgggttttgctgggtgcagtggatcacacctgtaatcccagcactttgggaggctgaggtgggcagatca

SEQ ID NO: 68477 - DNA, 3316 bp, Homo sapiens
tgcctcccaggttcaagcgattcttctgcctcagcctcctgagtagctgggattacaggcgtgcaccacacccggctaatttttgtatttttagcagagacggggtttccaccaccttagccaggctggtcttgaactcccgacctgatgatccacccacctcggcctcccaaagtgctgagattacaggcatgagccaccgcgcccagcctgaacttggtttttaaaagaccactttggctggagtattgggcaagagtgattttctaaggtcccttcccagctttttccctgtcattctaggctgccatgaactggttgcctgagccataaagacacagtttctggattagagtgactgaagagcttagagtggttccttgcccttggccggagtagggaatctgtgtcaccttgttctgcaggagatggaggaagtgactccctcagggaggggtgggaatcccatcttggaaaacatcctcaaaccacctgtattgtttctgcctcctgtgtggaagtttctgccaatgacacagtgctctctggaatgcacccccccaacgcacacacccaatcttccgtttacacaggcatagctgtactttgcattcctcctaggatttagttcaaagctagcctacaggaactggtcgataaagagttactgattgattactaaagaaagagaatattctcagccattaagcaaatattaatgagttttatgagtattatgttggtctctgggggtgcaaggtgattaaatgggtttctagtcttcactgagctcagaattcagtggatagaccaaaaactacagacaactacaatgctggatacaatagttataacagcaacatttactagggccttccttatccaggtaggacaagttggctttggagccagactacctgggttcaaatcatggttttaccacttactcgctgtgcatctttgaacaactttcttaacttctctataggaataataagagaacctacctgagtggtactattttgagaattcaatgaactatctcatataaaacacttaagtgcaagtgctcattgttaaatattactaaaattaccttaatacctgcaccatatgatcttacatacattcttacaaaaggctcttaaatccttacaaaaaccctatgaagtattattattatccccatttttcagatagggggactgaggctcagaaatggaaaggaatgcacccaaaatctaacagctgatatgtaatagagaccagattcaaactcaactctgtctgattccagagcccatacttccaattaacaaaatgatccccttttcataaagagccccagcacagtgcctaacacacagcagagactttataaagggagctatggttattatgtcattgtccctggagtttccagctgtagatgctgtagaacccagaggagggggcctctctttcaccctaaagggatctgagaagggtttaaaggtgctgggtgccaactacaggctttgcttgggagtcccaaaggtttccctcactggggcttgggatactaatatggaacctacactagcaccactaaatcagacccagaaagttcccccaggtgtccaaacacctgcatgaacaagcaggcagtttcctctaggttgacttcttgtctggccctacacatctctcagtttcatcactcagccaccagccctgggtctcatgtatgcacctgctgcttgacccagtcccaggagacactgagccttagaattgggctccttctctggaccttgccccaaaggctatttctgagtgactccctgggacttccctgacatggtaacccctagggctccaactgaacatgggtgctgtgagcaaggggaaattcttctgagtagcagatggagagtgggtagaacaagaggcagttgttctggatcagagataagcatggggtgagaaccatagtacactggattttatgtttaagcagcactgatcctcgatagttcagaactcccgcactgaagtccagcgtaggcaggtaaggacaacctggagccaggcattaatactcacttctacttcccatctgagtcatattcagagtctggccttgcctggtactttgactgcagaaggcaacccatggctaaatcaaggcacctcaagcctcatagagaaaagggaaagactcagcatttgctgagcttttactctgcactaggcaatgtgtaagtgcactttacatgtaccattaattattaggaatgtttgttaatccagtcactaaacactcagccaccaagtactaggcccagcagtagctgttaagagtgaataagacatagtttttatcctcagtaagctcagagcacctcgtttagtctttctcccaacaaccctctgaaatgagtattacttccactttatagatcttcaggtttacagagggaagtaacttgtccaaattcatgaagccagttaagtgataagatattgcttctactcaaaaaatgcttgttgactgaatgaatgaatgaatgacacagctatggctgtgactttagtcaaggagtagcaacaagaccaaatatttatagttctcaaagtgctttttcatctatcatctctttgggcctccctgctagcccatgagggaggcaaggcgggtgttatctttcttcaacatatgaggcaacaggcagagcttgggcaagaggcttgaggccacagagcaaacaaggagtgagtggggccatcctggaaaaactccagagttcccacaatgccatgtttaatcattcaaacccatgtcaagcacctactgtgtgccaggcatgctcctacccactttaaatacttaactcattaagtcttccactcagtcaacaaacaaggaggaccctgggaagataaaacaaaatatgccccattgccaaacgcctagtcaacaacactggccaaacctctactgtgtacaaggtatgacttgggccttgtagaggaggtaggggacaaggttgtgagccaaggccccaagcttcaggtaccttaaaatctctaaactcttggtccaaagatatccacatattctgtcagcctgaaagttcactcctggagagtagatccaatagcaatgacaacaatttgtttaccagtgattgcaatgtgacaataacagtaataatagtagcttgttatactaagtaattactatatgctgggctccttggtaagtgctccatgtatcttttcaactattttcatgctctcaagagtgtttcaagaaaagcgctgtaggccgggc

SEQ ID NO: 68478 - DNA, 1288 bp, Homo sapiens
ggcaggagaatcacttgaacctgggaggcgaaggttgtggtgagccgaggtggcaccattgcactccagcctgggcaacaagagcgaaactctgtctcaaaaaaaaaaaaaaaaaaggaaaaaagaaaagcactgtatattgttacctcttttccatacatgaggaaactaaggctgggaaagattaagtatttgccaaggataactattaagcaagtgagactcaccaactcaacaacggtttgtcaaatttcgtacctgactcttaacaacgatggaatttctcccaaggaggcaaggcagacaccaggaataccaggagcagctgctgcctgagagagtggggggcctccagagcccccagaagagtcttcctaacctctttccatcaggttttaacatcacactgagatggggaggtaaggaaagaatggttaggtgtgctcaatctatccttagggcaacaagggtctggccctctttgttgaccctcaagggaagaagtttgtgacttcccatttgtcactcaccaaccctctagagagaaacagaagggggcaagggcatgggagtattttctccctggggttggggggcacacacaagggaagaagcagcagccttactggctctttcctcccctgggcaagaagcctgtacatgtgatacagtgtatgtcattcacatggaacccccttggggaaatgccaaggtaccttttggacccaagaagcctcagagaggagagactggcaaagccctgaactgcaagctaagctgacaatttctaagcattgtaactaggtcatcaggttcctggagaagccagctgtggctgggggatggggaggaaaattttgcagcctaccaagatccctacttccctttaggccccaccctccctgaaatctgcacctgctcccaaactgacccctccccccagctgagcccagctgtcaacggctcccaatgccccgccctgccttccttaggccagaaccatgggggcctcttgggcaggaggtacctgattgccacctgagctttgcagagaaggagctgtggggcagggaaggattggcctctcctagaagatatttcttgctccaccagggcagcaagaaagttaggcccctttgggcctacctagggtacccttcctggcattgtcactgcaggtggcaggagacaggtgatgtttaccctgctgaggccagagttgccaaaaggcttcaatcaatcctttgaatctgcacctggccctgagtcccaaaataacaaccagggc

SEQ ID NO: 68479 - DNA, 4333 bp, Homo sapiens
aggaagagattactatcatcttcattaagagattagtattatctccatttacagaccgggaaactgaggcctcagtggaaattgtacaaagctacggtgctgagaaagctatgattatttaagctgtcagtgacctctctccttcctaaccctttccactgttgatgcagaagacagtctggattggcaatgcagttggctagggaaagggtgcaggttgatgatacaggctgagggtggaggcctctgggcccagtaatcaactgggtagctgatggtggaagctggcccatttggcagaggcccagggcccagcaatgcagtcaggtgggctcaacttcttccacttttggtgtttactctacaggtttggcacagtttgcctcaagccattcaccaagtgtttgaggtctattcctactgcttcaaatgagtttgcttccttaggggcagaaactttttttgtagcctaacctgtatctaataataacccttcatgttcattgagcaggccctggctgagtcctcacccaaccgcgggccctgagccaggtagtcagggtaaaataagccagtctgggcttgtaagaagcaatgacgcttataggcttttgcatcagacacatctgagtataagacccagctctgcctcttagaagatctgttactgtggacacattagggagcctctctgaaccctagattctccatcttcacaggagagcatttgtgagaaccaagtaagatgattatattgaggggataaacacagcacctggcacagagcaagtaactactcaacccatagtatctgttattattaccaaaaaacacacttacatttcactttctcattcatgcctcacttactctggtggcttggcattattctctcaggcttatggatgagaatttgaagctgatttgctttgtgttatgccaccagcaaggagtcaagctgtctcaaatgtgaggccagagttttgtctgtgtatgtgttgaaggtgattaatacatatcaactataatgaatcttgcctggtgtgtctggcagctgaggagaaggatggatggcacatgtagactgattcagatggcagagggacaccagcaagacccaaggtgtggagtatggaaacagaccattgagggatgggactcagtctcagttaccacaatatccacagtatcactagcatttagcacattacaaagcatttgtcaatatttgctgatttaacaaaagaaatgaaactccaaggacagctccaagccacacatccagctttaggagaggcagacagtattgataatactgtgttaaaagccagaacatgaattctaagtctgatgctgccatttactgtgggacaagaccccttatcttagtttcccctctggaaacagggctgaacatacccacctctcctacttcactgggaaataacttataaaaggagtttggtaaattgaaagtattatcatgcacataaaaagaataatcatgacaatacagactactaagacagtagagtgtgaatcccagctcttcttggtactagcctgtgaagctctgggtatatcacttttctctgagcctcaattttctcaaccataaaatgaaggtaacaacacctactttgcaagatttttaaggactggagataaaaaggacaggcttcagagtaagagagacctggtttcaaatgctgactctgcctctggctaactataagccctcccaaatctcagtgcctataacgataaggttgttgggatagtaacaaaaacagcgtcactaaaggctgtcacatagtgagcactggattaatgccagcagtcacctagacaatagcgcactggacgagggaacacagtggagcgtttaaaagggggaggttggaagctaccctcccaggctttgcctcttactaactgtgctactttgcataaattgcttaacctctctgtacctcagtttcctcatgtgtgaaacagggataaaagaacctacttcagagtgctgctgtgagaatgaaatctattaatacatgtaaagcactttgaacaatggctggcatagagtaagcactcaataagtgttagatactattaatagtaatgttaacaataatattaatcaccaactggagtaagagggagggactgtttatcctgggacatgggtgtcccatgaaataattacagagaagtctcagcagctgtttgtaggcaagtttttagcctcgaagactctatggaaaggacacgaggctgggggctcctgagcaaatatcccagtcccactgaccaggaggccagtctctagggaagcgagtcaggctccttggaagggacactatgttcctatccctgcctgactcgggggaacaaaggcacgtgtgtatgtgtgtgtggccagggaggagggaggggaatgtttccctttcaagagaggaacaaaggatctgaggcatagttgagtgcgttccaatcccctcccaggccagctcccattcctcagatgattgtccaacaaggttttcaaccttctagcttcctcctcaaaggtgactgggggaggggaaggcaggctctgtttcactccaccctttatcatcaatttccaagaggcaggatttatatgtgccaaacctcaagttatctcttaagaatcccatcctatgcaggggtggggtggaatctcctaggggaactcagggttaatggatgacacagggcaccgcaagcaacaggtttaatgcatctccaggggaagtccaggactgaaactgctaatgcgtgatggagccaaggagagaacccaggaattctaactgacctccctcacagcctagcctagggtagggggtaatggcctggcagaaccaagtagaaaggcattttctaaatcttgaagggatgatcacagctggaggcagaagccaggtgaaggaggaaagggtagggagcaaagaaagtaatggacaagaggaaaggcagggacacgtccaaaaaaagtagtttttggggggcggacctctagggacattgctttccagtttccacactcttgccggcagggctgggacaggaagcagtccatggaagtcatcgcaatggcatttcctgaagagctggagaaaaacctccagttccgaggggagcactggaggctgcccaaaaagctgtgtggctcagagttcactgtaaggctcaagcttggcccgagagtctcatcagggatgaaaccaaatagcagacggtcccaaaggcagtttctttatacaaaaccacaatttcaaaaatcaatatgtaaaaaaagagaagccagatgatgtgagtgaagagccctaggatgatatgaaagccttaaaagaatgaattaattcacccaatcttcagaaaaaggtggcattactatagccatttacaagttaaaagacttgcccaaggtcacacagcaagctagtagtcaagttccaatttgaaagtccaaaaactgcctcttcctcctgatgtaaccttgggcaagtcaattcatctttctcacctgatttctctcctttgaaacggagatgtcatccttcctgctcacctctctgggtggttataaggatcaaaaaggcaaggtggatctgaaagtgctttggaagctgtaaggtgttacataaatatagggtagcactattgtgggctcagtgataaactagcctgccttgacactgggtttagttaaggtgctgacatatctgtcaacaggagagagccattttaaaatataactaatgtgaaatatgctgtaatggtggaatccgccacaaggcctaaggatagagagaaccagcattcctttattgcctacttcaaaccctccatcttgcataaagggaaactggggactgggggtgaagtgacttggccaaggtgagactgagagtagaactgggattccaactccaagaccagtgcttacaccaccattgcacacaaacactgtggagctcctactacaacagaaatgctgcaagggcctgctctgagatgtgctgatgggtcactatggtatttagaaaaaggagagtggatgctcaagattccgtgaatgggtctctgacatgcgttctgtggaaagataataagaataatgataccaacatggctccagtctttatgcatctcaggtatacctcactgtgtctttaccatcgccccctgtgaggcaggtattattatttgtcccaagattcagagaggtaaaaggagcttgcataggtagacacggatgagttgggaactgaactcagacaaatttcatttactcagacagaaa

SEQ ID NO: 68480 - DNA, 5754 bp, Homo sapiens
tcacttgaacccgggaggcagaggctgcagtgagctgagatcgcgccactgcactccagcctaggcaacaagagcgagactccgtctcaaaaaaaaaaaaaaaaagaaaaaattaataagcagctcactctgggcaaaaccctgatgcccacttgaaacctgccatgtctgagttttaccagtgccagaatctgaggctaccaacacgcctctgggaacctgctactgccaactatccttcccatagctacctgaacaaagccagttatcagtccagagtgagcaccttcacaggcatggtttgcttggcccaacagcatctctggctttctgggccagcatgtctaggtcactttattactccctggacaacttgataggatgaaaagtgttggctttagaattatgccaaccttggtgtaaattctcattcagacacttaactggctgagggacacctggggtcagtcacttaggcacaaagaccttcatgtgtaaactgggaataaactcaccttccttggaaggttactgtagaatatatgaaacagcatgccgtttccatgaaggaaggtaccatgcgtggcttatggccagcacctagtacactgctagcttcacagtagatgctcaagaaacactggttgcataagtagaggacctaacacagtgcctagtacttaacaggtactcaataaagactaatttccttcccctttcctgtagggatgctaaatttagaacatagccctgagtagaatagcccataactcctacccttaaggatctcccagccgcagtctccaggataattacccgatgccaccacagtagccagtcggtgcagcttggaacaggataatacctgagaggaagggggcgggtaccttctacccaggctcaaaggatcctgagtcaaatgttctttactccctggccttagggagagaatgtgtgctcagaaatggttctgatataactggctcttccacacacatcccctctgttcaccaagaggaagtgacatgtggtatgttgtccaacaggctctgatgattcttaagcaaagagatggaagatggaatttcaaccccatggagatctaataaacttacccagagttgctgtgtctaagacctctttcatatgcaccactgggcagctggcaattctctggtaggggtagccttctgcagaggctggctagcagaccaggcacctctcccagactgccttttgtttatagctggcaacaacccacctggtattaggaccactggccaaagacaatagtcaggcaaagtgggcaagcagcctcaatccctacttggagatgcctcagagggtgtgtctgcagtactggaatcctgtccctcctgtaatcagctgaacaaatatttgccccaaaagagaatcaaagcaggagggaacaggagaggtcactgcacaaaccaacaggaactatttaatcatttatccccctagagagttcatttacagaatggctttcaagtctagtcagctagctcaagagaacccaccacctttacctcccctgaccccaccccagttatctgacctctattgacttgacccccttgccttttacaagagctggcacagacgagttgaaattgcaaagaaatgcaaaatgagagagggggtggggttccagggcaaactcaggaggtctcttgctcagtggtaaagtgaagtgcctgccacaccctaggcccagcctatagacagttgcattcttgacattcctgagtccatggtgcatgtccccttccacctcagctccttcaatggatgacttattttccacagcttgatgcttttctgcatactctgaggggatagaacatctctcataaaacctgcacctccgctaggtagggagataagcaagaaaacaggactgaattcactgaagagcaaaacttgcctacagtgaccactggtaaagaagctttcaccaccatctcatcctggctcagtgatgggcaggagaactctccctccctggaaagggaatttgctggtgtcagtcactgtgctcacattatcgccaagatttacaatacactgtaaggcaaggagagcttgccacattttttagtgaaagaaactaagcctcaagaaagtaacccagcctgtccaaggtcacacagctagttacatgacagaactggaacttatacctgcatgtgaagtctgttactaaatctcaatgtcccacagagccccaaagactaggttcttgctttgccagcaaacagtgcttgaagaggcccctgggctctggccggaaagtaacaggcagagcagctggagctccccaaccgaccccaggcaatgaggtgcaaagtcccctggcttaatgtgtgacacagcaagtgctccacaaacaaggcaaccatgcagaaagtcgcacactttgggggaaatgaacttagggggcgcagtgcaaacacaatctgcacagcctacactgccccaaaatctgacaattctcagccattcaacccagtgggaactcctgcctatggccatgccctagtctgagaggagagtgccatacacgcaaactttgaaataaagggaacttgatttgggggagagaagcccaggataggactgagaccccttggggggaacagatggagaggtctgtgggtcattgatgctcatcatcttctccaggcattatactcatcacccctttgtgtgtgaaccattgtataaggtaagggaaacaccgaactaacttcctaccctcacaggtttgggacttaatgaacacataggctacagttttctttgctgagaaactggaacacaagtatggaatagtggagtcatgggggtgaccagggtgaaagatgcctgatctctgaagcacagggtcatttgtatttccaaggagttaacctcttgtggtgaaatgaggccagtcaggtttcctcaactatcaacgtctccaacaatcacccaacacaacagaaagagatacagaagaagggctgttggggatctctgaccagaggccaaagaaaagggacacacaaggggcttggttcttacccagccgccgttctcctggatccaaggctctaggtggtcattcaggtaagtggccatccaagctgcgatccgactcaccaatacctgcatctccttgtctacgctttccacgcacagtgccccgccgaaggagaaaaaggccacaatgcgaccccagtttaccccatcccggaagagttcattcactacctgttcaaagctctgatatgctgtccctggggtgatgtggagctgggatgtcaggtcactgaatgcccgccggtaccgcagttcaaactcgtcgcctgcctccctcagcgcttgctttactgctgccatggggatcacctcccgggcatccaaactgctgctgtggccagtggctccattcaccgcggggctgtctgccaggtgccaggatgggttgccattgatggcactgggggtctccatctccgattcagtcccttctggggcctcagtcctgttctcttccacatcactaaactgactccagctgtatcctttctgggaaagcttgtaggagagaaagtcaaccaccagctcccggttgctctgagacatttttataatagggatgggctcaaccagtccattgtccaaaacacctgctcactcactgagtctcgtctctggttagtgattctcttctaagatccaaagccaagataagattctgaagggagagaaagagcttcaggaaaaaaaaataattaatatgcatgccatttaccctaaaaattccattccccctccaggtaccagaactggtttctttgtgggtcttacgaaggtctgggtctaggttccaagatacttcacttaagtcaaatcgaaagcaccagtggactctgaatctcccaccagccttttctacccccgtcttctccgaaatgccttcctcggaaagtcactccctgggcagtcccccccgccccactcccgctcccccgcaccacctacattcaaatccgccttaggcaaaggcaggcaggtgcagcccccggaagatcttttgtatcacaggtcgggagaggaggtggctgcggggatgccggtaactcagccggcctcgcggtggctggcaaaaaaaccagctccggccggagggatcatgcgacccggcaggctgggagcccagaaggcgacacaggaattgcgaagctcaggaaccagccccctcgcttgcttcctcctccatcgcccggatcgagggcggccgctccgcagccgcggcctcctgccacccgggagcccagccccctctctcttgcacgccccttggctctccgcctcctactgggagccaggagtactctcccggaggtggctggtatggatttagttggtttttgtttttcttttttctatttaagcaccagcccagggtgaggtggaggcgtccgaaaccctaaagggacttctcaatggggttcaaggtttcagtgagggacgcagggagggggaaactgcctcagatctgcaatctgactttgggaaggccacccccaggcctgtctgtgatgttgaaggccggagacccccaacaaatgccgctggtttgctctgaattccccaaaggcccagaacgtggcagttggggattgccgggtcctccattccccgcccggacacaatggccgccggcgccctgcacaaagactgggtgagggtgaggcgctgggcctctcctcaggtcaggaagaggggtcgaggcctgctcgacggccccacagctgagaccacgttttcctggggacaggcccaaagtggctttctggcgcccccgggagggctccggggccgggggctgcacctctccggagcccagggtgggccggctgcggcctagcggcttctcgagctcactaggccgggtacccgccgagccaccgccccgttgctaggcaaccgccctcccccgggggcgccccctagaccttcctgagaggaggggcctcgcccccggcggtccgccccagcgcagccaatcagcgagcccagccggcacggaagcgggacggcgaaggctcctattgggcgcaacggctgtcacgcacaggggaggcggcgctctcacctgcgagccccgcgagccgtggggggccacatcccccttcatcggcccggtagcttccagacgcaagagctcttcgcggccgagttccgcgccgcggacccgggccggcctacctggctgccggcctacctggctgactgctcgcgccgtctctcccgaacaagccggcctcagtttcccctgaagagacaggggaacttgcaagctcagtcacttccggtgccgcggcaacgcgcgcgagcccgagacgcaaagggagtgcgcgccttgagtgactggcatcaggaccggggagagatcgccccctcgcggtagatctggggaatcgggaggcgcaaaaaatcaacatttataatcacatttccatttattcattcagtcagtcagtcagtcactcatcagtcaatcagcctatttcatccgtccgtcagtttatatatagaagaagcatcgccttgtggttaagcactttgtctggattctaactctgctagttaggcaagtttctcaactgctctgtgcttcaatgtcctcaattgtaaaatgggtaatagtaccaacctctctcgttgagctattgtgatgat

SEQ ID NO: 68481 - DNA, 902 bp, Homo sapiens
cttggtctcaagggatccttctgctttagcctcctgtggagctgggattataggtgagcgccacgaagcccggcctctaattaattatcggtggtgtataaaaagaacagaccttcttaattcgaatcccatcttctccatttattatgtgattttggacatgtttgttcaacttctcctagactttgttttctttttacgacatggggatcataaagccgggatgcagttgggaataaaaccggataaagctcccaacgaaccgcgggtttcataagatcagggcagggactgggtaaaaggtttcaaagactcctgcactattgggaaggacgctacgggcgagtctatgttgcatgcaggcgactccatgttaagacgaagtgaactccctgaaccttcaagggataatgcacaaccataacgagaataatttttaaaaatagagttttcttccctgaaaacttggagaggtccaggatgcgcgccattctgtgatctaggttgactctccacctcttcagttggtaccacctttcccaaatagtttggagcagagcactccggtctttgtaataacgtactcctaagagctgttccagtggactcacgcaggcgcaggagactacacttcccaggaactccgggccgcgttgttcgctggtacctccttctgacttccggtattgctgcggtctgtagggccaatcgggagcctggaattgctttcccggcgctctgattggtgcattcgactaggctgcctgggttcaaaatttcaacgatactgaatgagtcccgcggcgggttggctcgcgcttcgttgtcagatctgaggcgaggctaggtgagccgtgggaagaaaagagggagcagctagggcgcgggtctccctcctcccg

SEQ ID NO: 68482 - DNA, 1010 bp, Homo sapiens
ctgaccaggtgacttagtgagtaacttcgttaagtaaggaaactcagtaccattacatttaccgaaagctgacaacttttcagatgcagcgctcccagtttaaggaaagtgcagttggaggcggcgtggggcagagggagccagcctctgaacgaactgccccagggtcgcggagaggcgaggctggaaaagaaaggttgaggaagtcgggggacctaggctgccaggacgcccaatagcctccagaggttctggtggaccagagcctgcgcactccgccgagagcatgcccttggctcatccaatcagagcggcggatccaggcgcctgtctgtcgccttggcaacgggacgcataagcacgcgaggcgcgcggtggcggtttggatctggcccctggggaatcgcgttatgtcgcgaccgaaggtaggagtcgacctgacccagatgcttttatcgtccctagaaaaagggaggaaagcagcagagggattcaaaatcggttggggatgggtgttcctcgcggaatgggtaggggtggggcgggggggcggggtgggttgttctcgcggaggaattccgaaaacaggaagaaaaaaagccgaggaactcagaggaaagactacaagtcccggcatgcaccgcgccgcccaagctgctgcgcaagtcccgcgagcccggccagctggcgggaagtttacacaacagtgggactctaagctccgtgaccccaggggaagttgaacctcagaatttcagatttcctgacttggcgaaacccgcctgcccgtccatccgtccatccatccatccatccatccgtttattcatccattcaaaacaacgctaattagtgtcttttccaagccaagctcagtgccggccaagggacacaggtgaatcagacaaacctctgccctccaagagggcacagaccaactctcccattttaagaatgggaaaaatgaaagtccaagagggaaaatgaattacagtaaaattcagctctcc

SEQ ID NO: 68483 - DNA, 1487 bp, Homo sapiens
aggttcgaatcctgctatctgcctcaagctgtgtaatttcaccttcctatttactcctcctcaaaatggagctacggacagtacctaccttacaggttattgagccagcaattaaatgacttaacacagtacctggcacatagtaagtagctgataaactttaactgctcttattctcatccagcacaccctgatccagtacttaatttgacaggatcttgcccaagttttccccttctcagtaaatacctgacccttctaactggagatgagagggagtcacgactcccccggctccactaccacggcctactgagtctgtctccaaaatacatttctgaccccttcacttctctccaccaccactacctagtccaaatccatctctggtctggaccataccaatggcccctcacccatctccctgcctccgcccttgcccacctatattctgtattccacacagcagccaggggggatccttttaaaacctaaatccaattacgtcaccctccttcccccaggaactcccctcaaaaacttggcacttaaaacaagacaccccataaacagggcgccaccttcccccacgtccccacccctgcccggtcacaaggccccctcaggcttcttttcggttccagctctcccctgagggcctttacagggcggtgcccctagatcaaccatggggccgggaagtgcattttgaaacaggtgctcagggaaacggcccagagcatgatgggtcgagatccacagagcatggcaaggggcagagaaaggatgaagagagaggaatgtccagcatagcgcaggcgctcacttagtagcggccgaatatttatcggcccaggtctgtcgcctcggagccgttaaccgcctgtccaggtcaactcactgcgaccccgcgcgctttcccacggcgccggccgccaggccccagcgccgcggaggggcctctcacctgccgcttgtccgccagcacctcctcggcgagctcctccacttctacaaggtaccgcagcactcgctctgcctcgggtgatagcatagcgcccaccaactccgcttgcggctctcgcgcgaccccgggatctccgcttcgactcccgctgcgcacgcgccgctctctaggtgcttccggcgcgcctgcgcagttaaaagaacggtggtgcgcaggctctaacactagtgcgccagccggctgcgagaggcggggcctagctttgggggcggggctggagcgccctctgcaggctcagagagctcagtcctcgggctgcctctgacccgttactccctcggttcatgcttcttgagcacttattatgtgccaagcagttttatgtgcttaggatgcagcagtgaacacaacaaaatccctgccctcatggaacttcatcctagtgggaaacaccgacaattaatggcaaaacaattatataccgtggcaggtagtgattaggatctgggaaatattattc

SEQ ID NO: 68484 - DNA, 980 bp, Homo sapiens
gacagacagaccaccaagcagacccagtatccaaggcacagacagaccaccaagtagacccagcatccaagacacagacagacagaccaccaagcagacccagtatccaaggcacagacagtccaccaagtagacccagcatccaagacacagacagacagaccaccaaacagacccagcatccaagacacagacagacagaccacaaagcggccccagtatcaagacacagacacacagacctccaagaggacccagtattaagacacagacagacagacagaccaccaaacagatccagcattcaagacacagagagacagatcaccaagtggacccagtatcaagacagacagaaaagcagacctcgtattcacaggatagacaggctgtctggcatccaggggacagagactgaagctcctggcctctaagggcaggcagacaggctgacccaggatcacagggtcagaccaataggacatagtatctgagagactatgtgacccacagtccaagggacaggattccaggattttggaactgagccagggactgagccaggattccagggcgagactgactgactaacagactcctgacagaaatgcaggaatggtaaataggctagccctgcattcaagggacagacacaatagacaggctgatctgagccacagacagagacaatgactcaggatctgaggtcaaagggatgggtccaggcttgggcccaggtttgactgtctgaatggactgaggtgcaggccagaaactctgacctagaaccagagacttggggtgactcaggaacgaagaacaggagagagatggggtgatgcagacgttgccagaagcttcctggcttctcaagaacatgggatcccctcgtccttttcccctcctgcccattagagagcagcccccaaactctgggggactgggggacactggaaatttcccgtgaggagggtaggatg

SEQ ID NO: 68485 - DNA, 1876 bp, Homo sapiens
ctagtgcatgacgtccacattcagagatatctccctccactgaatatgctggttttcactcgttcatttaaaaaataatgtattgggcatctaccacaagcccaaaggagtatacataaacatatactgacaattatttattgaatacatcctatgtaatactgtgtcactgaatcctcatcacaagcctatgatgaaccaacccccttcccatttcacagatgggaatgaggaagagcaaggtaaaaaacgaacaaacaaaaaaacagggtccaccctcatggggattacagtctactaaagaggatataggatagtcaaacaaatacttaaaatcaaacaaatacttaaatatataattacaaattattcttggagtcgtactgctcttggagccccagtgcccaccctttccctcaaatcaaggtctcaggtaaccctggcaatgggtcttcctgccagtagtaaagatggcgctgagagcacgagcgcactttcgcacacccccattacccacaatgcagcgggaataagggaggctcagtttctgccaggagctaatatggcttccttagttacaccgttctctctcttcacctaatcagcgaccttactttcccagaccagactgtcgagcaggagctaagactccttttcccctctgctgaccgccactacaggagcggttgaagccagacgaccaccttgtggagttaaactccgtaaccagggagcaccacttccgctgacgtcattacggcgacacgtggatccaagatggcgacggcgatggtgagtgaaggagactccgggagcgggagctggagcggggccctccggggtatcccaggatcttccagcaccccatgcctggccctgagccacctccgggacccctgactcaggcctgagggctacctctgactgggcttgtcttccccgaaatccacctccctggccctgcccctgcactcaggcttgtgaaggccccgagttttgggggaggcgccgtttcggaggaagacctcggctgctgccttcgccggttcccattctacttttggtctccgcccactgtgagccccattttccatttctcacctccctgtcctgacccctctgaagaccccctcccgttattctcatccttgctcctccccgtcacgtccagaccctgctctccccgcctccccaccatcataaccagtccgcagatgtgacctctcctctgaccaccctcccagcccaagcgctgcctcagatccttttcagagccctgtcctcacttacactcatagctgtccccatcgcgcacccccttgactgccgctaccccagagcttgccttcacctaccccacccccatctttcatccctagaggcttccctgcccttcctgtcttctctcagtcaactccctgcccctctcttagggaccttttaccctgttggttctcaaactttactgtgcataagaatctcgaggtgtgtagggggaggcatgctaaaaatgcagtttcctgagcagccccactcccagagattctaattccatagggctaggtgatgcccaggaatctgcccttttataagcactctagtgattatatagtggaggtggtctgtgaactacgttttgaaaaacactaatagccccacctcactgctctccttcccattccccaacatggccacacagctcgttagggatgaaggctctttattatgaagctatatgttgggatgaagtctgtgtgtggatgagggtggaggtaaaatagccatgcttggaagttgggtcagagcttgcgggctcctggtgcagaaccttggaagtaaatctttgaaggactggccctttttctaaaagtttagt

SEQ ID NO: 68486 - DNA, 1214 bp, Homo sapiens
agcctcagcctcccgagtagctgagactacaggcatgagccaccacaccggctattttttgtatttttagtagagacggagtttcgccatgtgggccaggctggtctcaaactcctgacctcaggtgatccacctacctcggcctcccaaagtgctgggattgcaggcatgagccaccacgcctggccagagtagttaccgtgttctcagtgatgagagtacatcagagaacaaggtagacacactcctcccaaggagctcacagtcttttggggataggcggatattgatcaggtagccaaaatatgtaattacgaactgggatgagagcaagaaggggcagtattagggacctgagagggcatagaacagagtcctgctcagtctgagggtcagggaatactttctggaaggaatgatgcttgagcagagtctgaaagacaaggagggcttaagagcttctggtctgggggccccaccgggacaggtaggggaggtccctggatgctgctcctcaacccggcccctcttgctccagacggcaactctgtaccctggtgtggtttttggcatctgcttcgtattgaattgcttcatttggggaaagcactcatcaggagcggtaagtgcctcccctacccttccagcccctccccagcaagcgaggaccagttgcactcagccctactcccaaaagccacttcctgccattcccttcccttttctgagtccccagagttacgttcccagccatgagggcagagggccagctggggtttccccagccctgcccttggtgtgtcatgccctggccctggccttcctgtgagatctttcagtcaactgacccaagcccacttctctaaagggaggtttccacagtccagcggccaactggggaatttccctttgtcttaaccaagagtgagctgcccagtgtgagtttattaggtcattatcccaaagcaagcctgtcctcctcagtgtccctgcccctcagcaccagcccctgcaggtggaggagagaggaaaggaaggatcaggttgtattacccttagagctgggaatcctgccagccccagtccagtgtgttactagcagctgtccaagactcactgaggaggattttgaactcagttgtggggagggggagtggggtcttggtcaattagcaggactgcagttgagatgtggcaggcattttgctatccta

SEQ ID NO: 68487 - DNA, 2067 bp, Homo sapiens
tcatggggagaaaacgtgattcgacacccccgctcccaatctggtggcctcaccttaggagagaaaggttagaaacccaagaccagactctacacacagtcccatggctgacaggtggaaaaacacacaagccaggagacaggctaagcttgcaggtgaaagcaccgattcccccacacaggtgtccccatatcctccacctaacaggcccctttctccccaccaaggtgggccacagcctggtcccaggccaacttttagatcaccccactgtggtgtgggaaaggttcaattccccgagcctgggagagatgggagtggatgagggctggagaagcaaaggaaatccagggagaagtctggagggagtctctgggatgggaaggaagagcgaggatgggaaggaatcatgagcaactttcctgggtctctaagggatccccacaagaatgaaatgggggattataagggctggaaggctggggggatggggatagtcagaagtgtatcctctgaatttcaagagggtctcaaaatgggtaacgggatggaagatgtcgaaagcctgggagtatggccactgaggagggaactacaggtggggcttattcgacttctccagacccagatatttgagggaagcctcaaagggagttatgtaagtctggaaaatgaaacagggtacagagcgggctatctggagcaggaaagggggttatgtgggtctgggtaggcgtgtcggagggagggagcaggtgcagcttatctgcgtcccccagacccgggtccctggtaaggtcagcagcgccttatctgggtctccagggagcctaggggtcgggaatgggggaccctcaggactgcgtctccaggtctcggaagggaggggaccggtggcttcctcgggtcccccagacacaggtatggggtccagggagagttttcgtcaccccagggcctatctggggccgggttggcgcagaccgggccccgggtcgggggtgtgggcgaccgcgctgaggggcccgagatgaggcgcgccgccgctccgggtacagggcgcgcggacgcagcgagacggcctcccgcccctctccccgccgtcccctggggccctcgccggcactcaccgcgctcggggccccacgctgcgggccgggccgcgctcgggctccgccaggccccctcaggccccggtagtggcggcggtcgggccattgtgcggtgcattgtgggagccgcgcgagcgggcgctcgggtcgtggagggggcggtgccgcgggatctctatggtcccgcccgcccgcgggctagagcggccggggcggtgcgcgggcggcgcgcagggaccgctgggagcggggcgggcgctcgcgtccctccttccctccccgactgtgcgccgcggctggctcgggttcccgggccgacatgggcgccgccgcgtgggcacggccgctgagcgtgtctttcctgctgctgcttctgccgctcccggggatgcctgcgggctcctgggacccggccggttacctgctctactgcccctgcatgggtaaggcctcccaagccctctgctcagatggagaaactgaggccgggagaggaaaagccactcctcagatgcgcccagagacaccttcacaggtccaggagagaacctcagagcgggacggggcatgctcttctcctctctgccttagttgcaagggcacagaggggccaacgtgtccaactttccatttgacagatgagaaaactgaggctgggagaggttacgtgacttgcttgaggtctaagccagtccagggtccagtaaatggagttagtggggcaggacttgatgtcactgacccacgctggctcctggtgatttttcattgattcagcaaatatttatggggcacctattctgtgccgggccctgttctctgtactgggaataccgcagtgaataagataaactccgtgtccttgtagagccttcattttagttggggaagacaaacaattgagaataagtaggccaggcgcggtggctcacttctgtaatcccaccactttgag

SEQ ID NO: 68488 - DNA, 1171 bp, Homo sapiens
ccttggttcaaaatccaaggtctgcttctccccagaccctcatcagtgctgctgggtcagcaggatgtgacatgtgaacaggaaagactctcctgctggaatccagaattgaagccacggcactctgctcagcccctggcctaggaattgcagagtgacatttctcctaggccatcctgtgagagtgttttggcctgagtcacatcacccagcttcccccacctacacttccctggccccatccccaaatggctttccctccccatcagtaagccttccaccactctctttctgcaggaaggaaacccctttggcccattctgggatcagtttcatgtgagtttcaacaagtcggagctttttacaggcatttccttcagtgcttcctacagagaacaatggagccagaggtacttggagggggtagcgtttctgggtttaggggaggcgcatggagctcatgagcattcagcaccttctggcactctccccatcttcccaactctgatgtatgagaccaaaggtgcaggtgctctgtctgttgaacttggaatcctgtgtgatctgttcccatgtccacgcctgacacggtggaacattgacccgccatgagattgagaaagagttcatcggttgataagggatgtcataaaaagaacattctgcagtcgcatgagtctcaatttcctcctctaggcgtgagaatcactcctgtgttaccttactcttcccaaggtgaaactggaagcagcttctagagaacagcttcaggtgcagaccgagaaatgacgtcatcctgataattattggacgtgtttattaattgcaccccattagcccctgtttttaaaaaatataggttagcaggacgtgggcacaggccgtgaaacatttatagggcgcctgtcacgtgtgagacatagtaatcagaggccaatggtgatgtgtgaaaatgaggatgaccagctctggttttctaggagctatggtctcataatgacaataatcagcatagtgtacttgtccttaatgttatagcatggcaggaaagaccatgggcttagaaggcagacattggttaggaggtgcagggaacatactaattcatgtgcggtcaaagcacttggcatttaatagggcaaaggtaaacagatgtagagaaatgagtctc

SEQ ID NO: 68489 - DNA, 891 bp, Homo sapiens
tttaccaagctcttgggtgtgccagacactattctgcgcatactggagcactgccttcccacagcaaggacagaggtgaaataattatgagatggactgtgtatgagggggaagcaggggcttgggagggcatgataggggcacctgcagacccctgctcccttccatagcgcagggactatgcctgtcttgttttcctccaggtcccaatacatagtaggcaatcaataaatgttttttaaatgttgaatgaatgattcaaatccagtatacatagtccctgtgagtgtgacctggccgttgcttctgtaagcagctgcatgtcccagtcctgccatgtaggtaaaagggcaaaggcttggtccagacaccccaccctggaatgaattactgcaccgcagattggaagccagtgtgacatataaaaggttggaatgctctcctgtaaagttttaattgttcgacaagcaaagagggttgtaaattccatgtggcgggacagtattgcatattgtgcctgttgccgccgccaccaaggttccttatcagcccgttggtatttcacaacctctcgtgtttcttgcgtgttgcaggggcccctccgcagggtctctggggcatggtgcaacaccatcctttttcccgtgggggtggcagccaggctctctgtgcgtcctctgacttccctcattccatctcctgtctagattttctccaaaggaacatccggtgcttgccctgccaggagccccagcccagttccccgtcctagaggaacacaggccactacagaagtacatggtatggtcagacgaaatggtgaagacgggagaggcccagattcatgcccaccttgtccggccctatgtgggcattcatctgcgcattggc

SEQ ID NO: 68490 - DNA, 655 bp, Homo sapiens
aagcaccttttgactcttcccttccaatgtaatctctgccaacaccatgaggcttaaggtgctctaagtcatgagtgttttggtctcaaatgctgcagttttaataatctgtgactcctgagagcccatggttttttgaccttgtggttctaaaattccttgtctgacccctgtagatcttttccttgccatgtcacctcccttggcctttgatcctggaaaggtggcagagcctccactgagccaggcccagagctccttgcagtgccttcttccttgtttacctgtgggaggaaacactttttttgtcaggggcagcctggttcagagctcagaggtcacactgtatcaaagatctcaaacagcaaagtcagcatttgctgtatagagctgccacccaactctaagcaggagaaactgtacagaaagggctttgctatttttcccttttgggaaaacaatgaagtgttttaagtcctgggtggactgagagatggtttgcctgtccagacttgctctcaagcctcatccagagaaggagctgcagatgagggagcccgtacactccctgccaccactaggttgtaagcctgtagctggctggctgatttcattttggaattcatttgccatccacagccttacactaggcaca

SEQ ID NO: 68491 - DNA, 1412 bp, Homo sapiens
ggaaacagaccagatatttcaggcaggctagagatgagcgtggcctggccttgcctggggcggttgtgactgactggattgggtgaaggacaggaaagctacaacaagggtgcctataggtgttcgtattgagtcactgggggcaccctaaatgggagttacctcagtagcagtttgagacaccagtcagataatggatgtgaaagcttttagaaaggttgaacggcggctgaaatcgcgtgtgttccatttacagatgggaaactgaggcacgagataccagaggatggagtcaggccacgttgtgcgccactctccccgcttaggtgggtgaggagaccgaggtgtgttgggcccccgctaaacaccagcaccgacctgagccccgcccagacccctccagccggctttccctgtcctctgctcgtgtgccaataaagttattgaaattgacaccggttgctaaggaagtgggtcgccgagccaggttgctaaggaagtgagcggccactgtctctccccatccggggcagcggggaatggctgagccaggggttcgccgcccccgccgccgccgccgccgccgccgccgccgccgccgcccgctttcggctcgggcctcaggtgagtcggaggggccgggcgcccaccgagcagggctaatcctgtggccgcctggggttttccctgcgacctgcgcccgcgcctctgcctggctttgctgtcccgcgagccggagcatcctctgccctgcctcctaggcatcctttggtagtccggacggccttgcccctccttcccctggcagggtcgcggcccgacccccagacacggccaccttgggtcgcagcccacctgggggccctgaggcggtggtcagggccccagtttgggaggagggcggggaagcgagagcctggggtccgaacctcggcgctgtgctgggcttgctgtgtgaccttgggcaagtcttttcacctccctggccttagctgacctgtttattcaatggggtcctaacattgctgctcagagtggtaaagataatgagaagtgtatgtgaaagtgccctaaatggggagagggagaattcttagggcaccctagatgggagaccaagagggcagtttgaagtctgagcgagttagagacgtggcatttccacttagtaactgtgtggccctgggcaagttaatttctctgagtcttcttttccttatctgtgaaatgaggtaatagactactgtggaaatcagtgagactgggtatgtcaagtagcttggcacatagtaagtgctcaaccagctattatgaggcgtccagggtaggagggcaagacttccaggaggagatgactttgggacaggtaaggtgtaggtgtgtagagtgccagctcatatgggtagtcctac

SEQ ID NO: 68492 - DNA, 1032 bp, Homo sapiens
gccaccatgctcggccactagtctatttcttaacacttattaagctccctttcaaaccaatggtgatcaagcttaaggcctcagataagctacagtatttagctagaatttagtaacattgttgtctgttcttatatttattttcacagttactttctatttataacaagtgatactgattttccattcatggtggttatataaagtttctttttaaaataaactttgtgttaagcaaagtagatttaaagaaaaaacgttaagtaaataatagtacaggtgatgatagacatggcgaaaattgtccagaaacaatcggattattgacatttaggacatgctggtgtggaagaaaggccatggactttggagccagatggacctggtttcagcttgctttgccacttattaactcagtgtgccatgttacttccctgtctaagtctctgttttttttctcctgcaaattgggtcagggcagagttaccacttgtgggccagacgcttgctgcctgtcttcttctagtcctcacacggccccaagcagcaggtgttagtgatattcccattttacagatgaggaaatcagctccgaggggtaagaaactttcacagagcctcagaactacgaatgataggctgggcacagtggctcccagcactttaggaggccgaggcaggtagaacacctgaggtcaggaattcgagaccagcctggccaacatagtgaaacccacgctctactaaaaatacaaaagttagccgtgcgtggtggcaggcgcctgtaatcccagctgcttgggaagctgaggcaggagaatcccttgaacctgggaggtggaagttgcagtgagccgagatcacgccactacactgcagcctgggtgacagcaagactccatctcaaaaacaaacaaacaaaactaggaatgatagagctgggtttcagtcccaggtgtgtctgaatctctttttggctattcaggctacctctgcctgttaaatacaggttttgctatggccctctgccca

SEQ ID NO: 68493 - DNA, 1924 bp, Homo sapiens
ccagaagaaagccaaatatgtgttataaaaaatagtttctgaaatgtcaaagagaaaattttagctccccaaaatatttttttttctaaggagtctattttcattattatctctctctctctctcttttttttttttttttttttttttttttttgagacagagttttgctctttggcccaggccagagtgcagtggtgtgatctcggctcactgcaacctctgccctctgggttcaagtgattctcctgtctcagcctcctgagtagctgggattataggtgcctactaccacacacagctaatttttgtatttttagtagagacagagtttcgccatgttggccaggctgttctcgaactcctgacctcaggcaatccactggctcggcctcccaaagtgttaggattacagacatgagccaccgtgcctggcctatatctctttttatatcttttgagtaaacagtgagtcagcctctttctcacagtaccctatacctctgtgctgtttgctttgtgtcccttccatgttcatttccttttggcattgttttgtcctgaggctttagaagagtaaaggcagagatataatgggagacagtcatcaccatagagagacaccaccagtgggttccagtttccttgtttgatgtgtttcctgggcacttgtcagacagagactgttagtaggaatggtcttcattctcaggggctgaaatccacttagtcctgctttttatcctggtcagttagaatgggaaattttccagcttggacaacgagccatgggattggagtaaggcagtttaatttcttctgtttttggcattttggaagttaatgaccttggttatcagcaccagtggccctctgaaagatacttcaggtagcaaatgttcactccaatatagcccaggggtcacctccctcttgagcctgttcacatcctgccccttcccaggcagaagtgacctctccatatttctaagacagaccactgtcagtacctattatacctaacagggctgcaccattaccctttgtttcaggcaggagccagatgtcatttgtgtctgtatctcagctctttgtatgatgttaggcccatcgtacttgctgagtaaatgtttgctatgtgccttgactcttacctgattactcaccatgcatgagaccagatagctgacacttcatatgtattctgtatctgttttcacctgttatgtgtgctcttacaggcatcttattatagaaaactttatccctctggaagaaaaaagtaaaattatgaatagagccttctttgatgaagaggaagatcattggaaactacatcctataaccagactggagtaagtcactattaacttcaagtatattttcaagtatgagggaggaaaagaatgttgataacaagagccctctggtcaacaaaggggtttgataagaacacagtttggcttatttaaactcaaaacccactgcattactgattttctagctgccatagatccaccaggtaaaagtttgatcatgagtgtggttttaggaattgggagactttgtcactagtgagtgagcaagtgacctttccaaagttcctgcatttctgtttctccagctgtgaagtgaagtatgctaggtcacgtaaggggcaattcagagctgttatctttgtgtgtcattctgacccacagtgttgagaaggattctcatgctaagtctgggtgctgctggaaagatgggagacacctggcagggatgcagaggtggggggtgttgacagctatgctttgtgaatgctgtctaagaactgggtgatgattaaaaatctcttctggcttaaaagatgcatgatgctctgaatcagaaagcaactcaagcagaaaacagaagcatttcccgtcccacttacgtcagcc

SEQ ID NO: 68494 - DNA, 5586 bp, Homo sapiens
cctcagcctcctgagtagctgggactataggcacatgctgccacgcccagctgaagtcatgctctctatccatgagcatctttataacttgcatagatatatttgggtgaaatcctgtcttggtctttcccgattctccctgagcaggttccaaacattgtttagggctcaaagggaaattagtcttcagagtttctccagtaaagtaattacggagatcgggtcatttattcaacagattgggtgcctaccatgtgccaagactgtgccaggcactggggatatgatgatgaaaccaaagatgctagcatgaacacaatcactaaaccaaagtcacacaaataaattaaatgtgggagggacaaggagagctatacatgtactgatcatctgctatgctggaagtttatttagcaaatgtaatcttatttaatcatctggacccaagggaggtaatctgacctctctgaatctcagcttcatgtgaaaacggggataatattattgagagagaacatttgttacaggggcaaaccctgttccaaggtttctttcactcaaagtataaacaatgaggcactttttacactttagacactaaaactttttggaggcaaagagggctggtatttagtgagtatctgctatgtgctaggcactttacagagatctcatttaatctcagttccattctttgaatttgctatgtaccctgctgtccaaatgacggcactgagtcagtgagaggtttcataacttgcccaaggccacagaactggatggagaaagactgcagagattcaaacccaggcctgctgacatgcagagccaatgagaatatattatcttgcagtgcagtttatgggatatatgtgtccctttgggaattcctgggtgtctgctggtggcctgttaacttggttcttgaatatgcactttgcttataactgtgcagtttgaaaagtgactcatccccaaactaggcagggttgagtgtctgtcctgtttatcttccacatgccacctgcactaacttctgaagataatctataataaaagcactgtgattaaaaaacagaaaaacacacaccaaaaatgtataggtttgtctgttggtgcttctgacaagaaaataaactcatgaatctcattaactttaaaaaaatcacatctacttaaggtttaatgactaaagccaactttctaacatatctgtaccgttctctgaacatactgttttcacacttaactacgatgttgtcacttgtttctgtctgattctgcaagggcagagaccttgaaatattcaaatctggattcccccatggtttgacccagctgaagtcaggcagtgttcgctgaaagaaataaaggtgtttccataatgcctgtattagctttcttttggggctgtaagaagttaccacagatttagtgtcataaaacaatattcatttctgtttcacgcttcttgtgggcccgacgtctggattccatggctcagctgattctctgcttccagtctcacgaggctgaaatcaaggtgtctatattcctttctagagagttggggagggggtataatctgttcccaagttcattcagcttgtcagaattcagctctgtgaggttgtaggactgaagtccccatttccttgctggctcttggcaggacttcctctgagcttttggaggctgcctggattccctggcttgtggccactttcaaagccagtaacagtgggttgaattcctctcatactttgaatttaattcctctgcctcatctctccaaaacatctcttttgcctcccttttgtgcttttaagggttcatgtgattacactgggctcacccatataatacggaatcatctaattttaagggctttatttccattggcaaaatatcttttgccaaagaatgctggctggtaatcccagcactttgggaggccgagatgggtggatcacctgaggtcaggagttcaagaccagcctggccaacatggagaaacccagtcactactaaagatacaaaaattagctgggcatggtagcgcatgcctgtaatctcagctacttgggaggctgaggcaggaggatcgcatgaacccaggaggcggaggttgcagttagccaagatcacgccactgcactccagcctgggtaacacagcgagactctgtctcaaaaaataaataaataaataaataaaaaagcaacatattcacaggttccagggactaggacttggacagttttgggcaagcggggaagacattattctgtctaccacagtacctgtattaaacatgtaaatttcagttattccctgtaggtcagagggcagtaaagctacttcagaagacatcggaaagaagccaaatgacttgccaaagagtactgtatcagccgtagattgaaaaaaaagaagttaaaaatcctttgtaaaaaatcaaggcaaacagttttttgagggacagtagttcctcctttctctcagggtaaagctagagagatttttaagaggtgtcttattctaacttgcagtcttttccctttgtaggattttgcttaccggactcacaagttttctgtgaccagtattagaagcagaaaacactgaaccccttggcgttagagtttgggctacaccataatggtctcctatcaatactggctctcgctacgtgttaacattagggagtggagagtgtgtttcctcacccagggaaaccgtttaaatgtggccactgatcctgccttcatagtttttaagagctggcatcaatccaactccggacggactctagaaatgtttctggacaacgactgaacctatagttacagaaaacctatgtgctgggcgctctgaatttcatttcaggttctaaaactaaggctcagagaggctaagtatattgcctattgtttctcagctggtaataacagctaccatttattaaacatttgctctatgccaggcgccatatcatacggacctgataatgtcaagatctcccttcacatcctcttccaatctgtcaagaattgtatgttaattttaattccaataatgccatgaaatacaagacaaatgcagatcagaaaactgaggctcagagaggttgagtggacagccagggagtgactcagccaagattccagtctaggtccgctggactccagggcctgaattctctccagggtactgcctctaaaaacgccctcaggtgcattctggtcagtatggccccagagtccaagttctttacacgacccgtcaacatatcaccaagttcctaagaacgctctaggctgctggtgcaggctctgcaaatacacagcggcctgaaagcacaggaagaaatgaagaaccgtctaagtccatcagccgtggaataaccgttttactggtatgagggtctttttgtctcattattatgtggcagtgagtcatttagaggtgaccaaaagggaaagtcctgcctctcgtcccctacgagaagtgtaggtaagaaccgtttaggcgaggagaagcacgaagtgggaactgcgagtcgagctccccatcctcactccccacccgcacccgccaggaggtcctgaagcaaaaagcaccgaaggggttaagggtggccgggggagcccagccaccgccccttcccagcatcgcctcccagaatcccgcaggcccccagccagttctcgcacctcgcgagactccacccagccccttccccgaacagcgacccgtccccgttcctagctgaggtcggtgctaggcggaggacgcgagagggagagcggaagggggccgccgggcacgccgggaagtgtggtccacgcgcttcacgcggccatattcttccggagcgggggaggccagagaggccgttgggactacgactcccaggcgccctttcggtttgtttttgttcaaaaaaaaaaaaccccacactccccctcctcactcttcacacacactcacacacacccacggcagacacgcacgcacccgggcgccgaagggaaagccgcgtctcgccctcccgccccgccgtcggtcctgtctcagtccctcagcagagcgggaaagcggaggccggagccgtgacctctgaccccgtggttatgcggagccgccgcattccttagcgatcgcggggcagccgccgctgccgccgtgggcgactgacgcagcgcgggcgcgtggagccgccgccgcccctcccccaccgccgctctcgcgccagccggtccccgcgtgcccgccccttctccccggccgcacccgagacctcgcgcgccgccgctgccacgcgccccccccaccgccgccgccgccccagccccgcgccaccgccccagcccgcccagcccggaggtcccgcgtggagctgccgccgccgccggggagaaggatgaaggacaaacagaagaagaagaaggagcgcacgtgggccgaggccgcgcgcctggtgaggcggacagccgaggggggctccgtggggcccggggtggggggggctcgccgcgcacccccccactggggggggaggggcaaggccctgcccaccgcgggagggggcggggccatcttcctttaagaacgggacagccccgcaaggcgaggggtggggagcgctccgccgggatgggatgtggcgcctttttccgctcgccctcgcgccccccccgccccgcgcagctaaattccggcggaggggcgagctggcaggccggctcctcccactctgggcagcggggtcccgcgtcccctcccccactatttggcagcgtctgggggtctggggcagcttcgttcattcacccgggggagttgggtttccgggaagggtcggaagctcctccctcgcttcctggtgggtaatggggtggtgcctttgactccgggggtggaaaagcgaccccacattcaaggacgccaatggcatgttgagctttcccaatctaaaccaggtgcgtggagggaagcaagtgcttactcccagcttgaaccctgagcagcggttctctaactttagtgtcctgtgggcgacacctgggaggcggttaggaacgctactcctagggcccttcgtaagacctgctgagcctcagggtctgggatagagcctgggaatctgcgctttcaccagcttcccaggtgattcaaacgcagtggctcacggaccccactttgagaaacgcagactgggctgtttgccttcagaagctggactggaaattggtattttgaggagaactgaatccactttgcaaagaatgtatgttggacaaagacaaagtatctctgttgggagacgttgttcactgaggatttagcaagggagagcgtaacttgagtgtttgaagccgtctcgttcaaccgatgggggttgtgaattttgtgttcagagcgtcagaggacttgcaggtgaaatagcttccttttggattactcccacaaagctcagacactttgagacatattcgggtaattatctgctgataccagtagtaacaggttatactaagatgtcagttcctaagatctgtcacacagcgaggttgtggtgcg

SEQ ID NO: 68495 - DNA, 601 bp, Homo sapiens
ggtggggggactgcctgactcccagagggacttgaaactgaagcaagaaggttgcattctccaccaagggagttaacctacctgaactaagtagaaatgccagtcttccactaccccctccctgccatcttttcttctgctactttggggagttgatggccaggaaagaagccagcacagggttaaagtaactcctggcattgcccaccagggggctggtgcacctgctgacctcagggtcacagttgagtcatttgccagttgacggagcaagtttgaccttggttctgttgctgaagcaaatttggaacttttctgtctcagtgtgatccactaacccacaggatcatttggaaccttgaatagctctgcttggacaatggggttggggaatagggttgtctttcctatgaaaatgccatctgtagaccttgtgagtcagccgtccagatgtttgcaggtgaattcctctgcttgacatcctccctgtcactttggaccctatgggagtgggcatctccacgcacctgtgtatgtgaaagtcattttacatttcaaagcagtgtgtgtttcttatttttatatttttaactctttattc

SEQ ID NO: 68496 - DNA, 2269 bp, Homo sapiens
acagcaatacctgggaccatgctctcctgggactgtgaggctccttttgacgtacttttgacatcaggcaggtttgggaagaaacaaagccatgcctgctcctgcctctctcccaacatgtttccagcaagtagatgcccctgtgtgtgttttcccttgccttgtttcctgccttatatcttgtatttcgacttattacagagttgagggttcttgcttaatttagatcaagtataaaatttgtatgacttcaagtctcattttatctgaaaggtttttttctcatttaatctgatgtggcattttcgtcatctgaagcatgagtgacaagttgggaatgatgtggtgatttagaatgcagtattggccaagtccaagttgtcaacttaagcgtctgtttaccaaagaccgggaacaggggcccaaacatgtccagtcctcttcttccctctgctggaacctttggggacactcaagggtacagtttgacactgatctggtccatgaggctgcccagagaaagcactgcttctgtatgtctcttgtggtattggaacaataaacccgtacaacctgcagttgtggtctcagtcatctgtggctgcctcgctggtgtgggaaggtcagctggagtgctgagctggaagggaaggagtagacgccagctctcctcaccttggctctggagctactcttcttatacttggagctcttcttttgggaggttagtccaaaaggaatgacttggcagcttcactggtctttagccattcatgacttggcggacttcaccacatagactgcagtcagcgttctactgagagcaatgagaatgtttccccttgggagtgcgagtcacaaactgtgacatccctctgcagcaactcatccaaacagcttcactgaggttgaggttgccaagtggcttcctaatggttagtggtcttctgtgggagggtgactagctctaaccttggaaaaccttaaccacaagcacctctttctgtagcctctggtggcagtgagaggaaggtgctggcccagggtggggtgtctgatgctagttgcgtgagcctgagtagacgacgtgcttcagggattgacttcttgagaagtcctcagacgtctctagagtacgtaaatacattgactttgtgcttatcagaaataattttattagtatataaataagccaaaacagcaaaatgatgggagtttaaacatatattcattaattttttcctgtgaattggaggaaaaactttgtggtgggatatcctttggggagttcaagctgccattttgtattgctgccgtttgatcgacatgcagttttgagaattgatggttcggaggccctgtagtgactgagcaactgcctgctgttggtgatatgtccttgtgtcacagaatccatttgcccacttatgtctgcaggagctcagaatgcattacggtcccagatcgggaccttccaatgcctgttgcctctcctcagggaggcagaatggtgtagtgagttcctagagtatagcctctgcgacgtgccagctctgtgttcttgggccatgttatttaaccaggctgccaactctcatatatgaatgggtgtaatagttcttacttcatgaggttgttagtgcctgccacctaggacataatgactattagttcacagcaggccaaggcaataattgttaggtgaacttatagtagaaatctatacagctactgccagctacttcactcttgctccagaaaggagctgtcaggatgtaggccttgtgcccactgcgctgaggggtgatgcaggctgtgaagtcactttggaccctggcttttggtctcaggccacagacctgaccaaaggttgagtgtagtcctgagtttagactgaatatttggtcaggaaggcttattttgctcatggtccaaaggacaagggaaataatgtttcagaatataggaagaatggtactggcctggcaaggtgtcatttatttgctatccagcctgctgtaagactgtgttagagtgtgtgtgggtatgtgtgcatgctaaatagagctgcctgcatccatcaggggtcttgatggccaaagcatctgcctgccctgtctccctgagaggaggggacccaggctgtgttgccctcgtgtgggtgttgtttgaagccatagaagtggcaggatgtggaactttggagattgctccaaaattggacaacacccctatgcttcctcttgtctctggtcaatttgaaagccta

SEQ ID NO: 68497 - DNA, 1961 bp, Homo sapiens
cgtccttggctaatgaattagacgtcacacacctagatcttcccctaaaactgaaatcatttctctctgcagagaccctggggttcctggcccgtagagaggtgtccaagctgcagatgatgttcaggccttgggacaggtggctcaagcggtggggccctggagacagacaccaccttcagtggagggggaggtggacaccaattatgcgtcaggtcccgagtgtcaggcggcgggtaactcatcatgcctgatttgcacaaccaccctctgcagcagacatcagggaggaaccagaggctccagggggaagtcaccgacccatcacccgggatgagtggaggcgcccagacaggccccaaagcaccacccaggccgcccagtgctctcagacattctgggagcctccaaggccagccttgatttgcccatctgtactgtgggacaattccctacccctgctaccagactgctccacttcctagagcccctcccccaacacctactggccactgatgccccggggaagcgctcccaggatgaactgcctgtgtgtgggtgttctccctggccccgtcctccaggccaagcacaggcggtgagaaataaacactaattcagtgtgcaaagatcgagccgagacacacagcctgctccccgtgttctcagagcaaacagagccactccaggccaccatgtgtgaatgattcacggggcagggccctggccccaaagcccctgcaggccctcctccagccctcccggaagccagtctgggttcggtgcattgcagtccttaggtcggagtgatgacgccaacgcggcctggtcacttcctggttcctgggaaagtcacccttgaacaggctcccggtggaggtgcctcaggagggcctgtccctgacacaggagcctgcaggatggagctctgtatgtgtcctgggctgaggggtggtggcgaagggcaagggcactgatccccacgtggccccactgggccaggctcaccttcacctccattctttttttttttttttttttgagatggagtcactctgtagcccagtggtgtgatcttggctcactgcaacctccacctcctgggttcaagcgattctcctgccttagcttcctgagtagctgggattacaggtgcccatcaccacgcccagctaatttttgtatttttagtagaagtggggttttgccatgttggccaggctggtctcaaactcctgacctcaagtgatctgcctgccttagcctcccaaagtgctgggattatgggcatgagccaccacgcctggttcacccactttctcagtaggtgaacctctcggctcctcaggccccagagcttgtcctccccagcatcccagacaaggccagggctgtgtaggccctgcccactcctggataaagggatctctcggtgctgtctcccagcgtctctcaccccttggcgggccggggcccagcacagcccagcattgtctgtgccgcctgcggcccagctgatgatggacactttcctgtgacccgggactgccagtgtggcccacagccaatccctggaaggcttgggccccagctctctgctcctgggggaggggaggccaggaggccgccgcctgctcatctgttgtgggtatttggagccttgaggaggaacaaacagctcttgctcctggggtgggggtgggtgggacctgcacccagagaatggggcccagctctggtttctggcctcagctgtgagaattagggtcagggcaatggacacagccataatgagcaggtgttggggagaaggcttggcttaaaagcccactgcaagagaagcctttcacaggccagcccagggaggctggtgcaggggccacacctcctgccatgcaatactgaccagagcagacgtctggccatgagtgttgggtccacggggaggcagcagcaggccg

SEQ ID NO: 68498 - DNA, 1258 bp, Homo sapiens
cctctgggcagcaggtgctgagggaaccccatggaccccacagaaatgccactgtcagctacctgatcctgacagcccccaaatcaccagacctccccaggacgtgtctccaagagagatcacgctctcaaagggtggtcatgaggaataacagcatgagatctgcttgggaatgagtagggggaccatggtcccttcagccccactgctctgggtttctgaacaactgtcccagacccttcttgtgggggaccacagcctgtggccccagctgggctctgcaggcaccgccctcagtgttccttgggcgtggcctcaatcggctcagttgaggcgggaggtcagctgctgcgcttgtcccagccccagagccccccagagcacgtggctgcccccgccggtccccacccccgtgggaacgctggaaggcggcactggcctgggaggctggcagcacgagggggtcgcaccgacctcacgaggcatcaagcacaaaagccttttctttgccggcagccacgcaccccactcctcctgcagccactccctgtgctccccagcccctggcccagacacctccagctgcctccagactgggtctcctcccaaacaaagccggattcaggccttcgggaggcaggcgcgcaggttctgccatggagatgaactttgacccaaacagcaaggctcctaccccttatttactctttaaggctgacccgtttcacagagttcacattacacccctttttaatccgcacctccctcccacattccaggcctcgaccttcaacccctcctaattgctggctccggctcctacaccccagttcttgggcccagctcactcatccctgcccccaaccatctcctccacggaaacaaaggcgatgctggggtgctgtgctcacagggccacctcacaaccctggcacaccaaggtagatgccagggtcccagagcccaaccacttgggggagtccacgtggaggccggggtggatctttggggtctgattcctgaccctaactctccaacccctgagaaggaagcctctattccaagggaggctggagtaggctgcctggcaggccctgcgcggaggcggtcagggctagggaagaatccggacagctccccagccagccgcatcgcatcccaaggggctagggtgaatgtgggcagctgcactgcctggtcactcaccaggtgacctgggctatagcctcacatgtggctgcagaaacacagcttgttt

SEQ ID NO: 68499 - DNA, 3731 bp, Homo sapiens
gctcccgagcggctggaataaaaatgcggattgcactcccccctcctccctatccaaagtgtccagccttgaagacaaggtggagggaggagagagagggcggaggtgtaaatccaacttaacccctgcgcgcgccctcgaggcggccggctgcccccgccccgccgtgtcccctcattaaggaaggccccttcgccaggggccgccaacgcccgcggcttccggtcagacggtgcacctgagagggacaccccgtcccctcccgggagggacccgggcctgctgaagtgggctcaactctgcaaaccgcgtctcaactccccgcgccgcgccggggaacccctccctgacactcaacgcttcccgtcctcacatccccaaacacagtccacttcccttctcgtggcggccgcggcaacccgagcccggcccccgccccgccgccagagaacgcctccctcgccgggacgcggtgccgagcccgctgcacaccgagcggccgtggcacaataccgcggcgctgcgcgcacaatcaccgccccccaggacccgcggcgcgcaccccgggagtggggtgcgccccgcgaccctgggcgctcagggccagacacacctcttgggcgccccgcggcccccacagtgcagccttcatcgccccccctccactctcgggcacactcacccgccccccgccccagcccactcggcccagggcgcagccgctcccccgcgccccctccctcagccccggcaaaggaagctccccctgcgcccccctccccagaaccgcccccagcccctcgcccccctaaccgcagctcaacggccggcggcagcagccggagaaggggggcggcggcccgggccccggaaacggcccgatcgccgggatccgggccggactccgtacctgggctggaagcgaggcggagatgggcggtcgggatccgcgagtgagcggggcgggcggcggtgacagccccacagctccagctgctgctgctgctgctgccgccgcggctgcccggggagaggggctggcaccaccgcggcgcgtcactgcccggcccgggggcgggggtggccaggaggagggcccaggcgagcagcggcggcagcggcggcggcgccgcggcccggaggaagggggagggggcaccgggcacggggaggcgggagagggggcgggaccgggcacggggcgggggcgggggggaggggagcgcagggagggcgcaggcagggggagtaggaggagcagcaggaggaggtggcggaggggcgggtgagagggaggagtgggcacggggggaaggggagagaggaaaaggaggcacccagggagaggggagaggagaaaggagggagagaggcgcggggggagaagaggaggaaggagggggagctgggccaggtagggggggataagggcgcgctggacgcgccgccgtgcgcttcggtggggagcgcgctcttaagggggaagcgcttcgaggaagatccttgcacggggctgagcccggaaagaaggcgctgggatctgtgcctacccatcgctcccggaggctgcggtctctgggtccggtgggggctggggggagagggcacccggcgggctgtctgcggtcaggccaggagagggagacttggcccaaataaagtgactcaggcaccctcaggaactctcggcgcccggggccccttcgggcagccttcgacccccatgcgtctttcgggtccccagggacgcgggtacttgtggggcggggctgccgggcctcggggttcggctcccccgggcggccggagcgagaccccgggctgggaaagccaggcacgtggccggctctcggccgtacccccgccccacccccacggcagggcccccagtgcttgatcaagttcaagctcgagctcctcggcgcgctgcccaccggctgcccctccgcgcccctcccccttccccatccgcaccgtctcgctcttcactcttcctttgtctctttcccaccacttagtttacaccccctccgccctcctccccgccccccgcgggcacccgagtgtccgggaggcgctcacctgttcgacccaaacatctacgcgacccccagcgcccgccgcccgcgtgcccgcccccgccccgccgccggtcattgtgctccgccagcccacaccgggccgggtcctgacggcgcgcgagccacagttgtaaagtaataggataatctcggggacgtcgctccagcccagacccgggcacgcactgtccgtggagacggcaccgccggggaggggagccacgcggattccagatgcggtcccccaggcggacagacccttgcccggggcgcaggaggaggcaggactggcatcgcggggtgggagccctggacctccgagcaacctcggactcggcccgaaaagcaacactctcatcaccaaaccgcagaattagaccccgatggagaaaatgggtcaggggatccattcccaccccacccctccaaatccagaccctccgctaccacagatcagcctcgaaaaaagcttgtgcttcaacaaggatggggaactgccctcgtggaattctgtggggaaattgccaaaaaaaaaaaaaaaaaaaaaaaaaaaaacaactaaaaaaaaaccctgataaggatcccacctcctgattcctctggtcgcatccgaagaggaagggcaatttctactgactctttacgctaccattcattcacggtggaaccagcagagaagagaaaacgagacagccacagcgattgtttgcaattttgaaacagactgcctttaaccctccaactttttttctgtaaaaagccttttttctttcttcctctgaaagctttgcattgtgaacaatccatggtaaacaaggctccctctacagccgcgagtgcgaagtacaaccccacaggttcagagcccagcgtttacccgtcagaaaaataaaatgatgacaagacatcacattagcgccacgcaggcttccttccgcacatgctcaagactctgctgtcaatagaaaactcacactttctttttaaaagagggtttaggcacatttactcatttgcaccttttattcctgaaatcaaatgtgttttcaaaccaattcactctccccagtttactggatcttctcatccttggtgatgtggggcaggtgggaggctttatttatccacacatgctggtgcccaataatgatttttagaacgaactagtggccacagctcttaagttcatccaggaaatgtgtttccaaacgcgggaactgtccatcctcactctgaaaatgagataattcagactcaggatttccctttccccaccacattttcagagacctttgacttctcctggcctgaattactatttcacagcagtggtggacatctgagcttgaaatataaagccaaatacaactgaagttcaaaggtggaattgaacccagataacccacctcttctctgactaataaaagagagctagtaccgcccaggagggcagagcagtgattttctgtaggcatgaaacgtgaactcatttactatccctgagataaaacagcccagccctgctcaacccacagaaaacagttgagagccctgcagaaacctggctgttgagcggcactgcaaatgaggtgagttttcatgtgtgtgtgctgaagccctcagaaatctcccagatccttattcctacag

SEQ ID NO: 68500 - DNA, 680 bp, Homo sapiens
gagaaaaacgccaggatgggggacaaggtcaggtggaaacgtgaacaaggaagaagtgggttccttggactctgagacacgccgcccccctccctgcccatggtcaacatgtggtgccacactcgagcctctacaaatgacctgatagtgcggcaccgctggactctgttgccatggagaagggtgagctaggagctagcaagggtcacggagcctaaatcatccagcaggttgctggcaagagaagcacaacaagagcccagagagatctttcaacatctctttgccaagaaaaatggaaaccagcccaggcactagacctagttttatgcagtctcgagaataatcaatgatgtgggtgcttgggccaagccaggttgtttgctggcctgtgcagctgggcgccaatggcactcatcaaccaatgcaaacctcaaccatgggagtgaccctcatttcctcgtgggaacaccaggtggtgatgctcacaagctttcacctacagcacgaagaactctcagtccagagacaggtatgaaagatcttccaggcaggggtgggcgtcgaaggatgtgtgcacgatgggggcctggcacagagaggccgtgagaccagccagcctcagggggttcaaatttggaaacagagatcccaggcctgagaccagctcaaaaggtggc

SEQ ID NO: 68501 - DNA, 657 bp, Homo sapiens
ggtgcctgtaatcccagctactcaggaggctgaggcaggagagtcacttgaactcaggaggcggaggttgcagtgagccaagatcgcaccactgcactacagcctgggggatagagcaagactctgtgtacaaaaaaaaaaaaaagaagtgcagtgcaggcaactggtgctcagatgggaaggcctgtcagggcactgtgtcggggacagagatggttgccgccatcctgggacagtgtccaacatagtgcaagagatgggctgggtgaggcataatgccagcgatgacagcaaccacccccagtggtgctggctgtcgttgactgtggttcactgtgagtgccaaacacacatgctttgctgcatttactcctccagccccggagttgccactgctcccatttcagagatggggaaaccgtggcagggagacttgcccatgggcccccaggcagtaagagtagggctggagggaagaaactggcaggctggttccagagacctccctcttaggtatcactgagaggggcttccaggcacctctgtgtggttgaacttgctgatctgttcaaactgctgtcatataaggacgttcaacttgattttcagcatcaccagcaaccttgctgctccttccccctctgggctagtagggtg

SEQ ID NO: 68502 - DNA, 515 bp, Homo sapiens
ccacaatgcctttggccgagcactttccctcttcttgttgaagcccaggggtattttctaggaaattgagtccatctgtttctgattcattcgtacttaactcatcaccgggctgttttgtaagagccctttgatgtgaaagccgccttattccataagcctctctaagcctttatttagtcaacagcaggtaaacgggcctctccaaagaggccagaggcagcatattgatctcctgctacacaaagtccatgtgaagggaaagtgtggcccaaacgcctgcctggagacactgagactccccgtctttgggcctagcagggcaaagcagaccactccctagccctgacccagcgctgtggggctcagccacgcagagggacctcctctggcgactcactaactctcctccccaggcactgtaacccagcgtcctcctccataactcacagccttgctacatagatttacgatttcctgtatgttgcctaagagttccttttttttggtggggg

SEQ ID NO: 68503 - DNA, 1088 bp, Homo sapiens
caaagtgctgggattacagacatgagccaccatgcccagctattattttaacttagtttaccaggaaacattaagcatttttgggagaaaatttggcaaatgcagatagtcaagaattgcactgccaagaattcacccaaccaagctgcacccaaaagcacgctgagatatacaggggaagctctttagcaatgtggatagtagggatgaaaggtcatggagagaccaggcacggtggctcatgcctgtaatgccagcactttgggaggctgagggggtggatcacttgaggtcagtagttcgagaccagcctggccaacgtggcaaaaccccgtctctactaaaagtacaaaaattagccgggtgtggtggcatgcgcctgtagtcccagctacttgggaggctgagggtgcagtgagcagagacggcaccactgcattacagcctggcaacagagcaactctgtctcaaaaaaaaaaaaaaacaggctgggcgcctgttacaaaattagccaggagggtgaggcaggagaatcatctgagcctggcaggtggaggttgccgtgagccgagatctgccactgcactcaagcctgggcgacagagcgagactccgtctcaaaaacaaacgatgacaaaaacaacaaacaaaaacctcaggtcagaccatgctattttttctgctcaaaaccctctactatctcctatttcactcacagtaaaatccaaaggttgtacaacaccctgcatgctctggcctcctcttagaacccctaggctctctcccttgcttactgtgctatttttagaatatgccagacagctttctacccctggccatttgcccttgcagttctctgcacatagctcatcccttcgcttcattcagggttctgcctgactcttacctcctcagaaaggatccccgaccattctatttcacattttttctttttttacttttttttttttttaatctcattctgtcacccaggctggagtgcggtggtgtaatcacggctcattacagccttgacctcctgggcttaatggatcctcccacctcaggctcctaagtagctgggacta

SEQ ID NO: 68504 - DNA, 1218 bp, Homo sapiens
gcaaggtggcatgctcctgtagtcctagctactcaggaggctgaggcaggaggattgcttcagcccaggcattccaagctgcagtgagtcatgatcacaccactgaactccagcctgagtgacagaacaagatcctagctcaaaaaataaaaataaaaaataaaaataaattagtcaagcatggtggtatgcacctgtagttctagctactctggaggctgaggtggaaggattgcttgagcccaggagcttgaggctgcagcaaactatgattgcgccactgcaatccagcctgagcgacagtgcaagaatgtgttattgatccctcgtccctatctctcccttcccaagccctccttatcctccaaagccctgccaagaaaccatgacactcccaacaagaaagggacctacccagattctcaacttctgaggctccctggggccacctacaattttcaactctgataaggaacacaaacatgtcttagaagagaagtttccttatatggcattgcagcttcacagcaacttaaatactgtaagtgcacagtatttgctgaataaatctttcctaaacactccccgcaatgctttgcctttgcaattgcataggtgcctccctctggaatgctcacccacccatggctatctatgcatgcatctcaaaatcttaaggattctccccagtaaacttaggaagagatgcacaaggtcattccagactagagaaatgcaaatcagtaaaaccagaatatactatttttcacttatcagatctgcaaacccaaaagtttgactaggacaccagtgctggtgaaagtacaaggaagcagacaggttcctgcatgactgataataggatacactggggtgacctttctaggggcaatttcacaatgtgcatctaacttgtatttttttgaggcagagtctggctctgtcgcccagactggagtgcagtggcgcaatcacggctcgctggagcctccaacctcttgggttcaaagcaatcctcccacctcagtctgctgagtagctgagattacaggcacatgccaccacatccacattgggctaatttttttatattttgtagagacagggtctcacaatgttgccccagctcatctggaactcctgggctcaagcaatcctcctgcctcaccctccctaagaactgggattataggtttgaccaaccacacccaaccggca

SEQ ID NO: 68505 - DNA, 2097 bp, Homo sapiens
aaccagcacagaagcaggatgcctccaagactgccttggttggcacctgcagcctgaagggggagaaaaaggctttgctagctcccctaccatcgaggatgaagacccccactgtacacagtgtataaggtttctttccatgtgaatcccagtgactctccttaactgggtggaggtggaaggtgtcatcagccttgtcccagatcgagcccctcaggcccacagagccccagtggggcctggctattactgacactcatgtcacactgagatgtaagacggcagcccaggccaagcttccccgggccccctcagattctcgggccctcccactcccctcaggcttcctcggcctccctgccaaacatctatctccctttggaccccactgctccccaaaactccccacgcccttagtctgttccttcagttccccaaactccttcagcctcatctagactcccctccgtccctcttctaggaccccaaaagctctcctcggccccaggaccccgcagaggtcccgtagtcccatctctgagaccccacaaagcctttcggacccctcaggtggcccttaggcctccggagatcccttggctccccacactctcctcagaccccagctcaccttagcctcgccccgaacccacctcacacaccccaaacgcccacaagacgccgctctgtctagtctctcccaactcccgcgcacccccggacgtcccccccaccccaggcccggatcctggaatcacctgggccccgcgccccacgccccgccgccgggcccacctgcgcgcccagctggttcagctgctgcatgtcgccgcccacggcctccggcaccgggtcctcagtgcagtgcaggcggcccatggcgcgcgccccagccccgcaggttccaccgccgccgccgccctgctcagcttcctcctccgctgccgctgccaccgctgccggcctctccgcgcatccacaaccgcactttcgccacggccgtcgcagcgcactcctcccccggccgccctgggctgtccggagccggggagccctcgcagggccgcggacacgcgcggccgccgggctccggggaggggcaggggcggcgccggcaccggcagacgcgaggtttcctgccagctctcccgctgagtgacctttgggtacggcgcttggcctctctgaacctcagtttcaccatctgagaaaatgatggctggggtagctccttaaatgagttaagcctccagaaatgtttaacgcagagaccggcacacaagaggtcttcaatcaatggctagctgctattatcatcatcactgttactatgcactccagagatatttatggcagcctactcgatgccagacactggggacagggaagggaacaaagcaggccagagtgtctctcggagagctgacatcagagtagagactaggtctcaaccttggaagggcatcagcatcaccccagcatcacctggtattgccgggccccgcccccagaggatctgattcgaaaggccagggtggagcctgagaatttgcatttccaataagcacccagggactacactttgagaccttctggagtggaagaaactgacttaccaaagtttcctcaaaatagtgcgagggctttgactgtgcggggcagggagggtggtggtgaggtgggtgaggggaggttactgagaccgtgatcatcactgcagcccctcaaacactctaacccccatgccctctcttcccaggggctcctcacagttcccaggtgaatattaccctaatccccactggaaacatgagaaaatagagacatgctacccagaatctaggaactgaacgccaagcctaagggcttcacctagcccctaagtccagccttgagggtaaagaggtaatgccgagaaacctggagcagggaaatgtggggggtttggctggccttcctcaccagccctcctcctctcctctaccctttcctgaaaatcccttctgtaaaagtataaacaaaatgtcttctacccggcccggcgcggtggctcactcctgtaatcccagcactttgggaggctgaggcgggcggatc

SEQ ID NO: 68506 - DNA, 924 bp, Homo sapiens
acaccttatatgaagagtcacggaaagacattgcaaaggagaaaaatgctaggaaggagagtggggggctgtcaacaggtgtaatgggggtaaacctgtccggcggagggaaggtaagcagatggagcagttagcctctgtggggccttaggaaaggagcaattgagggggaagccctggggtcttgggcatgtcacccctaccttctccctctactctgcaggtcagcataacttggtaatcatttcctggcctgcagccagggttatcagcatgctgtgtatatggacgtcgtgaagattggaggctgagggccctgaccagaggagataagaacaggtttggacaagaagaatccatcccctctatgtttatctcaaaacggtagagcaggctgagtctggacccagaacaaatccaggaagtagaatccaagaagcagagagatgaatcaagaatgacactaaggttttgggcttcattccatgctacactatctgccccatttgacagtgaaggaagcagacgcccagagaagggaagacacctgtctgaggtcacacagtgggttaataggagaatgagaacagaacctagaccgctgaacttttccccttaaccatcttaccctcctcagaagtcaagcctgagcttccaaaaatgaaggaactcaggtccagggaaactttctgttttgtctgagggtgagggatgagataatgatgagtcagggcttcagggaaacgaacatttactgattacctaatgtgggggtagatgtggtccctgctctcagaaagctcaaagtgtgaatgaattaaagtcaatgtgaccaggcgcggtggctcatgcctaaaatcccagcactttgggaggccgaggcaggcagatcacctgaggtcaggagttcaagaccagcctggt

SEQ ID NO: 68507 - DNA, 1379 bp, Homo sapiens
aggagcccgggaaaaaggccccagaaggagtctggttttggacgtctgaccccacccctcccgcttagggcttctgatcccccagggtgatttcactggcccggggttgggagggcagggggccagggggcggagcccgcggagaggggcggaggggaggctccgagcgatttcaaatttccctcgtccccgcccccccgttccccccgcgcccgggcggggatctgagtggctgcggcgggggcacccccgggcgggggcggggcaagagccgggccggggctacaaggggagtcggcaccgccccctccccacccactcccgctgccccgtccggcccgcgccgcttcctcgcagcagctgctcccggctccgcggccgcagcccgcgtggacgctccgagcgccccccgacggacgggaccggctccctggcggtcgggcgagcgggcggcaacgctgcccggccggcagcgctggggttaagtggcccaagtaaacctagctcggcgatcggcgccggagattcgcgagcccagcgccctgcacggccgccagccggcctcccgccagccagccccgacccgcggctccgccgcccagccgcgccccagccagccctgcggcaggtgagcgccccggggccccggggaggctcggccgccagctgcttcgagggctgctaggggaggggacggcgggggctcccgaagctgccggggagagaccctctccagggacctcccgaggaggggctctcgccgggttggagacccggctgggtttgcggggtgaggaaacgtccacggaccctgcttggggtggaacggggacagcgggtgggacgcgggggacatacgtctgacggggaccggagatactagaggaagggacgcgtctgctgcctccaggagcccgaagaggagagaagcttgctcgcagggagggggacgcgctggcttcccggggtccagactcgaggaggaggaggtgcccgtcgagagcatgaacaggggctttgctcatgggcagggggtgtaattacctggcctctgccttgggaaaagttaaggggcagaggaggtgaggaggggtttctgccatgcaggtgggcgtccgccccttgcaactgggatgtggggtcttcaggcgaggcgctgtcccttcccccaatcccagctttaggaaagagctcgtgagtgtgggcttagactcgcgcgggctggggtgtgcgccgtggagggcgtgaggcagagggcgacctcccggggtgctcctgagctgagccatcaagcgcggggagcagcggggctgccctctgcctgtgcacacctggcccgggaggagccggccggaggggcggcgcctccctgtcccggc

SEQ ID NO: 68508 - DNA, 1121 bp, Homo sapiens
gaattatgcaacgagaagaaagcatatataagtgctcagcttgctcctgggggacacccaggtagctagtgccatttattgtgggttttcttcctggactgtctctccagtacccacaggtcttgttctaggggcttgaggcttttcctgaatgttgagatatgggttttggaaggtgtgctgcccacacgttgggtaggctggtggccagttggcactgctgaggccctgggggaaggcccagggtggttaatcattgtcagcctgggtctgtctaggaggtgagactcctgtctggcttcttgttgacccagttagggcctgtctgaggaatggggttcaatgttgcctgcgaaacccagcacacattagaaccccaggccctggatgaaggcgaaggaggtcacatccttcactccaggcctctggtctgctaccagctcctggccacaaacaaaccctgtgtgtcctccccccagagcactttggggaggtggaccctcctggagacaccaggtacaccaggtagccccacctcccactctatgccaggcccactaggttacttagttcactgatttggcctgaggtgaaacgcttgaaattaatgattattctgaaccgacaccgcagcagctttcctgggattctgactgctttgtctcataggaactggccataggtcagccagcctgttcttccgggtcagggcttgggagaaaaagggctgagaagcagctgattggtctgattcaggcacgtcccttgtccttggtaggggaaattccttaacaggtgctgatacacactctggatcatgtgaagcacagaaagcctatgtgttatgtatcagcgcacatgtttataatctgaacaatgctgctttaacatgcatattaatcacctaggcatgacttgtgtgtgttaaaatgtcttgtgaaaatcccgcttcaggccgggtgtggtggctcacgcctgtaatcccagcactttggtaggctgaggtgggcagatcacgaggacaagacatcgagaccatcctggccaacatggtgaaacctgtctctactaaaaatacaaaaatcagctgggcgtggtggcgcatgcctgtaatcccagct

SEQ ID NO: 68509 - DNA, 1611 bp, Homo sapiens
agaaagttgacttctaagcgtttccccaaagtgtctattaggtatctttatgattcaataacccattcttacagaaattaattgtaagcctgggagcggtggctcacgcctgttatcccagcgctttgggaggctaaggcgggaggatcgcttgaggccaagagttcgagaccaccctgggcaacacagcgagacctccatacatctctaagcaaaaaaaaaaaaaaattcattgtaaaagcaattttctttttggttactgccatagggattttgtaactgagtcacaccgggccgaggcgggacctcattggctgcgaccgaccacgtgccgcagtcgccccggcggtcggggccccgcccctcggctaccgttctgtggatcaggggccgagctccgcccccggcgcgcggctgagaccctctctataaaaggagccggcggaggatggcgagcctttacgtcggcgcgtaacgagggggtgcgtgtgaggtcatcgcgcgggcgggcgggcggggtctggcggtttgaacgagacgaagacggaaccggagccggttgcgggcagtggacgcggttctgccgagagccggtgagccggctagcgggcccggggggtgcggctgggggggcggccgcgtgggccaaggccgggcgtgcgcgggcaggccctacgggcagcgccagggccgttccacacggcggtgctgttcgagccgggtgggggaagggcggggccgtcacccggcgcgcgcgggctgggcctgggggcgcgcgctgcgctctgctcagggggcggggtctcgggccggaagtgggctgctgctacgcggggtgggggtttctgggccgccgctgaggtgtggtccctgcgctgcagcgactggaggtcccagggtggttgggccctgggagggtgtgggcgaggtgggccgtcctgggagctctggggacgcacattgtgggaggccgtgttgcctgagggccgagagatcgggtggtggagtcagacctgggttgggttccgtgcggtgtgaccttggacaggtgctttaaccgctgtggatctcagcttcctcatctgtaaaacggggacagtaatactacccacattaaactcttagcgcgatgtatggcagaaagtaagccagctcttggactccctcctttcttcagtgtgtgtttattgaatgcccactaggtgttgggcaccgtgctaaaccctggctgttttcccgggaacaaagatttgctctccaggaatccacattatgatgagcaggaggacagtataacgggatggtatcaacagtgctagttcagtccctacttcacagttgccctcggatgctgcagggcagagcttgacctctgccccattttggggatgaggatcctggggcccattgagggaggttatgctaggccgggcatccgcttctccgatggcatgtctctaacagtagtaatgataatagcagctctttgttagttgggcacttgttttgtgtcaagcactgttaagtgctccatgtggctttgtgtcttttaatactaacactgtctttaagagagattctcttcttccttttttttttttttttgagaca

SEQ ID NO: 68510 - DNA, 816 bp, Homo sapiens
taggattttttcttttttttttttgagttcagcttctgcccttccttattttatagctgggtcctagtctcggtcttagtttcattgacttgtcttgttatttccttggtgaggtgtatttaatcttggttttacggatggtcagatggaggctacgtgtgaagctgtacagtaacacagtggtgcccaagagttgtgtttattcagcattaattactttgctgatcatagacaacaggctgttagccttagatctgtgctgtgtcccccccaccattttctattagtttcctcattattcatttccctatccccatttgtgtgaggcttttaaagcacttgtttgacctgtgttctgtgactaatgtgaggatgaggtcatcctagttttcactggagccagctttttaccagcaattccctctaaaatttacctttttctgtaaatatattccaaagtctatttcacttagttaattggaaaatgtgatctttaatgtttagataagttgtatatgtgctgatcgggctctaggtttatctcattcaggcagagagctgttgtagacaggactgggcataaagaggcttcagtctgctctgagccatgtgacttttgacaagacccttaatgtcttagttcttcatctgtgaactggggcagcgatacctggcccacttgttggccagtgtgagaatcacctataataacagctttcagataactgactgtgtgccagaccctggaaatgagtgcaggtcatttgatgggggcacatcctccttttacagatgaggagactaaccctggggcac

SEQ ID NO: 68511 - DNA, 640 bp, Homo sapiens
ctttctgcttcttagcatttctctctttgtccccaacccctactcaagtgcattgcctggggggctcaacctccagggctctgaacaaagggacagagtgatgctccagtggccaggaagcaagccaggtggttttcaattagctttcaacaaaagaggagtgttgctgctggtggtggtattaatctgctggaattgttgcaaaaccatttttgataaaacatcatcacatgatttttggcatttacattgaaagcagttcaaagaattgagcaacactgttttaccaaaactctgttcattcttatctgctgacctgtatttgctaaacaaataagcggatgttttttaagagcgcttaggtctctaaaaatgaaaattaggtctctgatgagtgctaaacactgcctccttctagcaataagcaaattataaatctgttaaaagaactaattggaaaaaagcccaatccatgtcattaacacatccatttccaaatcaatattactttgtgtttaattattatcaaaatttgttttgataaattgtatatcactattaatagtaacaatctaaaagattattttaaatacatagtgtccactggtcaaaggagatttgaaaaaaatttaatcaagat

SEQ ID NO: 68512 - DNA, 347 bp, Homo sapiens
agtttagttatattccaaaagcgatcctccaccagcttcagcctcagctgggtgcttgataggaatgcggaatctcaggccacaccccagacctgctgaattgcaatctgcggggaactgtgtacacacaggagcaagagatactccgctctacaacctcagggcaaatgcctcagggcaccatttgaccctttaaaattccagggttccaaagttcaacatgggaatgttaacaatctagaatgtagatttttgaggtcctagaattctagtgttctaaggtgttaggattctaacaccctagggtttccagatttaagactgctgggatcccattgttctaaaat

SEQ ID NO: 68513 - DNA, 1861 bp, Homo sapiens
accacacccagctagtgtgtgtgtgtgtctgtgtgtctgtatgtgtgtgtgtatgtgtgtagagactgggtttcgccatgttgcccgtgtgtgtgtgtgtgtgtgtgtgtgtctgtgtgtgtagggactgggtttcaccatgttgcccaggtgtgtgcatgtgtgtgtgtgtgtgtgtgtagggactgggtttcaccatgttgcccaggtgtgtgtttgtgtgtgtagagactgggtttcgccatgttgcccaggtgtgtgtgtgtgtaaagactgggtttccccatgttgcacaagctggtctattctcaaactactgagctcaggcaatctgcccaccacagtctcccaaagtgcttggattacaggcagaagccacagtgcctggccagcataaactattctaaatagctttttttatttaactaataaatctagacagattaaacattttagaggacctctaaaatactatgccctgtggaaaacaagacaaagcactaattccatacagcttgccttgggacagattctcccttcagtctcatctgtgtaatacttattattctcaaagaaagtgaacacatagagcgacatttaaattccaagatgtaacaaaaccttaatgttaacattaaaaaattaaaatctcagagtgtgccacaccataggtgcttaattaaaaaaaaacatactaaacagtgaaaatggatgacccagtccttagcctatgttatggagttagcgaagcaagctccagtgccctgtggcttagtcatacaataaatacttactgtcacacagtggctgctcagtaaatatttatgctttttaaactaaacagtgaaaatgggtgaccagtccttagcctttgcttatgaagtgagcagaagcaaactccagtgcccagtggcttagtcatacaataaatatttactgagcagctactttgtgccacacactatgctaggttcttggcaacaaggacactgtttggtcattaaggaaacatggaaaagtgagggatgccccctctccaagcaagcctgaccccctccgcatggcctccaacacacggctgcttccactctgggctggcaggtggatctgtttacagatgttatctctctcatgaatcagctgcagaacctgatgaaacagaacacattataggtaatcacaatctcaccaaagaaccttacagaaagcaataccgctcttactatgtatcctccaaggtcaattttcacataattaagaggctaattaaaccagacacacaaaatcacctattccctaacttttgttcaagccccattctatttgtctcagacacttcacctgatggcatctctgctttcaaagagtagagagaagaaagtaagcagaggtcagattaaagccatgggagctgaatacaggtagtgctgacactagggtcagcaggcaaagcaggaaaaaaatggcacttctttcagctagcttacaaagcagtcactttctattttttttttttttgagacagagtatcactccattgcccaggctggagtacagtggtgccatctccactcactgcaacctctgtctcctgggttcaagcgattctcctgcctcagcctccccagtagcagggattacaggcacaaaccaccacacctggctaacttttgtatttttagtagagatgatgttgcccaggctggactagaaatactgacctcaagtgatccgcctgcctcagcctcccaaagtgctgggattacaggcgtgagccaccacgcccagcccaaactagtcatttttaaagataccatcaggtcaggtgtcatggctcacctctgtaatcccagcactttgg

SEQ ID NO: 68514 - DNA, 1082 bp, Homo sapiens
gtctcaagaaaaaaaaagtatggaccctggagtcagaatctgaccccactgctgccaagccagctaaaccttaggcacctgtcttaaactctgggagcctctagatggggataatagcacctatctccataagcctaccgtaggatcaaatgcaataatacaagcaaaatgctttgcataacgcaatgtagaagcctctctggaggctcgaaattaattctgacagtcggcaatgaggctggaacaacagcgtacaacatcccaaacattttattggctggttacaatgcgttaggcatggtgcaaagcattttccgcgaattattacctataaccctcatagcaaccctgtgaggcaggctgtactgtcaaccccacttcacgggtggcgaagcgaagccttgaaagaagtggaggtgacctgtccaaggtcacacggggttaggcggcggggttagggtacgaacccctacagcctgacgccaggccccacgccataaccaccgtgccatcctccctcttgaacaccgtgcgcttcccgggatccgcggcccctcctgccccaggcgccagtcaaaagcgggtgcgcagcccaccccggcggccgcgctgctcacctcccgcagcagcaacagtgcccggggtcccgcagcgtaagttctgccggcaagtcggatcccctcacaggtccgccgctgcgttcatacacaagcgacttccgttccgccgctacttcaggccgggtcatgctaacggaagtgcttcctttttacagtccgggtggacccaaagctccgtggcggtgctgaactttagggcagccactagccacggacttaagcggcaattgagctcctcaaagtgggtgagtgcaaatcaaatgtgcgctaaatgtcagatacactggatgtggaagaagaaatgtcaaatagtgtcaaatagttcatatatataatgtttatattgattatgtgctgcaataattgttgggatatattggattaaataagtacatttgttgaattagttttttttatttgtagctatggtggtagaaatatttgaattaagttcacctgttg

SEQ ID NO: 68515 - DNA, 1541 bp, Homo sapiens
accttggttgcttctcagggactccctcctccctgtcccactggtgtcccggcctcaaccccctttctccacactctgctttccgggggacccctcttgtccttgatgttcatgctggttacccctcagacccccccgcctccacacagaactcccacccacgtgtccttggtgctcccacaatcttatccacacctgtgtcttccgtgccccctaaggccaccaactactgaaaccccctccaaccttggtgtgcccagtgccctccgttacctgtttcctcagaccccccttacccccagacaggaagcctccagctccatgtcctgggcgcgctgccagccccctgcgccctcggctgcccccagacaccacgaccccgcgccctcggtgtcccgcgcccacctttgatgctgatgcccagcccaccggcgtcggccttgcgcaccgtcacgcggcgccgctggagcagtagcgcctctggcagctgcgggggcccggcgcccggctccgcggcgccgttgagctgcgcgggctcctgctcccgcggagcgccgggctcgggaccagggtcgccgtcggcggggctcacggtcagcacgtcctccgccagactcagcagcacccgctgccatcgctcgccgccggcccccgagcccgccccggcgcgcagctccagcagcccggtgcgcggggcgcgcctgccggacgccatcttcgcctccgagcccccgggccgccgcgctcgccctgtcccgctttgcccagcccgctccgaccaagcgcccagggcagagggcagcgggggcccggctgggccagccgccaccctaccccggccgctgggggaggagctctgggggcggggctaccctggggtgtggccagtgctggggagggggcctcgggcaaatgcaggaggccggggcggggcccgggagccgagggccgccgtgtgggactacctagcggggtgggtcagaagggcggcggggcgggccactaagtaaggcgaaagcccgggaggcgtggtgctgggcggggcgtcagggggcggggcttcgcgtcgggggcggaacccagtgagcccgcgcagggggctcggcgctcggaatgcccatcgagggccgggactgtaactcccggacgtgggagcgcatgaaaaagagacagaaccacgtatcctggtgcgaagcactgggcatcgggctgggctgcatatggcggagggctgggctgcgtatggtagagcgttggactccaaggcttgagtttaagaggtagacaccgtctgggcgtggaggctcacgcctgtaatcccaacactttgggaggcctagatgacagcccagaagctcgaggctgcagtaagccgcgatcgcgccactgcactccagcctgggtgacagagcgaaaccctgtgtcaaaaaaaaaaaaaaaaaaaaaaggtagatgctgagccgcgagagaccttgcgggcacagttgctagttggggagctgaggaagaagttggtttcctatcggggagggcgggggatg

SEQ ID NO: 68516 - DNA, 1903 bp, Homo sapiens
gccccagcctcccgagtagctgggactaaaggcacgcgccaccgcaccaggctaatttttgtatttttatttatttatttttttagtagagatagggtttcaccttataggccagactggtcttcaaactcctgacctcgtgatcctcccgcctcggcctcccaaagtgctaggattacaggcttgagccactgcgcccggctctaagttttgtatttttagtagagacagcgtttcgccacattggccagactagcctcgaagttctgacctcaggtaatccaccctcctcggcctcccaaagtgttaggattataggcctgagccaccgtgcctggtctattttttatttttatttatttatttttttaatagagacgctagtctcaaactcctgagctcaagtgactctcctttggcctcccaaagtactaggattacaggcgtgggccaccacgcccggccaacagttattaaaattacgatgatgaaattttaggcatttagaatacttcaggccaaaaacactttgagccagggggctcgctcaaaggcatgcgcaaaagccatcaggcctgtacctggagaactcaggtgagacgttgccactcgttgtaatccctccccctagcactcggcccccgagcctgggccactgccctggctacaccgggaagtctggagctagaaagtgggccgtgcgcgtgacgggcgcgcgtgacgccgagggggcaggtctgagaagcaggctgcgccgggattcggcggtcggttcccgcggaaggggcgggtcaggttagggggcggtgcttaatgggagctggtcttggggccgggcttccgcgtgcgttggcctggcggcgagagcgcgcggcgggggcgtgcccggcgggcggggcggggccagccgggggcggggcggggcgcggcctaacggcggcggcggcggcggcgacggcgacagcagcggtggtggtgtctggttagctcggcggctgcagatctcgcggcgacgcctgcgagggacccgggccgcgggtcgaggcgggcggcgcctgcgagggacccgtgtcgcgggtagaggcgggcggcgcgcggcggcggcgctcggcgatggtaggcgtccctggagcggccgccttccagcgtaagtggggcgtgaatgcgggcggccgaggggggcgtgtgagggcctgcggctccgcaggcgcggtgattccgagtgccccgggcgcgaggccgggagtggaaactgaggcccgaagcggggcggcggatccaaggtcacgcagcggggcgggccttcccgggctcctgaggccaccccgtcgcttcctgcgccgcccgaagagctcggggctcacggtgtgagggaaattgtggggcccgcggcctcggaacttaggccgggccggcgtccatgggacttgccggcgggcaagaatcattttgttgtcccagcgctggggccacgaagtccggctcctggggaaatactacacccgcccgatgttgagggttggaggagatgagaatggcccctcggagggcctgtttgagcgcaggctcagtagttggctacctgggttcacatccaggcttccccatttaggtagtgaccttggctctcccggtgcctcagttcccccatctgcaaaatggggatgtggagcgggttccctccctcccccagggttcttgggttttgtgaggccagtaaaacgcttgacaccgaccgtggcacacacacaattgtgaaaactgtcattattgtaatcgtcctttattaatctgatccagtgtgcaccgcactcggaaaagtccgaaattaggctctagccgtgttaagattttgttttgttgtctgttagtcctgctccatgatctaattgttattcttact

SEQ ID NO: 68517 - DNA, 812 bp, Homo sapiens
ttttcttttttaacgttgtttgaaagtctagaatcatttttatgtgctagatgagagatttgatctgataaatcaaactcagatgtctgcatctcaagtgtatttgtagaattatttttctgttttctattaatttagattgaatgtcagagtacccattataggtattaaaatgaatattacataagaaaaaataacaacttaaaaatgttcagaattgtttaaataaaaactttagacagacatttagcagaatttaggtgagcattaaaggattcaggcagcattcaaaactggaagaagttcagagagctctgctttagaagcaggcttttataggctgaacgctgtagcaaagtaaaggaattacttgattggctgtagctaggcacttgccttatttggatatgatccagtggaaagtccctagttagaggtttgtttttgattggttaagcttaagtttcattttatgtttacattgggcttcagtttgcttactaggcactggagccagctgtctcagcctaatggctgcccaatttaaaaaaaaaaaaacattaaaatggcatgtagttgtcatcatcagagtaagaaaccaaagaagagaccgtcatgaatgggatcattagatcatggactgacacacatgttcacttaatacccacaagagtgtcttcacacttttttgtcatggatgggacttgttttctgttttttgttttgttttgtttttgatacagtaaaatacttaggagttcttgcaactttctataagttgtttacattttactccaattgctttatcattg

SEQ ID NO: 68518 - DNA, 758 bp, Homo sapiens
taagaaggaatttgttatattaggatttaaaaactggctcaaaaaacagaagctattaaacaatagcagaaaccagacagtatataggactttaaatggtaattgctaaacatttgaatgttcccaaaaatgtgagtctgtgtgtctctgtgtgtctctacgtgttattccactagggatttgcacagataggttttgcacaatatccttgctgttattgtcagccataaacaaattacacgtatttaacaagttaatgtcagattggccaggagccactgggaggtgtgtacttagtgacatcagctggcaaagagccctggtaacagggagggttggaagggtagtggagagagaggaagcaggagggagggagaaaaagagagagactgactgtatctggggattctggcaaggtgaagagctggtctgtttggcaggaccttcccatctgggatccatctgtgtttccctggaatgggacaggcagctctagtcagtgagaaatcgcagatgtgagagagctgacacatgtccagctaatgaaaggaggaggaaggctggtctccgattgagctttgaagattaggaggagaaaaagaggagctttggaatatctatttcaaataaatttggtgtatttaagaatctggattgtttataatttgggcatttggggtaagtacattttaatatagttttgggggttaaagtgcacaattctctgcctttcaaagctttttacttctttcaaatta

SEQ ID NO: 68519 - DNA, 1718 bp, Homo sapiens
gtttgactcagtcttaaacaaaaaaagcccagaagggagggcagagattccagaaccagaaagtggatgagacttgagagccccggggggtgagcatgagtgggattctctcccaaccctggacgaacgggtggagatcccaacacggagaatcagttctagttggtactactggagctagaggcagggggaattccctagtgtcctctcttcagctcctaggctcagaacttccctgtctccctctcaaatgagcagaagccctggaccaggcgggggtgggaggtgctgaaagcccctgacatagggcctggaagggatctcataaacttagacggagctggtctcaggaagtcagcctgggatggatgagggtttccagaaaggaggcggagtccggggcgccacgcagggaagggcgggcttccccgcggcctgaattggacaggggtcccctccagccctgtgcacgagaggatgacaggacccgggtggacgacaggacccgggtggacgagggtcccaggagaagcgcggagcggccccgggtcgtgggctcggccctagcgcgctctcccgcctcacgcccctgttccacccccagaccaggatcgtgctgattctccccctggacaagcggcagccgctggccaacgctgggcaacggattgactacgcgtccggcgctgggctgggctccccggcggcacccagattgcgcggagcgggcgaaggtagcgagcgcgagccgaggatgccggtactgctgctgctgcggcggcaagaggcgcggcggccggaagagggcggggccagggcagctctgagctggccgcggctgctctcgcgcttccggtccccggggaaggctccccgcgaagccggccccgccgaggagcagccgcgcaaacggtgccgctgccctcgcccgcagctttaaacgcttggcccggaccccgcccaataaagagtgcgtggcaaccctggcgcctgcgaaccctgtcggaggcgtctgggcgcggagtcggggtgggcaaagctcagcctaggagccgcagaggggtgaacggggcgtgatgaaggcagagccatcgccacggtctggagccagggctgtcttttgctttctccttccttgtgccaagggtcagaacagaaccccaaaccttgctacagtggcgggaggcagtttccttcccccaacactccaaatccaggtcacatcctgcccagtctgcaggctcaagggaggtgggcttgggcaaacccaggcttggccacgctagtgagagggacctgcttccggtaaagcctgacatccccccagcatccagaaatccctcttaggcatgagggagggttcccggccaacaggcaccatcctgggtaagaacagccaggatggcagtcagctggggcaaggcctgagacgtggattctgcctggggacgcacccaggagaagctggaagccctgggcctctctctggcccctcactcctacacattgtgcttggtaaccccaaagcattcaggccccccagtcttccccaaggcacctgtctcccaacctaccctgtcccatctccttccccacgtgacaaagactaattccaaaccacttacctgtctagggcagctcactcccctgctcataagctttcaacaggtctccattaccaacagggaaaaagcccacagcttcagtctcactcccca

SEQ ID NO: 68520 - DNA, 2187 bp, Homo sapiens
tgtgtacacacacacgtccaagggggagtgggggtggcagaaggcaagttcggcagatttcatttatggagaagtggagatgaagagcaacagaggcagagaggagcagagtcaagacaggtccccgtctctcttagtgacctgctcccaggtcacccaaagcagcccagcaaaggggagactggcaggcctggcaagcaggggtgggccaagcctgggccgagagcccccatgaactccaggtcctgaacgccagccccctccagggtcctgttttgtcagggtcagtggggctcaggaaagactctaacctctagcctaactcagagaaggtctgccactggctgaggggcacgcagcaagccagggaggcccaggtagggtagatggagatcttgggagtgggcaggggtgctaagctgggaatggggacatctggggtcaccctattgtatccctgcctccatgactgacctgagacatatcccctcaggccttggttttcctacttgggaagaaggagggtcaggtcccttccagccagggctgtggtcaaggtgctgagtcactaggggcagtggggagggggtgggagacagctttgcctccctctggagttggggcatgagggggccaggacagagccgagcacagcggtgaacggtggagaaagggctcagggccgtggctggtgcccatggtggccgcagggccacccatggccccatgggagggtgactctgagcagcccttaccaactgtaggactctgctgccctggagtggggcctgaagaactctgggggcggcactagagtcaggagtgaggggcccttgcgtttccaggctccccttccccagtcagcccagcctggagctgccacagagtggggtgaccgctgctgtgattgtcgccagccccccgccaacaccagacacacaaatggggtgggctgaggggtgggaggcagcaggggcagtgacactggagcagggacaagaggagacatggagagacagaacaggtcacacaagggcagaaaggtcaagagaaaacagcagggccagagagaggggaagagacccagaaacagcggcggggcccgaacaaccccggagggtgagactaacagagactcgggtagggagacaccgcgagcagagcccgcgcccactcacgtcctggaagagcgtgtgtccggcgggccccgggtcgggcgcgagctgggggtgccgcggggtctggggctggggctggggcgcgggcggccggagcaggcacacggtgagcagccccgcgcacgccatggcgccgccacccgctcgggctcggctgcggttgctgccgaccctggacgccgcggcggactcggtgtggctagaggccgccccttggcgccggcgccgacgcgcgggctcaggccccgcccccgccccgcccccgcggacgccgggttccctcgcctcaaggtccaactccagcgccgcgggcctccgcgcttccgcggccacggcggagggggaggcgcccgagggctccggtcccgcgacggcctgtcgggagcagaacctaggggctgcgggcctacccagagggacaggatgaccaagccagtgccgaggtcagggtgacacaagtgggtaaaacccaccaggacttcaccttttggggcgtctgtatcctcatctacaaaaatggtactggcagacaccctatgcaattgttgggactcattcaatgtcaagtgcttacaacgggggctggcgcagaggaagcccacaggtccgtgcggccgaatcccaggcatcccgacgcccgccctctctggcactaagcgcagccctttcccctcccctccgtgactctggccctcccttcaacccgttctccacacagcagccggggggagcttttaagatgcgaaagaggaggtgtcacttcggtctccagtgactccttggcccctgaataaagcttaagactgaacgccccactccaggagcaccactctgaccctcacctcaggaccgcagccacactgctttctctccggtcctctatcccgctccctcctgcccaaggcctttgcccatcgtgtcctctgcttggtgttttcttcctctggttaactcctacttattttacagcgctcagcttaagcaccacccattccagaacgcctttccc

SEQ ID NO: 68521 - DNA, 1348 bp, Homo sapiens
ctaggatgccaattctgggggacacaaaccactttctctggtttgttctctgctttgtccccggttctggcactgtaggccctcaataaatggtggctgttatgcactaggtttaaaggagactgagctcccctctaggcaccagccagggcaatgaccccaagacctctcttgcaggtaagatgccaggatagttgcagcttcttttacattcattgtcacgtcccaggagccccctgagccgaacgggacttagcgctggagtcctacaggtgagaagtgagaagcaggatgcaagcccatgggcaagcttcatggggacagaatagacaggaggcatccgcctgccagctagaggccagagtccagttccccattgtgcagatggggccgttgaggcccaaaggcacacagagaggtgaggtgaactgaacccaaatgaggggatacagaagctggcatgggaggagtcaaagcaagagggccaggctgcaaaggttggaagacccagaaaatgtgcagtgggagccccagttcagagctgggaaggcgcgcaagccaaaatccagctcccattgcacagatggtgacctccgagacttagagacacacgaggactgctccagggcaaacagcaccgcggcatcggacttcgaactcgcgcctctgaccccaggcaggacatccctcagccccagcccggcccgacggccccactcacacagccccgttccggaagcccttaagcacggccaacgcagcgtggtagcggcgcttgcgcagcagtgcgttgacgactacgagcagagcccttagctgcggcggggctgccatagtgcgggctgcgcgcagggtcggggttaggaactgtaagcgcactgacagccggaggttccagctgcgcgcccacagcccctcggtagcgccgccgactcgtggcgtctataggctgtttctgcgtcactcatgcatggaagaccaatcagagagcgtacttgtctcatgggacaatagcactcatcgaaatagttgtctgactggaagagaaaggaaagcttgtagccaatcacagtgggctccgcccaaggtcacacacgatttgtccaatcagaaggcactttcccttgggccatgttgggttcacgagtgggtttggaaggaggcgtgtacttggaaggagggctcctgaatgaggagtggccctgcttagagatgggatgggcgacaggtgatgatacagggaggagcagggccccatctttatgcgagatagttctgactgggatatcctttaccatagcgatcttcccagagtgtcagtcacatggcccctcaatggcttccatgt

SEQ ID NO: 68522 - DNA, 1622 bp, Homo sapiens
acatggtggcgtgtgccggtagtccccgctactctggaggctgaggcgggctcccaacaggcagagttgagcagggtagtaggggcgggaagtctctaataggggatgagggatgggaatctatgttgtacagcctggagatccctgtgacagttgggtggtctgggtgagatgggataggggtcatggtttgttgcagagtcggggtatactgtgctcagcggaaatggggtccgtgcagcagacctggaggactcacgtgctgtgggaatgggggattctgtgtcagagctggggggtcgggtccggtgagatggggatgcggatttagataatagggatgggaagttccgcgtgtgcggcggatataaggtcggtgtagacttggtcgttcaagtgaggcggggtccacactcggtggcccggtgactgggttatcgagtggagccagggcagcccagagatgctggggtcccgcgagcctaggttgggtttccagggctgggggctcggcggcggctcctgggcgccccctggcggccccgactcaaccgccacggctcccacaatgctcgcgtagccgggcttcggttcctgtggcggcgacggcggcggctccaagatggcgcaggcgatctttgaggccctggagggtgagcggcggcggggccggcggaggcggctgttccgcgctgcgccccctcccgccgcgccctcgcagcgcccggcctagggcgcgcagcggccgcggggcggagggcgccggggctggaacagccgcggggcgggaggggcgcgggcgggaacagcgcgggagccgaggcccggcgggggagctccggggccggaacagccggggagagccaggccggcggggagggggctcgggtccggaacagcgccagcctgggcggccttgggcgggcgcgggaggggctccctgcagggaactgcgcgggaggcgacggcggggcggtctggaacagccgcggccagggaggcggcttggcggcgcgcggggcccgggacgggggtgcggtcgcagctgcgggcaggagggcctcggcggcctgaccacgaagaacttctgcggagcggactgtatgcctcgtgctaggacgtagtctcaaaatcagaccacagcagcagaggcgccacctgtgtgcacagcctggactcagagcttagggacccaagccagcaaacacctggcgcctgcagtgcgcaccgtggccggtgcagttttacaaattaaactgacaccgtgggtgctggcgcggtgtgcccggccgggacgcggtgttcccagacccaggccagcaaacgctgggtgccgacagactgttccgtgctctgcaagaacctgggatggggttggtgctcaggctcaaaactgtgggctttggagacagcaaacactgagcacctccatgtgtgcatctgctgggcgtcggggaggaagggcagccttagcgactcggggccatggcgcagaatagatattgtgggaaatacagaccaagaatggtcttggaggagtgggatgagatgagtatacagatagggtgcaaactcgaagtactggactggcgggatgaagctgaagctttgagtcctgcagc

SEQ ID NO: 68523 - DNA, 824 bp, Homo sapiens
cctcaagtgatctgcccgcctcagcctcccaaagtgctgggattacaggcgtgagcgactgctccaggactcccttcacttcttgaaggatcacaattcgcaccaggaaatggggggcggggtagccctgtctccatctagtggggttccgattcaaagactgactgagacagacactccctgtagtttctgccctgcagtctggtagaggagagaaattataaaacaagcaattatagaaattatagaattatggaaaaggtcatgtagaataagatgacctcagctggccattcctactgtgaataacataagcaggaggtggtggatcaggaaggccgaggtcagtggtagttccctcccagaggccaatagaatggggtgaggcttactttctctttaggctgtttggacttcctcattgtttgaatatttactgcaagaatgtgtttgtgtattgagtaatgaagacagttaaagagaaatcagttcctaggacagtgggatgcatgttgggtgaagaaagggcagcaggactgtggagatctaggggaggagggcaggagaatggcccaggcagcaggaactgcattttcaaagccctggggagaaaggtctcctgggattcacagaagctgggtgtgggtgaactgctagagatggggtttgatggagcagctaaactttatcttgggatcagtgtggagctaacaaaaggttttcagcaggggagcagcacaatgtgatgtatgttttataaagttcaccctagctgctctggaacagactggagggggccagagtggcagtggggggtcggggtg

SEQ ID NO: 68524 - DNA, 1715 bp, Homo sapiens
catgtctctctcgtctctcttgtgtcctataagctggaacagttcctccttctgtctttgtcttcgagaccttgatatttctgaagagtatagacaggttattctgtagaatgtcctcagtttgggtttgcctgattttaccctatgattaaattcaggtcatgcacttttgtcaggaatgtcacaacaaatactgtgtcctcctccgtgtgtcatatcaggaggcatgtgatgttgatttgctctattactggtgatgttaccttggatgacttaattcaggtgctgtttctggcaggagattttaattttcctggctattggtaaacaatctctgacacaaatctatgtctcccccaaacccagcccctgaagcatgtgagattctgtcctttcccatctcaccagctagttaagtctctgccctcctggtacctctgctcccaccccaccttccctttcttgctgcctggaggcatttagtatgtggcttctttctttttcttttctttttttattttttttgagacagagtctctctccgtcacccaggctgaagtgcagtggcatgatcttggctcaccgcaacctctgccctcctgggttcaagtgattcttgtgcctcagcctcctgagtagctgggattacaggtgtgagccaccacacctggctaatttttgtatttttagtaaagacggcatttctccatgttggccaggttggtctcgaactcctgaccttaagtgatccgcccacctcggcctcccaaagtgctgggattacaggcatgagccaccgcgcctggctagtgtgtggtttcagagtgcgcctggctagtgtgtagtttcagagtgcggtctatggggctcccctgggcccttcgcaggtgcagcctgcctggggtttcccacaggcagtactctacacagcctgccttttggtttttgctttgaattgttcacctacctgtgacattcctcactgataactcattgtaaataggtcaatatgctggcaaatgttttcttttttcttttctttttttgtctgataataccctttcttccttagctggcacatgttttcatgatggggagatggtggtgtcttttctcccttcagagtggttggtggcctgagactgctgttgtgaggacatgtttatgagctgtttggcacagttgtgttttttgactctgtattaggccattcttgcactgctataaagaaatacctgagactgggtaatttataagaaaagaggcttatttgactcacggttcagcaggctgtacaggaagcatagtgtctgagctagcagatctgccactggggaggcctcaggaggcttttactcatggcaggaggagaaggggaagtagacatgtcacatggccagagcaggagccagatagagagagagggaggcgccatacacttttaaacagctagatctcatgagaactcactcactatcctgaggactgcaccaaggggatggtcctaaaccattcatgagaaatccacccccatgatccaatcacctcccaccagaactcacctccagcactggggattatagttcaacatgagatttaggtggggacacagatacaaactatgtcagactctgtgacaatctcccttttttttttttttttttttgagatggagtctcactgtgtcgcccaggctggagtgcagtagcgtgatc

SEQ ID NO: 68525 - DNA, 1023 bp, Homo sapiens
gggtgggacagatgtcaggcctgagggcaggcctctccttttttttttttttggagacatagtctcactctgtcatccaggctggagtgcagtggtaagatcttgtctcactgcaacctctgccttctgggttcaagcgattctcttgcctcggcttcccaagtagctgagattacagatttagtagagatggagtttcgccatgttgcctaggctggtctcgagctcctgaccgcaagtgatccatccacctcggcctcccaaagtgctgagattacaggcgtgagccactgtgcctggccaggcctctctccttttatcctgtcctgggccctgcctgcctcacttcccaccctacctccttgcccagcccttagggtggacaaggctgtcccttgtgcccagggctagtggaggggccagcaagaggatcctaagcttggtgagctccccctgaccagtggctttgggttttaggacgcacacaggctgcagtaaggagttcaaccggccggacaagctgaaggcccacatcctctcccactctggtaagtggctcttgggcctgctaagagggtctggttcagctctagttcactgggatagacccgccaggaagagaaagagcagacatatcctgtgaggcttgttttccctgcctggcacattccagccagcactttcacttatgtgggctatgagccaggcctgtgttagggacttaagggtgaacagagatgaatcagacacagtcccccagtccaaggaggaagctgacctgagcagagatgactcagttggagcagtgcccagtgtaatagaggtgtggacgaggtgtggagggaatcagattccagccaggtccaagacatggccaggaagcttctttgatagggcagggcaggggtctccaagccactcctcagtttctcagcgcctcctcagagcagcctggctggctttccacatgccagccgaggtctaaaacaaggttcttcaaccctggcaccattgacaatttgg

SEQ ID NO: 68526 - DNA, 2706 bp, Homo sapiens
cacatgaatatacatgtgaagttcaagcatggcagtatcccatactagcaataaatttttgagcagtgttgcacacttactgtcatttctcttactgttctgccactcctacagagcgcaggccaaggagactacatttcccagaatgccacacgccctttgaccccagctacagcaaaagacgcgccggggagcgcctgaagccggaagactatagcttcccggcatgcagcacgcttccccctattagatttgaggcgcggccggcgcgttgcccactgggagttgtagtcagtggcgcgttgccctgacgcctgccgggccgggcgtgggggcctgtgggaggtggcgcggccgggcccagctgcggggcggaggcggaggcggaggagaggcctgcggcggcagggagcggcgggactgggagcgggcgccggagccgacccgagccgagccgagccgagccgagccggagcgggcggcgaaggccggcgcggcgagcagcaaccatgtcggtgttcgggaagctgttcggggctggagggggtaaggccggcaagggcggcccgaccccccaggaggccatccagcggctgcgggacacggaagagatgttaagcaagaaacaggagttcctggagaagaaaatcgagcaggagctgacggccgccaagaagcacggcaccaaaaacaagcgcggtgaggctgcccggccccttcagacttgccacgggctccccccaggctccccgggcccggacttcaccttcatcagactcgcctcggggtctggtctgaccctggaactctccgggtcagacttcttgccgggtctgggaccccctccccgactcccttcaatgtctccccgatccctggacttttccatcgtcagacttattctgccctctcccctcagcctctctccaccccgccaggtcccttcagaccccaatctcacagcactttcctccgccctcactctgtccctttctcttccgccttttccttctcgcctcacccacctgcctagctactgcccctgcctcctcctcggctcatttctgcccccatcctagcatttctgtgcttcctggtcctacctgtgccctctcccgactcctcggtggaatctgtgagctgccccttggcctctcccctgtcctcttgtctcagaattctcgttgaaaagcctccttgctggagagaaaaggggactgggggagatgagacccccgattcctgctctattcacttgctgagtgaacttgagcaagttgctttccctttgaggcctcagtttccccatccgtcagccagagttcggcctctgttgaggcctaaggtgttttccagcgttgtgattcactttttgttgcctcgtagcttgaccttaccaaagtttcccgtggcgcaagccttcaccccatgactcaccgcttccccatccgtctgaaccagaaatagagactcccgactgctccccagtccccactactaggattcagggccccagtattgaatcttgaggcactgcttactttacttcctgttgtcgtatggctttctgggcattccaagtgctttgtgtttttcttaagtgagatgaatgtgaaaatgctttaaaactgtaaagcagtttagaaatgtttgctttttcttgttatggccatgtgagagtgaatcacagaacgacatcccttccccttgagaggggtttaggattgaggtaattcactcagaagtctgctagtgactagcagtgcgaccttgagctcatttacctttctgaaaggaaaatcatggatttacagtgctcagcacatagtaggggctaaatcgatgttttctccattctaataggagaacaaaatagcctatctggaggatgcttctctgctgatagtcaacagatattctggaaattctttttagtgcctgctgcatgcgctgtattcataggggtgaacaaaacacggcctcaaccctaatgggagagaagacagaaacaggaaaataaatgaagaaaatattgtccgggggtgataagtactaaacacacaaaaagatggtctgatagggagtggtggagtgggagggatgccactttggatagaatggtcagggaaggcgtctttgaaaaggtaaagtttgaactgagtctggagaaggaaccagctctgtaaaaaaaaaaaaaaaagggggaggagccttctgggcgtggaaagcagcatgggaaaaggctcggaggttagcaggttgtaagaaaccgaagagagagacccttgtgtccagaatgtagtgcttggagggagagtggtatggaataaagggggcggggcttggactttgaacctgttggtgaagagtttgaattttattccaagtggatggaaagtttttggagagtattttgttggaacgtgtccttattgacagagtttttaaaacatcatctggctgctctttggagagtgggtgggggatgcgggtgggagcagggagaacagtgaggaggcagctgcagtggtccatttgtggcttggactccagcttagttgtggagatgggaacagggttatattttgctgtctctagctttttcctctgatgactctccctcagtccagatcctctgtttatggtcatcagaatcagtgtttttagctttctgcattttggaatgcaggaggagggtgtcagttt

SEQ ID NO: 68527 - DNA, 2817 bp, Homo sapiens
ctttgaacccaggaggcagaggttgcagagagccgagatcgtgccactgcactccagcctaggcgacagagctagactccgcctcaaaaaacacacaaacaatgaacagacaaataaatgacagaacaagaagacaaactagagaacatcttgagacaaggtgttcagggaagagttcttttgagaaggtgatattaaagcgagtttggggaagaacgtcccaggccttgcgctcagggtcgtcaactctttgatttctcttccttttgaagcagggcagggaggtcatcaaacaacagaaggacaattataactgctggtatggcaaagccaggactctgaattcaaactctgctccattctcaggaatcccgtctgttaagcaggttctggggaagcgatgtgagtcatgaaatcacaggtcggaggaggcatcgagaatatggtcagttctcaactttcagggaaatccatagctgaggaatgaaggacaacgggcttctcgtgctctcactaggaagactggttcaccggaggctggaacactgaaagtgagaaatcccgacaggagaaatgtgtaggagagaggactagcacctggatcaagttataaaacatctcctgcatctttttcggagatcacccttagcgcggcctctccgcccagtcccagattaggcagcgaagagcgaccctcaccttgtctaggtggcacgttccttaaaagcgaaaggaccaggagtttcttcctgcctcgtctcttccggatccctcctgcaccgcccacagcctgcagatttgagcgccatctccaggccccgcccacctcaagcaccacccctcagtccttccttggggcacgcctccttccggcacccgcccagagtagccacccccggggcccctcctcccctccctgcttccgggcccgcctccttcaggcccgcttccatcttcctcccactctaagcttctcttcagccccgcctccctccacccgtggctccgccctctgggcgattctccatttagccccgcccacagcatctcctttcaagcgctgtcctggttcccggctctccatctcctgcacggccttccccactggtccggcgaccctcttcccagggcctcatcaccatcttagctccgcccctacttcggctccaaacctgtgcaagctgccctcttcccgccccagccccgcctccccaagccgcgtctcagtccctcctccctttcaggccccaccctggccccgccttcctcccgtccccgccgaagctctggacctttccaaagccaggctgagagggtggggagagcccatgcgcctgggaagccgggctgtttctgggcggggctgcagactcctcgtgctcgtgtcaccgtgtccttcccaggagacagagaaggaggagagcccggaaccagggccggagcggcgggcggagccgagctgcggggagccgctccgggtgcccccacccccgcgcgcctcagtggtgccggccgagggcagggctcgcggttgcggggctcgcgccgctgtcagtgcggcggggcgcgcgagcggcgccagctcggggcagcggaacccagagaagctgagggggcggtagcggcggcgacggcgacgacgacgactcccgcgcgtgtgcccagcctcttcccgccgcagccgcccttttcctccctcccttacgtccccgagtgcggcagtaccgcctccttcccagccgcgcggcttcctccagacctctcggcgcgggtgagtggggactgcgggcgtctccttaggggtgcggggagggtgtgtgctttgtgcctttccgttcactcacttcttccggcaggccgctgcctatttttagaaacttatttctgcccttcggggagtcccgggagcccgagtaactctaggccccctccgccgctcctttctcccactcggacccgccgccccgggtccccggccccagccctccgcgcccggtcctgctcccggcgttccctgtctgctctctccgcgggccaagtctgggccagtagttggctgggtgggcccgcgcccgctcggaagttggagtcttttgtgctcgtgccccgccccgcccggcgaggggcggagggaggggaacggaggctgctccggggaggccgcaggcgggcccggccgcggctgcttccggctctcctaacccggactgggtctacgggctcccggaggcgcgcagagcttgtcctgcctcggctcccgcctcttctgggctctttgcacgccttgggctcggagagaaacaacaacgggccctcgaactggggccgtatccgcgtttcactcagcctccttggcggccgagtcttagtttgcctctcggtgacatggggggaaagaaggaaactcgctttgcggggtgttcgtggattcagggagggaactaatatgtgaaagaagtgtttaacaccgacagggaacatttaatgagacttcacccaggaacttcccaagccttatttcatttaatgttcacaacggccttctggtttatcctcatttacaaaagcagaaattaaggcgcagaggggtcaagtaattttctccaagtcacagtagccacagaagtgcaaaggagtggtgccagtacctattatttattaatatttcctggtgtgagcatgtatcatctcttagtgcagagggtatttttacctagccttgggtcacaccatttaattaggggcataactctgggttttccctgacttctgggccgttgtccactatactgtggatgaaatcccattctggggtta

SEQ ID NO: 68528 - DNA, 698 bp, Homo sapiens
tccattccgctgcgcaacagttgtcatttttctaacatctgaaaactccagaaggagatggtgataaatgtggtaccggattctgcctaaaggatcagtctttagatgttttcagattgaaagcctcatttgtgatcctcacagccatcttgaaagaatagagcagccagtgggtatactggattgtgagctaagaggcctgggactttccccctgttgctgccagccaggttgatgaccctgggcaagtctttttccttaccaggtctcagtttcctcagctgtaaaatgagaggttgatctggatcagggatagtaaatgggcctttgttcagttactgactgttgtataacaaaccacccccaaatttagtagccttaataaacatttattagctcctgagtgagtggcttggcagtttgggctgtgttcagtgtggtggttcttatctcatctgggccctcgtgtggctgaagtgagctggcagatcagctggggactggctggtctcagatggcctcgcccgcctgtcaggtggttggctgggcaactgggccacacgttccagcatctagcaggctgacccaggattctagacatcatggctgagttccaaaaaccgcaagagaagacaagcccagtatgcgagtgctcttgaggatattgctatgacgtatcttttggccaaagtaagtca

SEQ ID NO: 68529 - DNA, 2387 bp, Homo sapiens
gcagcctagagcaatgtctataaccgccaaggaccatatacaaactttcagtttctctaacccattaagatcctagtcaatctggaattctactggtttagccacttagtatttgatcatgggcattatacaactctgtaacactcaaatttttcatctctaaaatgggcacaacaatagacctattttacaggactgttgtgagaaccaagtaagagactggaatcccgtccagaatatattccaaattccttaacttcgtcttcacagccctccatgaactagtcattacctgcttggcaagtgttcaccccttaactctaatcaaactggagattattctacttcctgtgagcacatttactggcctttctcgaccattcctttgcccttgtgatcaaggcttcctattgcctgaggaaattctcaacaacttacggggcctcccccaatgttaagcaatacctactgggagtacttaacatcaacttcattttaagtcgttagacgttatatcaactaggataaatctgagggaaagggatttgaggaaattcactgagatccaagtaccacggtaaaaaaagatccagccagtttcacagcccgcacttcccgctcacgtcgccggtagccctctgttaagggaagctcaggggctcgcccggaaactttccgggaaggtcagtcacttcctgaggctgcagaatctttttctctcgttctaaccccatcaccccctcgtctttttaaaaaacaatgctaggaaggcaaacaagggcgggataccggccccgacaagatagcctagaaagttttaacgagggcgttataccaagccaagagaggctcctcgcggcacccctggcacccccggcacccagtgaggcgagctggggcggcagtgcccagcagaaaggaatgcagggatcgccagccccagtctcgttcggggttattaaccgggcattcgagccccttccgggaggacgactcaacgtgtgctctccattccggaaacgccaaccacggcaggaggtccgcctcagcgctgccgccctgaggaaagcgggctgcggccaagcctgcggctccggagtcctcgccggctctgccgctccgggccgcctaggcgcggctgcctcacatggcggcggccggctgctaggccgcaggcccgttctcccacactggagtgggttaggcttctcgcctcaatccttagcccttacgccgggctcagatcctcacctcgtccccagacatggctgcggctcgagtgggctcggcacggacgggaagtcagacgggtcagccccaggccccggcggcagcgctgcccctgccgatacctctcccaccaccgcactaggctcttgcatcagcgaaaggaaacgacaccccgccctctcctccaagcgttggaaatgcgcctgcgcagagctcgccaaggcgcaggcgcgcagaagagccaacctagcgcgcttcgtgtggcgcgagttaccaggcgacgccgcgtcgccaggcatgccgggacttgtagtccatttataagagggttgcgcttgcgctgtagccgcccagcgacctgtgcgcggcgtctgagcgagctgcagccggaagaacattcggttgttgatattgcctcagccttttggagcattcttttgcgctgcttgtagagtgaattggggtcccttcctcctgggttagggtagtgggttagacactgagtcatatgaacccgctggagctttagtttcccacatgacccccgggcgtcatggtgtttgagaaattctgagttggagctagaggcgcccacctccctaagggtttttacttcgtaagaaatttgacggctggttttctgcttgggaggtcagaaaccaaagtatcttcccggtcttcccccgggagagataacatctcctgaggagaaacaaccacgcaagaggcagctgtcggggagcctcagaatacttgtttatgaaatctgattgaatgggtgcgccacgcaatttcccttgagacctaacaacagcagcgaccctttagggagctctcactgcggctgtgctctccagccaaagaccatcgagaacactcctgtagctggacaaagtggagtttatggtcttgcaagtagggcagtacgccgtgggaaacaccgggacgtctttggaagagggtgttggaaagaatttacagggtttgggcagggtttaaggaagcagagcttctctctggattagatgcagtcaggaggtgggggtaattctatgattgggtaatttaataattcttttttttttttttttttttttttgagactcgctctgttgcccaggctggagtgcagtggcgcgatctcggttcactgcagg

SEQ ID NO: 68530 - DNA, 831 bp, Homo sapiens
taggccagggcccttagtctaaagtctgaatcagcatttggatttagccctaatagagcctgtttatccatccttgctgctatacttggagttttctggttataataggcttgccctctgatcccacagaagaatttataaacatcttccctatcactccagcccgcctcccagcctgaactccatggtcagccagcggaacggagccgagcggcgcagctcgcagagagctgggacagcggccctcgtccttgtcgccgtagtcctctgccacgaccgcagcgccaacgccagagacggagttggccgggactgcacgcctctcgtcgctccgcgtcccctggcaccttctcttgagtggcaggcaagcaagcaagcaagcgggcggggtcagcgccccaagaagggaaagagcgcgagggccagctaacgccgccgccgccgtcgccgctgagtcagcgcgaagcgccctctccgagtaggtgccgcgcgggcgggcgctggcgccagcagtctcatggagagtgcgggcggcagcccgcgggctggggccgtctcctgtctatttcttatttattcctttcaaaatggcgtcttatgataagcaaaaaaataaattttcttgaagtccaatattttatttttacttttatggttagtacattttatgttctacctatgaaatttccgtttactccatagtcacaaagatatacttctagaagttttatggttctagtttttaatgtaggtctatgatccatcttgaattaattttttgtatggaatgccataggggttagagctgtctttccatagagatacccagtt

SEQ ID NO: 68531 - DNA, 1399 bp, Homo sapiens
gtgagactctgtctcaaaagaaaaaaaaaagaagaagaagaaagaaagaggatattctacacatatcagacagggaagggaggaacatcaacatttattgatcttcagtgtaacagacttttcactttataaacagacttcatttatcctcaagacaatactgcaaggcagatattatggaaccttttttgcagatgaaaaaactgagtctcatggaggataagtaagttacccacagccacatagtcattatattggcagagtcaggattcaaatcaggtcctcctggctccagagctctcaggaatggaaaataggaaacacaggtgcatctgtgtacaagacaggagtccattttctgggtatcacaatgttcctgtgcctgccacaatggagatgaaggaaggggcacctggggtggctctgagtggcccaagctcacttaggtcgagggaccaggccccacaagagtgtcacaggcagatcccagtgcctgcttggatttcccatttgccttccctcagaggacacgttgctatcagtgcctggctccaggtcagtagccgggctaacaagaacctactggcttgagtcctacagtgtgactcatccagcacgcttcttctcctctccctgaccttgtgacttcccaagccccctctgcccctctcacttcactgcagctcaacgtccccagaaacatctgactttgctccttttgtctctctttgaagcgctgaacaagaaatccaaacagatcggcagaaaagcagcagaaaagaaaagatcttctaaggtaagggcagggaagttctgggagttctcattgttggggtgagactggacttaaagaaggaggacccccaacctctggctaggaactaaatgaaagatttttcaggcctatattaacaaaagaaactgaaagctactaaagacttcctggcttgagctctgagccagacacccacagaagcccagggagctgaagtccactgagcaaaataggttacgaaaagcagcttcctctactagttagcccctgcctgaaatttcaccatcactcatacttttggatgaatgtggtgtttcccaaacctcagtcatttcagaaccacatttataactttgccatatctgagttccacctatttatttaacatatttgtttaaaattaaatcttaggccggatgcggtggctcacgcctataatcccagcactttgggaggccaaggtgggtgaatcacctgaggtcaggagttcgagactagcctggccaacatggtgaaaccccgtctctactaaaaatacaaaaattagccaggcgtggtggtgggcgcctgtaatcccagctacttgggaggctgaggcaggagaattgcttgtacccgggaggt

SEQ ID NO: 68532 - DNA, 1869 bp, Homo sapiens
caggttggagcgtggtggtgcaatctcggctcactgcaacctccgtctccccggctcaaacagtcctcctgcctcagcctcccgagtagctgggaatgaaggcgcccgccaccacgcccagctagtttttgtatttttggtagagatagcgtttcaccacgttggccaggctggtctcgaactcttgacctcaagtgattcgcccacctcggcctctcaaagtgctgggactacaggggtgagccaccacacccggtccaatagtgtcaaagttacttgaaaagctaccagccaaactgaactggtttttgctgaaaattcactaggattgttccgcgtgtattcgcttgcacacagtggtgaaagggtgcgctcagagatctagatggcctgcgttccaatcttgctccatcaccaccagctgtaagactgagggcaagttacctctgcctcaggattctcatcataaaatgagaacagtttccctatagagccatgagactagaataaagctagaaggcagtgccgatcccacaggaaacactaagtaaacgttaactatccctgtattacacttcaatcggtgggacagcaggatttttcaaaccactccaaattttcttcgagatttctgcaaggctgcccctgctggaggggtgggggaccccacaggttgggtaactggcccaaagtcccaggggagaggaggatcggagccggcctggggctcgctttccaggcctctcctcatacaccctccggggtgccctcgccgtccctgtaggaggcccagagaggggtggacgctcgtcggggccgcccagctggacagggtccggtccaggcctaggaggccgggcgcaggccccccgagcagggtccggcaggtgccagccgtcccaggccgtggccaggtgtgctctcccgcggagcacgccgccagtttgcggctcgcagaccgcgcggcggccccggcgtcgcggggcatgctgggacttgtagtccacggccacccggaacggcccgctcatggccgcgcgagaactccaacttccagctggcttcgcgcggccagaaacgcgccgaggctgcgattccagggggtccagagagccccgagtcggccctgcagcccccgccacgaacaagccccgggcgggtgccgggcggccgcaaccggctgcaggtcctgggactcaccgactttgtagggcagtttgtcagacatgctggcggcactcgtgatggaaacgggcgaagggggctgggcctcagtctgggaacaggaactgggcgggcagcgccgagcagggatatgcgcgtggcgccgacgcctttaaatatcttcctcgcacttgcatattcatgacccgctggggcggggcccaacgcgcagggcggagccggaggggatttcgatccctgaaaagaagcctcagaatttcacaaggcgtggccccaggagtctcactcaccggtccggaagggagcgccgggagaggcctgagagccagccgggccgtcctctcgctggttcagccagttgattcagtgtcaaaacccagcggaactgaaattccgccagttcacttccctgtgcctcaatttcctcatctgtaaaatgggccaaatgacatctgccacacagattattataagtaaagttgcaggccaggcgcggtggctcacacctgtaatcccagcactttgggaggccaaggcgggaggatcgcttgagcccaggagttcaagaccatcctgggcaacacagtgagacctgaactctacaaaaaaaaattaaaaattagccgggcgtggtggcgcgcgcttgtggtcccagctacttgggacgcggaggcgggagggagg

SEQ ID NO: 68533 - DNA, 2853 bp, Homo sapiens
gtgctgggattacagacgtgagccaccatgcccggctgattaattttatttttaagtttactatcacatggataaaaagtttacagtttaataacatactattggtaagagtgtggggaaacaggcctcctcatactttggttttgggattgtacattggcacaaccttaatgaacaacactctggtaataactaacaagattacaaacccgcatgccctttgaccaagcagttccacttctaggaatttattccaaagatgtttgtacacatgagcaaaatgacgttaagaacaaaagactgtccttccatggaagacttgttaaataaatattggtacagtccacatgatggaatatgcagatagccatttttttgtttaaatgagctgtttatctaacaatatagaatgatcttcaagatatggtggcccagtgcgatggcccaagcctgaggcctaagcgccactgcactctgcctgggcaacaaagcgagaccctgtccgtattttaaaaaaacgacagtcgggcgtggtggctcatgtctgtaatcccagcactttggaaggctgattcgggcgggtcacctgaggtcaggagttcgagatcggcctggccaacatggcgaaatcccatctctactaaaaatacaaaaattaggcgggcgtggtggcacacacctgtaatcccagctactcagtaggctgaggcaggagaatcgcttgagcccggtaggttgcagtgagccgagattgtgccactgcactctagcctgggcaacagagtgagactctgtctaaaaaacaaacaaaacaacaacaacaacaaaaccaacaacaaaacatataatgaaggacaaaaagcaaagtgcagaacggtgcgcctagtatgcgattatttatgtaaaagaaagaaaagaacacacaaacaggtatttgcctatacatgcagaaaatataccaggctggatgtacaagaaactgctaacagtgcttccctggggatccccgcccacgccgctgaaagctgccctggacgttaactgttgatgtcccttctccaggtccaggccccagtggagcttctggcgggaaggtcgaaaccccaggcagaagcaggtcccggtccctcctcccgacctttgtacctgccttttccgtgtttgcttttgcaaacaattaggtcctgggcgcggaggggcggagagggggcggagagggggcggagggcgcacaagcctgccctttggccgcggggctttagcctgccctagcttcagcatccccgctcgcctcccggcggtcctgcgtctcactctggattaactggaggcttcgagatgggatagagaggggtgcaggcgctgagaaagcccgctgatggggatggagccggattaagcagttctgtggagttcctcccttcttgtccaccccgctaggggtctctcctttcccgctgtatccacgcccctccctccaggccccctgggcccacctcgaagtcaccgctgggctggggagtacagaggtgggggacttcttagagaccctgggacagggcccccctctctccctcaatccttctcatcccacgcggctccgctgtgagtcgggcgtcccaggagctgccggcccacccatccgcgggtttcttccgttgggggagccctccagactcgtagaatataagagagcgcccctccctagccgcgggccatctctaagcgacaggctttaagaggcaccccgaaagggggatgtgaggtggtgtggttctatatcattatatcgaaatcatctgattatgtgcctgtcccattacttccaggagggacagaaacctgtatggctttgccagctgctgtgtccccagggtccagctcagtgcctggcacacagactgcacacaatatttgggaatgaattaatgttcccagatgtctgccccggaacccacgctgtggtgccccttggcttcagcccacagtcctggctctcctcagggtggagccagggagtcccctaatccaggtctctgacgtcccccgctgaggctggatcgttccccagtggggctggatggcctctgggttcacttcccagccttgtctgagcttccacgccccttttatcctaatatttgctaagagcctcgtccagggaccttaggagtcacacagccaggggttctgcccctgcccttcatttctcagatgatagaaaagcaaaaggaacactctgagaacttgtaatggggaggagtggggggttggtccagtctgacggggcgggggcagggtgggagacgtccttggagcgagatctgaggcagaggagctcagtccacagaaagggagcacgggctccacgctgcaagagtagggagctgtaaggtgccctccccagacggctccattttgcccaccttcctttgcggatagcacccctggacctccgaggtcagcctgtgccctgcagctggagtcgcccttgactccactgtgccaggagagggcaccctgctcccagctttggcttcagactgctgcagtgcaaactcttccctccaggggcaggatttggagcgctgtgatgataacctcccagctgccctgggagaaagcaaagtacagcttatcgctccctcccataggaagaaactgaggttcagagaagagcaatgaatgttgctagtaagtggtctttggacttgttttgaaggggctttagcccttggaagcatttgtcgggatgtttttgttctgttctgttttgttgagccagggtgtcactcttgttcaggccggaatgctatggcaccatcagagatcactgtagcctcaaactcctga

SEQ ID NO: 68534 - DNA, 478 bp, Homo sapiens
tccggctaagatcatccctataacattgacctgtgctttaactgccagatacctggagcccaagattcagctagtaatctgagagctgtttgtgacaccactcccttcctcttcccttccattgatcccacaaacattgttaactgcccactcagggcaggcaacacagatgactcagacctgggccctgctctcaaggaatttcctagccagtggggaaaaaagactcaccaatgttcacgacacagatcatggatgccagggcaggtcagagcagagagtccaaggtggagggagagggtgactcactaggcctaggggctgtggaaacctctcagaggaagaggcgtccaccaaagtcttcaaaatgagtcaggtagagagagaactgtgcaggtgtgggaatcacatttgcaaagtcatggcagagtaagaaagtggggacaaaatagctgggcacagaggctcacgcctgtaa

SEQ ID NO: 68535 - DNA, 706 bp, Homo sapiens
ctccttaagtgtattttcataatatacatactaaggaataccgtgcagctgttataaagaactagtaacttggctgggcaaggtgtctcacacctacaatcctagtactttgggaggctgaggtgggtggatcacctgaggtcaagagttcaggagcagcctggccaacatggtgaaactccgtctctactaaaaatacaaaaattagccgggcttggtggcatgcgcctgtaatcccaactacttgaaaggctgaggcaggagaatcgcttgaacccagagggcagaggttgcagtgagccgagattgcgccacttcactccagcctgggcgaaagagtgaaactccgtctaaaaaaaaaacaactagtaactctatatgtatctacatagaaaagaaacctcagccaggcacagtggctcacatatgtaatcccagccctttgaggggtggaagtagaagggtcacttgaggccaggagtttgggaccagtctgctaaaacataacaagaccctgtctctattttaaaaagaaagaaaaaagagagaagccaggcatggtggctcatgcctgtaatcctaatactttgggaggccaaggtgggcggattgcctgagctcaagagttcaagaccagcttgggcaacatggtgaaattccatctctacaaaaaaaataccaaacaaaaaaattagctgggtgtgat

SEQ ID NO: 68536 - DNA, 1770 bp, Homo sapiens
tgccagatcttctgatcagaaactctgggggtgggggtcagcagtgtaagttttaataagctctctaggtgattctgatgcacaccatagtttgagaatcacagtccttataggctctggtgggcggggtgttaaaaaaaaaaaaaagcctggaggtgctgggagccgctcgcgcccatctcacctggagctgaggaaaactgggatttaactgatttaccaccgcagccagctcttcaagccaggggcgggccggacggctggcgcgcaaggcctgctggggcttgtagtctagaccacttccgcgctcaggcgcctgcgctttagctgctaactcgctctagtagctgtggtcggggctcgggaccggctgccatcttagtctagggactgaggagtcgccgccgccccgagtcccggtaaacccccgtgggcgaactcggggcagttctcgggagagggagggagtccggatgagaatgttcggggagaacaagggtagaggagtgggacgcgcggttcgggaccccagagccgcggctgctccttcttccagagccggtgtctgtcgggggcgcggggagctcgggctactggcccgggccgggcggtgggggtgggctgtctggacgttcggagggatcagtgtctggcacaggcttccggaggccttcgcctcgcgggctccaagttgtgaaagggctgggccacgacgggcgtgggtaccgtccggcccctcgcccctcagccccgcctggggccactctccagcggttcggcctacgcgcggggcccggcggcggggccggcgcgggcgacgtggccctgtgaggggcggcggccgggtcccccgccacccagctggccttctcgagacttttccgagcccccagtcgctagaagggcccagcacagcggctgcctccccttctctctcccactcgcctcctccttccattgtccccccggcgtggtggtcccggctccggcgccctccccgacgtccgccaccgtcgtggcggcgccgacttttgcagacgtggagctgtcactgcccttcctccggagagtgcccttttctttagcagagaaaagaaaaaagtagccgttgaacgtattctaagggtcgaagcatgatgacatgacttttaagtggagaactcaagttttccaagacagttcccgtccgcgacagaaaagagaatcgcagaatttgtgcgcccgaagtagacgctgggcctaaagttagttggacatgtaaccaggtgaacttgtaaagggccaggaattcattatccccaataacaacgcaaccttgttttcttggttgtattcgtatcctaatcttattacattttctgccattcttccacagctacagtatacttggtttggagtgggggatggggaattgtgggatttttgccttgaaaattagtaagaccctggagccagccacccacttaggtgggttctcctgcatcttttcctgatagaattcgatcttcaggaagtatgtaaaggcagtgtatttccattctcaaaatcggctaaggaatggtttatcagttgaggtgaagttctcatggcagatctgctgagagcttgctatgtgtatttacaggtttatttaagctacgatttatttttaaaattaagaaatgggccgggtgctgtgtgtggctcacgcctgtaatcctagcactttgggaggccgaggcgggcagatcatgaggtcaggagttcgagaccatcctgaccaacatggtg

SEQ ID NO: 68537 - DNA, 1050 bp, Homo sapiens
tcaaaaaacaaaaaaagaaagattgctctggtgatgagcgaaaggatgagggactagctattgcagaagtctagttgagaaatgacaaagcctgaccttggagagaggttgtggggatgatcaaaggattggatttagctttttactagtgcaatattgttgccatatttctagatgaggatttttttttagagctaatctgggtaaagggctccttttctgtcaaaagaacccattagcaagtctgaataatattgccaggttatatatgttatgtatagtatgagagtgaattgttcattagcatctttgagaaattagaaagaactatgtcaggtgtaatttggaagagaacttgaagtttgttattgttactatttttgagatggagtcttgctcggccatgcaggctggagtgcagtgatgtgatctcggctcactgcaacctccacctcccgggttcaagcgattcgtgtgcctcagcctcccaagtagctgcctcccaagtagctggaattagaggtgcatgccaccaagcctggctaatttagaacttggagtttggactgaaatttatgcctctaaaaagtattgatctaggcttgttgggagtgtttttctctcagcctgtagaaacttgctcattgagttttagagttgggagaagttacagagattatctagtccataatggcaaatatattttggtttattggccagctctaattggaagctgccagaagcactgtgtttggaaggattctggttgtaggtgctctgagaaattgtattatggttgatcaatgatgtctcctgtggacagttacctagtaggtagtagacatgtgccaaatatatgctattcttagataagtccaatctcttagttttctgttttgttgttgtttgtttgttttaaaggttaaataatttacctgaaactagttaagagtaagaactagaactagaactgggttttgcaactctgggactggtattctctggtttacaaagatcaatgtgcactactgaagagcttctggtattaga

SEQ ID NO: 68538 - DNA, 1066 bp, Homo sapiens
acaggcttgagccactgtgcccagcctagatttaatcttttttttttcttttttgagatggagttttgctcctgttgcccaggctggagtgcaatggcgcaatcttggcttactgcctcccgggttcaagcgattctcctgcctcagacttccgagtagctggaattacaagcatccaccaccacgcccagctaattttttgtatttttaatacagacggggtttcaacgtgttggccaggctggtgttgaactcctgacctcaggtgattcacccgtcttggcctcccagagtgctgggattacaggagtgagtcaccacgcccggcctagatttaatcattttaaccatgtatgcagttgtaaataatagaactaagaatctggcgctcaggggagaggatgggacttgaagtgtggattatctatttttttctactctgttttatgctgtttttaaaattgtacaagtcaacagtgatacatgtcctatttttagaacttcaaacaatacatacaaaactacagttccctatgaccacgtacttgagtacacaggtgccctcctcctgaatggaatgtatactttttctgcgtttatttacaagtatttgtacccataggaatatatagtgttttagtttgcaaaaataatatcatactgtacatactgatggggtgatcattttgtgatctaccccaccccaactcatgcatgttgttctgcagctttaaagatgttcttgggatctctcaatttcagtcattaataagttacttattttgatacctgcatagtaatctgttctgtggtatgaatatgtgatttaatatatgaatatgccaattgataatatacattatttctaatttttttgatattatacaaatagtgatttttattcttttcaagaatttaaaatgcttggtgaattttagttatgtaaaactagtatgtatatgtacataaattattgaaattactaggatgtttttggcagagcacctcacaattctaccataatgattctctgtaattatctggagagtcattgttcttaaaaatg

SEQ ID NO: 68539 - DNA, 1110 bp, Homo sapiens
tggttctctaccagtcataattgttattgcatagttgtcaaaaacagttggtacatattctgatggaaatttgttgtgttgttttaccaacagcaccatcacccacaacaacacacttaattgtctgcattgctgaaatagttttgtatccactttaaatatttcaaatctcatgttgacctcagcttctccaccgggttgttggctcatctgtgttttttatttgatgtttgttgtatgctagcattgggcaaaataaggaaactttggtatttgccagaaatttcttatattctcgtctttactccaaattaagaaagagatgtcatcttgattttagttattattaatcgtaattaaatattactgcatttcccaaatttattacagtgcaatatatttagctctgattgttcagggaccaaaaagatcccttatacttatgttttttttttattcctttaacagtccagcaaactaagaattttatacttgtgatttagagtttagttctccacaggcagggcagagttcttccaaagaggtagctgttgctcaactggattgatctcttacctggttcattattctgcttatttatttagttttggcactgttttttgttgtaccttgttctctgtagcttatccaaagtaggttggataagctacggatccattctttttttgtatgtgtattgtaaaatgtttatgttgtatcagagagatacactgaagaactgaaatcagttcaaagcactgaccttcagaacagaaggatcagaggaacattagtttaagccatgaaaactatttgcattagtatgtgggtatgtgtgagagagagagagcacatgcatgggagagtgagatagccagcaagtgattataataaagcagagagacagagactagaaagcagggaaacttttgttttctaccatgactaataacaatttggttcaacatgtatattaaatacctctcagattaaatcccagagtgctccagaaattgtaaagattggctatatctgtgcaatcaagaggctcacggggtgagttaaatgagtaaaaactagtaagacaaaatgaaaagctgacggagccat

SEQ ID NO: 68540 - DNA, 1271 bp, Homo sapiens
tgcttaaaagtcttctcaaaggccttccttactaccaagtcattttctgtcacatcagcctgtttttcatcataaatactttaattagaatataatctccttgaaagccagatccttttctttactgttaattgctttagggacagagtttagagcagtatctgacacatggtaggcattcagatgtttgttgaccatgtttgtcaatgcatacattttgttttgagatatggtctcgctgtgctgcccaggcaggtcttaaacacctaggctcaagcagtcctcctgcctcagccacctgagtagctgagattacgggtgcaagccaccctgcccagccatatgtgtactttttaaatttttcctcctgttgcccaagctgttgcacaaccatagctcactgaagccttgacctcctggactcaagcgattctcctacctcagcctcccaggtagctgggactggcacacgccactgtgcccagctaatttttttgatttttaggcgagatgaggtctcgctatgttttccagattggtcttcgactactgagcttaggcaatcctcttgcctcagcctcccaaagttctgggattagaggtgtaacccgctgcacctggcccatatgtgtactttttaattgatctgagttctggacttttgataccatggaattctactgatgggaatttgggttgatggtacggggaacctctatatttatttactaggatgggaggaagtacaaaggttatgagtgaataaaattggtaagtattttagagcaaaactgcttctctgagtaaatttagtaaatctgcctaattatgaagttaaattgatttcatgagtgaattaacatctcaactattgaaatgtttttcatttcttttacatagtcatctcagcaaaacttaaggaaaataagaagaattggtttggaccaagtccttacgtagaggtcacagtagatggacagtcaaagaagacagaaaaatgcaacaacacaaacagtcccaagtggaagcaaccccttacagtgtaagcttggaagtatttttctgtagtatgttttgtttagtagatgattggaaatacaatttaaaaaaatgtttctcactttggttttttgttgttgttgttcctcctttctctcttctttttttttttttctttttcctaggactccttctggtttgcttttttgtttctctttagatagctgtttttatagtcactccctttctttaccttctctagtttagttggt

SEQ ID NO: 68541 - DNA, 2288 bp, Homo sapiens
atcgttgaatccagcaagctacagtgcctgggagaaacagcatttataaagtatcgaggttaccgatacttccctgaagctaccggagataacgttatgtgcgtgttcagcacagtaatgtggcacagggttcactaaacggcagcatgttttaacagaagttatttactcctagaggacccagaaacgtttgcggcctgccggaacaggacaacatagggctctgggaagagtccccctttcagaggtgagaacaagacagaacacacagatgtgaagtgccttctgctaggtaacgcgaggcggggctgagctcggattctaaagactcccaggccagccctaaccaattcatctccgagcttgcacggcatcttacccggagactcgaggtacctgactccagccccaccccaggcctgcccgatcccgaagcgcattttggccctgggcctctctctggctcagtctgggcgcaaagcgggtctcagcaaccgtcccacttgccttcataccctcccaccacgctccactcagggactccagaaccagcttagacctccattgagagctgaaagcctcttccgataccgagaaccagcactgaaagcctcttccgataccgagaaccagcatggtttttgttttgttttgttttagtcagggtctcttgctctgtcgcccaggctggggtgcagtggcgcaatctcggctcactgcagcctcgaactcctggtcaggcgatcctcctacctcagcctctggagtaactggaactacacgagcgcgccaccacgcccggctaattttgtttattttttagtagagaaggggtctctccatgttgcccaggctggtctcgaactcttgggctcaagcaatccttccgactcggcctcccaaagtgctggaattacaggcgtaagccaccgcgtccagccagaaccagcatcttttctgcacggctggagttgggaattttccacagcttagcgcactgctccttagcttttcgctttgccacagtggaaagcagattttccaagaatcctggcggagccaagatcggctcgcccgcccccgcctcacgctggctcctgataggcagctagagctgtccgttttgacagaaacctttgcgcaggcgcagaaaggcacaggactcgctaagtgttcgctacgcggggctaccggatcggtcggaaatggtgagcgtgcgccggggtcttgtggctggcggccgcccaccaccccacgccaggccttcagtcttccgaggatgaggggatctcagagctccggacagggaatcggtggtggctgggcgtggccgggcccgggccccagccgacttgagggtggaacccggcggcggaggcctctaaagcctgaccgaggcggggccgccggatcccgctgccccttgaccggaagcgggagcccagcctcggccaggaagagatgatgggcgaggggtgggcggcggccctgcagcctagagttttggggccttggtgcgcgatggcaaccctggcaacgtttcccgggagctcagtttgtggcaggctctgccaagcactttatgtatcttgtatttcctccgcctcctcccagctctgtgaggtagatacaatctttagtcccattttgttatacatatctgttattcagcgccccgagaagccaagtgctttgccccaggaaatagtggagatggatttgaaccctagaagcttgacggccgccactctgtcggcgtggttctttctagccgctgggactgggtgccagagtcaggaacgggcggggtctgctcttggggatcccaaagcttgctttctaccttgcttgctgcagctgtgggttctcaacgccgttacaggttttgtgtttgtaatcctcacagcttgggcaaaatttgaaaaagtttcaaattttaagccatgtgaatatattactttttcaaaaatcttatttagaaatctagagcttgtaataaaaaaattgaaaaaagaaaccgtgtcatcacctagaggcaaccacttacagtagtcatatgacttctagtcttttttgcttgtttttggtttatacagtttagcccctattgaatgtgcaattgtgggttctgtgtttttcattattacaccacaatatctccacatcattacaaacatgtaataatgcttcaaatatgtataacttcatttttcacatcacttcttaagctgtaaaaaaaattgatatataatagttgtacacatttatgttgtagatatacatgtaat

SEQ ID NO: 68542 - DNA, 1601 bp, Homo sapiens
tttttttgtattttcaggagagacggagtttcaccgtgttagccaggatggtttctatctcctgacctcatgatccgcccatctcggcctcccaaagtgctgggattacaggcatgagccgccgcaccggccccatttgccactttataggaggagcttgtttacccttccctccagtgttcgagagtattctgtcacaggggagtgggtggcagtgactggattgtcagccttgtgccttccagaaaaacaagaattcattgtgctgtctccacccagtgttgaggatccccccccccatttcttttggtgaatggagcctctgtttctaacaactctcagcctttgaggggcttctgactggattctagaccagtctggaaggggccgcctgagaacaggtatacctcagggctagtttccatccacaggaagaattaagtctagttcagttaagcggtgtttatcacacttctactccacagacctttttagagtctctaagaaatggacatagtacctaatgcatgtcccagagaggcacacccagggatttggggagtcacacgtaggcagactccatcaactgggggatcagtaaaggcttcgcggaggagatgatgtcttagatggtcaagaggagtttgttggatttcagcagagaagaggccttgtgggataaaaagatgtagagatagggaggtgtgtcacggagctggagagtggagggaagggtaggacaggagtgacaggaggcctggcatggcagaatgaggacccgaactgcgactgcccctccacttacagatgccatatgcaagagtagcccaccagagcagtttctgggtaatcaagattaatgagccccttcccaaggcacacttcttacagctgagtgctgtgcatcacactatctcagatgcctgccgcagtcactgagtctatcctcatgtgctgtttgggccacaaatgacaaagtgttgtcttcctgttagatactactctctgagttttcttaaatcaacagagtcccatcccccagctatgccaaatatgtgagtcatggacatgtatatacatgggaatggtgtttatattctgctccccaacagctgaggagggtgggataatagtgcctggtgggcagagcgccaggagcagccctgtcctgcgtgggggtgtgagcggatgctctgggcactggtggtggccggaggagcacgtcagatcagcctggggaactttgagggtgtgccaggtgcctgagtattacttgtttgttgttggaagacaaacgtatgattcatctgcctggggtatgaggaagttaatcctgcctatcggcctctcctaaccttggtcttgttttctggcaggcagaggtggaggagacactgaagcgactgcagagccagaagggagtgcagggaatcatcgtcgtgaacacagaaggtacgccctccctcccgccatgacccgcacccaggcaggcccagaagcagccataacacagcatagcacttgctgttcactaagcccttcatgaatctgatctaattttaggcctttttaatttttaacacctccagtgttcttttttt

SEQ ID NO: 68543 - DNA, 653 bp, Homo sapiens
ggcttgatgatttggagtaaaagacactgatgttaccgattgtgcctatttttatcagtggcttgttaattatttctgttttcattagtgatttttatgtatgcagattggttagccatgaaactgttagtcacttcatttctgtttcttccctgttgcaacagcccatcttcgtgggaagaaccaagctttaggcttggctctgaacagccacaaagtgacttggctgaggtcctgccatttcgctcatgctcagcagggggcagcagaccagggcagttcagagtatggggtcaaacccaggtccctgtccccactccacctgtggatttaccctggattgggcaagccctttaactctctgaggctccgtgttctcagagtgactcgaggattcactgaggtgccgtgtgagaagtgggtggcccagacctggacacaaagaagccttgatcaatgtttgcagtttgattaagtgggtaaatctgcatatataaaaatcactaatgaaaacaaataattaacaagccactgataaaaataggcacaatcggtaacatcagtgtcttttactccaaatcatcaagccctaaatgcaacaataccacttctccagttacctcttcagtgaaacgggaggcactcaggctcac

SEQ ID NO: 68544 - DNA, 687 bp, Homo sapiens
agatcatgggtttgttgtgcacaggtcaagtttgagatgtctgtcagacattcaagcagacacatgaagtagaggtcaggccactggattcaggggtgatggggcaggggagggactgaagggcgagtcagccctgctgactgtcaggcaggggcagagctcacagcttgggacttggggccctcctcctccacgttggcctcagttcagggctgagtctgacaaaagacaggtgtaatcactttccaaggctgacccagttctttggctgctctcagtgggcctggtcacatttaatcttctgtggcactgtgtgtgtgaggtttgtccagtttgacacacagctctggatcaaaagtcggcaaactaaggccctcagttaagtctgtttgttttggcaaataaagttttatccagatccagccaatctcatttaggctgtctaaggccactacagcagaaccaggtggctgccagagaccacatggcctgcaaagcctaaaatatttactgtctggccctttaagggaaacatttgccgactcctctccatctttcattaaacagggtgtggttctgttataggaacacacagcaagctattgaataagacatttaggtggttcccaactttttgctattatgaaaatgttacaataaacattcttacccttgtttccctgggct

SEQ ID NO: 68545 - DNA, 2076 bp, Homo sapiens
aggttgcagtgagctgagatcgcaccactgcaccccagcctggcgacagaacgagacttcgtccccctcccccctcccccaaaaaaatgttgatcttcagtctgcgcattctgctctggattttaagcatcatttctggcagctctttttcaggaactgtctctgcaggtctttcagtgttcgcctctggagctctgctcgggcccgcgagttctcctggcgttgccatctgtgcccttttccttattccccatcacctgtctctctggtgagctgcttccgatcagcctccaggtccacgatttctcttctgttgtccttttctgccttctcacctcatcctctgagacctgaatttcgatggctctacttttcaattatattattctttttcaaacctgggcgttcatttctagcatcctgttctatcctgtgtctgactgtgcctcccgcaccttctcccttctctcgccctaagccccgtgaaggcgccgggcctttggctccggctgtttcccacggcgcccagaaccgcgtcagtcctgacacagactcggtgagggcgggaagtggtgccgtggggctgcagcctggcccgcccgctccatcggcctagggcggccccaccgccctccgggccttaccttgagttcgggctgcgggagaagctcccgcgctgcccatgacgtcacgggactgtgacgcgcccagaagccccgcccctcgcgtcccggtccgcggacccaggctctctgcgccgtgacgtcacgggtccgggcgggcgggttgtgcgtcggcccaatgggagcggcgcactggcctcccctttaaggaatgttgtgacctgacgtcaccgggcgagttacctcccgcagccgcagccgccgtgctcagcgcgagccccggagcccttgagcgcgaggcgcggagcccccggagcccccaaaccgcagacacatccccgcgccccagagccccggcctgcgcgcccagccgggcccgcgcgatgccctcagaccggcctttcaagcagcggcggagcttcggtgaggcccggcaggcgagctgcgagctctggggcaggggtgccggccgaccccgactgccgcaggtgacgtcagccccgtgacgtcaggctctggctggaccctcgggctgggaccagctccggcctgggcgggggctgcccgcttccccaccgcgataggtgccaggggctgtggggcctgatggccccgggggtgggggctggagctggggcgtggccgggggccgcccctccgggacaggcggggcggacctgggccggcccgacccggcctcacggtctggccgctgtccgcagccgaccgctgtaaggaggtacagcagatccgcgaccagcaccccagcaaaatcccggtgagtcccgcacccccagccctgccccgcccccgcctcgcgcgttcccgacacgaccccctgcccgcccgccctgctcccaggtgatcatcgagcgctacaagggtgagaagcagctgcccgtcctggacaagaccaagtttttggtcccggaccatgtcaacatgagcgagttggtcaagatcatccggtgcgtgggcagccgccgccaggaggtggctagggtcgggaggggagccgggttcccgccgagaaggggtgggagtggggtcaggggtgatgggaccgggcggtgggcccctgttctggggtggctggaaaggtcaaggtcggggctgcagtcggtgttgggtcagaggtgacagctggggtgagaatgggtgtgaaaggctgggaatcattctgggggtcagggctatgtccgtcccgcagccaagcccctcacagctgcatactctcccgccggctgcaggcgccgcctgcagctgaaccccacgcaggccttcttcctgctggtgaaccagcacagcatggtgagtgtgtccacgcccatcgcggacatctacgagcaggagaaagacgaggacggcttcctctatatggtctacgcctcccaggaaaccttcggcttctgagccagcagtaggggggctcggcctgggagtcgggcggccc

SEQ ID NO: 68546 - DNA, 472 bp, Homo sapiens
tatgtgttttgaaaaaagcttgaaggggtaaaaaggagttaggaaggcagaggaggaatgatatgtgcttggggcagagtcagagaagatcaaggaaagtgagaagtgacttcaaatattttaaacaaactgtgcaataagcaaacatttctggagtttgctctatacgaagagtgtgatgggtgccaggaaacctggtgactcagatagtctctgtcctcagggagctcccagtaaacaattacaaaatacaggaggaaagtacaaaggaagcagacctagcccatcaggggaagctgacacctgagttttgaacaatgagtaggtgaggctgggcagtccaaggctgtgcacaggttggagggcaagagagaatggtgtgctggggtggggctgtgtgtactgtaattagctcaatatagccaaaacagggcaagagctgggaggagtgacaggaaagagaacacaaaag

SEQ ID NO: 68547 - DNA, 650 bp, Homo sapiens
aaagagtacaacttaatggtagcactgggtacaccctagagaattctttcatagagcctcagtaagttccagtcttccacatgggtcacccagctggaatgcatctgtttggcacttcagttttataagctacaaatggaggactatactgtacacgaaacataagagctgcttgaaatggcagccacataaaaaccaaacttttattcaatccatacatcacaattgaagaactttagaaacactggttataagtaggctggaacccagatcagcatggagtcaaaaagcatttgtgaagggtttgattgtacacagccctgtgtgagtctttgtcccaagagagacagaatggctctgtctcttttgctggccagaacaacagagcccagttgtgcaacagaactacagcaaatacttgatgactaagattgcaaatctccaaaaatacaacaaacaacatgggaaagtctcatcagattttcctcgcatttgttggcactaagcctgttttgtcagggaatacttacaacagggccactttcaaagggatgtaacgcatttccataggggtccggatgagttcggccacatctggggcatactggtccagttctaggaggagtttctgctttttaaactagaaaaaa

SEQ ID NO: 68548 - DNA, 509 bp, Homo sapiens
gtttaattaaaaggacaaaatataaaccaaggtgcttttatcacagagaagggggctggctcagcaatcaagtgcttagtgaggacagctgcagcagtggtagcaggaaggaggcctcactagctaagaggtctagagttctgcagcaaaaacaaggccacctggagtgggtgagatccacaaagaaggctgtgagaaaggaatagagttcatccaggggcagccagacagacaggtgggaatgcagacctcattccccaggctggaagccagccagcagggctgcactgagagaaagtggcaactacccgggatgtgtacatcctgggcaaaggtgacactgtgccagcaatggaagtacttccttataaccacaatcttctcaaatactttaaaacagaaagatcttctgaaaggagtctccaggtgggaaggcacacagatcagcaatccccacattctcagctttctagtctccctcaatttcagcagcacaggcactattatgg

SEQ ID NO: 68549 - DNA, 1182 bp, Homo sapiens
ttagtataaaacaatgttcggtgaagaacttagtaaggaacagtaacaaaaattgccctgcaagtcccagactgagaagagacgtctaaagcacacgcacactctcctcgcttaagcaaaattggtcccctcatcccggaccccctcacacataaccttttatcccagggagcacccctggcgatcccgccccaaatcccaaactcctctgcaagccgcgctccacaagcacctcctcctcttattccaacccttcccacagaccacactcctcggctcaggacactgaatgggacacgccccctcagatccccaccactaggtggtccggcccccagggcccaaacctcacgacactgtccccacgccccggtccccacgccccctcccctcaccagccccgccctcaggccccgccctctccaagaaccccacgagacagtcagttagttctctaggaaccgcgcgctggcggtcactgcccccgcctcccattcacagaggccgcgggagggcaggtggggcctgacagtctgctcgagccagtggcctcacctctcttccaagagctcagtggggacaccacctccacccgctcggaaatgaactcggccagactggagcggaacaaggccgcccgcactgtcacagccaccaccagcaccaggaccaagggagccgccatgataactggggcgggcgcgcgggcggggagggaaggcgaggcggaggagcctcgcgcgctgtgcgccacgctctgtagttccgcgggtgggcgcgcgctgccgctggcgccggagaggccagacgtggggactacggctcccagaaagccttgcggcgaggcgggccggagcgacggaaagcgggcgcctcaagctgcgtatgcagaaggtggggcgaaaccttctacgatcgcaggtgttttgtgaagccgcgccgctatagcggggctgaaacgctgctgaaagtagaagcggaagtagtcgccttcctgggattgtgagagacttttaaacagatgttaaattcactcttgcgtgtatgttttcaatgccaaaatgtttatttttatttttatttttattttttttgagacggagtctcgctctgtcgtccggctggagtgcagtggcgcgatcttggctcactgcaacttccgcctcctgggtagctgggatg

SEQ ID NO: 68550 - DNA, 2796 bp, Homo sapiens
ttgagctctctgagtctgtttcctcaactgttaaacgggacaatatctaccttttgggttgttgtgaagataaaaaaacacacccatagcacaggtcgtggcacacagtaagtgtgccaatacatgtcagctagtggtatggtggtgcaatagtaggtgcctaataaatgttgaatgcattgttgaacatgagttcacacgctaacagtgagattgtgagactcagctttcccacgtgtaaatcaggactcataatcagtccctgtcctgccacttctttacagccccggtagcaacatagattaaataaggtatgtaaacgttcaagcgcggagccgtctcaggtcaatgtttactcagcccagggcaattcctctccaagtcctactctgcgaaatttcacgtcagcttcactaacttctctacattcccagatgctccccgggaaccgggggttggggatgtccctcttttctcaagcccgccgagctgaggaaaaacggggtgggaaagcagagtgtgtaaggctgaggaggtgagccagaggggggagggagagcaggaataagggcagtggggagaatgcaggtgcacggacgtggtgtgggtcgagaacagggtccgcatcgggggacttggatataggatgcagtgaaaggatttggggagcagtgggagaggtgagggcgctgcgatccgggaagaatcaggaaaataaggagccggtaggagggagtggagatcctcctcgcggagagctcgccgcggcgcagggctcccagctccccgcagctgcctccccgaacactcaccctcccggttccgagaacgtttcccggcccgagcgcccggcccgcaaaccgggaggggaggggaggggaggggcagggggggatccgcagcccgggattggccgccgccccgccagccggtgacgcgaggcgggcgggcccctttgtgacgtcacaatcagctgtttgaacgttccaatttgtgccgtgagccccgccgcagcggccgcacagactcaaagccccgcgggcgagctcagcagcccggagcgaccgcggccccgccgcctcccccgcgagtcccggcgatgcggcccggcctgtgagcggccggcgaccctgggacgccccgccgcacaactacctcaacgccgtgccgcccccctcccgcccccaggtgagtcccgacccgggtgggcctgggggctcccctgccacggacacgccctgcgccccccgcgcccgggcctttgtctgtctccgccggcggccgccggggccgcgttcccggctcccgattggttgccgcacgcccggtagaccatgacgtcgttctatttgcatatgacattgagacgtcaccaaggccggtaccgcccccacaggctcgggtcgcttgtcctcccgtgacccggtagccgctgtgtcggggctgggccctgggtgagacgctgcaatccaaagggggctgcagggggatcggcgatttcctaggcttatccaggggctggggtcaggcctctgatcccctactttctctttgcaacctgagaaggagtcagacggcgctgctgggcctaggttgagggggtcgtcaggagttcagggctgcatgggactccaggtggttgggacagcaccagatggtggtgggatcccctccctccggctccagactccgcccccagggactaacagaataacatcctcctaatccctgatttgtgtgcagcgccttagctgatgtcactcctagacccaaaatgaagggtcttagaccccagtgcatggaaggggcaacaggcccagagaggaggattagctctctcgaggtcacataaccaattagagtcatgctcactgagtgacagatggattattagccaggggcaaagacataataggggctcagtacaagtggtaagatacacatcctccttccactggggacccgatcttgggctcagccttatcacggtttgataggctcctaggtgtccttactcctggacccttttccagggaatctctggagattggttcaccttttgtggtcctgaccccttctgtcctcactgtaccttgaagtcctagagtccaataaaatcgctgcctcccagctgtttggatcacagagaggtgagtcattggctgcctcggggtgtctccagggctgatgttggggtggagggtggggtgagggttccctctattggccctttaccttcccaacttcctaggtcgtcagctaggaagggcctgacctggcctagtgcagacaattgcaggtgttttgctgctccctcgtcacctctgcccacagagagtataggagaagggataggataaggagagtttctgacttaacaagtggatgggcctagaggctgaaccaggaactccattcctgctgggagtttgctcaaggatgggctgggggtaggggtggcttagggcacaaatgctattctgggcagagctgctgtagttattaaagggaatggttctccctggagcagaactgggaatgtgagaaccaggaagctggcagggctgggaaaggaaatctgggaggctccccaagtggtcaggagagggggcaggcactggctggctggtgactgctttcactcctggctgtcactgacttgctgtgtgacctcaggcagggagcttttcccctgagcctccctcccctaaacctatctgaaatttggggaggcacagtgcaggctctggtacacagtgggtcttcagtaaatgcatgctaaatcttggtgccagt

SEQ ID NO: 68551 - DNA, 1806 bp, Homo sapiens
aagataaaaaaaaaaccctggatttgaatgcagaaagcacatcttcccaaagcgtccgcacacatccccgttgtgtgtacccttctccctgctctgggggtgatatcttctggcctcttccccaggccaggagtggggtgaacctcaatcagtggtggctctcacgtccttctgattcccaggtttttgcactgccatagggcgcccccgtgaggcgcttcgccccccaccatgttccagcgcctctccagcctcttcttcagcaccccctcgccccccgaagaccccgactgcccccgcgccttcgtgtcggaggaggatgaagtggacggctggctcatcattgacctgccgggtgaggcctgggtctgtctcctgggcctgtgaagtcattctaagggcagatggcctagcagcggaggggaagggcgctgctgggggacgggggagtcccccaagcctactggaggtggggtcacggggccccttcccatgaaagccggggctctctcctggcggcccaggagaggcccgcacgtcaggtcccctagggcagcagggcgagacgcctggcccgtgggtgccccggggcgctgcggacgggctgcgggtctgactaacgatgccctttctctccccgcccccttgtccggtgtgtgtgtgtgtgtgtgtgtgtgcctcctcgctgctcccctcctctgcacggctcccatcccgcgccccgtagacagctacgcggctccacccagccccggggccgcccctgcccccgcgggccgccctccgcccgcgccctccttgatggacgagagctggtttgttacccctcccgcctgttttacggcagaggggcctggactcggtcccgcccgcctccagagcagtcccctggaggacctcctcatcgagcaccccagcatgtccgtttacgtcaccggcagcaccatagtgctagagcccgggtccccttccccgctcccggacgcggccctgcctgacggcgacctcagcgaagggtgagcgggccgggggcggagcctggaggcccagggagacggatcttggaggccagggtccaggctaggaggctggggtagtggggccaggagcccgccccgcgctcgagggggtagcggccttgggagggttgcctttgagacaaagtggggggccggtgggcctccgggcgaggctagaagcgggcctgaggacggaggggcggggcttgagagggaggggcgtggccaagaggctggggccggggttggaggcttgaggagcgtggctggagcgcctagggagtgggacttaaacagaaaggcaagggtggaatagggggtgggggtccagtctcccccgaggtccagtttacctgttaagggctagaaccgaggaggcacctccgggttggtacccacaagaagggcgtcgggcaccccaatctgaacagacacagaactgagccgaagcaagggtgggagatggcagcgccctctagaccccccgcccagcttacccggcttgaccgagcctggctctgtcctcacagggaattgacgcccgcccgccgcgagccgcgggccgcgcgccacgccgctcctctcccagcgcgggcggcgctgctggagaaggcgggccaggtgcggcggctgcagcgggcccggcagcgggcagagcgccacgcgctgagcgccaaggcggtgcagcggcagaaccgagcccgcgagagccgtccgcgccggtccaagaaccagagcagcttcatctaccagccgtgccagcgccagttcaactactgagcgtcca

SEQ ID NO: 68552 - DNA, 1901 bp, Homo sapiens
aagacaccttgggtcaccgcccccaaacagccaggtccctccttttaaagacacacacaactccctaagttgataaaggttctctccttccttgccaaccagttccactctctgtgcctcttttgctggccagctcctgcacccaaacctcagtctccctttgtcccccttttctctcatcaaacacctcctttttcctgttgcttcccccaagagggggtggaggatgcttgggacataagtcttcagagccttgggagttatacagctttgcaattcagccccagtaccccaaggactgccccaatctgaaccagcgtctgtacccaaagggccctcattcctcatcaatcacctccttccctcccagcaaagaactgctccagccctgacagcctgagcttggcccccatgcctccaccccaatccccaggtcctacctgcattagggctctaacaccgcctaaggcctaacccagttccacgtcctgccatcctctcagcccatagaccccaatcccggttcccttcggacccagtgttccttctccgcgaccctgaccacgaccccacgaccggctcccgcctgttccccaggcctggagcgccaccccgtgcagaccccggccagccctgcactccctcagtgcaccggcccccgcgcccagcaccctccccacccagcccggccgccgctccctccagcgcccccgcccgcaggcctggggcccgctccccaacatggcgacggggacacaagcgcggcgggcggggcggctccgggccgggcccgctctcagaccgtgccactcggtcgcccggcgccatttttccgcgcgggcccgggcggcgcctcctccccgcgaagccagcccgacaaggaccgcggacgcccggcgggcccaccccttacgggcccgcgccgccgtcccctcacctgagcgcggccccggccctcccgggcgggccttggagcgccggcccgggccgtgcgtgcccgccgccctcggtgcgtccgtccgtcagtcctcgcgtgcgcccgtctgtcccgccgcccgcgcccggccgcccgcagcccgacccggcagggcctcacggagccggcggggagggggatgggccggaccgggccggggagggagggggagggagggagagagggagggagcgcgagagggggcggggcggactcgaggggcggggcattgcccacgtgaccagacgtccccgggagcgcgaggtggagcgcgcgccagctcccttcggtgctgagtgcttagtgctgggatctcgtgggtctctgtcggctttccagggctattctctcgccagtgagtcccacttcggaagcacacattgcacagtcttttgcgagcgctctgagtatccttggacatggcaactccaagcctcagtttacccatctgaaatatggggaaaatcatagtgcttgtgaagagcaaatggaggtgggcttggaaagcacttgtcaccgtgcctgacacatactgtctaataataagcttaatgggatatagataaaagctttcattattatttgcctctaaatccctctcttctttttcccatcattacctccctagcaagctaaaatgctcagtaaatagaattattgatcgaacgagtgtggcccctcccctcttcccaaacgtagaaaggcctcctcagcactggacttcatgtctgtcatacaggcctggattcatatctggctttcactcttttttaaaaattttctgttttttcccacactacactgatgtattttttaaattttcgtaagtacgtagtaggtgaatatatttatggggtacatgagattttgatacaggcatgcgatgtgtaatcacatcatggtaaatggggtatctagcaactca

SEQ ID NO: 68553 - DNA, 969 bp, Homo sapiens
acaatccctggctgtggggaacttctcttaaggcacagattggatccctcttgctgcagtctctgacttggtttctcctatcctgtcctctgtggctagagaaagccctcttctgggtgatcacagcggttccttaggatctccccttcaacattccttcatcgttagttggttcttcccagaaggtaagcccaatcccttctactgcagtccctagcatcctctccgttgtcgcatcctacgcctccaaggcagaaatgcacccccttcctcaccaaataattaacagagacaagggagaagaagggagagatccaagaagatggggatgaattaaggagatggagctggaggtggatgcttgacacagaagaaggaagaccggggacttcccaaggcagggcagggacggggtcagcgggcctcaccggtgtcggggtctcccagaaaggcgtcctcgtccttgcggcccctcagcggggccgcgggcgccggctcgtcctcgggcagccgcgggaagctggtgatgctcatgtagtccactggcgagtaggcgcccagggcgctctcctggctggcctcgttctccgccgccatcctcgcccgcgccccccagcagcgcagcgcctgccggaagtggctgcggcgggggagtgggagggcggagggcggggcctgatcttcgcgacagccgggagggggcgcctctcccagccctcggccgtgtcccggtctgactcgcccccgtctgctcagcgctatcagcctgcagctggcacacaggtgcgtgtagatggacagccaggaaggcagcgcagggtcgaggggagagcgcggggcaagcgagacttcagtggctctgcactttacgcagctcagggaccaaaccccttcctccttccagcctgaatacagctagtgtcctcctcaaatcccaggcttccttttcgggccccagaccctttcact

SEQ ID NO: 68554 - DNA, 3686 bp, Homo sapiens
atcattgccttaatctggtagattcattccctccaaactcatccatcctctctccactccaaaattccaaccacactacagcttgtactacttctccatatccaaggatgagggaggttccttcttttacgaggtctctgttccaaactttcattgtgaagtccacaggaagagaggggggctggtgaagcctctatacacacatcctttctcttcccaaccccagaccagtctcagggatggcctgaagtgcttgaaaaatctactatatacacagcagctgcagtagcaactatagacaggagggggaagcagtgtgtcgggaacagctctggggtttgggtgtaggacttgggagagaggataggaaggagagggctactcagagctgtgtggtaagagtgcccagggagggtaacagtctatcaccaaaaagtgtacccattgtctgtgcctttccccaccccagagagttcttatctcctcagtgatgtttgtagggtctattacactaccctgaggtctaatccctctggtgggacccttccccacttgatgaggtctgcaccttctcagtgatgtccactcccacagtgtagttggcagctcctcactggagtttgagtcctctggtagggtccacgtctccttagtaaagtctatatcctctgtatctcttaggggaaatccatgtctcctcactagggtaagtgcccttcaaagccattcatgtcctattagcagggcccagggcccttcagtcagatctgagaacccccagcaacatctgtgctcccttagtggagtccatgtactgtcagtgaagtgtgtgtcccttcggtgcagtgaatatctcctttatgaaagtatctgaccccttggtggggtctatgtccaccccaagaggtctgtactccttcagtgggccctcagattcccgccctccttgggattgggcagactctcggtctcccatagagagattttttttcagcttagggtgtgcaaggtttacagtcagctgggcaaagtgcagggaagtagctgggaagggaggctgggctagatggggtcacaaggcctgtgtaggcttcaggaggtgggagctgcccgcttcaggcctcagaatcactcttggagttagatatttaagaatccttcctgccttgacagccagtctgtgaaatgatggtgaggtgggcacttctttgtggtgagtgcaggtgagagatggaggagggtcctgcctgacttctttctggggtggaggggctagagagaagctagaggtaattaagcccaggttgtggtggtggtggtgggggtttcccttggtggagtaaagagattgtgaaggaaagaagagaatgtgggccaggtgtggtggctcacgcctgtaatcctagcactttgggagcccaaggcgggcagatcacctgaggtcaggagttcaagaccagcctggacaacatggtgaaatcccatctctactaaaaatacaaaaattagctgggtgtggtggtgtgcacctgtaattccagctactcgggaggctgaggcaggagaattgcttgaatccaggaggcagaggttgcagtcagccgagattgtgccattgcactccagcctgggcgacagagcgagagactccatctcaaaacaaaaacaacaacaaaaaaagagaatgtgaatgatttttcctatttgcacagactttgatattttacaagccttagcttcaagcctgacgaggaagtaaaaccaaatctggagtcaaagaacctagctttggccctaacttggtcgttatttgctctctgactgtgcaccagttccttccctttcctgggtttgccatttgtgcaattaggaggtgggcttattacaaaaaacctgaaggtgtctcctagtcttcacttattgagtcttgtactttagatctggatggagatttgtgaaggcaaggagattgaagacatgtcctcataagagggagaaaatctgagctggttccagggtgagcagagaggaggtgctgtcgccagagcatgccctcaaggtcatgggagaagtttttccggaggacgagaatgtgggtgtggctcagagaggggggacctggagggaagggtgtcacctggaaggaactggtgatagtcaggactgtgcaatcagatcacggggcggctccgcgatggaccttactcaactcctctccttagtccatccctttccctttcgatccttgccttaacccaaccccttatctgtcactccaagaccccaccccactctggtcactccatggctctgcctcctctcctgtcacaaccagccgggttactccccatcactccatgggcccacctcctctcctgtcccgcctggccccgcccctcccttggcactccacggttccaccctctcccttgtcacacccggccccgccccttctgctttcactcgacggcgtcactccttccggcaagtcagctccacccctatccctcgacttttccttatagtatttctgtccttgccaacctcgatccctccccaaccagacacggccccgccccctctggcaccgcccacccgccagactaagccactcccccactcaccaggccccgcccctctacggaggccccgcctctagttcggcctgttttctcagtcccggcacccgccgcgaccgcaaaggcggccgcggttctaggaacttgacgtgatggggcttcctgaggagcgggtccggagcggcagcgggagccggggccaggaggaagctggagccggaggccgggcgcggagttggtctccgccgcccgaggtcagccgctccgcgcacgtcccctcgctgcagcgctaccgcgagctgcaccggcgctccgtggaggagccgcggggtgaggcccggcccgggcgggcctggggtgtcagtgaggagaagagtgggggctccctgggggagtcgggggctcccttgggaagctgaggggtgggtgaggagatggaggttctgtgaaggaagaattgcggttctttgaaaatggaaaagggattccgggaggagacgagggttccatgggagctggggagttccctgcagacttggagggtccgtggtggagatgcgggtttttgcgaggagacgcgggattccgtgagggaagaagtgaggttccttgagattgggacggggaggtcggccaagagagtgaaagtttcatgggaagagaaggggagttcctgaggcgaaaagagggtctctaaggggcgacgggagccttgaagggaggagggccacgaatagaactttctttgcttccctttcacaccagctcagccactgcctcctgagacccttaacctgtgaactgttgagggcaataacgggtctggttcccatcttggggtcctcagattagtaatggagtccccgatctatttttagtatatcggacatcctaatggaaattacgcggtataagactgaacgagttactacgatgtcaagttgttttatttatttttttaacttgggctgggattgtattagtaatagttcagaagttctgatagatggttccatgtctgttaaaatgtatgaggaaaatcggccaggagcagtggctcacgcctgtaatcccagcactttgggaggccgaggcgggcggatcact

SEQ ID NO: 68555 - DNA, 418 bp, Homo sapiens
tgggacacaggatggtaggaacaagtgtgtgattcccctcctgtaagtaggcatgtaggcagtgagaaaagagaagaggtacacaatccatcgggcaccaaagccactttggccaaggggaacatgcaaaaggtatttggatcaaggcctgaaaatagctggcaagaggacagggtacaataatagcccagactgcagggcaggagtcccatactctgaacctcagctccagggttctcttccagcctcttcacagagtcccagactgagcccactgtaggatctcaagaaacacttcttgacatgattccaaaatccattccacaaattccactcttgtctttcctctgcctgtccagcatctatcttgtttatctgtatcctatcttatcccctctccttccatactttctctctt

SEQ ID NO: 68556 - DNA, 863 bp, Homo sapiens
ggtagcaccagtcttccctgtcattagtcaattaccagtctttcaattattcaaccatgaccctcgaatacctattgtgccaattgtgcttggaggagacagagaagaagacatgatctctgccctccaagagctcagggtataatgggaaagataaggcccaaataaatataataaaagctagaaaaacagatcacaaagaaagtgagataaagggctttgggaggaagaaagaacttttagcttttgggtaggtgagaaaaagagaaactaacaaaaatttcatggaaaatgttaattcagagaacctggggctggagaggagcgcagggagtatttttttttttttaatgtggtgatcaaagataaccttactgagaagccaacatttgagcaacgactcaaagatagggaataagtcatgtggctatctagggaaagaacattccaagtagagggcaaaggctctgaggttaaatgttcttggtgcttttgccaaacactggggaggccgtttggctggagcagagggaaagggagaggaagagagaatagttgtatgtgaggacagagaggaaatgagggactagatcatgtaggccattgtgaggactttgacttttactcaaaatgaaatgggaagtgatctgagcattctgagcagaagggtgacataatctgaactacctaatggtagttttggactaggatggtagaaatagatgtgaagagaggtagtctaattctaaatggattttgaatcaataatgggttaaagtaaatttcgagagtgtgagaatgaagtagttggagaagactccttggaggaggttccctaggggaagaagatgagaaggactagt

SEQ ID NO: 68557 - DNA, 660 bp, Homo sapiens
tatgcctagaatgtttgtatatttatatgtgattttatacaagtgagcgcacataggtgagttggtatgtggtttgcatatggggacacatgtgcttgggtatgtatatgttggcattcagccataaccggagacgttctgaagttcctgtggcacttgtcagtgagccagttaaggaaatggcttttctgcctctggcattcagggccgtttgccagcttcctctctccctgttctttcccactttagtaagctccctgtgtttggcttctctcatccctaggagggttaaagcctactgactcatcgagccaggaactggaaaaaggctgataatcttctgtgtgacctctgttagtaagaaaaggcctggcttccctgccagtccctgtccttcacactatgagggagagtcctgacttgaaatcagaagacctgagcatctattcttggctctgccacttattattgtgtgaccaataatctctctaggtttcagttacctccttcataagtgctctgtgcagtaaggaaggagaggggaagcaatggtctgtggtgctaagggagagccagatggtgctggtgtctgaaggaggagggagaatattctgagcaggggcaatgatgtggccaaaagcgtggaggtggacctgaact

SEQ ID NO: 68558 - DNA, 806 bp, Homo sapiens
tcatctccattactaggctgtgatgtggggtgggctatctttgtggcctaagggatgcccaccttggaaggaccagagtccagccctcacaatatggcctttgttagctttggacccccaggcttctggtgggaatggtagaaatgcccagtgatggcctccaggctgagcagcatgagggatcaaagttctggggttgagtaagagtctgtgacttgaggctccctgaggggtcttagggctagagaggctgtagtctagtttagggaagttggaaagcccaatcagtgttaggggttttacatatataggggctggaatcaggatcaggaaaatggaagctgggaggaccagtgagaagggagtttggggtttatgacacactgaccctttcctcccactccctgtatacttggaccctcctcactacccttttcatcctgggctcttaacagggtaaactgaaagagaaatccaagcgtgttcagccccaggtatccatttctgcactgccgtgggcaccgcttctctgtttgcttgtctgtgtgctcatctgccctttgcctgtttgccccattgaggtggctgccagacctaacctccttccccttgcccctgggcaacttgacatctaagccactgaagggtggtgaaattaaatgtccgttactgcctctgtgaattggtatagagtatggatcttagagaggtaacagcagaacacattttatcctgatactcaggacctttgtgggagaggggacaaggtaacctgtcagaaaacatttactgtgcaggtagctgga

SEQ ID NO: 68559 - DNA, 1181 bp, Homo sapiens
gagcaaaattccgtctcagaaaaaaataatgcctttgtctcctatggttgcttgcttgattgagttagataatccacatgaaggggttagcagagaaactaacaattagtacttgataaacattagctgttgtgattattgtattcatacttgcaggagcctcacctgtcccttcaaccccaccccatttcactttcccaagagcaagttagtaacagggacagggcttacatccaggccttctgactcagcctagaattccatccattccatcgatctgctgccaaagaatgttactgattgggcaataattatttacttggtgtgtgggcaccactgttttttaaatgagtgttttcatttgtatcaaactggacctgctttcctcaaggattgcccaaaaggagacacaaatttactaaacacttatcaataatagaacaccgtgctaggcaatttccatatactattaatttaatcctcacaataactttggaagacagaaagtattttctctgatttacagatgaggatcctgaagctcagaggggtaaagttacttctctgaggtcacctagctagtaagtggtagagctgggattccaagccaggatcctctgtctccaaagcctgtacttcattcaggacactttcccccacatttagaaaagctgtaattatcttccagtgagacagcatagcaaatgtgatcactgtcccttcctcactccccaggtgttcaagcagccctggccagggatcatgcgcacagtctatgggaaccacgaacgctttgagacaacctactttaagaagtttcctggatactatgttacaggagatggtgagccttagctatccccctcttgcacctcccactaagacatgtaccttccacttccattttcaggaagagttggtgtgttgctataaaataatacctgagactgggtgatttataaagaaaagaggtttattttggatcatcattcttcaggctgtgcaggaagcatggtgctggcatctgcctatggtgaggcctcaggtagcttccaatcacggcagaaagcaaagggaaagccagtgtttgacatggcaagagaggaagcaagggagagagggaggagataccagcctcttttaaacaaccagatcttacatgaactcatagagttactgca

SEQ ID NO: 68560 - DNA, 547 bp, Homo sapiens
ttttttttttttggagtggggtcttactatgttgcccagactggaatacagtggctattcataggtgccatcatagtgcactatagcctcaaattcctgggctcaagcaatcctcctgtctcagcctccccagtagctgagactgcaggtgtgtaccactgccctggcctcagcatctaagataaaactgaggaaggctatttgtgagaataaggtttattcagtctgaagcctttatgagttagaatgggaatgactgcagattacataaggggtgacctaataccctgagtagctatgtgatgactacaggagcatttccttggcttgaacacatagagctctgctgcccccaacaagtctcatcttggcctcaaaaactcagagtttttctgctaagacatccctctgcctctgtcccagggctcattatgccctcctgaatttaggatcaatagtttatagctgttctctgctatctacaggctaaaggctgaaacacacagtcttctcacttttgatagagacattaacataaaatgacatt

SEQ ID NO: 68561 - DNA, 1885 bp, Homo sapiens
ccgagctacttgggaggctgaggcaggagaatagcttgaacccaggaggtggaggttgtagtgagccgagatcgtgccattgcactccagcctgggcaacaagagcaaagctctgtcaaaaaaaaaaaaaaagaaaaaaagaaagaaagaaaagaaatcagatgaaggtgctaagtgggccctttgtttttctcattctacagcctcaaccctcccttggctttatttatgttttgctgatgacattcaaatctacatcttcacagcaatactttcctaccttcaaactagaatatccaattttttcctgcgagtctccatacaaccagaatagaatttgttgttgtctcccacaaatctgcttcttctctgatgaaccccacccaggtacccaagccttgagtacttgtttcctacatctcactctccccaaatcctatggattttgctgcctaagtatatagtactttgaattcctttatttatctccatttccagagtttgtagcctagccccggccactgtcatctcttccctgggcgtgaaacagattcagagtcaggtgtcttcagtgaccaggatatgttggcctctgtcccccttccaggacttggcacgtgctgtcttctctttggaactctcgccaccactcctgatctgggctcgcgatttcgttccggaagctgtccctgttctccgccccgggcttctacattctacagcccatcacttttccctgtaccgtaggaacagtgtttgtcttgatcacttctctacctagtaattagccgcgcttagtactgtattcattcatcacatgaatgaatgaagaatgaatgacagacgggtcagatcaccgaaagcctcaaaacgcccacaaggaaatcggtcgcactttatcgccaggacttaggccagtgcctggaaaggccccgaggcaacgacacggtcggctgcccaggctggccccacttcacgggcccgctcgcttccaccctggacaaagtttggccctaatcgctccccgttgtagctctaactggctccagtctcactggcctacatgccccgacaccggcccgatctaaaggcagaagatccggaaagtctgggatcagtgcgcgccagcccaaccccctcactagacactagttgccccgctcctacgaagggtttcagccacaaggtctcccggcctccggaattccaatctcttgccagacccctccctcacatcgttcctcccgaggaaacgtgacccatgccggccgccgtggccgccccaacctactagttcgcctttcctccgcgaacggttctcccggccctcgcgccgctacccaggctcagggggcggggcctcgatgcgacccagtgcgcttgcgctgaccgccccggctaggcttaaagagcaggcggggcagagacccatacctttggcgctgagtcgaggccaggaaggggcggtcgatgagagggcggccttagcattaggagtgcgtcggctgcaccctggcggatggaccttgggaaggaggggaggggaccatcggggtcggcggggagctacgggtatgcatagctcatagagcgtcagagctgacgacgactagtggaagatggggaaactaatgctcagagcgggacagtcactacctcaggggcacacaattgataagggtgggggtggccgtggtaatggaggccccaaggaggggcaggggcccatagtacgtcaggggctgagcctgtattagaacccaggcttgtttcccagcccagccaagtcccagaaaaatccccctgattttatctatttttttttaacctgggataccagcagggaaagcattagaggcaaaaggaaaggattttcatttttcca

SEQ ID NO: 68562 - DNA, 638 bp, Homo sapiens
aggccttatgtctctctgttccaaagatgccatgagatgaggcctccatgtcccagcctcaccaccccaaggcctcgtctggcacgtttcctggcactctcccctcgtgccaccttggcctcccgctaaagcagaggaaccccagctccccagctctcccctccctgcaatccctgaaaccaaacagacccatgctctcttctctggttaagggccatgggaacccaggtggcaggtaacagggtgatagccagagagcacagatcaaaggtctggaatctccccaggtccacagagcaagctttcctgccttcggcacatggctttgtgtatcaattgtgtgccaggctcaggctagtgcaggaggaacgttggtgggaagacagagatggccctgtggtcacaaaactcacctgctagtgcaggagactgtgacgcagctggacagtaaggaaatggggggtaaggatacctgagcccttccagggactgcctccaggagcccgtccgtggctgtgcagaggctgctgctgctcaccctgcccctcggaaggcctcagcccaacagcggggcagtgagcagcgggcttccctctcagaacccttgtttgggcctcactctgggccgccccgcactt

SEQ ID NO: 68563 - DNA, 503 bp, Homo sapiens
caagtctgcaggatgccttcctgctccaactgggtccagagccccggagacccctgcagccacagaattaaactgccaagtgcattcccaccacatctcaggccagctttccttcccaggccagaaacatatccagaatcagacatggcttagaactgccagaggagagctgtttataccaaaagtgtgttgaaacaggtcatgccagtctgccagatggggaaagactctgccaatagggtgaggcccagcgtactccgtgcctgaggttcacttccagctggccttgggcaagtgtccacaactccaagcctcagcttcccagtctatgaagcaaaggcaggagatgaggaaatgactctggccccgtcatgggggaaggaagacggccaggcacgcaggggtctgggcccttcaaacagagcagctctgctgtgatccactgcagacatcagggcaggactgggtacaattttatttgaatgaagagttctgctacctta

SEQ ID NO: 68564 - DNA, 2467 bp, Homo sapiens
ttatgaaaaagctgtctttaaataaagctaatgttttacaggtgttagcaaggttcggggtgggggagggtggaagaagtagtggactaggtcctattcaacctggtttaccctaaagcagtgtccttcgctcactcaaaaataacaataatcatatgttgggcacctgttataagtcagatgcttaatattaactaccttcagcccttagtatgcaccagaaatgcactaatgctttacacaattgccccctttgatctccacaacaatcttaaaaggtaggttactaattctcatcttcatcttacaagtgaggaaactgaggcacagaaaggtcacctgcccaagcaagagagaggagcagggctttgaacccaggcctgactccagagtccctcttaaccgtgacgctctacactagcaaaccagatatagtctctgcacccgctggaactcagcctaatgtgggagacgggcgagaaaaaggcagacaacaaagaaatacgaaattatagactaagaaagtaatgtaaacgaaacgaattcgcggctgtgacagaataacaatggggacctactttagaaaggggaaggaaagagtgtcaaggaaaggcctgagaaaatgacatttatgaaatgctcgggaaccatttgggggctgcaatgatgaccccctcccccacgcccaatacacgggataaactcgaggcccacagaggctaaaacaaacacgacagggtcccccagacgtgtagacgtggcgcaaagaagggaggatccagaaactgggcccagggttcgtacacgccatcagtgtccacagcagcccagccccgctcggcccctgacaagggacatcaagccagctgcttcccacggccccgctgcagctgagagcgtccgggcagctcacagggaggccttccggccagccaaaagggctttggcccgtccagcggcggcctggaaaggcctcttccccggccccccgccagctcccgcctggtccgccccgccccgcccctcctggtccagcctcgtacctgcaccgcccggaccaggccccggccggtcagctggccctgccgcagctgcagcagaatgttaccaggccgcggccggccgccccatccgccccaagccgccactgtggctgccgaccgtctccctcggccggctccagacccagccgctaccggcgccgccgccatgtctcctcgtcggacaaacaggaagcaagcggcctcggggccgcggagatttctacggggcggcggaggggtcgccgcagcgcccccagtgggccgtcggcggaggcgcaagccgcgtggcagggaccgtgtgcggcgtggaggctactgggaattgtagtcctgcgcggcagcggggtaggtgggaaaagagatgtggcctttcctgcactgccggtttctctggcccccgggcccagcatttcggcgaaatctcccaaggtccacattctcccatttctctcgccgatttgggcaggatgcaggcagctggccaagaaatgatcctgggcttcaggtcaggagtcaggccctcgagtccgcttcctgcctgcttctctctacacgtgactcaccgcggacatcgaccaagtcatcgcgctctgccactgcgcctgtgtcctcgtcaggtcactccatctatagattctgggagcctgatcaatcgtagttcctggggctttctctgcgcccgacaccaaaccatgtctaggggaaagggagggtgtctgggatacagtggtgagcagaacggcctgggatcctttatcacgaaatgcaggttacaggggaagacagcagatccatacacaaagaaacgcagtctcaaactggataagttgtgtaactgggtaggttgttgtgaaattaaataatggaagggaaagggattagtaaattgtgacatcatattctctgtcagatgaaaaccctgtcctaatttctatccaccagatagcatgttgtctctaatactcattttttcagctaacttctgtggcaggatggcactgactccccccacccaacacacacacactttttcccttcctagcagggggcctgtaataaaaatgaaagaggagagctaagtgtgatgtaacagggaatggtgaagattgtgactcataactaagatgactgtaacttactgctcaaaccagaacactttaaagaatgaaaagacacaataaataattacaccgggacggtaggcataaaagtgactctcccaggtgaactggcactatggttaccatcctcacaccccatctaaaaggagtagactcaccatccatcttcatagaactagaaaaaagaatcctaaaaatcatatggaaccaaaaaagagcctgcatgtccaaagcaagactaagcaaaaagaataaatctggaggcatcacattacctgacttcaatctatacaataaggccat

SEQ ID NO: 68565 - DNA, 2036 bp, Homo sapiens
aatggtataaaccaagaatatttctggacagatacaaaggaaagttaatagttggaattctagggtatgggagatatttattgtatataatcttttaccacttgaatttgccatttgtatttactttgtttcaacttaaaaaaataaaaaccatcacaagttttgagtttaatttctcccgaccttagcacattcgtgtgtaaaacagggataatggcacctaactcgtaggggtattaagatactgagctgagatctgaatgacaagcagcagccagtgatgggaggaaaatggggagtgtatttcaggcacggggcacaccaactacaaagacttaagttttaggagtgtcacactccttcctggatctgaatgcccacctacataatgaaaggggtgggttttctaattcttggagcccttccacggtatctcgttactccagaaattgcctatgtccccacagctgatgcctgttactgctggggctgagctcagcgatccagcccacccggctaatccaggactttttttttcactgcgagaggctaagtggatcctggaggtgatagtaagaattgcggggagcgcggctctagctcagctgggagctttctggtgccggtgaggagaccatgaagccaccagccccagctgacccgcccgccgaggcccagagagtcagaccctggccgccccttgcccctccgctcgcactacctgccccaggtgtcgtgcccgtcacaggtgagaggtcgcagctcatcgaagggaaaggcattctccaggtagctgtcgtaggcgtggtagaacatggccttgactcgctccctgggtgggggacgagaaatcaggcatggggcaagaacacaaaaacaagcgggggaagaacaagatacagggcggaaagtgggaatcactagctgatttctccctgggacctagcggctgtgtcggagcaagtcggggtctgggatggacggaaagggaaaggaccgggttcacgcttcccattccccaactgcgaaagggcgggtcacagttcacctgtagtgggcgggatctggcgcggagccgtcgggacctggcgcaccatggtgctgaggcagcagcgcgcacaggaggccgagcgggatgagcagccggaaaggcatagagctcgtgtcctctcagcgcccccgcagcagcagcagccactgcaaccagttcatcctgggagctgctgcgggttcttccgggaatccgcgccactgcgcctgcgcgctgagaaatcagcctctcacttccggactacaagcccctgaatgcaatgggcagcgaaacgcggccgaagagcaacttcggatgtacggtttcggcaacactgatcaacgtgtcttaaagtcagtggctgttgttactactgttattaattaatgttttaataataacagctagcatgtattgagcacttattgtgtactagtactgtacggagcatttaaaatgcattctctcattcatttttttcaacaaccttattaagtatgaaggcagggtaagcatgagaaatgttcagcctttaccattattacctagcaggacaagccgcagacaaaactcctcagacaccgggttaaagaaggaaggagctttattcggccgggagcgtcagctgactcacttctcaaaaacggagctccccgagtgagcaattcctgtcccttttaagagcttacaactctaagggggtccgcgtgagagggtcgtgattgattgagcaagcagggggtacgtgactgattaccggtgcaccggtaatcagaacggaacagaacaggacagggattttcacaatgcttttccatacaatgtctggaatctatagataatataaccggttaggtcaggaggggtcgatctttaattaccaggcctggaatgcatcgccgggctgtctgactactgatttcacttctgtctttcttttaactcctacattttctttgaggcagaaattgggcataagacaatatgaggggtggtctgctccctt

SEQ ID NO: 68566 - DNA, 1569 bp, Homo sapiens
ctgacatgctattcatgtgtcagccaaaggcagcatgaggaatcccaactagtttgatatataagcagcgggaagcggccagaaaaggcagcaggggccaggtctctagcagccttgaatgccaggctaaagactctggacttgatcctgtggggaggcagtgtagcagaatggctgagtgctggacttgactgcctacgtgcaaaccttggctctgctacactatctctgtctcagtttcccatgtagactggggttaataatagtagctattgcattaagccactggggaaaggcacaaagataataatgtatgtaaagcccattgcccaggttataataagcactgaatcgacattggctatgattatttttgattaatgaaggggagggggttatggcactggaagattttaagtaggaaaaggacatgatctcatccctgggtcaggtggaggtcggaatagagaacggggagatgaagtagaaagttactaccccagtctagatgagacggatgaatcctgaatcagggcagtggaagaggagatggagaacaggcgatggaattggaattttattcaggtcaggatttgttaaccatttgttccgttggttaacaggaaacggggggagggagagccgagggtgaaaaaggaggcagaaaggagtgtctcttccactgcaggcctcagtttcctcatctgtaaaacggagataataatccctgtcctgtcctcctggcagagttactgtcagcgtcaaacgggagaagcggtgggagggcacattatagtttatgaagggtcgagaaggcgggcggccagcctcgaggtagggggttattatcttccgctgcccgccgccccctcccacgccggcccaggctgaagctgactctgcccgcaggcctccaaagacttcatatgctccagatctcctacttccgcgacccctatcacgtgtggtaccagggcaacgcgtcgctggggggacacctaacgcacgtgctggaaggcccagacaccaacaccacgatcattcagctgcagcccttgcaggagcccgagagctgggcgcgcacgcagagtggcctgcagtcctacctgctccagttccacggcctcgtgcgcctggtgcaccaggagcggaccttggcctgtgagtaggcgcgcagcgggggcggggtctgggcggggctagtgggggcggggcctggcgggtgggggcggggcctggcggatggaggcgggctgggacttgcagggacccggcagccactggagctcggtggcgcctgggcctttgaagattgctgggtgggggctggagagaggcagttgtccccgctaagaaagccccgactcgggcggtcgtcctgctggcataacctcttgggatagaccctgttggaaggccctgacaccgtgacgtcgaaggtccccagaaaactcctcacccctcgcctcacagtcctccaactccttttcttcatagatctccgtccttcccttcccacagcccccagcacttcaccccccaccctccagccacttctcatacaagctg

SEQ ID NO: 68567 - DNA, 1004 bp, Homo sapiens
agaaaaaattagctgggcatggtggtgtgggcctgtagttccagttactcaagaggctgaggtaagaggattgcttgagcccagaaggttgaggctgcactgagccatgatcgtgccaccacactgcagcctggcaacagaccaagaaaaaaaaaaaaagatagtgtatgtatagtcagtaaatacagcagtggcttctgatctccagacctctcatttgcattgattctttaaaatcatctctaccttaatgttctgtagacatttcaaaatcaacatgttcaaaatcaaatttattatctatctccccaaatctgctctctctacttctgatgtttactgttcattaatggataacagaataaccatcaaatcatgtaagtggagagaactcagtgttaacctttatttactccctcttatttatccccatctaccaactacagtatctataaaacacattcactcctttctaccccattgcttttgttcaagatatcataattcctctctttctttgtggtaaacatgaaggtgtaccatccagttctacctccaaagaaagacttcctgttggccgggcatgatggttcacgcttgtaatcgcagcactttgggaggccgaggtggggggatcacctgaggtcaggagttggagaccagcctggccaacatggcgaaaccctgtctctactaaaaatacaaaaattagccgggcgcggtgatgcacgcttgtaatcccagctactagcaggggctgaggcaggagaatctcttgaacccaagaggcagaggttgcaatgagctgagatctcgccactgcactccagcctgggcaacaagagcaaaattccatctcaaataaataaataaatacataaataagaaaaaaaagacttgccgttcagctatagggggaatagccagcagatagcttccgcttgcttcagttctttcaatgtctgcctcagctgtagaggacagtcctgcacaagatcatgccc

SEQ ID NO: 68568 - DNA, 1042 bp, Homo sapiens
cctaaactttattattatttgaaacataatttttgagtaagttattccgtctcaagaaggtccaattcgtgttattgagaatggtaaaataatacactacctgccctgggcactttagtgagaatccatttattgggttaactagcagtgactgtggatggcagtgagcaggcctgggagtggccaggacataggacagatgtgctttgatgggagagaagggaaggaaaagccggcagcacagcgatgggaaactagaggccagaggtagaggtggagggcaatgatcagggagcagagatgacagcatgccaaggacatcctgtgctgacttcacaggctggctctgggcataggccagtctcttcctggagctttcattttctctcttcggaatctgtcaactctctactgcaatctgttccacagtcgtatagccaaaatcctcttgctctgtgtctgtttattcaacaaatatttatcttaactgactctaatcacattgtctcctgtttgtcctgcagtgaagcccttttacatctgcttatctcttttgatccaagggaaggagacttaaccctgacttccagagaaggaaatagtctcagaaaggttaagtcatttatctgaagttgcccttttaatactgagtactggactctctcagtatccgcgtactctgctgccccctaccgtgaacatagcaataggttttaaatcacaaaaacacacagcagaacactacacaacactggaaagactacgacactataaatagtgcttacatttgttcatttagcaaatattcagctggacgtggtggctcacgcctgtaatcccagcactttgggaggccgaggcaggtggatcacttgaggccaggagttcaagaccagcctggccaacatggtgaaaccccacctctaaaaatactaaaattagccgggcatggtggcacgcacctgtaataccagctactcgggaggctgaggcaggagaattgcttgaatccaggaggcggaggctgtagtgagccgagatc

SEQ ID NO: 68569 - DNA, 566 bp, Homo sapiens
caggcactgttagctgatagggttttagttatattcctgatagaggcaaatgaatgtccaaagagttgtccagaggcaacgggaagacactcccactcctctgccctccccttctgcccagcactgggggtgtgcacttcccacacctgctccttgcttttgcagaacttgttggacccagcccccaaatcccaagagccggtggtatgtgtgggaaggaccggggacctgtggatgggcaccatcccagcacctctcccatctgtccaaccctaaccttcatgaaagactgccaattctgatagaaattccaagattgctaatgttttctttggataagaatcaggactttgctctgctctggaaaaccaagcaggaactgtccagatgcagctcaggaccacagcaatcgactcctgaactggaatgcagtgaaggcaggttttgggtgagaggcaaggaaccaaaatttattgagcatccatatattatctcgtttaatttccacatagactcagcaaaggggtggagtttcctgggaactttttgaacttattagcttactt

SEQ ID NO: 68570 - DNA, 2193 bp, Homo sapiens
ttaactctgagttgacacagcacatgtttcagagagcacagggttgggggtaaggttatagattaacagaatctcaaggcagaagaatttttcttagtacataacaaaatggagtctcctatgtctacttctttctgcacagacacagtaacaatctgatctctcttgcttttccccacaatctctcgcctggaccccagcatccaaacagatccccctgccccaggtcttgttccctctaatcctccctcaactgcagccagagtgatttaattgtatcaccacccccactcctacttaaaccccccactagccaagaagctgatccaaattcctttgtatggcattaagcgccctgctttccagcctggctgacctcatctctctccggccctcccctcctgctttgttccagagccaggtggaatgaaactgcctgtctctggactgtgtttattgcattccatccgccaggaatgccacccccacccttcctctcctgccccctgaatccgttctcctgactaacttctgatccttcaagactgagcttcaacttcacctttgtgaagctttccctgaacatcttcctccaggtttaaatgacccctctctcctcagaatccctgctcgaccctcccagacattcttaaagcacccagagccctctgcctcacttgtcactctctctctccttgtccctgctctgcagagaggcttgggaggcaggggttgtgcctgatttctctgtatgtccctggtgtccagcacggggcctggcacagggcccgtgctcggtgtttgctgaggtaatgggttggctgaccgactcatatctaagcaggtgccctgggcacctccccacactcctctccacagggaacgacctcttcctggtggctgtgcatgagctgggccacgcgctgggactggagcactccagcgaccccagcgccatcatggcgcccttctaccagtacatggagacgcacaacttcaagctgccccaggacgatctccagggcatccagaagatctatggtgtgtggcagggagaggggggactgctccttcctcggggctgggctgtgactgcctacctgtcatggggcaggggacgagggagggggacgttgctatcatcagcactgctgctgtttctctgtgtgtgacctttacagacttccaatggctttgcctggccagagggcaaggcttcccctggcacacctgggaaacctaggggagggtctgagctgtaactgagagggacaaaagtgaggtgagggccacccattccctctcctttacccctccccttccacactcttccccgtcccttcatgcttctctccctccctcccacaccagatggtgactgagtgctcccatagattccacctctagccaggcaggttcacacatctgcaggagtaacggtgatacagcgtgatggggactataaccagagctttgttctttaaaaagaaaaaacgagggccaggcgtggtggctcttgcctgaaatcccagcactttgggaggctgaggcaggcaggtcacttgaggtcaggagtttgagaccagtctggccaacatggtgaaaccccatctctaccaaaaatattaaaacaaacaaacaaaaaaattagccaggtgtggtggtgggcaagtgaaatctcagctacttgggaggctgaggcaggagaatcacttgaacccaggaggcagaggttgcagtgagctgagatcgcaccactgcactccagcctgggcaacagggcgagactccgtctcaaaaaaaaaaaaaaaaaaaaaaaaaaaaaaagaaagaaaaggtgaaagatgagaagctactgctatctaggtaagatatgaaaggcctcctacacacctctctcccagttctgttcacactggtatgtgaggttcttgttctggtcaagtcaggtgagctagggagaccagtttacttgagcaaatgcttgtcaagacagcacaggcacccacagcccacaggctacggagcacagaaggagggctccctctggaggagatgacccagccagagccctggaggacaggcaggacctccacaagtaaagcagcagagaccaggtgggggctgtgggtcccagaagctattccaaaggtagaacaacaggatctgctgacagatcagacatggggtgag

SEQ ID NO: 68571 - DNA, 774 bp, Homo sapiens
aacctgggaggcggagcttgcagtgagccgagattgcgccactgcactccagcctgggtgacagagcgagactccatctaaaaaaaaaaaaaaagaaagaaaactgaggcctggaggctacaggccttgcctagactgcttgtgtaccagcccaagactgaggcaccagttacaagaggcgtttttactggactcggactatttagctgccatttactcaacatggactgtgtgccccgtactggtctgggcattttgcctagaatctctcatctgattctccattattacctgcacttgcaggtgaggcctaggtcatgcagctataaatggaggaatgtgaattcatgcccaggtctcgagggaattcccatgacttggcttccatgatcctggccctgctggatggagccagcctcatggagggcgctcggcccaggctcagtgaccaccccagcctcccactgtcccgaggaccagtctggctgatgtcagtgacgctccactgcccccatgtggccactccaggccccaacatcatcctttccggctccctcacacctccttttccacaccaggcctgtctgctgtttgtctcattgtccacccagcagcaagagtcagcaggaggctgaattgaagacagttacaggagcatcctgtcttcctcccagggctttaaaagtcagaagcagctaatggacagtctcggtggagggctgggctgttgggacctaagccccacagctgcaatcactgggttcggaggcaggg

SEQ ID NO: 68572 - DNA, 2996 bp, Homo sapiens
ccagttaggtgaggcagagatggctgcagggccaacactggcagagcctgggagtccttcggaaggggaccagggcgtctgaagtgctcagtgcccccactactctgaggccgactccagctactctgaggccgactcaatctctcggctggaagcagtgttttcccagagcttggcccttgctgacctcgctcactgggcccatcttcccacactgctcttagaaggacacccctaccggtagcagccccaagctgagggggctccctttttgaccttcactggcccgcccttcactgtctccagcaggagttcctagggcttggcctgccttgctccacagtacggcggaggcagccctgcttgtcactgaggagccctagacaaggccaatgggttcatcaatgcccactggctctctgccaaagccaaaaaggtgtcaggcagtctccagcgtgctggccgggtctcggatgccacccctgctcactgagcctgcatgggccttgcccccgaccctgtggtctctgggattggggtcggcttaccctgtagcacagacagggactcctgctgccctgggagctgtctcaagcaaaatctcttgtcccagaggtgcccatgtgggtccgctgtgtcccctgtcatcatccttgttttttctcattttggccaagggcaggctccctgggacaggcagggaacaactgcggagatattagtgattcataggtttgtacagtgttttatactttgcaaagcactttattagctcacacctgtccactcacatgaaactcgtgttaggccctgggaggccgacggtaactctcaccgtgccctcagatgaagcacagagaggttgttacttgcccgggccatccagtgggctggctgggtcttgtgtccccatctgtggacccctctagggtctgagatgagatgagaagtgtctcctgtatccacctcttcctggcctcccttcccccacttcctggtccctgtccactcctcaggttggtgctctcacttcttgaaagctctaggcacccccgcctcccgccaggctccccattggctcctggcaggccagctgagaatgaacaggagatggaggcaggcagcccaggctgcagaggtgagggatgtggggccaggcccagagggctcagcctagaggcttccaatctcagattctcctgcctgtggtcatctgtttgtccatcaccccaggacagggcagacagaggggcaaagcactgggggccccagagcctagcttcccctcagcctgggggacatcacagcatttcagtgtcagtcacattttaaactgatcagcctttgtataatgttttttaaatcatttctaaataaaacagaaatacagagtgtgtcatttccctgggatgagggaacaaagatcaggttccaagagtaaccttaggacgctctgggaagagaaccgggtcctttggggtgtctgggagctgcccacccatctcctctgccagaccggcggtcagatagcctccctctacaacaggctggccctgggggcccagggttattggggttccaggaacacagcctgatgatgcctccttacgatccaggatggagagcagcccccccaggagtatggggagggtcactgtggcacgggcttctccatgacctgggacatgacctgggacacatagtcaagagcacggttatcagcaatacagatattaataaaaggcagacgaagtcaggaggtcagcaactttgcgggcttaccaggaggcctgtcctgcctctggaagccagcgacagagagggatgcccccgacccagccagccggagaaagggatggggtggtcacgaaggtctgagctgggtctgggtgtaggctgggaagcaggctggggtgtagactgcgaaggcggccctgccgggacttctttccagtccccggcgacctcttcgaattctctgctatctctggggagcctcgggtgggagggggtgtaagagacgcagggacgtggggagaggagacaaggcaggcaagaaccacaggggacggcggacagacgggcgacatcctgcggaggacgccgtcagtaccaggaagtgcaggcgatgaggaagcgcacgtcgtccagcggcccccacgggctgggctcgggctggggctggggctggggctggggctggggctggggcggatgccggggctgttccgggccctccggcgccgcaggctggggctggggctggggctgggtttgcgcaggctccggggcgccgcggccgccgcttagctgagcccccatggtctgcaagaagagaagccctttaaggtctgggtcgccgggacaccccgctagggccccgccccggctctgccctcacctctcgcagccagacccgcgggtctcccggaacccacctcggcgtcgggaggagctggcgccgtgacgccaccaccgcgtaccgacctcaccctccgtgcgttggagcggaaagaagggactcgaccctgtgcttcggggcggggctccgcgaccgtcccccgccaatcccgccccagcgcctcaaggccccgccccgcgcaaggggacggaatgcaccccaacagcctccaagacgcccaggccaggaggacgctgggaacccgctgccccgccccacgcccacccaggaaaagacctgcaacctccatccaccttagtcaaagaatgccccgaagccagatgccccagagctctcacaggggacttgcccagctcaggggaaaatcggaacggactctctgcctttcaaggccagagaagaccggcgcagaagtcgggtgaaaactgtgagaactagaccgggcgccgtggctcacgcctgtaatcccaacactttgggaggccgaggcggtgggtcgcttgagttcaggagtataaaccagcctgggcaacacagtgacttcgtttctacaaaaaaataaacgaggcgagag

SEQ ID NO: 68573 - DNA, 4106 bp, Homo sapiens
agctaatctttacagagacagaaatggatgcttagaaagagaaagcaccttgcccagtcagtggcagggagagatgagatacaaatcctcggctgggtatagtggctctcgcctataatcccaacactttaagagaccaaggtaagaagatcacttgagcccaggagatcaaggccaggctgggcaacacagggaggccgcgtctctaccaaaaatgtaaaaattagccaggtgtggtggcacgtgcctgtggccctagctacctggtaggctgaggtgggaggatcacttgagcctaagaagttgaggatgcagacagctgtgatcttgccactgcactccagcctgggcgaaagagcaaaaatctggcctcaaaaaaaaaaaaaaaagagaaaaatccttctccaacactaggaactaggtgtggaacttactgagtcacttaggtcaagtctcaacttcctcatcagtcaagttaggccagtaactcctaccttctagtgtctttgtgacgaaggaatgagaacaggagtgaaagcactttacattatttgttattactattatccagcagcctttgctagagggttgccccgatctcctgacgcttggcctgagagattctatagtgcccagagataacagatgataccctgggaatccctaggtcactccgggttccctccgggggtgtaattaatggtgcttggagaccactccctccctcggcgtcctccacctgccttacccacacacatgcgcccgatgatgcggcagccggcgatagacgcgtgcaccacggggatggtatcggagagctcgccctcgaacacactgtagggacatggactcggtggtggcggggcagaggggccggcaccctcccactgccggagctcttgactcctgcgcacgcctccccgccaccgtaagccccggggctcccgccgcacctgtagaagttctctgagcctccgatcgctaccagacagtaggtgttggtgagcttggcaaagcagccgatctcacagttgttctcgaacgaagctcggaccgccatgaggcctaggggcggcggaggcgggagttcaaggccggcggatcctttcccaagtatcccggcctccgtccctcaggccccgccgcgaccccgcccctctcggcctcccggcccctccgtcctcgggtcccgcccactgggcccccaccagaacctccggccctgaatcctctggcccccacccctcccgacccaggaccggagctgaccctcccaggttcccctcacaccagcttaccaagtaaccagtaacaagctccgcacgcggcgactgtaccttggactccctaaaaaggtttccgtttccacttccgtccagggagacttccgggagagcccggcgctccccgccacgcatccagcccctctacctccggcctccggcggactctatggtcgcgagcggtctgggcgcgaccccgcctggccccacgcctagcctgctcgcgttcattcattcattattcattcaggagctttttaggagctgtcatcgacctagacctccggctggtcggttgtgaggcatgagggagaggaggggccaggagtgtctcgcggaagggttgatgatggaggtattgatggaaatgaagccggaggaagggcaggtttggggaaagggatgagtccagctgtgccttgagggacagaagtccatgtctggagcccagcaggggagtggagtgctgacgaatgagatgaggggctgaagacgggtggactagaagaggctacccatggagagagttccaggaggcagaagtgcggccagaccgaggctggagaaagagcgcagccagagacggaaaggcagccaggctgcaggtgctggagagaggggaggactgaggaagcaggggctcaggaaaaggctggaaaggggtccagggtgggcaaggatgtgggtgctggttggcttccacgatgtgcctctcgcacggcctctatcactcactcagcagccaacttctgtccccaggatagtgatgggggccaagggccctgctgcacacttggacaggatgaacttggcccacattttgtagaatctgcaaaagccccgggttctctcaaaatgtcacagtggtaacttggagcccctggactcccccaattcctccttcggcattcaccctcctccaggggtttccccataattggcctgaatggtgcccttcccattcccccaacgtgtccctcccataactcctcaaagttcaggatacaccaggcgctgtgattcacaataaagtctgcctttattgatgtgtatcatgtttactatcccgggtaagtggtgagttcaggaaaatggcccacaacctgtcacagcctgtacttcaagagacactcagcaagatgatgacgacgacaatgatgatgatgatgatgatgactcagcaagatgatgacgacgacaatgatgatgatgataatgatgatgtgtgtgtgtgtgtgtttccgggtatccacatactctgctcttcctcactcattcacctcagacccactcagtcctctttagggcatctctttcacctgattctctctaccaaaaatttttctaactctctcctccctctgtccaaaacctccccatccttcagggcctggctcaaaggccacctccatctcctctaagaaagttttctgactactccaccttctccaggactctctgccctttgttttctaacaccctctgtaactggttaacctttaacttgatatggctctgaccccttctccagcagcttgtgcatttcacctctgtccccaggtctgagtgtgacccacctgtcagctctacaggcccagcacagggctggaaacacagcctagattcaagaagatactagttagggtgtgtgtgtgtgtgtgtgtgtgtgtgtgtgtacacaagaatcttgagcccagagagtgtgtctgacctgggtttctagacacctcccttccccagtctgggacctgagcaagtccagagtctcggtggacagaggaggggcctgcccttgccagtgcacccccgatgccagtcctttggctaggactcaaagcggcttcggagctgcttgaacttggacttgttgtacttagtgatgaggtccagtttgctgtgacccagggtcagccgtttctcatccctgaccaggtcactgttaccaccattgagatggccacccttgggacccccaggctcagttccctgcctggccccgtgcaactgatgatacttggtgatgaggtccagcttgctgtggcccagggttagccgtttctcatccccagacccagctccagccgtgcgagcagggcttgatatcgggagaccattgggcccaggcccctcaccacggaatgggccgaactttgtgatgaggtccagctggctgtgccccagggtctgccgccgctcatctggtgcccgtctggcaggtctggctgaggagttggtttcaaggggcactctggaaccctgggccttggggtactgcatcaggaggtctgattggccacggctttggtttagggacagcctcctgtcctccagggcccgatcaccaggtctgagggaacccaactcaggggcacccccagtacccagggctcgggacaggagatccagctggctgtcggcctggcttggggacaacctcctgtcctctggggcctgctcgccaggccgaagggggcctgagttgggggtaaccccagagtcagggtctcccacttctcgggctctggggaaggggacaaggagatccagctggccacggctctgacttggagatgccttcttctccttctcctccactgtctccagggttgtgccaggtacccatcgaccccgcagggggctgggctcttggcttcctgggagcccattctctgggaaccgggacagagctggggcaccccgatggaactggaggaggggccgggagcgaggaagcagaggtgaccccactgccaaggttaaggggctggtactattatggttgagggcaggggaggactgggaccatgggtatgcccctagctt

SEQ ID NO: 68574 - DNA, 7091 bp, Homo sapiens
ctaagtccctggaataaagaagggccatggcagagagaagtctctgtttcttttaatggccaactcaaccccatggctgaaagccgagggacaacgcgtggtcaccgaccggactcggcagcattacaatctgctcctaggccacagcaggccctggggggtttcccttttgaacctacaccatcccttccttggcctttgggaaaagctatcagtcacatgtagttgctggagggggttggggagtgtgtgctgggggactctcactcggggcttcccctaagggagaggacaccccgggagagctaggggttctcccagccctgtaccccagcagatcagactcctgggcacactaagaggaaactcaacacaaatggggccaggtatttgacagatgctgttcagaggtcagttcaggccactttctgcagggtcctggaccaacaggcacttctctcctggaggttcctcgaagccagctggcgggccgtgcggagggcccagcccatcaaagtccctcgtcgttgtaagtcggagaatggggcttcaggatgctctgaggattcttctccactagagggcgccagctcacctcccctgtcagaagcagatcctccccgttcatggagtccaggtactgtatctgcaaccaggggagggggaaggaggaagcgacagaggcagggcagaggtgaggagccagcgtcaggaaccagcctcccagaggagaggaaggaaggggacggggcatgaggggggcttctgaccatcccaggtcccagaccaagccgtcccaggccaagccgtctctgatctcctagataatttcactaaggtggttcagagaaagcagtcactggggagctgggtggcgggggcagttagggaattccctatcacacctctgaatggagacagacacacacctcccaaggacacgtctcccctacacgccctccctagacagctcctgcaggccaggaagtcagggcttgcagcgcacacagccatgctgtccaccccagcactgctgggtgagagtcctgattctgtcccttcccagtgctgctacccagggtggcagcttcccctctctgagatttaagttcccttgtcttgagagaggggatagaaacaggtacctcacaggacacatgaagagattcaacaatatgcatatatgcagtgctaggcactcacgctttaaacatatgtatgcctctgttgtcctctagtgggcccctggtcagtgggccccagtatcacctctctaggacagtaggggcagacagctctgccattaaaatggtcatcatccagagaagccactgctgcagggccaggagacttcatcttaggctttaggtcattcccccttccaagaatccaccactctggttgcttccgcttccagctgctgacgcttgaactcaaccccagcctctcgcacgtgtcttggctctggattcccacctgccctgccatctcttccctaaagcccactcctcccttacagtgactccatttctgcccccagtgccacccctctgcccacctcctgggttgaaaatctcaacagaacctctggttggctcttgggccatcggccacaccaaacagtctgctcaaggcccagctcctgctcttcctttcccggccttcagcactctgccctccctgtatcacataacaggctggcttactccagggttagccgtgtgcctgggcttcctcaccaaaccatgagctggctcctcgagggcaggactgggtcttattaatcgttgctttcccaagagtacatggagcagcaggtgctcaaaaggtttgctgatagaactgggtccccaccaaagctccctgctttcccaagaaccccttcacggtttttccactgcctctcactggggccacatgggacctcttgtagggacaatggttgtggcagccccttcctagagggccctcggagaagtcccagtgtgtcttgttggggcttctggcacaagcccaccatggcagatggaaatgttgggcaggtctctcagaaaacacagcatttgctttgcgaattgctactcccgtctgagggtgagtccagtcaacagagtatcagaattctctgtgagtggggccctctggccatgccgtgccctctccctggctctagcagatttgaagagtggtcaaacagaagtcctggctcctgggattctctaccctgtgggtctgcagagccccagtatgtggtttttccagcagttaacaagctagtcctatgggccctgtcttctcaagagctgaagtccagccttgcctttcctggttgttgaagaccatgaatacaagtgaacaagagagtaactgtggcgtgacaccccttcagctccaggggccaggccatgaagcaaaggtgtgactcatggcacagcctgagctgtctgaggcagctgaggcctcagtggtcacatgaatcacacagcttggggccctagggcagctgtgcaggctgactcactgggaggccctggaagagcctctatgtcctcttcgctgccagtcagctcactcatctatcaagtatgagtttcccatcaatacaggatctgagggcagggaggtcaaggaattaattccccggggcttgaggacagctatgtgggtaagcagcccccactgcggagctttctcgtagaagctttgatgtcggggagccctggggagccagaggggtgagaaactgaagtggggggactctacttgactgtggagagcatctagcaggaagaggctgtctgtgaaatgctgcctgctgcccagttttgctggaagtcaggagcaggaaacaaatccaagtgggtagagaaggggtccacagtgggcagctgctactacaccacgtgctcatatctgccaggactctgtgggcccagctgctagcatagcactgggcgcacagtaggcaatgaggtgcacagtgaatgaatgactcaaagttcctgagggcaggagactactcgatgcctctttctctctctcttcccatttcccgctccctggcccagttcatggttggacatacagaaggcgctccttcttcagcgtctagtgctgatgtgatctggtcagaattctctcaggctggtccttggtaactccacctctcatgatcccctgaaagcccaagaggaggacccactgttgccaggacttgggaggggagggaaagggtcactcacctgtttcctcacatactctaccagcaattcaagatgtcgagggtcttcacatttccggttgaagaaggttctccagagggcagcggccagcccatgatcatctgaaaggatcccctggaacatacagcacagcagtggtctcctgagggatccacagagccaggacacagacggtggggatactatgaacatgctagcaaccatggaatcagctcagaagggccctccacgcacaagaggaaaatggggcagtcacacagtagaggtggaaggggtcttacaagggtatctggcccaatcccttcattttattacatacagagggagaacagggggtccagaggggccaagccaccagttaggtgatgcagagctgggactcaggcagtactccgtactgcgcctggcccaggcaacacttgagaggctgagaagagaaacagtagcagcaatgctccccctgctgtccatagcagcaatgctccccctgctgtccacagggcacgggctgggaatattgtgaatgtatgtttctcccaggaatggaggtgggcatggactgtgccttcttgcttggtccaaggaccaaggcaaggcaactggtccttgggggaagggagccagctaccttgtcttcactcttacccaactctgggcccagcctctccctaagtaggggaacaggatgttcagcaggattgctggggccacagagggccaggctcagagcttgcatgtgtgtgtgtgcctaacgctgcctcttttggcagaggagacttctgttgggaagcttaaagattacagagcaaaataagagccccagccaccagctaaggacattttctagcttggacctctagaggagggagggctgagagtcttgcttcctggggtgaaggtggctgatggaacaggccctgagaagttgctctgtccaggtgccaaggtagtgtgtggaatcgatgtgctgacttggagttagaagggagatcaagtcctaattccacctctgccaagatcagtgatggtggcagctgactaaaccaaagtctcaatcttctacttcttcaaaacagatgaagttacctgctctacttatagcattcttgaactatttgttaagtgtaatctgttggatacaaagattaggagcatgctttggcagacagcggggatacagtcaaaaccgtggggtctgggagccagagcacagagttcgaatgccagctgtgtcacttgatggccatgcggcctttaagaagctattagccattcctgagcctcagtttttcatgagtcaaacaagcctaataatacctatcccacagagttgctgtgagaattaagagatactggccatgaatggctctgtaagtggtaaacattacccaaagacccaggatcactttattcgacattttattgtggtctgtcctcttgggcattgtggtatgtgaggtctggctccaggcctgctgccaacaagggccatgtccagtatggggtgctgacagtttggtagaaaaacattccacctgttccaaatgctctctgataaaccctccttacggttccacagcttaggactgtcctggcacaatggctgagtcaggaaaactggctttttctggcacatggggacaggagcagaggacaagctcaggcacatcacccttctgcaaacgatttgctagcacaacagcgtgcctgtgtctgctgtgcctgggcacatgccagagcgctgctggcagcaacccacatgtgctgtgcagaaaggaatgggattgggagcgcgtgttatggggacctggagaatgggcagagcccaggatgggaaaacaggcaactttagcagcgggtgagatggctgggaaggggcaaattcataatcaggaattcctgagccatcagaaggaaaaggatgactcaggacccactaatagtgagaacaacccaactgtttcagactgttagggttccctcacacgcctagctcctaatgattatgtttgccaagtagaatagatattatattcccatttgctttgctttgttttgttttgttttgagatgaagtctcactctgtcacccaggctgaagtgcagtggcatgatcttggctcaatgcaacctctgcctcccaagttcaagtgattctcttgcctcagcctcccaagtagctgggactacgggcatgtgccatcacacccggctaattttttgtatttttagtagagacagggtttcaccatgttggccagggtggtctcgaactcctgacctcaagtgatctgcctgcttcggcctcccaagtgctgggattacaggcgtgagccaccgcacctggcctatatccccatttgaaagataagtaaactgaggcttagaggctagctaactgatggctgaactagaaccagcatgcattgatgaggtgggggatgatgactgacccactctagtcagaatacagaacctggcatagagtgggagagcaatcagaatggctgaatacccagcactttgggagtccaagctgggtggatcacttgagcccaggagttcaagaccagcctggacaacatggcgaaactgtttccacaaaaaaatataaaaattagccaggcatggtggcacacaagtgtagtcccagctactcgggaggatgaggtgggatgatcacctgggcctggggaggttgaggatacagtgagctgtgatcacactgctgcactccagcctgggcaacagagtgagaccctgtcttaggaaaaaaaaaaagaatagctgaataaatcaacgaacacaacttcagccttcttcccaccacactgctagtgtaaggcagtgaaaacaaatgagagactaatctgagggtgcacatttcaaactaagaaagcagaactggaagaagggtcctgggaaccaaacatgagggcacagcataatttccccccaatctaatcgggtgcctacttgttttccctcgtgacacaatgaagcatccttcagaaattaagacacctaggtctagagtaactgagaggaagccaaggggattgtttcagctttggagggttctagttctgattaagggtttaaagtggcagagttccactcagtgaagattgatttgacatcactatgtgctcagcatgatgctaggaacacaagagtcacagcaatatggtctgagctctcagggaacttgcaatctagctgaagggacaaaatcagtgcacatctaacagcagcacagagtaaaatcccggagaatgaacacatgccaagctgcacagtgagactcagctacactctacatggctgcctccttgttctacagtcttagcttttatgacaactcctcagagagatcttcctggtccacatcaagtcattccccctgttgttctctctcactgcactctactgtagttagatatttactgcttatctgctacttgtttactatgtctctcaattagaaggtaagctctagtgggaaagagccagaccgtgtttgttttattcaccaatatattcccatgtatcacacatggtagacactcaaaagctacctgttaaatggataatgaatagatggatgggtgtggaaattcacagtaaaaacacaagcgatccagagaggtcagggaaacctttctgaagaagtaggcctttaagaattgggaggatttagcgggtgtggtggctcacgcctgtaatcccagcactttgggaggccgaggtgggtggatcacgaggtcaagagatcgagaccatcctgggcaacgtggtgaaaccctgtctctacgaaaaatacaaaaaaaattagtcaagcatggtggc

SEQ ID NO: 68575 - DNA, 2873 bp, Homo sapiens
tcagctcactgcaagctccacctcctgggttcatgccattctcctgcctcagcctcccgagtagctgggactacaggcgcccaccaccatgccgggctaatttttttttttttttttttcagtagagacggggtttcaccatgttggtcaggctggtctcgaactcttggcctcgtgatctatccacctcggcctcccaaagtgctgggattacaggcgtgagccactgtgcctggccagctgcagattattctaagcaagagaaaatattcaaaatatttacagagggagtgcctacaaggtacaccaggccctgaaccagaccctaaagctgaccaagactcagctactgccctcaacccctcattgttaggtagagtctcagtcaggcacagcatgtctatagggcagtaaggcaaacggcctaagagagagcacaagaaatataaaggcagatagggcacatagcaatggcaacagttcacagaaggcctggaagttcagggagcaatttggacctaatgtcacagaaaacagggaggttcccaaagcgtccagggagggggaacaatccaagcaagattctaggaaaaggttgctgtagaacagcgctgtccaatagaactttttgtgactatggaactgttctgtatctgcactgtccaagatggtagtcacatatagtaactgagtacctgaggatctgaattttccattttatttaattaatttaaattaaaatagctgcatgtgtttagtatcaaatagctctagcaccttgtgactccaagtgtggtctgcaaaatggctgcacccccatcacgtgcagctgttagcaatgcagaatctcaggccccgccccagacttgctgagtcagaatctgaattgtacctaggtcctctaggtgactcacatgcacattaaaatacaggaaaaacttctagaattgcacattaaaatcacctgggaacttttacaactacagatgtccacctccaccaattaaatcagaatctttgggggacagggcccagacactgatatttctaaaaagtgtcccaggtaattagtatatttccccaaaatttcctgctcttaaaagtcaccttcgggtgacttgttgaaccaccaggcagcactcctactgaattgtaatcttcagagaggtgataaagatttagattttaaaagcaccccaggtgactcctgtggtcaggcacagttgggtaaaatggctctgccagaatggactggatgggggaccggaaacaaacacaattcggtacatttttattaatactgatgaaaggatcgactgagccaatagagccacctgcaataaagaccataaacaaaggctcacagagaggtgtagttcttcactcctaagcctcatccttttctatattgtaaggcttctacaattacaattcgtccacttttataattgatatgtacacttgagcaataattctcaattcccaacccataacccccgaaagctcatgttaagttaatgatgtgtatagtatgcaatgtaaatgctcccttgtaattcaggatatccagtagaataggaatcaggagaccctattttaacaaaagttaagaaactgaactccagtttcttaacttttgtccttttatgcatttctcactctttgactaccacatgccaagcactatgccaggccacagaaatgcaaacacagtaggcattgcactacccaaaaagaaatccccacccagccaaggtgacagataatgtgaatgtagtaagcactgtgagagtgcagggaggatggaatgagctgagtcacaggaagttcaggaaccgcttcccaggaggggtcatgcttgcattaaatctggaggtaaccacaaaatcagtataaaagcatatggttagtttaaaatatcaggtgttcattacaccattctttctacatgcttgaaatctccacaataaatgttggggagaaaaaagatgagatagatgaacctcgagggcattatgttaagtgaaataagtcagtcacaaaaggtcaaaaattgtgtgattctacttatatgaattatctacagtagtcaaattcatagagacataaagtcaaatgaatggtggttgctaggggatatgagggaaggagggaataattattgttcaatagggacagagtttcagtttggaagatggaaaagctctggagatgaatggtggtgacggtgcaaagcaatgggaatgtactttatgctactaaactgtacacttaaaaatagttaaaatggtacattttatgatatgtatattttacaatttttttaaaaagatgaggccaggcgtggtggctcacgcctgtaatcccagcactttgggaggccgaggcgggcagatcacaaggtcaggagatcgagaccatcctggctaacacggtgaaaccctgtctctactaaaaatacaaaaaattagccgggtgtggtggcaggcgcctgtagtcccagctactcaggaggctgaggcagaagaatggcgtgaacctgggaggtggagcttgtggtaagtagagatcgcgccactgcactccagcctgggtgacagagcaagactctgtctaaaaaaaaaaaaaaaaaaaaaaaaagatgagatagatccaaatgtcctgatgtggaaggacacccaagatacatacttcagtgaaaaaagcaagttgcagaatcatgtgtctagtgtaactccagttgcataaagaaggaaaagacaaaggtgcttgtctatgcacagacaacattcggaaggacatccaataaactagaaattaagttttcgtctggagcagggtaggaaataggtcttctaatttcattttttttg

SEQ ID NO: 68576 - DNA, 4298 bp, Homo sapiens
cacctgccaccacacctggctaatttttttgtatttttagtagagatggggtttcaccatgttggccaggctggtctcgaactcctgacctcaggcgatcagcccgcctcgacctcctaaagtgctgggattacaggcgtgagccactgcgcccggcccctttcctacacacagggctatttggaagagcacgtgagttagcatgcattcattcattaatttaataatgtatgtatgctgaaagccttggtaaactgcagaatgctctgcaaatgtaaggaattataagtaataacttctggtttgtttacataaaaccaaaaccagttccaatgctttacagccatggataattttcaaaaatgaaaggattgtgaagctcaaggctggaaaatgtagactggatgtaactaggagtgcaaaccatgacctatcccacacaccttcaaccagggctacattagccatccatccttggtgttctcacagctctctgggcatattttctgcctgggtacacacgtggtttagagctgcttatgcacctgtctctcccattagtctgggagctactcaagggtcataggaaccatgtctgattaatctcggcacccccatcatctggtccagagcctaacccagagcaggggctaagacaggcttgctggtaactgaatttttacaagggcctgtgtactacgccatgcatagcatgttctatccaactagtgttttaggggattttcttcttcttcgcctttctttccccctgttgaataccttctgtgtttctggaatttcagaaacatatactgccaaacttctactgtcccatcttccagaaaggggtaaagggaagagtcaagaaacaggccagagctagagttcattccttctgtcatgtgaggatgagactacaactcagacctcctgatacccatacttggaggatctccctactcccacatgagttgttctcctaattgtgttaggaataatcacagccacaaacggatgatatcagaggtgtcaaacagtaaggcaggagcatctctcagaggaaaacattcactgaacctgcctagcagagctagtttatgtcatgtatcacaccattaagctttggagcaggaagggccctcagagattacctagctcaatacccttgaggaaagggtgaactgaaacccagaaagaagagacttattcaagatcacacatcaagttagtataagagccaggattagaacctgatttctgggtaagtgcttttcctactttaccatctgcagggcatttccagagatcatcaacacattcatctgcaaacctcagttcttgctttccagcaaggcccacaaacatacaaacacattttctcctcttgggatacacctgcattctggttggctactgcccaggaaaaacggagtgcaagagtagagttccttactagcaaggctccttgacttcctggtcctatattctaactccagtgacctgtaagctgcctctcccttcacctctagctgagacaatggcaaactgccacagctagaaatgcttttcagatatcatcacccaggctggattagatcatgaaaaggggccttcctggaagagggtggaagtgagatcagtacagacacgtgatctgcaggcaacaggtgagggcaagtgacagcaccttcctcaactaccggactcactcggcagggcccttctagctagtccagcagccaaggggagcaggatattcgctctggtgaatccctgttggattttattccctcatttaagtttttggttgctggtgtgcaggttccccacctctccactgccagatcattctatatggagcactctgcccatgactacacagctgcacccagcagaagagaaactcctcccagatagtgttgggccgttctcttattaaactcatcctttccataatgctttgcttttcataaaaacccatacatacaacaccacaaggaaaaggttccttttatatcagttactcatattttcccatttatttaagccattaaaattcatgcagatattttataagccaccaggattcagtgactggtattactgaatgtttaataataaactaaacagaagaaatcagagggttaaatgatgactgcaattcctgtaatgacttaattaaatttttattgagtacataaactatgatgtcacctctagccaaccacaggcctgctttcccagcatgtcacagggagggagcactcaataggaggcttggctaaatgagcagcaggtctcagctgaaatggggaggggagtgaggctcatgtaacacactcaataaattatccgttcatttttaaacaaagtccatgagttataatatatttgccatgcactttttatgacataataaaaatgttaccttaaggattacttaacacatactacaaatattatagcagaggcaggcacaaggggcaaagaaaacaaacacgagcaggccagggacgggtcctggagtttatgtcccaggggaaacagcatagtatattaaaaagggaatgcaaaaaaaaggaagggatgcaagagttcagggttactaatcggcagattaatgaatgagacaaccaacagagaacacaagtaaggcaataatgaatcttgcagggcacatgtttaattaaagtagcattctcaaggaggaatattagctttaaagagatgccagttcatttgaggccaattcgctgctctctttccccttttcactgttgctgccttaaagatatttatgtgactgcttaacagaggaaccagactatgtggatacagggactgatgggagatcaagttttaactcctccatggactctacaaggcttctagtgatctgctcttggccatcttttttgcctcccctcctcttgcctccccatcttacttcaccctgcagtcagtaaagtatgtgcacagatacatcatgctgtcatctatttcttagtcatactgctgccaggaattcttctcttctttatccactgatggaagggatgctaactccttatcctctaagacttagcacacatattttctctactaagtctgccctctcccccatctacaggtgccccaaagtgattcaagtctggagacgggtcccatcattcattatttaccaagtgccaataactgtgctacaactttacacattagcccacttaaaccttcccaaggactctaagagacaggaactgttactgtctccactttagagaagaggaatctgatgtttgggaaagttaaagctagacagctaggaaatagtggggtcaagataagaatacagagcaatccaactccattgcctacctgtgttggaatagacactggaaggaatgtagctgccccttcctgtgccccacagctcaggctatctgcagaggcagaactaagaaatgctaatgtggtcttgagtaaacacaactcagagattccagttccagtggcagctagagacagccaccagatgggtcatcagtggccggttactaatacatcagatatccctagtagagccaagctccactcctgggaaaacctgaggttgagagtgggtgtaattatggtgggggaatgggaaaacagaagaaagttggtatggaaaacactgatgagcatgaaggtgagaataagctttaaggttactggcttgaagcaaagttgctaacagtagcagactaagaatttgctggaatgaatgaatgacaaaggacagctagagttgctggctgaagcctaaggactatatcaaattcatcataaggcaacaatgcaacacaagattgtaggtcatgttttagtttgctgtagtagacagtaatgccaccaccaatgctttgcagtgccaacgccatgttctacagtcattgtgcggcaacaggctgatgtgcactgaacatcagctagcctatttaaagttcaggttagaaattagcccactgtggaatattttgtgagatacttagaaacagagtaagagtagacagacaagagagacgggggacatggagagaccaaataaaaaagtctacctgttaactcacatgcattacgactgaaagatctattgagggtcttttagcaatgatgacaaaatacaaacaaaactgtgtgtgtgtgtgtgtgtgtgtgtgtgtgtgcgcgcgcgcgcgcgcacgctcaggcacgcatgcatattgagcagttccagaaaaagttgttaataccaagaataaaaagaaaaatattttaaa

SEQ ID NO: 68577 - DNA, 3790 bp, Homo sapiens
atccatttggcacagtggtatcatgagctaactgatgttcctcaccagactataaacggtcttggtacagaattctacgttgcattgtacatgtttgataagcacgtattgagtaactgctgtattctactgtggtatatgctggaggtaaaaaaatcaataaaacacagtacttgtcctcaagaagtttacaatctcacgtgggagacacacctagcacgttgtatgtacaaaacggtaatggtatagggactgaaaggcttgagagaagaggcaacatttattacagtgggtattaaagggtcaacaggtatgttcagacagaaagaatggtatgtgtaaaggcacagggaggtgaacaagtacagcattttcaaagggaagtttgtaaaaaaaaaaacaaaaaaacacacacaaaaaaaacaaaaaaacacagaagctgctcatggtggcaagaatcagaaggtggagctggaagggcagtttgtgtgagattgtaaatggccctgaacgccagccacatgaaagaaagaacaaggaaggggtttaagcacagggaaattgcatggacagatttattttcaaaaagtaaccctagaagtacagatcacaaagttgggggaaggtccagaggcaggaaaaccagaggaggctgctacaatggtgtagatgagagtctgtaaggaactgaaacaatgtgaagtgacaacacgaacaaagaggaaggcatgctttcaagagaaatgactacagccagagcaacgggatttgattatcgagtagatgaggaggaggaaaggggaggccatgacttgcatgtaatcagacctcactgaagaaagtggagagaacagaaagatgaaaacggaatgcaagttatatgcaatcatacactgatgactttctgaccctggcagtgccaagcgcagacaaccagtcttgtatgattttagcaatcaccatgcccttcatgtctcctatgttgtggtaatggaaaatcttacttggataagatgtaatatgagcaagatgtgtatttagtttgagcccggcaggcgtctccagtggagcacaggcataacacaccagggcctaggagcctgagccccttttccagtaatttgttcactacatgtaggtcggtatcattactccgggccctctgcattctgactgcagccatgaggtctgattaccgtcagcaagaagacgctgacacactcaggtttccagagacacttggaggctgctaattgcaccctgagcctcatgactgcatttatgagcgcagaaaagctgcaggcactacttggcttttttaattattttctattaaatttaggcagactgggtacagtggaaaactacaggatgcttgttccacatcactaccaaccatgtcaactgcacagacacaaaaggcaaacaggtgaatatagatcaacaagttggtcagttctttgctaatagagctgagccactgtcacttgtcatggatgctgaggccctgaacaacctagaggatctaaaggcaacactgagatcactgacccgagtcctttcccagcgatcctaaaatagatatcatattgcccagatggcaacattttctcagaggacccaaaatttagccccttactgatcttgaggttcctgacccttcatccaacagccctgccttcttcttctccacagcaatgaagagtgaaaggggcggggtcaccctaatgaactgaatcacaggagttaactgctaactccacctgggcacaatgggtcagaccaaagtctaaagctcaaaacagtaaagcagacatttacattgtttcacacaggtcacagaatgtttgtctttcactgctgtgtcctaactgctcactgttcagagctgtacaattgccaaaatactgacccaatggttatctgagaaagaggctgttccctgctgaagacatgaggaagcaaaggctcagaaaggtcaagtgactcacccaattatcacttggctaataaatggtcaagaggttcacagagacaaggtcttctggctcctagtccaagtttttttgtttgttttaaggctcaaacagaattgccactcagtggatagtttgtacattcctgtagaagcatcctgggaatggctgagcctggatcccaggtagaagccatatgatcattcttacttaagtagtgaggtggtcaaggttgaggccaagagtgaggttcagatatcccttaaaatggaattgacagagccgggtgcagtggctcatgcctctgtaatcccaccactttgggaggttaaggcaggcagatcacctgaggtcaggagtttgagaccagcctggccaacatggtgaaaccccttctttactaaaaatacaaaaattagctgggcatggtggtgggtgcctgtagtcccagctactagggaggctgaggcaggagaattgcttgaaccaggaggcaaagattgcagtgaggtgagattacgccactgcaatccagccggggcaacagaacaagactttgtctcacaaaaaaaggaaaaaaaaaaaaaaaagcatggaactgacacagcctgtgagttctgagagtgactccatctttatagggtaattctcttttgtcctcttttctcagtaaaatgttcttagaaaggtattttatccaaaggaaagagacaaactcagttagaatgctgtatgttaaagagatgatctctttggtgttctgtatttaagtcccaactcagacctaggaaacgcactgaaatctaagtaaattttgggccccaacagccctgtttccccacctggtgagtctgaaagattaatcactctgagcctcagtttttccatcacaactatgcaaaaccacctttcctttttccttttcatattaacagatgaaaatgcctaacagtaagtaaattagtagtggcaaacatctatttcactctcaggcattgtttaaagaacctcacatgtgataactcatttatccctcacaatgctacaagcgatgtaaggtgggtattacagttatgtctattttacggagagaaaactgaggcatagaaaggaaacaggcatagagaccttgcccaaggtcacatggctagggcaggatttgagtccaaactggcttcagtatgtgagcactctcaactactctgtgatactgcattggaaaggaggttataaactcaacccaatcccccacttggagatgagagcctggaagtctctgaagcttctctcaggaccttggggctcacctactctcctgcctcatcctcccattacactcagccctgccctgggataactcctggaagaagcctgcagtgaacacaaaacaaaaaagcaagtgaactcatatctttctcgttcgtctgtttcgtgtggaagtgaatccaggaaagattcaacttcctttctcagcataaactagattgtaagccctgtaagatcacttatctctggtatattatctaccaaccacattcagggattagcatgtggcgagagacaaaaatgttccttgaataaatgaatgaaacaattcttaataaaaccatacaaattaataatgctactggatctagaggaaatacattcaatattgccttcatcaaatgtattcagcactacccaggcatcaagcactgttttaggagctgaggctacagcagtaaacaagagacaattcccgaactccgggagtttaggatgattagtcaggctgctgaatgatttgcagaatgaatctgagatgaagagag

SEQ ID NO: 68578 - DNA, 612 bp, Homo sapiens
cagccgacagtgagtttaggtgagaggtcaggactggatctgagcatcagtaggacagttgaggccctgatagtggttgttttaaagaagggctccttatagttcctcctgctcctttgagaaccaggcacgtcacattgatggcaaggatcactgacattcagaaagaccagctaaagagaggacaatgaacatggaaaaacaagtccctccactctagctgggccccttcagctccaaccaaccccacagggccattcactcagcattttgggggaaacaaagtgagaaaagagtgttacagctgcctcatcaatggatccagaaatactcatggcacacccagggcagctgaaagaaacatctgtctctactgtatcctaggtctgacctcagagcctccagaacttttttacatagccccacccagatcctggcggagctactgccctctggtggtacccaatgcaggggttaagcccacaggagaaaagagtcttgtggtaggacatggagtgagaggcatagtcaaccccaagagctcgtcacagtgcctgtatgtcttactactgcaaccactgctttttccaaagacgctatttacagaaaact

SEQ ID NO: 68579 - DNA, 4829 bp, Homo sapiens
gggggaaacgatttatttccttttcttccaatatttaagactaacacagcaaacaaatatcctcagaataaaaaacggtatctccctgccccactttttccagtactcattctgggcctgcaggactggcttccttcattcttcagatagttactgggcacctattcaggaaaggggcaataacaggcactttggagacagatgtacgtgatcctgcaccacaggaattcacctggaagacagtcaacataagtgaataacagtgatacaaaatagaaagagtaagagctggaagaagggtagatataaatcattaaggtacttccttaggggaaactgggattggcttccagttagctgtggaaggatgtgaaggaattgaggctggggtgttagggcaatctaggtgtatgcatggagtgagcaaagacacaagacagaaatagcaaggaattcagcttggctggagtgaagggtatgtgaagcaaggatggaatgtgatgttcactgagtgcttactaagtgccaggcacatgtgctagtaggtttcacatatttaaggttcaagaagaactagaggaaatgagtttggagaggtggtctggagtgtgatcgtagaggaccttacaaagcaaaatggtggttctgagaagcaaggcagaattacacaagagtcaagttcagcccacagttcctccatttttcctaggccctctgcatcatcccatcaagcagctctgctagagagtgagcaggggaccatgaggtgacagaaggtgcattcttattccagaagtctcactgaggcaacaggcatgccagggaccgctgataagggtaaactgtaatttctcaactacagcccactcccatcccttcccatctctgtcttggaaagcttgagcctgctcattgtgagccacaaggtggagatgtctggcagggcagaactgagaggaagtcgtttagccagcctaaggttaccattaacactttgagccactgccgtgagctaatttttatgtttgttttttaagtttggttgaaatgtcacaaatggaaaaattaagtaaagcgccctggttagccacaagactggacacacctggctgcaaacccagcaaaagaaacttacttcattagtaggagaggcagagagtgaaatttacatctgaaatctgcctgcaccaggagaaagtgctgaggccaaaggcgctgtctgtttttacagctgtgtcaagacttagttctttactcttaccaacactcaggagtgcggcaagggcccaaggaaaaatggtctccaagctcttcagctgcaactcagctcacaaagatttttaagaagcagttaatgaaataaaactagaccagatgaggtgatataatgaactttatttccacagctaatttataagtttaaatcccaaataatgtttttttaagtcagaacactctaaattattgatgtgatttttgtaacctcaaatttaacacctgctttttgtaccagcttcacgatgatatatgagtctgctccatttttcacaatagttgggctccaaaaagttggtgaaaagcaaatttttgtaaaataaaaaatttcccaccaaatcagaatagaattctaatttcaaaggagtttttgatgcaaatttattattcatcactaactcgaaagtggctctcttatttcttgatcttccacacaccaatccactcaaagcaatcacctctaagtttttggcatgagaaaaatcactactacattgattggttttataaattctacattttatatgttttcttacagaggtacacctgggatgccaaataacacagagatagatttgcaaattaccaccttcaaaccatagattttcaagctgaaaaaaagctgaaaacttggggctcatgtagttaggcctcccctgtccccacctttcttttaatacagaaactgaagcacagaagaggaaagatttgccagtcagggtgagaaccaggccagactggctctacactgcctattacttctccctagccacgtgtcccatttataggttgtacacacacggaagactgagatcccctcaaacacacacatgcactcacactcatccatgcatgcactcacaacccagtgattaatatacaattgtcttgcctatataaggcatgtctatttatgccatgaggttagaaagaaggtatcaagtcaactatagcagaaagcagtaatagtaattccccaactcttccaaatctctattattttaaaaccatcatcctttagttatagtctttgtaactaaaccggaatttgggcacttctcttcatgaaggcaatttaagagcctgtattgggggaccacctaaaaccttgctattgtcccctaccccaccctgcgtcactagcaacatccgcatcacctggaagcttttcagaactgtagattttctcacccctgtcctgaaacttactgaatcagaatctgtattttaacaagatcctcaggtgaaccataggcacattaaagtatgagaaacgctgatctaaaacactcccttatggggcagcaccctatctacaacaatccaaatagaaaaaacggctggataaaatgcgataggggaaaaattccccaattcctgcaggactgcactgatatacacttggatcagagactaataaagcaggtatgatttatctaataaatgttagcttaaaaaagaattccaaaggctggtattcaatatattcatttatttgacaattatttattcatttgacaattattcaatgtttactgcataagcaaaaaactgaataagacggttttctgcttttataaaacttacagttaagtagaagggacactgcataagaagtaacatgggagaaggctcaagtgttgacaactgtgatgaagagagatggaggtccagaaggaaattcaactgtggcgagaggcaactaaaaggttcctgcagtccaggagtcagcaacctatggctcattaagctattcaggatagagacagctgtggctcatatggctagtgagacaacttccaacagagtttagtcaacaatgataagaagaacagtttcactacaggaagagctactgcgcaactgcctggcagtcagccagggctttggctgaccaggaggtatctctggccatcattaaataggactgagactgccaacaccaccttatgtccactgtgcactgctacagagttgggtggtaagtacttgagggcatgtgggaacattcagctggatgaataccttaaaggctgccgatctcactctgggcagctgtgatattgtgaaatatatagttggtcttcaactcccttcctggcatacaactcctaaaatctttggcctttccaaagtggtgtcattttgtatgctaatgattggtggctggcgcacttaggtagcttcagggtaggggctggtcactgaaaaaccaagggaggattagaaggttaggactttctgtcccatctcccaacctccaaggagggcagagaggctgactgatttccaatggccagtggtttaatcagttgtgcctacataatgcagcttccataaaacccttaaaaggactgggtttggggcacttccagatagctgaacaggtggaggtttctggacagctgcacaccaggaaaggtatggaatctcctcaccccttcccccatcttgtcctatgcatctcttcatctgtatcccttgcaatatcctttataataaaccggtaatgtaataagtgtttccctgagttctgtgagccgctccagcaaattaattgaaccaaagaaaggggtggggaaccccaatttataatcggttggccagaagcacaggtaaaacagcctggagcttgcaattggtgtggcaagttgggggcagtcttgtgggcagagccctcaacctgtgggatctgacactatctccgagtacacaatgttggaattgaattgggttagaggacacccacctggtgacctctctccagaattgactgcctgtttgctgtgtggggagaaactcccacaaatgtgtcacagaaaccttctgtgtaattgtaattgagtgagagagctgaaaaaatactttttttctctatattacacagcagctacgacagaaagaaagcaaaaaatgaaaaaggaaccaaaaaggatgattacaaagatagctctcaggcgaaggatacgcatcaactcaaaaatggttacttttctccttccttgaaggtaagaaaaaataacataaaaaataaaaaaggttacttctggggagttagactggggggaaaaaagacacttgttttttacactcaatactttttactctttgatttctattctatgagcatatgtaacttttataatatgtttatttctcagtccacagggagaactttgccctgtaatgaaagaaaccaaattaacccatttcatgacccagtcatggttctactttggatgctcccaagctgggaggcaatgaaatgcttcccagtaacagggaactacaagctactaaaacgtgatctagatacacaaaatacacaacataaacaaaagaagatactagtgggaggtgaagccagctgggcttctgggtcgggtggatacttgcaccaatcagtgctctgtgtctagctagaggattgtaaatgcaccaatcagcattctgtaaaaacgcaccaatcagcgctctgtgtctagctacaggattgtaaatgcaccaatcagcactctgtaaaaacgcaccaatcagcactctgtaaaatggac

SEQ ID NO: 68580 - DNA, 538 bp, Homo sapiens
agggggtgctgggacaaactcaagcgattcttgaataccatgggcgtgtgtgtctgctccttttagcaactataagctccagggcacagcccatcttatatgtctgtcattttctgtcccaatactcaacaccattctgggcatgaagtcattactcaataaaaactaggtggattttttttttttttcaaagaggacaactttggagaacgtccaaaaaaagaaccacaggaatgatcaaagggatgaataaaaggtcctagtggaaaggtcaaaaggaatttaggctgtttagcttggagaaaaggcaactgaagaactaaagagtaactcagaataacaacacttgagctggaagaaatctcagagatattctggtccaaccttttcacttcacagatgaggaaactaagacaaagggagaggttgcaatttggtaaaggtaattttaggacaacttttttttttttttttaagtttcatttcatacagtgaggagaaaactttcccaagcaacaggaacataaatagcaacaaa

SEQ ID NO: 68581 - DNA, 1832 bp, Homo sapiens
tgtaaaataacaattcagaagttacctagacacaggaatagaccatgtctactatgaaaaacagtgtctttgacccagtttttgaagactcgctaaaactatacactctcccatccctccatgattaaaaactaagctctgtatcctaacgttttttctgctgccactttcttttctcctttaattgctagagaaaagagtatgctagaagggtcaggactaaatctcaagaggtgcagtagtttcacacacgggtgctaaagagtctggtagtctttccttacttcattcatttattcaacaagtaatcatttaacacctatgatgtgccagacaccatgctaggcaaagtgaaaacgacggagacagacatgactccaattctcacgcagctttcaatctaataatctatattccacttaactgtacagttaagaactgacttattacctatgaaagaaaccctgagaatctcagaatctaaagggactgcaggagataaatgtcctcgtttttcacatagggtcaatgaggcccaaaagtgacttgcttaaagtcactatgcatcagtgacagtcagggactagaacccaggcctcctgaaactccaatcagtgtcctacatgctcctctccctgaggggaagcaggtacatgggggagggaaggaaaagtaaaccccatcaaataaaggccagatgtcagtcttccccttctcgaaagatgggggagctaaggtcaaaacggggtaggaagaggtcggaagctgcctcagtttccccacggaaaagcggccactcagcctagctataacacaggcttccctcctgcgattccttccaattcctcccgccctgccttgtcgaactccaacccgggacccagagagctaccgtagaaaattactccttcactcacaaggactcgcaccagcaacgccatgttcctcaataaccatttccgggtgaagagtgagtttccggtgtccccttttctacgtcctccttttgccggcgaaagactggcaaggggggcgcaggcgcaaagaggtcgctacgcgcacgcgctgttgttttctcggctgtgcaccaggctgtcgtgcccgggcacgctctccctgctgtctcccccactacacgtaacagtggttcaaatccttcccccacgcctgtctccttgaccccagacctcggggcttctcatatccctctctttattccccacctaacccagcctcactcctcagcccctccttcccaaactccaccccaacacttttcaatggaggttgaaaagaacaggactttaggaaatcccaatctttagaaagagccagaagaccgggcgcggtggctcacgcctgtaatcccagcactttgggaggccgaggcgggcggatcacctgagatcaggagttcgagactagcctggccaacatggcaaaaccccgtccctaactaaaaatacaaagaaagtagccgggcatgttggtgtgtgcctgtaatcccagctactctgaaggcagaggttgcagtgagccgagatcgcgccactgcactccagcctgggcgacagagcaggactggactctgtctcaaaaaaaaaaaaaaaaaaaaaaaaaaaaaagccagagaaggaggctaagataaaagaatacgggggataccagactcctgaaagtcaaggcaagaaggcggtcatgtgccgatctgaagcctggtagaggaagaaacttttgggatttgtggttggttggttgtttaagggaaacatctttgcatattgataggaaaagattagtgaagagtatacagggccgtgcccggtggctca

SEQ ID NO: 68582 - DNA, 889 bp, Homo sapiens
acgaccgagctagaattcaacccaagaccctaattctgaatccagtgcccttcccacgtaaagagaggactgaccaccctacaggttaggagctggcagggaggaaagcccagagtcccttcccttttcatctgtgctccttctaatctgtggggactgcctgtcccaacccctgagaatcccagcaagagcagagccgcctctgcctacactcacccgcgccgcaaacctggtttcttttcttttcttttttattattattatactttaagttctagggtacatgtgcacagcatgcaggtttgttacatatgttttttttaaatttttttattatactttaagttctagggtacatgtgcacaatgtgaaggtttgttacatatgtatacgtgtgccacgttggtatgctgcacccattaactcgtcatttacattaggtatatctcctaatgctaccccttccccctccccccacctcacaacaggccccggtgtgtgatgttccccttcctgtgtccaagtgttcttattgttcaattcccgcgtgttctcactcataggtgggaatttaacaatgaaaacctggtttcttttctaaactccgcagcagtggccactgctcaggacgcgctctcaagggctccccctgctgggatactcgggagctgcaccttgctagagttgagtgtctctgggccttctgtccataagtcaatcaaattccttccctgggctgcaaatacctgtactacaatctgaagctggaaattgtatgtgagtgttgcgtgtgtctgtctgttgtgggtagaggggtgtgaataaaataaccacatgttttacatatttattctagaaaatatttttatttttaaaataattctaaaac

SEQ ID NO: 68583 - DNA, 1761 bp, Homo sapiens
agtcccagctactcgggaggctgaggcaggagaattacttgaacctgggaggcagaggttgcagtgagccgagatcgtgccaatgcactccagcctggcgacagagcaagactccatttcaaaaaaaaaaaaaaaaatttatacacaaaatgctacaggaataacgcatgggtcctattgggaagaaaaagttctctagaagtcaggcttaagcagaactgcagctccgggacggattaagtcaggtaaaggtaacactctgtgcagagacatgcagacaaaaccgagtgttgagtaagtaactcgcctgtaagtgttatgctgcctgaagcttctcggagcgtctgagcagcaaggtgaacaaccctcagaaaccggtcgcgctgccagtattatcgctaaccagtggcagcgagcccctttgtttctcggcagttgtaattgtagtctggtttgtaggtggagctgtgcgcaggcgcacctagaaccaggtgaccttgcacatgcgctgtatgtaacactgaagccaaaagcgaaatgattgagggcaatttttcttttctgcttccgaaatgtccctttcgcgaatccagagaccctgaccgtccccatttctggctagggatcttataattcttaaaataataccccctttccttcagggcctctctagtaagtcggctgccaatacccaacatggcgggaggccctgcgccggctcagtctgcctataggtgcaggacttggaggggcgggcccctcccaaagggcgggagtttggggggcggggcctggccctctgcctcggggtgggctccgcccccgtcccccgcagggccttagcagcggctgccgcagctcaatcgcggagcaactagccgggcgtctgcgggagccgagcgtggtgaggtggggcctcaggggcaggtgggaggtgctcgggttaaccgtccgaggcccggagacccgcccgtctagggcgcctgagggaatcccgttcgggcagcggcctcttgttacccgggaggaacccgaggcccagagaggggctgggacgcgtcgttagggcccggggcccgcttgcctcagcttcttgctgccgccagcacgctaagctccagtcggcgccgaaggagagcttcccgaccctcgtgtccagtagccgcaatcccaggctgggagggtgaggcgccgcgctctgccgcccccccgcccctcgctccctgtgtcctggcggatttgcacgtaatctatccgaaagcccagtcccacccgccacccgactctggagctcccattcttcaggaccctgctgaagtatcgcttctcagccgccttctccaggcgcagctgcattcgcttctcggtttttgcactcgctgtgcaccgagttactttcccggcccctcgttgacaccgtaagctcgttcgttagatgttatgccttgcctttttcatctctagatcccagggcctagcacgtgatgataatagtcatggcttactgtacggaatgatcacaaattgtcaggtgctactgaatgcattacacataagggcccatttatttatttatttagagacggagtttcgcgcttgttgcccaggctggagtgcaatggcgcgatctcggctcacctcaacctccgcctcccgggttcaagcgattctcctgcctcagcctcccaagtagctgggattgcaggcatgcgccaccacacccggctaattttatgtttttagtagagacggggtttctcc

SEQ ID NO: 68584 - DNA, 888 bp, Homo sapiens
gaggcccgggcagtagcttccagacccaattgcccgcgcaagggggcgtggcagcatcgttgggcggggccgcctgtaagagaacgcggctaaaggtggggccaagcgtgcggtttgctgcgcctgcgtgaggaaaaagaggggggcgtggctccaggccggaagagggagtctgtaggggcgggccggctggcgtcccctttccggccggtccccatggaggcgctggggaagctgaagcagttcgatgcctaccccaagactttggaggacttccgggtcaagacctgcgggggcgccaccggtaggccgcagcggggccggggtcgcgtggaggggggcgtcctagagcttagcccgggctcctggactctgactggcctgccggtgtctgagggagcggattcgaggccattctgaccctcgccccttgtcctgcagtgaccattgtcagtggccttctcatgctgctactgttcctgtccgagctgcagtattacctcaccacggaggtaaggggcggggcttagtgcgtgggcggggcttggcattctaggagtaggacctttaggggtgggagtggggaaggagaggtttggggctaagtcttactgaggtagcgctgccccaggtgcatcctgagctctacgtggacaagtcgcggggagataaactgaagatcaacatcgatgtactttttccgcacatgccttgtgcctgtgagtacctcaccatgggtgggactggagagacccagggttctcatgtgggctgccagattcacacctccacccttaggttctggactggaccccaggacaacctccttctcctcatcccgttctgccccaagacaggcccagtatccccttcccctccaaaacccac

SEQ ID NO: 68585 - DNA, 2469 bp, Homo sapiens
agaaagaaagaaagaaagaaagaaagaaagaaagaaagaaaaaaactgttatagactgagtgccattttagatggggttttctgggaagtgctgtgacatcatcgcttgctgtaaaagaggccgggcgcggtggctgacgcctgtactcccagcgctttgggaggccgaggcgggaggatcgcttgagcctaggagttcgaagttacaatgagctatgatcaggccactgcactccagcctgggcaatgagaaagaccctgtctcttaaacaacaacaaagtcagaaggagaggctgccatggctacggctccaggtgacgtcacggccagctccgtgacgcgcggccagggcagcccgcggagaccgaggctcctctgtgacgtcagcagccggccgggacacagcgggagggcaggtgcggccgcggggcctgccgacttcacgcagggtccgtggggtccccgcggcgcgcagcggctgaaggaggccccagggccttggcgaccgcagcggcggctttagcgtcagtgactaggcagcagggggtcaggatgcggcgaagctcccgcccgggctcggcctcgtcctcgcgcaagcacacgcccaactttttcagcgagaacagctcaatgagcatcacctcggaggacagcaaagggctccggtcagcggagcccgggcctggggagcccgagggcagaagagcccggggcccgagctgcggtgagcccgccttgagcgcgggagtgcccggaggaaccacatgggcaggaagctctcagcagaagccagcgcctcggagccacaactggcagacagcctgtggcgcggcaaccgtgaggggcggggcctcgggtgcgggcggggtcgaccccgggtgagccagtggagggggcggggcctaaagggcggtgctgggcggggacggggctaagatgatatctgggcacctcctacaaggtgggtcctgtagggtaaagggatggtgctaaatgagatcccttaaggggcggagcctcggtgtcctggacggttatgggaaggggcggggaaaatcttgtggttgggtgccactgagggggcgcggcctcaatgttagcgtgagtggctcccaggacaattgggttccaccaagatctaaggctgggggcgggtcatccgtttgggggagggaccaactcttttttttttttttttgcaacggagtttcgctcctgttgcccatgccatgcaatggcatgatctcggctcaccgcaacctccgcctcccgggttcaaacgattctcccgcctcagcctcccgagtagctgggattacaggcgtgcgccaccatgcccggccaatttttgtgtttttagtagagacggggtttctccgtgttaatcaggctggcctcgaactcccgacctcaggtgatccgcccgcctcggcctcccaaatcgctgggattacaggcgtgagccaccgcgcccggccaggagaccaactcttgacggagcctccctgaggggcggggcttcagagggcggagctggagccgggatagggctgcggtgggaccaaagcctgtgagagacttcccagctgtctggcttgtggactgagcaatctgcggcccggtctcgaggggaaaataggtctgtggtccgcaaggccccagtggagcccttgggttcccgcagaaccgactgggtctccagtagtctctgaggagccgctcgaccttctcccgaccctggatctgaggcaggagatgcctcccccgcgggtgttcaagagctttctgagtacgggccaggccagctgcgatcccctctgaccctcgggttcccctctccgaactccagttctctctgagcccccggcccccgtttgagtatcgagcccctctccgagcctcaactcattcctagcccccatccaattatcctagccgaccctctcttcctgagccccaggcccacccccggcccctcccaagccccttctgaacccggacaccacgcaggctgagccccgcctctccctgccgtgggcccctctctgaccctctgtcctggcctcaggcctgctcttccaggggctgagcgtgttgttatccctggcaggagacgtgctggtcagcatgtacaggtcagaggaagggacgctggcgccccaggaacagctctttggagggggtggggagcagggccggaaccttgctggcgcttgagccgattcagatctgattgagtcatgttggcaagagctgggtctaggaccctggggtggggactggagggttgagcaggtcggggcctcagcctccctccggttccccagggaggtctgttccatccgcttcctgttcacggctgtgtcgctgctgagcctctttctgtcaggtgaggggcagtgaattccctggagcccctgccctgggtgctttggaggcaaacccagcacattttctcctacatcctc

SEQ ID NO: 68586 - DNA, 2059 bp, Homo sapiens
aacggtccctaccaacttcttcaatttatattaggttatctctgagaatcctggagccaaggagggttttagggcccagaaatctcttaaagtctgcaattctcagcatgacaccacgcagatgagtaaatgtttagcacttaatactgagtaaccctcacaagagcccctcagatttgtcactataaagcacacgttggaggcacacaaaaagcccgtacgtttacaacctagcagctaagcctgctgcactggcgtccaaccccgtcactaacctgtagatcctcaaagtccctcccaccacccaattcacgtggctgcaaactaatgcagccaagcttcagagaaactcaattaactctccatcaaaagcacccaccctccgcagcccactggatctcgtcctcctgaaatgccacaggatcctctcccgagggagccgtaaatgtgctgctcacagcagccccttccctactgggggaccaaaggcctggcatcttactacaattctcagagcctcaggaggcgtactcaccccaccccctcacctcctagcttcagacgccggcttctcaaaactgctacaccctcgagtaaagcccctccccagcaatggacctcggaggcatttcactgcaaacccctccaccttcaggccacgaaggcggccggttgtgacacttcctttctgaactcacaggagtgtaccgactacagcttcctccccacaggtgtgacctgggtccccttttgctggtaggccacaaaggcctcctttccatttcgggttgaaggagtgtcctcactacgattatctccccacctccaggcacagagatgtagttataacctctgcttcactgggggagacaagaaatcctccgtactcgggatgtaggcgtgtttttactgcagtccccgttagctcgcaggccgctgagccagccagctctggcctgccccctctcagaccacgggggagtcctcgctatggcctcgtccccacttcggtacgcaggctcatcctcttgcgtcctccttgcatcctctcagatctcagaggcctaagtggcatcccactccccctgcagccctgcctcgaccctttgtgtggggcgctagttgccgcgggctcgaaggcctccgaaggccccgccccgggccaccaaggggcaccacgagccccgcacagccccacccgttcaggggctgcgggagtcttaccggggaaagctgcgcggcaccagaacccagaccccgaattaccccccgcgcgagtgcctccgccccgcggccgacagccccagcccgaacggcttcccggagcccaacgcagccaccacctccttcgccgcttcacaaaatggccgtcggcccgctcagcggctccgcgttccagaagggggaggaacggcgtggttgacgtcaaggggccgcgcaagcgcgctgacggtctcgggcgatctcccggaagttactgggttttgtgctaagagggggatattcagtccctgcttgcgactgttggcgcacaggaccgaccttgggctagtggccctggcgggtgggctgggtatgagtgtctagcttggcccttcactgcaagactgtgcaaattgcttcacgtcttccagtttccgcggaaggagcgaattgtgcttacctctaagttttttgaggattaaatggaccacaacgtggtggctagttattatatcctgacaaaacagccaaaacctgattcttttttcccatttaagagtttatacaggccgggggccgggcgcggtggctcacgcctgtaatcccagcactttgggaggccgaggcgggcggatcacgaggtcgggagatcgagaccatcctggctaacacggtgaaaccccgtctcttctaaaaaatacaaaaaattagccgggcgtggtggcgggcacctgtagtcccagctactcgggaggctgaggcaggagaatagcgtgaacctgggaggcggagcttgcagtgagccgagattgcgccactgcactccggcctgggcgaaagagcaagactccatctc

SEQ ID NO: 68587 - DNA, 855 bp, Homo sapiens
tacagttgtttataaaaatttcatttaaatgacatttcaccacccacccaccttattttatctcagttacccatgatgtagatttctttaacaatttatagattattttactctaccaatcatggagattaaaagaaacatcatcacaggtactcttagcgatccttgacctgttggtttggaatctgtggagacttccaaagaaaatattttcgaagttttgaaaatgctctccatttcagaaaccatctccacctttggaggaaccttcaccccgactctctggtctctgcagtcccaaggaaggatgccttcctgttaacatgatcaggcagagtgctgatgaccctgaagcccgtcctaggcctcctatattcaggccaaggtcaaagaaaccaacactggcagcacagttcaaagacaaagatgagagcaagtggagccagagttcaaagtacagcaagccacaatttctcagagccttggcatttactcacataatcctggcaaccaggcccagtgaaatctgactatgttctatgaaacaccaacgtgactactaaaagtaccttttccttgcattagcaccaaagatcttctatgtacccaggacaaaatgactgatcccagaatgggtgaccatgtgaatgcctgcagagggcaccacaaagacaagcacttcaaaatggagatatctaaagaaacaggaggaacttgttgcaaatagatctgatcagaaagaaaaaggaaggctgagaggaggacagccctgaaatcacatatataacttgttgttactagataaaaagaatggagaaaggccgggtacggtggctcacacctgtaatcccagca

SEQ ID NO: 68588 - DNA, 1550 bp, Homo sapiens
taagaccgaaggcaactatgaacgcatggcatccaaagggcagaaggaaaaatctggctggaggtgagataagtgtaagggatgctagggtcgaatctcaatggaaagaaaacaacaccagatacctgacacgctgtaaaaggaggtaagggagagggagagagggttcctggagggggtgttgagttgatattcaaatggtatcgtaggaaggaaggctctaaagggcaaagacgtttagaaggaacgtggagccagagtaggtgcagtcccttctgaccgaaggtaacggtctgcacgggagcccggagcagcatctgtaacttggccaggagcggtctgaaggacgcgcctccacggctctgggggcctgtcgcgcagggtgcgaggggtggtgcgccggggtcaaccgttcggggacccgcctaagaaagtttgagggatgtgtcatttgagagaagggtcagagggtctgggcagcagggtggacaggaaggctccggaatattcagttgcgtcgccgcgcggaggggacaggtccgcgcctcccggagagcgggacccgagcgtaccgcgcaggcgcagcccccgagtgggcgccgcgggcttcggccctggagccgctgtcaccgccactgccgcccgcctccaagcggctcggagcagcatggtcccgctggcagagcccaccttccgaagccgctgcagtcctgggccccaggctcccggaagtgctgcccggcgctccggaagcgattcatcgggccgcgagcgccctccccgtcgttttccgtgagagacgtagagctgagcgacccagcccgcgagcgaggtgaggtaggcgccgggcgacgcggggccggaacgcgaagagggtggtggagtcgggctacccactgattttccttcccttacttcccctgagcccttgggcccacttcccagcctaccgcttccgtccccgcccgactcttgggccagcgcctgggcccacactttcctatcccccgcagatgccggtggccgtgggtccctacggacagtcccagccaagctgcttcgaccgtgtcaaaatgggcttcgtgatgggttgcgccgtgggcatggcggccggggcgctcttcggcaccttttcctgtctcaggtgaggggcgcgggcggtgatctctgggcaggacaaccagaccttccggccctgccccattcggcctggagcctgaacacagcctccttctttcgacttccctctctgtcccctcgcgagccagactcattccaaaccaccttcaatctgtaaagtcaggttggaagcgtcagtgcttaagaatttgagctttagagtcaaaatgctttctggcccttttcttactggttcggtgactttaggcaagttggagactgggtttccttaagtgtagaatgaagacagtagcatctaacttatagagttgtaaaaattcgatcagcacactttgcacagcatctggcacatattaagtgctcagtaactagttactactgttgcttttatttttttttccaattgcgca

SEQ ID NO: 68589 - DNA, 4690 bp, Homo sapiens
agctataggagtaaagtgctaacttacaaagcttacagtttgtgacaccagtgataatgcatgcatactgctattttcaccaccaactggtgaaacaatgaaaagacagtttacttttactgagataccgaaatgagtcaaagactatattagccaatataattcctttgtttttagtgtgaaatactatggtagggcctaattaaaaataaaaacaatatggagaacagtaaaacagtcatcaagtgactctaagcttgtatttactctaagcttgtattaagcttgtattgactctactgcctcttgtattttttttttttaatttctattcagggatccaagaattttagtaattattaactgagcagcagattgccactggactgttttaagatttactatcaccagtcttacatagatacataaattttaaaatctcacccatttcttcttataagactgttagaagatttaacttgccacagactggtcatgctttgttattcttggacccctgctttttcccaaaccactacattcacctttttgctataccaaactggaggtggtaattcttagttgagtcattttacctaggggaccacggtacagcgataagtcactcaattactaccttatgattgacagttcacactggaatcaaaggtgaattcatgggagtagaggtgagatatcgttaggcaagtctacaaagagagatagatgggcatttattcatcacgctgaagtgaaactactgcacaatattattacatcaatagcatatatttacttttgtaagttacacgtaatgcatctctgataagataaatcaagagggctccggggaggttagtttacatttcagcagtagtttcgtgaataatgctaaattaagaaatatataaacctcaccgacatgttttttctcaccttcttgtaaggagcctcaagcattgcttcaatatcaatatcgtctgccattttctctaaacgcctaggaagagaacaagacaatttcttgagtaaacatttctcttacaatgtgaaacaagtttcactcttgttgcctatatcgtctaacattttctctaaacgcctaggaaaagaacaagacgattccgtgagtaaacatttttctttttttttttttttttttttgagacggagtttcgctctagttgcccaggctgaagtgcagtagcgcgatctcggctcactgcaagctccgcctcccaggttccagcgatcctaccacctcacctcccgaatagctgggatcacaggcgcctgccaccacgcccggctaatttttgtatttttggtagagacggggtttcaccatgttgatgaggttggtctcgaactcctaacctcaagtgatccgcctgcctctgcctcccaaactgctgggattacaggcgtgagccaccgcgcccggcctggtaaacgtttttcaaatcgactgaatttttcttctcagccgacacactcgaaaacttaagaaaaacctccaaaagccctacaattaatgactaaagtgacatgcactttaaccaggtttggcttacgtaagtaaatccaaaacgcctcttacacgaaacacacgaaaatgaagacttcaatatccaatatttaaaactctgctgtcaactccaaaaacagaaactgggagacccgaacgagagcgcctctttccgggcaaaaacccgcgctgccattttaggggcaaagagaaactccctccattgggaggggttatgagccaaggcagcgttcaactggcgccatgttgggaggtcgcggccggcccaggcctcgaaggagacaggtcaccattctaccgcggcctctcgggggtccctaccgccccaagaatccagactatacccgactggaaaataagggcgcggtcactgaaacagggccgatttctcgaaaaccaccccccaccccggtcgctaaagacctccaaaagcgcccctcagcccaaaatggagccaaacctcgagaaagctgagataatacgcgggtccgcaacgccccgtacctgttccggccttcgggcgcctgtggtgctcgtgttcgggaagagattgctgctgctgctgctgctgctgccgccgccgccgcttctgttgctactgttaagcccctaggcccaggccgcggaaccgcccagcccgaatatcgggttccaaggacggctaggcccgagagaatctaaaaaaaacaatggaattagagaagcccacgcgggagagcaggacggcggcttcggcagctcaggatccacccctgcgacagcgtcgacaagctccctgaaatggcggccgctgcttccctgtactcacattcaccagcacacatacacacacacaaacacacggggcctcacagagccctcagcacgggctctcgcgagaagctgccccaagctccaaatttgagcggccgaagtatcgcgagacctaagtatggctccggcgaccgtagcccaatctcgcgcaatgattgcgccacagatattcccatcccccattcagtgaggcgcctttcactccccctccgcgtaagcacccaaatctcgcgagacagagcgggtctctagggcaaagacagttggtaggctgcctgtcaatctttcagagagctcttcgctgagtggagctcagcggtcacctccccctcgtggcgcctcctcacggccatctgaagattcctccggcacagccgatcgcccccgctccggcctcccacacagatggctgtcaaggtcgccataaggcaacctagtccttatggcgataggataaaacggccatattcagattatccgctgagggtggagaggaagtggaaaagtgtatcagaaggccagaagaagagatctttaggggtagggggagagggggagataataaaaatagatttccctgtcatttggagccaatggcgcggcctccactgtcgagctttgaaacaaccttggaaatagtggagaaaagcaaaaaaaaggtggaaaaaataaactcttgcttcccttggcatgggatcagttttgtgccccgaatttaatcagctcttgtgtcagggttgctaccgttccttcaaaaatgttccccttcctgaatattactggacgatttggtgaaaaaataagacacccccccaacaaaaaaaaaaaggcccccttccccctgggacctggctcctctcccctgaagtcttctagatgccaggtaattagagtatgaattagccatttgttctttggtcagtactgtgtgaggtttcctcctagatgctgggaaaaaaaactggaaagaagtcttcaaagcaaaaatcttaccctctaatcttaacagtctaatgattgagggcagaaaagattggaaatgagacgccttgattagtgtaactagctgctgcaacactgtgtgaccttggacaagcaaattaacctctcagaggggatctttcatttcctgatttaaaagaggacgtacttagtagctagtctaagctacttgagactgaggaaggcaggtaatgctcagtactgaatttttagaggttagcagggcatgtctgcccaagtggaccctcagtaaattaatgaatgaaggctcagaagggctatagtgaagattaaatgatataatgtctgtaaaacgcctggtaaatatttgatcttcaaaacagctaacttctgtttctgctaaacaaaattatttagagcaaatatagatgttaagtggttttgcctctcaggttaactttacacacaggttaggatttatcttagaggattattaataacagttattttgtagttagaatactcccttaatcctttttctgaaaattcagatcctctttttattttatttctgagacagtctcgctctggaggctgggcgcagtggctcatgcatctaatcccagcactttgggaggccgacgcgggtggaccgcctgaggtcaggagttcaagacctgaccaacatggcgaaaccctgtctctactaaaaataaaaaaaaaactaggtggcaggcgcctgcaattcccagctactcgggaggctgaggcaggagaatcacttgaacctgggaggcagaggttgcagtgagctgagatcatgccattgcactccagcctgggtgacagagatcgagactccatctcaaaaaaaaaagaaagaaaaagaaagaaaagaaaactgtcacaggaaattgaagcataatatgtcagaaataaagcaagctaacctttgctatctcttcctgcccctcggtaattccagtattatgactagtgcaaaatgaaagcatgaagatggcacttggtttttcttgtttgtttaggaacatgacatgacagaatttgaccttaaccgctagacttcttgtttgggaagaggaaggatttaagctctaagtcgcttgatgatttaaggtcccttaaatagttttctgctcaaggaccatcagaggcaatatggcaacttagcagatcatcaagaaaagccgtttggaaaaatcaagtttctgaaacaagtattttttatgtttaaaagaaaatatccccaggcatggcggctcatggcctgttatcccagcactttgagaggccaaggcaggaggattgcttgagtccaggagtttgagaccagcctggacaata

SEQ ID NO: 68590 - DNA, 1456 bp, Homo sapiens
aagaatggattagaacggcgaagagtaatagggtggaaaccatcttcatcttggagagagatggtggtcgcttcgatggagaaatgggaagctttgagacgcatttaggtggcaaaattaacgggtgatggatagcgtccattccccggcttcggtgatctcagtgattacgagtgagtggggacttcgtgttcctgctagggcgcgggcctgtttcccgcgcgtcagggtagtgggcgtggcctgcgcaggccgttgccacagtgatcgggcagacggggcagggggcggggcagctgggaccttacgtcactcggtggtggcgatgatgcgtgtgtgtggggggcggggcatacgctgggcgcgtcccgggggtcacgtggtgcagagcacgcagagtccttctgtcggttggtcctggagcggcgcagccggagtggggccgtgaggtgagctcgcggccaggcgaagccggccggccgggccgggttgggccgggcccgcgctgcgcgcgcgccgtgcgggcggggacggcgacggacgccaccgctgcttcggtcccctgcccggccccgctccccgcctggccccgctcgcccagcctggagggaggccctgggactgctgctgagagcgtggcgggcgtgcgagcggtgcccaatccccggggctacccgcaagagtggcggcggctgccgccaatcagcgccgcccgagggggctgggccgtggggtgcgggcccggggcgcggagcgggccgtgttgggggtgcgggtaagccctagggcccgagcctgagctgtgtgggcacctagagcctcatcagcagcctctgctattgccttgcgctttgggaatatgttttttaaaattggctttttttatcctattctggggagcacattcctttctcaagaccccaaatatgggagtgtcccttttctctatagttttgaaaactgggcggcacaccccctttcttaagctctagctctggaattttatctaaatttctaaaagccctcccccccccaaatttagggcgtaccctcttccgtcagcccccaaagtgggagcacattccttttttcgggcctccaatttgattctgcatttccgttccaatttagaggttcaccctgttatcgggtcctcagatctggggtccattagctaaagttttgggatactttcttgtatcccctctactccaaggaagaattccccttttccaggtcccaaatctgacagcatgccttctggaatttcttacatttaggggccacttcctttcctcagcccttcaaacctgaggttgggccgaaaacaatgtccaaattttgaagtttatgggtacttatttccagtttcacaaataagggaattcactgccttctcccgagactgtattattggggttacacacttttcacgtgttccccaaatcaaactacc

SEQ ID NO: 68591 - DNA, 473 bp, Homo sapiens
cctgggcaaggtgcagcagatcgccctctgctgctcaacatgaaactgggcacccaaaactcatgggggcacaatcctggggcacctgcaggaggagcttcgcatatttaaataaataaacctagcatgctgaatgcacgtgacaccgactgacttcagggatctgggccaggagtgtggtggacattggacaaagaggccattttggctgcgggaggacactctgatctcgaagcctgccataaaggtagcaaatagactcttgggattcccctcttctgtgcacatcgttgaatgaagagagtctttttgcacaaacttcacttgaaattgtgccactgatgataaacggaatgagagccaaaaaagtttagttggagacagttgtaaattcaatttggagtttatttaattgacttttctatcacgttggggcacatgccaactccctggtttcttcctggcatggtgtt

SEQ ID NO: 68592 - DNA, 2765 bp, Homo sapiens
caatttgtctgtctttaatattcaaaagcaaattgcccctcaccaacttccagcccagtctcactcatgctttgtggtgtgaactgcaggctgattttgattgttgagagcagtgcaaggaagacaagtctggccttccttatattaacaaatggcactcactgcaataggacctatctgggaccaatccaagctgtccatggaccctaactagctccttcctggttgggcagaagcctctggaaacagagtaggtttaagatttcagaacaggtcctcattatttgccaaattctttcttccctttgtaaacgattatgctagtttaaacaccaaaagggagccagccggagagacattaaaatgagtagcttcagtaatgtaaataatccattacttcaactagttctgctttattcctaccacaggcctaaaatttggcaaggaagttgagcaagcctggcggcataagccagagctcacaagaactagcctatctctgtgaaggtgtgcagtaaacacttcacattaaaatggcccagtaacttggacattttgggaagcctgtacccaaagggcaggtgcaagttggtgcccatattggtatagaggtagccagttaagtgagcatttaatagagccagctattttgcgtgtaagaaacccaagtgggtccttgggagcccaggtgaaaaacttcccatgtgtggtagagggataacctaggttcagtcaacatctaaagatcccactatagccaacgaaggccttattgttacggactcccaacttcgtttcgccaccagccagaaaggcggtaggaaacaggcttggtaaaataaacccaataagaacgaatgaaagagacacaccagaccacaggcgctgccaaaactcatttttcattaacacggggtggggtcccaggctcaggcccccgggcccgatcatggccccagtccgcacagagcgcccggccctggccgcccgcagctccaccgctcagccagtgatgcgcacatccgtgcggcggcggatccgccgggcccgagccgcctcgggcaggatggcgagcagctgctcttgcaccagcatctccacgatctgctccttggtgcggatgtcaggccgcagccactggcgggacagctcccgcagctgccggaaagcctcccggggacccgccgcatcctggtagcggaactgccggaaacgctggcggaacgtctcgggaccgagtctagagccggcggggcctggtgtggagcgcgcttcagcttcggcctgaggcgctacgctcacgggtgcgggcccgagaggcagctccagggccgcggaggccgcagctcggggcgtagggatggcttcagggaccgcggcgttgggactggaaggctcaggggcaggcggtgaggcctctggcagcgaggagcccacacagttacgctcaggggctgagctcgaaccggctccttccagtttctccggtggcaccgccgcgggactcccagtggccgccaagatcggctccgtagccgccataactccagctccgggcgtcactctttgtccggtagctgtgtgctcagcactgcgtctgcgcgggggtggggtgagcagggagacgtttccggttaaagggcagagctcgcgtcacccttgagggagtcggactcgggaccggccgagagtgtgcggagcttacctgcaccagcgaagcgcctgcggcagccggaagcgaaagtctctggcttctctgcgtccaggtcggcgcgcgagcacccggaagccgcttgcgggctcccggaagcggcgccctctagcgttctcgagtcgcatgaggcggctgctgccctcgcggtgcgggagggcgagctgcgcgtggcctgggctccttccgaatggtggcgcctctgagcgccagttcgaggaggagtcggaggaggagcctgaatgtttggagatagacttcaagtcccggaccttatccgtgcgccgcttcggtttgcaggtgacctttgcgtgcgggcgccccttctgattgaccctgatgagctgtagctctgatggcccctccttcgggaatgattagggtgacggctggccggggctcgttcgagtggcgcccggccggtggtgacccgaacaggagagcgggacggcgaccattctctcgggaggggcccatctggagaaagtcctctcgcttggtcaaactaggagggcgatagcaccggccttactgcgacgatgacaaagtacaacacaccgtctggcgcgaaggagatgctcgagaaccctttgctgttgttatttttcgcgtgtcctccgaaaccaagggaaatgcggctctgtgggttctgttaacgtcagcatttaataagtgaactctaaatgcattgccccttatggtggccgctggcctcctgagttgactcagctcttgcaacgtagctagttgataaccctcgaaatatagcgaattgagatgtgctatattgtaaaatacgggacttagtacgaaaaaactgatgtaaaaattatctcaatactttttaatactgattacatgttggaatataatgttttgcatatattgggtcaaataaaaatgttattaatttcacctgtgtttttactttttaaatgcagcttctaaaaacatttaaattgcatgtgcagtttacattatatttctgttgagcagccttgggttagagtgttggagtgaggctaccttggtggaatcccctttgacgataccc

SEQ ID NO: 68593 - DNA, 1397 bp, Homo sapiens
ttaaggcctttgtccgttgtcgtcaggactaggtaggtctcgcccaatggcgacagagtggtcacccgggaaccggatctgcgcggctccgtggcctaaagaggcggccgagcctgcttgcgtccctaggccgccttcccgggccgtccacgccttaatggcctccgccgcgcggcgttcgagctgccgccatacttcccggcccaccacgcccagcgccgcccaaaggcgctgcgtcccggcggctctgcgggggtttcgtcgaggcttgggtcgggagacccgggtgccggcggggtccgggctgggagacgccacggccgccattagtcaccgaggtggggtgggaaagagaggttcgctgcggcttcaaggtctgggcacagccagtgggcgggcacagccagtgggcagccacagcagaggcctccgttatctgcagggcagagggctcggcctgtcccggggccccccagttcacccgccggcccggggccggagggcctggagggccctggaggagcgggctgcgttctgcgtctctccgcgatctctgccggaccggaactgacttggcagttctctgcgctggcaagagaggagcggtaccggaagtgcccttgcgctgggggcccgcgagccgtggttccgggtctgcaatgttccggcgtgggggtggggaatggggaatggggtgtggtcacgtggggttagggccccctccaccccgcttgctcttcgcaacggaaattgctactggcctcagaattccctgagcaaacgttgcttctctatctccttactcctccggtgctggataagaagactccaatatttcatttattgactcatttaccacctgtttaccgagcacctatgtgcctctaagcacgggggagtgcagcagtaaagaaaaaaacacaggaaaatttctgctctcctaaaatttacattctagtaagggaaacaacaataaacaagatccttaaaatgcataaaagggtagatagcgaaagtgctttggaaacataaaaaggaaagaggaatatgaagtgcaggtgcggaatgctttatagtacggccaggtgactctggagcagagacccgaaggaggcgaggggatgagccatgcttggagatgtctgtaggggaacagcttatgcacaggccacaaagccgaagcatgtgggccaggcctgttccaggaacagcaaagaggctggggaagagaggagagaaatgggaccatgggagggagttgaactgcagtgcgggagagctgaagtggaggcaggggcagaagcagggagacctgataactgactgttgcaatcaagcaggtgagctatgatagggacttatgccagggcgacgacagcaaagggggcaaaaagtgg

SEQ ID NO: 68594 - DNA, 1380 bp, Homo sapiens
ccgaccccgtagcggggactctgctgctgtgcggggcgcggttcgccgaacccactggccgcttctagagagtcggccccagggccaggacctccacttggcaggcgctggggcgcccaggggcagggccagcgcgggaaaggccgcgagtccttcgaccccctggcagtctgggagccggccgcggctgccatggcaacgcccggaagctgccgggaggggaggcaggcccagccgggacgaggccctgcctccagccaacgctccgcccagaacgaagccccgccccggaacgaagccccgcctccagcaactctctgcccggagagaggcccgacagctgcgacccgactggttctgtccgagcccgacgggccgcgctgacccagcgactgtgcctgactgaccacaggtgccgccaccgcctgataatacgagtgtgtcagcttccgtctgactgaacgcaggtttcatgggtgcctgacagaccaagactgctggatctgtcagcctggccgcagctggctgactggctgactggctggctggttgactggctggctgactggctgcctggctggctggctggctggctgctcttgcccggccgccatctgggcctgacgggctgcgtctgaccgggcggcctatctgcctctgcctgaccagcctccatctgtgcttggcgagctgtgtgaccggccgcgacggtctgtgtctgactgagcacaaggttcctagcggccgatcagctgcttgaccccatctctgctgagccggccgacaccgacggattgactctggcaacgcctggcccgagtggcgctaccggcttccagagacttcctgacccctgccgaggttgcaccgctcagcgctgccctgtgaggcgctgactgtggccgcagctgagtgcggctgccccttcacagacagggcgtgcagaatgacggtcgcctggctgtccctccctaggcgcccctggctagctcggcttgcctggcagcgtctgtgtctgagggacgtgttggtggccgccgctggccgcatctgtccccctgcaggtgggcatcaggttgcccccgtgaagtgcagctggggccgagcctggctgaaggacggccaccttctctccagctgtccagcgagggcttctgaggtggtgccctccggggctctgtggcctggacctctccagccacacacagtcagagccttaggggatcccaagcaagggcacccacagggaagagagcctaagacagaggccaagggacaggcaggcagcaggggtgggacttcgggccaggcgaggaacagctggaagaagctccggggctgggaggaggccgcaggaccttgaggtgccggagtttaggg

SEQ ID NO: 68595 - DNA, 1012 bp, Homo sapiens
atttccagtggcagagataaaaaagtaagatttcagactcaaacatgcaatggcactccaagtttctgcttcgaactggcatgtatctctctagctcacatttcattggccaaaggaagtcatgtggttaagcttgacaatgggctggggaagtgcactccttcctctggaaggtacacaagtcacatggcaactggctaggatggataattctcttactggccaagggaagggcaaataatggagaaaaataatacgtcaaccacaggggttgagtaactttcccaagatcaaaccactgggaagggacagaggcagattcaaactcagacagtctccaaagccatagtgaactccatggctccctactgcctgttagatggaatccaaatatatttaagctttagggcattcctgcagcctggagggcccttctacctaatttgtgtgctgaattcactctttaaggctccactccaatctcaactccttggactcactcttatttgtcatgtgttccctctgctctaaggcccttgtacagtgttcccaaatgtttgcagtattttgggatgaaaggagtgaggggcacaagctgcaagtggactgtgctcctgaggatgagagcactttgcctacttttccacccctctaaactaagcttagtatcttgtgcttgggtgactctgacaggtcagccccgcatgactcactctgtaagccttcagcgcgggtcaccacaaggtcctggtttagggtgtgtgagttggtgggtggggaggggaggtggaaattaactttcacctttcaggaacctttcccttccccaggagaaggacaagtgtaagtccttcccttaagtagtctgggcaagtctctactcatcactcctaggaggactggggaggtcctggaaggtgcagaggaggaagctctgagaagtagaaacagcaccaaactgcaccatagaagactttactaatttgtccaaatgacagaatttaccttctct

SEQ ID NO: 68596 - DNA, 1736 bp, Homo sapiens
tatatgtactcagctgagcttttgtgcctggctttgtgctcggttccagggaaacagtgaggaacaagacaggcagattccttccctagtgcgttgatagcctgactgagatgttaggacttggcctgcaggaaggacacggggtgataatggccagagggactgaggtggcgaccgctgctgctgcagcagcggaggctgacgctggttctctctgggctggtggctgggtttctgaggctctccccgagggctgagtgtgactggaagctgagacactgtgaccgggatagagactggctgacaaagacagtgaccgagcgcctgactggctacttctgaatagtagccactggtacaagccttggctgtgctttagtgaccatgactgcttgagcccaaagtaagatggctggtggctgtgtttctggacggggatataaaatgcataggttaatgaaagttgttcacaattcagaagctaaaacgagaaactaagaataacaaaaggcaaccttgcatccggcggaacctgcaggcacgggccattcttcccgcgacccagggctctgccggaccgcttcccccgtcgctccagtcagacgccaaagctggagaacttccggtgcgtttccgctgtaccggaacgtggggcgaggcggtgagtgtggcctcctggcctctttttcctttcctgattccttgtgtatgtgtggctgggccgcccctcttctcggctcagagtcacggagtgccttgaactaggcccacctcgccggggcggctggttctctgtttgtgggacgctggtgtctctggaggcccttcctgagaagccgtcgccagagttacgtcgcggttttcttaactttagagcctgggggccggagaccctgattgcactcgacctggctctgccctactctctgcgtgacttccagtaaggtctttccccgaactgaggctttgtttctcgtttacaaaatggatatcatacttgtattaaataaatgtttactaagcgttgaatctgtgctagggatacagcaggactcaagtctcgtggcgatgacagccttcaatcaaacatccaaaactgcagttgtgatcattgagacggaaaggtacaaggcaccccagattatatcacaggagacctgacctagccccagggcaaggaacctttactgaggaggtgaatattgagctgagatcagaaaaaaggatttgacaaagtggggagggaagagttttctatatggagacagcctccaatttcaggttctgaaagaggccgttgtggctggaacagagagcttgtgggggaccattgtgtgacacaagctaaaggggttgccaggagtcagaccgtgcaggctttgtaggtaataggaagaattctggtttttcaagaaccatatgggaaaccactcagaagctgacatgggtggtgttgtgattagattggcattttgaaaaggttactgctgttgaatggagaatgggttgaggagcaagcactctgagtgagggacgatggtagcttggattagggaggtggtggagagaagtggatggatgtgactttaggtgttccaggactgtgaggaactcacagagctgtcagtgacaggggctggtagactgcagagttctatgcatatttaataaacgttttcctagcatctcctctgtgctaggccctgtgccagctgctggagatatagtgaatagaa

SEQ ID NO: 68597 - DNA, 917 bp, Homo sapiens
cacaggcacatcctcaccactgtacatccagccactgtctccctactgggtcacccctgctcagaaggctgcccccttactcctcagcatctgtctccaaggagtgagcaatcgggtcctttctccacccccagggctgttctgagcccccacgttgctgaagggcatgaaagctctgtccttctcacagaggcatctgtgcactcaggtcctgtgcaggccggtgggttgatgtaggggagcggcagttattgaggcagtgagagcccctctcaagcagggcgtgggcagggtgaggagctgcctgcctgcccgcccacccacgtggacctggccaattctccactgccagtgccactactgctgtccctgttctccctccccctgtctgacccagattccacattccagaaatagctctggcaggtgactggcaggcggggtcagctctagctgggatggtgggagaagcagccgctatggatgcgtgcccctccccagccaaaggacctatctaggagggggcttgggggtgccatcactccccagtctgccccctcctgcctctcttctctctatgcctctgagaaaaagaagaaaggagaacagcctccctcctcctccctccctcctcttactctgccatctccctctctttcttccagcttcccctcccttcctctccctctttctccccccaccatctttgccttctgtctgtctccctcagttctctgcttctccctcccaccctctctgccttccttccctctcagtttctggccctcctccccgtcctccctttctgtgtctctcccactccctctgaatcacagggaggctgtgatgacagccagtggcctgggcaggcaaggtggtgggctgcagggtgtacccccactcctgccagctgcatt

SEQ ID NO: 68598 - DNA, 3383 bp, Homo sapiens
agaccttgtcgctacaaaaaataaaaataaccaacttaaagtgaatagtacaggcgtagcataagtgactgagataggatgaccttcaaagtgcttagcacagtgcctggattcaaaacggttggctaaccctcaattccgtttattatttttacaccttaatgcaaaaaccatgacagtggtattggaaacactatcatcttcgccagtgctcaaaatattttgatatgtcaaaaattcttttctccattttttggaaaacagatgcgagaaaggaaaggacttgcctaggtcacccagcaaggcaggtcatgaacaagagttgggtctgcgtctggcagacctaccacaggtgcggcctggagagatgaggcccacaaggcagcgacaggacctggattcagtgaggagaggggactcgcggggtagaagccaggaactgggaaggcgaggaggcgtgaaggcaccacctactgccaacccggctcgagctggtcactttgccctccatgagatcgtaggtgtgcttgttgttttattttacgggggaggaatggaaggctcagggaagttgaatgcggatgttgttcaagatcacacaggcctccagaggcggagccgggattggaacccaatctctaggactctgggttagcaaagcaaagggaggatgcagtggcgaggacagctagatacacctagggcgcagagcagccaggaccagagggccaatctgactatgcaggggtgagagggccacctcgggcagcttcctcggagcctcggttccccccttacagcgaggtgtcgctggggtgaactggtgggaactcccgcctcggtccacctcccgcacagagcatgcgtcgcgttccagctggaaccggtttggcgaggcggttcgaggggcggcgaccccacccccacccccccatgctcgggcatgcgcgtgccgacgtgggcgcgcgctcctttcctgggccggccggctgggcgtgggccggacgcggcggcccgcgcgcctgccgaccagcccggctgcgcgcgccgggccacatgccaagcgggctgcgcgcgcccctgcccggcccgggagtccctgacgacgcgcgcgcggctgacgcggggggcggggaggggcggggcaggtgcgggactttaacccggagccccgcccctcgggcgtacaaaaccggagcctcgggccgggctgcgtgagggaggagggtgagtgcccgccgctggccgccgccgccgccgccagtccgtccgtctgtccggtccacgtcgtcgctgccgcctcctcagcccggacgcccggggcccgcccagcgccgcccggagcagccgcggccccgcgaggagacgggggccgccccgcccggcccggcccggccctgccccgcccccgccctcgccctcctcctcctcctcctcctccccgtctgtccgtccgtccgtccgtccgcccgcccgcccgcccgcccgcgcttccgtcctgtccagccgccagtcctccagcccgtgtccccgctccgcccgctttgtctctccccggctcgctgtctctttgtctctgccctcgcgctcctccgcagcccctccctcgctccccatctcgggtccccttctcagagcgctcttcagccctcagagccgccctttctgggcgaccccactcttcgggactccccctcagagcgcccccagatcttttggggttccccttgagaacaccttccactctccccaagggctccccgtgagtttcttgcacatcctttgggggttctgcaccccaagtcgctggggtctcgcctcctctgaacccccattgcccctgggctttccctcttctgggtgttccccatatccactgggagctcctaggtcccaagttggggtctttctccttgggaccccccaatatgtcctcagctccctgacttcaggagctcctctctgctttcccctggtttgtcccctgtcgctgtctctccttgttctctctcaggtctccgagcacccccacttctcgggatcggggtcccctgctttgctctccctgcccctctgtgcccccacatctgtctcggtggtctcgccactctgtgcctcttgcgctgaaggcccccctttgagcctgcttctttgcctggggcccttggcccccccttgctttttcagccctagccccctgtctccccttctctctgctccttgtctccctctccctttttctgtctttgccgggtctctgggtctctgacccccatccggccctcatggctttgtgtctggagctcttgaagcaatgtgagtggtggggtgtccgggtcgggccggagttggcccgcaggctggccgcggccgaggctccatggggttggcgctggggcaagggctggcgctagggcaagggggctctgaggcctcccacaaagggggaaaggagggaggggccaggctgtctggcggaggagggagtggggggccttcctgctctgaggcttctgctttagttgcttgagtgtgtggagggcaccacgggctgggcatccctgcccacttggccccgcatggcctggcactttgtgatcgcttgtgggcaggccgggctattttggagccggcaggatgtgatatcatttggacgtttatttagccccggctgggtgtgggggctgcgttcttgccagcttgagtaatgaaattttgcaggggggtgggggtggggtcagcctcctaggcagctaggctgtggggttcatggccagaactttgcagaacaccagagtgggcaagtgaacaaaggtctgtgctgcctggatcttgctgagattcgattcaggatgagcagggagaggacttcttaatctgaccaccctgaggattgactttggtagtctaacctctggggccttggttctgccagcttcaaggtgttgtaaccttgagcgagacccttgtcctctctgtcagtttccctatctgtaaaaagtggataattgtgctggcctcacactgttgtcatgatgatcaaatgaaacatctgtagacacgctttgtgaactgtcagcctgtctttaaacagccccatcgagggagaggagcttgcccaagggtaaacagctggctggctcctgccagagctgggacagggatccaggactaggacattacagtccagggctctttaacctcctccccactacctggttattcgagaatgcacctgcccttccaatagagcagggagacggctgtttcttaattcaggccccaatcctgcttgttctttgttagtccgtttgtaaagatagatgggcgtgcccatcgggatgtctgtgcagggggacagttggattttccatgttccatcc

SEQ ID NO: 68599 - DNA, 1074 bp, Homo sapiens
aaaaaaaagaagaaactgttccagagagtagaaactctgggtttcagaaccacaaacgcctggttttaatcagtctccatcattcactgcgtttgtaatcttgggcaaattatttctttgagcttcagttttcttatctggactcaagatctgtactacaggattatgatgaggattaaatgagattatgtatttttttttaaatctggtgcacagtaggcacttaataaatgtgaactttcccttcccaaaaacatctgggtgacttttctctttgtaggaactagacagcccagttccccccccatcccccccacccccgcatgccctgtggttggggtttagataactaggaaagcacctgtggctattctaatagtaataggagtgatcttctcatctctcccaggctgtgtgaggcattgtgtaatcagccaggctctttcccgaccattgttctccaccaacaggcctggaagtcggaagccagtggagttctccctgtttcacaggtgaatgaaaaatagggggcccagagagagacaaggacctgctcaggggcccacagccacagcagtgacaggcaaacttgtagcccaggcctcttctccacagcccgcagcgtttctccaggtttatggcttctgcctgatagcctacccctcaggccgccttccctgggtctgttcccatctgttctgggaggagggttttcttgacatttccccagtctctgagctcatcttgaatttaaaaggaggctatctggaggctgggtggggactgagtcaccacctcccgtggctttctcatcctgagcagcaaccagacacacccagagggccactgctggagacctgcagattgtaaatgccacacaggctttcttcccagaagctcagatgggctcttgcgggaaggctgtcatcgtggttctgtatgtatttcttccttcccctagccactttgagaagttgttgcctgtcctttcccgcttcagcctttattaatgctgtcctcttcccctatagtgccctctcttcccctagaggcccacactgtcaaatgccacct

SEQ ID NO: 68600 - DNA, 1146 bp, Homo sapiens
tctccaaggtgccttgcacaggagagccaagtgacggaggctaggactcatttctcaggctgcagccaggaatccccagtgggcagagggaaagggaaggggactagtgcttacacagtggctaccatgggaggcagcagtggttggtcccagtgtacagccaggaaattgatggcttggccgaggcctcccagccaatcattctctctgtgtgcagcccacactcctctgaacacaaacttggtcatgaggcagagcaaccacatggcaggcacagcctccaggtgcccctcaccctgctggtcccttgcctccagcaaacacccagcatctgtatgccagtttgctttggcagatactctgagcccagtggtatgcagggtacaattgtaactgtaaccgtgttcgtcataccaaaatctggacaaaggttttgagagattttttgctcctttggaacagaggtggcctgagaaatgctatttggactttggaacagtggactagagtgacctatgctgtccctttccattgtagtaattcatttgatgaccatctggagccagttgctttctcgtaaatttgctcattctcccgtatattcattctttttgttttgtttcagcacgttggttctggatctttaatatttgtttagtttgttttgatttgcagagcactttcatacacattatctcagtagatctttatccaactttggaaagtattactattcttatcatccttgtttttcagaagaggaaactgaggttcactggtagaaagaggcttgaccaagctcactgtggctgagctacttattcaataaatatttattaagtgctgctctgtgcctggcagtgagctggccctggggaaacactgacagacagagctgccttaaagacttagtttctgacctcccagagtctgcagcagcagcacaccgagatctagccaggatccaccccaggctcctaacctgcatcctgggccctctccacttcaggtccctgtagtttgggcctgtggcttaggtctagactgttgcagcccgtgagcccttatcctggagcatcttggtataaagcaagccaaggcataagtctctgcaaaccgaacttcaaaagtaacaaaagaggctgg

SEQ ID NO: 68601 - DNA, 2161 bp, Homo sapiens
ggtggaaaaattgcttaagcccaggagttctagtacagcatgggcaacatagtgagacctcatctctacaaaaactaaaaaaattagccaggcatggtggtgcacccctgtggttccagttacttgggaggctgaggtgagaggattgcttgagcccgggctatcaaggctgcagtgagctgtgatcataccactgcactccagcctggatgacagtgagactgtctcaaaaaaaaaatgttgaactatgaatgtcatgcacacaaagatgatgtgtggtatcacgtccagaactggatgtaaagtagaagggcaaagagcgtctcaggcccggtaggaatcttaaaagtcacacccatggggacttcagtttcctccctggcatccatcctgcctgtgtctagcctggctggccattttctaggtccttcttccatctttggccagctctgcttcttagaaagctcctctttataattagtcaaaatttacttccattaacaatccccaccttccttttcccctctgattgtagtgtgaccctctggggctacatgtgtatttgacagtcttttaggtatttgaggacagtagccatgcccttttaaattgtctctcttctccagggtgaccatcctagcctctccaagccatccctcactttacgctaagcacaacttttggtgcatatgtgtcacacgccccgtttgtgacaagtccgtcccagacacactaatcacttgttgaatcagtcctgggctttctcatgcaactccatatggctgccacagtgcccagtcagtggaggaggcttttcattgtcatctccacatttctatgggtttcttgaggacaaggactactcattctgggtccctagtggctggcactgtgcatggctttccctctgtaaataagcatttgctggaatggggtggagttgagacttctccctgtgtggatcaccttctgtcttcaggttccagtttgacgatatcccttgcctggaattacctatgataccctcagtattatccagagttcagtggggactgcgccctctctggtcctgtgactttcctgtaacagtgcatcctcagtgtctgtggtcagctgacgtcactaagccatttttccacatatgccgcttttcttgtgtaattgtcttacttgggttcccaaactcagggtcttaatataagctctgagggaaaaaaaatccctctgtttttctgtgtctctgtcccccgggtgtgcctggcacagagacaggcagcattacctctgctgacctgaagtgaactcacggttttccccattcagtcctgcactattcgtctcatcccaactctaggctgccgagggatcttggctcctactcctgtcacctgatatgccacctgccactccaggcccagtgaatgagcttgttaacactgcctttctattctgggattcgcttggtcattcagaatggtgaaagaggccagcaatcgaggtgcacagggcctggcagcgtctggctttgcacactggacacacagcctatgacagttggtgaaagccgggcttttgtgacctatcgccagggtttgaagtcagccctccattgacatcagccctccagaagtgagggtagtttttttgaggctctttccaagtaatacttcccaggctgggctctgggatcttagggctttggaaaggtagcagcaaagctcgtatgatacagccagtatttgaaaagccacattttgcattctctaccctcagtccttcaccagaccaagcgggctgcacatgtcaagtttttgcactgggctggagccgaggcagctttgtaactgggcggtttctcctgcttactagcacctgcttctcgtgggttgtttttttgtttttgtttttgtttttttgagacagggtctaactctgttgtccaggctggagtgcagtggcatgatcttggttcactacaacctctgtctcccgggttcaagtgatccccacacctcagcctcctgagtagctgggattactggcatgagataccatgcccggctaatttttgtatttttagtagagacagggtttcaccatgttggccaggctggtctcaaactcctgacctcaagtgatccccctgcctcagcctcccaaa

SEQ ID NO: 68602 - DNA, 672 bp, Homo sapiens
cttaggcctgtcctgggcgtcccattccctggattcaccccagccccattcttggtctcattgcagctccttggagatccagtggtgctgcattccttgagccggcttttgccgaggggaaatgtggctgcatccctgtcccagaaagcttccctggcccctacttctctccacaaggccaagagactgaagagtccccagtttctgaggatgccctgaacccttggtgcctcatgccctagattgagtgtgggtttctccctcattcttgagtgatgataggaaagctggcctggctgccccatggcccgggacctttgtcccagagaagaaaggcaggcgcagggcatcactgttgtcctgttccacttcacaggagtggagggagtgacagctttccacttggccctgaccccagtccttcctactgctccccagggccacccagtgctaaaggtaacctcagccaagtgtgaataacgtccagggacttcggtggctcctgtgggtggcagtttctgaatctagaactgccgtccagggtttgcccttagtgcaggcgcctctggcctgccctccaggtttctgccacagggttcagggagtgatctttgcctcaagacagccgccagcttcaactacaccagataacggctgtggctttgtgtgtgt

SEQ ID NO: 68603 - DNA, 511 bp, Homo sapiens
ttttcagatcagggatgctcaacatgtatatagtaacaaaacacacaggatttgctggcaactgaagccccattcaataaatataatggtgtaaaagcaaatacgagaactgcacccaagcaaataacagcaactaaaaagcaagccacagtgcaaaaaatatactgagggaattcctacccagcacctgcagcaaaagtcaacaaaatctggcacaaagccacaaaacccattcctgccggatatgatgttgccacacttcaccactaggggacgacgaaggtcacccagcgaatttgggccgcgatgctcagaattcctggccccgtctgctttcccagacaacggatggcctctttggcacctgtaaggtcccccaaactgcaagatgctagaaagcaatctcaagggaccagcagccccaggcctatgaagccctcaagagcctaactcgttctcttccatccacaatatgggcatgttatattggggtgcccaagggccccacttt

SEQ ID NO: 68604 - DNA, 3925 bp, Homo sapiens
acatctagcaccagacttgggaaacactcgtctaaggggctgctgcaggcacaatttacggtgcggtctcttcctctagcccaggcccccagtggcttccccagaaagggcagaatgtggctcttacgcatacaggagaaaaacgcctagtgcggagttcaagctcagcagccactaccagagccccctctccaggctcacctggtcgcacccatttccccctggggctcccctcttctgaaggtccctgtcccatacatttcctagaggccaaggcccattggttttacatttcttacctaaggcaacccagacgtggctttttctttcacagggccgtggggggagcaccacttccccggccaaaaaaattgtttctgacccacactctgggccttattttccctgtctgtgaaatggagagcaacaggcagtgccactgacatttcacccgctgccgtgaggaggtttttaacatttgcaggaagtctggcttctatggggtgtccaggtgaaaccttaacaatctttaatcagcattctgattggcttaaggcttgtttggaaaaaattaagagttttgttcctagagttctccattgctaaagggtaattaagtccaaaagctgttttcaaagcgatttccaagctcaagggccctagatatctggacctagccgtgtccgggtacagggctggggggcgtggggggatgccctaagaggctggttaacagaaatatcacagtatgtggtacccacagcagagagcagggaagaatgtactgactggggtgggggaggccaaggaaaaccttctggagtagggtgtaactggcagaagaggaaaaagaaaccagacaggaactccgggagctcctggactgatcgtttaaggccgggcacaaggggtaagggatcaggcttcactatcgaccgacctgggctgaatgataccggttgactgtgtgacaaaagcaaatcaagaacctctctgcggctcatgagtaagccagagacttacataggacaacacataccctatcacccgaggatgagacgggatgacacacacgaagtgccccgcacagcgtcgttgtaaagcgttggctgttttcacctctggccgccccctgtgagcccgatcatgtgctttttgggcttaggtcggaggcggcctcccagattctacaggccattgaggtcgtaacaagcgtctccatcagagcctagtccttaactagctgcgggtaagtgcccggactaagtggcctcagtttcccctcgaagcaacgggaccaatcgcaccgccggcaggacatcttgtgcggggcgcgaagtgacaaaagtcaggatttgcagaagttcccactcggtaacgacccccaccccggcaaggagcacagtaggcgctccggaaacgccctccacgaggagggccgggccacttcctgcccccgagcgggctctccccggcggaggctcccaccgccgctatgggtaggccatgcagcattcctgagggcggggtgggcgcaggaagaaggtgcccgcggccccgccccctccgggcgcgctgggcggggcgaagcccctcggcgccgacggcccgccccgcggggggtgggcgcagctcgtcgcgctccgcacaaagtttgttttctccctccgggcgggtgggggagggcgcagagggcgcggggggaggagaggggatctgacgtcaggccgcgaggtgctttccagccgcgagctgtcaggccgagtgtcaggccgggcaggtacgcggcgcgcgcccccggcgccccccgctccccgccgggacgccccgcgccgagccggaggccgcgtggacccgaaagccgctgggaaaagtcagtgcagggagcagcagagggccagatgggggtgggggcgcgcggacaacttggaaagtttctttttctcggccggacggggagggggcgtcgtcctggcgcgtgcggtagggggtgtgtgagctcgggggtgtttgtgagtcccgacggcccccggggggtgtttgtgagtcccgacggcgctgcgctccgggggccggtgggggactgttccagcccccgggaggaagcccgcttggggccctggtggggggcccagcttcataggatcccaccccaggagagggccgatcctgcaccggacctgagtgagcgcgcggggggacggatttgtttggtttcaaaagtgcacgttgctaaccgccagcagggcccccccgccgccgagccggacagggggcggccgagagtgacagctgggggtgggggccgcgggaagggcccggagcgggggggccctggggagcccgcgcgagttcccctttcctttggaacaaaggaaagtctgtctccgaggcatctgtcactcccaggctggccaaggaagcggggcgcgtggggccggcgccccggagaaagtttgttcgcgccgggaccctcgggcaggccgaaggtgatccaagcctcccgcgggagaagcgcgtagtctccggggcagggggcggccaacatggagtctgggcgcagggctgggggggggggggcggcgcggaggtgggagcccagccccctcccctcccttcccctcccctccccctccgggcccagttcggagcacaaagccgagcgcgcacgctccgccgtccccgcgccccgaagagtcggccagccccgaactgccggagtaggggtgggaaccaaactttttcctgccccgggacagacacgtgagttttctttcttccagagcccccgtcccaccgggatggcgggcccgcgcgggagctggtgcgcggagtcggcccggggtgtggggactgtggggtgcaagcgccccgagcgccggacgattcctcgccgacccaggagccatgtgctccgactcggtctgggccgcgggggaggttgcgcgctttgtctgaactgctgggaatgcgggcgtgagtgcgcggcccgggggagtgtcgggaccagctaggggagttgtcagaaagttcgtgcgggagtggctgcaggtggcgtcgtgggagtctgtaggagggtgtacgggatgttgtgtcgaggggttgctgccacaggtcactgagggtagaactgattgttagtgtgatgacgcctggagttttccctgtcggagagatcgggggtggccgggtcggttggagttcgtgggtgggcgggtacagaagttgggctagttgtgtgggtcacagttgttcgtgctaggcctggggtctgtaagctgtgcgtgtgcgtgctgtatgcgtcggtgaaaaccctagggtttgtaaggcttgagcgatgggtccgggccagttatcctagcgctgttggttaattgcctggcgtgagtgtgtctgggtgcggtgtggggtgcatatgtgggaagcctcccagactacagatggccctgtgtggcggaacaccgaggtggagaagtttgtgtagactgaggggtcattccccagggcccacccggggaaccctgcagacagacttggctggcagccagggtggaatttgtacagataaccttgagtacttctcacagccggccagggctgcatcactgagcccagatcccagctgccctggccacctagaaatggctgtctgacctcagaaagcagcctgcagtggtgctctctgaggagtggcacgtctaaccagtgcctgtctcacctccaggtggcctgactgaaagggtagacccttccctcgaaagcctggcctagccagcccagagatctgggctcgggtccaagaagaggaaacaaaacctgggagatgccagagtctgttggccggcctgctggggagctgttaaaaggctgagaagggaggagccttgagatcctggcatcagcctggcctagaacttttgctttt

SEQ ID NO: 68605 - DNA, 3890 bp, Homo sapiens
tgagcagagaccgtgccgtctcaaaaaaaaaaaaaaaaaaaaatccactgtccagaagggatgtgccttggtctctggacttaccagcacagtgagcctggcaccacctggagggccaccggaaggagccccatccccaggggttctgagtcagtaggcgtggaatgggggccgagaacctgcgcctctacccagttcccaggcgatacggccgctgctgatccggaagctcactttgtgaaccactgacgcagcacatggtgaggacgctgtatgtgaacactcagatatcctgatacctaacccaatccttgtatttgccgcccaggagtccccggttgggtccaccttgctatacggcctcagaatctcatttcctcttttggggtctcagggctctcgtgtgccaaaagagggtgctgggcaagatgaaatggttagttattacagaagagttaacatcttcaacaaggccctacagaacttgcagggttaggggagaaaataagcgggctaaatcctgtggggcagcttggagctaccctggagcaaggtctgggctcagcaggcgagtaggtcgcaaggaaaggtagagccgctcctgccccactcgctgctcgaggggcagctgtggccgactgggcgacgctgacgtccagcctcggttttcccctacctcctcggtctccacagcgcctcctggcgcccatgtcaccgttctaccaagattgtccctcccctcacaccttaccgcgagcccggcggatgctgacgtcatttccgccacgagtagcgcgcttgcgccaaggcgccggtcgctgtttcactcggatggcttcgcggtcgccgattggctgcgtgagcacgtcggcgggagggcgcgcgacactgcaccgcccctcccttcgcggcgcctgctctgtagagccggcggaaccgggtagcttggccaggttgtgaggaaccgcagcgcgccgcaggaccgggccgctgagcctgcagccgccccgcgccgtgacctgcgaccctagaccccgactccctttggctcagcccgcgcgccccaggcccggcccgggcggcgcgacgggaggatgagcggcgggcggcggaaggaggagccgcctcagccgcagctggccaacggggccctcaaagtctccgtctggagtaaggtgctgcggagcgacgcggcctgggaggataaggtacggtggagtctgaacagggcgcgggtgcgaggagtcggctgggactcggggaacggaagactggcgcgggcctgccctcgtcctcgttccggcacaatcgagtagggcagtggggcgggtggcccaagggtgtcagagcaaacttggcgggcactgggcggacagctgggcttggagctccccgaagggtggcctaaggatgaagccccctagttatgcggaattggcgaggagcggggagaggcgttgtcattcgcgggcagggtttgtgcctgaactgggaaagggagctgaattcgattcggcctccgccttttatgtgcagtagggttttgagtaggttacttgtttctttcgaattaagtagcacaaacattaacagtaacagacttctgctgagaatgctttctacgtgccaggtgctctgcaagcggaatctcgtttaactcagaataactctgaagtggggtactgtggtacattaaagccttttgcacatagtgaggctcgctaatcttgagctgctgttgcttgttgaatgtaaaggaccgaatactttgataagcatgagtcaagaggggagactgagaccacccgctgggtgagtgtgaggtgtgggggtggagaaacgccaccagatatgtgcgagaattggttgggacttcagaacgttcttactcgtcccattcggaggatgcttcgtaactctgctccatgatctggaaggggccatcacaaacagcttgattccaggtagcttgaaaagcgtattatatttgcagtcatttcttggttttctgggctgccgaagtggattttccttcctgaagttcctgtaaagggggatgggaggcacttcctgaaggtgcccttgttctgcccccagccctgcccagctcttgcaaaacctgcagtctctaatctgctgtgtcatttctttcttttcttgtataaggactggtttctggaatctagggcagatcagaaacctgagtcgtctgtgttcttccattaaacttaaatatagtggcacctgcctccagcatttatggttctaatccgtatgtgcggccagtagcacaattattatcacagtcatttcattacaggccatattatatatgcacctctagaattttgatttagagcacagattctggaagtgatcgcttaatgatgtctaaatgtatctttttttttttttttttttgagacggagtttcactcttgttgccctgcaacctccacctcccaggttcaagcaattctcttgcctcagcctcccaagtagctgggattaaaggcgcccgccacaacacccggctaattttttgtatttttagtagagacagggtttcaccatgttggccgggctggtcttgaactcctgacatcaggtgatccacccgcctcggcctcccaaagtgctgggattacaggcttcagccaccacgcccagcccctaaatgtatcatttctaccacattttagtataagtaagaggtgaaacaggaagcacatactgttgcctttggggggaaacaaatttcctggatatgtttagcagaaaggtttaatattctccccttttgctgtcttgtggcacccactccagataattcttgcattttctgtcttttctacaggatgaatttttagatgtgatctactggttccgacagatcattgctgtggtcctgggtgtcatttggggagttttgccattacgagggttcttgggaatagcagggtaagtcttgggtatcttatattttcatggtatcatttctttttaaatagaggctttttttcctgttacaggaaaggccattgctgctctggagctgtgtgtgtgtgtgatgactaaagcaaagaagcagccctacagtggcactcctgggtctggtgcaccactcctcaggagcatctcaggtcaggcaggttaccttcctgccttcctgaaggctgggccagtccattcattcatgggtctaaagtgacctcatgcaagaggctatgactacttgttcgtggcatgcactctagttctgctgtgacctttgtacctgtgcgagtttgggaagtaggaacttctgtatttgacgaccatttcccttgttcctggcacagtgcttaatgtcctaaaccttggctttggtagaagttatttcaggtccctccattttgtttttttgagatagggccgcactttgttgcccaggtgggagcacactggcaccatcacagctgactgcagcctcgacctcctggactcaaatgattttcctgcctcagcctcctaagtagctggaactacaggtgtgagccaccacacctggctaatttttaaaaattttgtagagacaaggtttctctacatttcccaggctggtcttgaactcctgggctcaagtgatcctcctttcttggcctctcaaagtgttggtattataggcatgagtcagcaggtctggcatcggtctcattcttttttttttttttttttttttttaaagacagagtctttctctgtcgcccaggcaggcgtgtactggcgtgatctcggctcactgcaacctctacctctcaggttcaagcaattcttctgcctcagactcccaagtagctgggactacaggtgtctgcccccatgcccggcttattttttgtatttttagt

SEQ ID NO: 68606 - DNA, 2180 bp, Homo sapiens
aaaaacgacagtttgagctagttattttgggggagaaacattcacatatttttatagctgttcatttggaactttaaatcatgggaggcttcttaaattcagcaccactctatcaatgttctctttctcttcttgctttatcttaaatactgaaatgttcaagcccaaccttggggcaaaggcagaaagcctcggacagaaagccccggaatgaggtgagtgctagccaaatctgctctgtcacctccaagtccagcccgcccagctagcccagtcagcccagtcctgctctcttggcaggaaaggaaggctaataatatcccctgagggccagggtaagggggggggggggcgcggcgggggtgatctggatgccagcaggcaaggatcactcttgttctgtcagtaagccaccaaaggaaagcttccctgcttcctaatccacggggctcctagtctacctgtgatagggaggccagctctgcaggaagaaaaaaagggcttcatgacaaggaagggggaagcatttggattgggaagtgcagaggtggttatgcgaggttatcttaataaaatgcttagcaagatccctggcacacagcgagcggtggaagaacgttagctcttatattaataacactattattattacagtaacacctcaattgtactccgacaacaagaaaatcttttttgtgcagcctacttttacgacgttcgagagcaacttcagagatgacaagtgatttcaaaattttttcaaaggtacgagatcaaattccaaccgcactggcctgagagcccgagaccctgagttgagagctgaccctgccacttgtcagctgcgtgaccttgggcatggcacttcacctttccgtgcctcagtttcctcggctgttaagtggggctaagaagcctctccccggtagggtagtcgtagggtcccgttagaggatgccctctgctgctctggggccggacgggtgcaagggctgctcacggcccctcttccaagcatctgggctcttggagcgggcgaggtagatggatgagcaaccccaaggcccaccaagctctgccgcctgcagagccagagcgagagaagggttcgcgcctgcggggggcgtccctgtgacccagggtgttgagcccggagggaggctctcttgctacccacacgctgtcgccggcgggctgggcgcggggagcggccgaggaaagccgggctgacctgggtccggcgggcgggcggggcggggcagagggccccgggggcacgggggaggcaagcagcacgggccaccagggcctcgccgtgccgcggagatgatgcggggaaggagcagggcaaaggagcgacgcccccgaatgcggcgccgcgcgccccccgcgggccgggcggaggcgctcactcacctgaggcgcgggcacccgccgtcagtgcagcagcagcggcggcggcggcggcggcggcggcggcggcggcggcggcgagaggggcgggggaggtgctgcggtccgcgcaggcgcgccgaggacgccagggcggcgcatgagtgctgtgcccgtccacctcgggaactaccgagaagatggtggctgagccaggagaggccggcggcgccatctttgatgtagtttttcttgctgcggagtttcctcagagaagaatctcagattttggaggcgctgggcggcagggccattgagctctgcgtctggagcgcttccctcagttccctgagtcgcatccttatgaagcccctaagagctcttgcagggtatggcatcctccttttaaggtgacctagagccatacccaaggtcacagggcgcctagcacagtgctcggcacgtggaaagagcttagtaaatttttggtgaatgaacatagtaatttaagaactagagtccaagactcagggctccgaattaccagtcctccattgtatcacccctattacaaccgtcagccaaatcatctactttcttgaatgcaacattagagatggaattttttttcccagaatgattgcagatattaaacttaatgacccaacaatttaacaccaaaatgtacaggacacactcttcctctatttattatctattatttctttaccattaagtaccactgactaaaagtttttttgttttgttttgttttgttttttgagacg

SEQ ID NO: 68607 - DNA, 628 bp, Homo sapiens
gggtgggtatttcttaagtcttggatttaccaaaacaacaacatatttcatggggatttaattctcagtctactgtgcttctgtagaatttacatctagaaatttcctatcaactctgagtacccataacatactatttattgtggggagaaaaacaaatcacctcatataggtcttaccctcttggaccataggctttgaagggcagtttgtatcccaaaggctatcatggaaaacagcctgaactctggtcccctcaagagacaagcttaccgagctgtactgacaccttctggaagcactgggtactttcatccataaaggcctgcagctgtttcactgatccttgcagttcatccatctgtagaaaaaagacagctgtgagctgtaaaggtccatggcttcttggatgttcctcaaacctgacaagcaagctcttgctcaggagctctgggcttgctgttctttcagcctggaatgcttatgccagataattctgtttgttcctccaaagtcacaccacattcttctccaggctgctctatgctccaggaggctgacccatgtaacctctaccaacaggatgcctaagtgggaaggagctgaacgagtcatcttgagttggctc

SEQ ID NO: 68608 - DNA, 1759 bp, Homo sapiens
taaaaagatatgaatatatgcagagggacaaaaaggaaaagataacaaggagggctcggtcaaggatctgaatcccccacggtccttatgacaatatcacacaaatccaggcttggataataacgactgtatcacacagatccaggcttagaaaagcaacaactgtcaactgttaaacgcttattctgtgctaggacctgtgctatgtaagcgctttacttgcatcgttattccacttaatcccttccacaactccgtaagcaccattaactccactttgcagacaggggaactgaggttcagaggggcaaaaagcctggcccaagcttgtgacacagccagcctgggggcacaggggcaattcgaaccccagccctctacccagtcctcacccctgtttctggagcctagacccctggcacggcagatacgtctctaatggggtcggtaagggggactgccctcgggtttcatttcacccgggaggaggtcgcagcgccctcggggacccccagtgtccacggtcggggccggggctgcggcgggtcgagctgggccgacgggtacgacgccgaagagattagtgcggcggcgggcggggccacatcagaggacaagtctgtgacttcctgacgcccgtccagtccggaacctccgtacctgaaacacaaggccacgggtcgctctccacagccccaggtcactcctggacgccttgcgcacccgcagccgatactccctgatcagggtgaagcggtctccaccttctacgtcacggtcaccgcctccgaaactcccgccaaccaagggcgcatgcgcggccgtcagtttctcgggcacgcgcgcgcagaacgcctgcctccggcgatgcacatgcgtacaccgccgcccgacgcgcatgcgtacaccgccgtccaacgctcctgccagctccgctcctctagtccaagtcctttaggtcctgtctggccacgtcaccacctccccgcaacaccccgcccgggagtccctttccgggacccgccacactatcgtgtccttttgcgcccgacggccccagagcccatctaagatgggggaaacagaggcccggagagattcttgccggaggaatacagcgcctcaaagggcatctgatgccctgtccccgtcgctaggctctggttcccactccctttatctccttaactcccaaaatgtggaccgtgactctccccagggtggactggagctctgagctcagtttgcctcacagtctatcccactcctgctctaggactttttctctctcatttccaggccactccctcaaacggcttgctttacttgcttggtgggtgggggcctgccctcgggtttcatttcacccgggaggaggtcgcagcgcccccaagtggtcgcagtgtccttagtcggggtcggggggtgcggcaggtcgggctggtccttaggggtaggacggggacagggcatcagatgccctttgaggcgctatattcccaggcgctgttccctctgcctgggaaggctttccctgcttttcctagctacatcctccaatttttttgtattttgagacggagtctcgctctgtcgcccaggctagagtgcagtggcgcgatctcggctcccggcaacctccgcctcccgggttcgggttcaagcgattctcctgcctcagcctcccgagtagctgggattacaggcgcccaccaccacgcctggctaatttttgtatttttagtagagacggccacta

SEQ ID NO: 68609 - DNA, 1213 bp, Homo sapiens
cagcaggaagttgtgcttgaattgctgggactcctgcaccagcatgttcttctcctggctccagaatttctgctccagcctccgctggaggctcagactctgcagctcaaactcccgcctcaggagcgccctctgctggtcctccttcagctgccgggggacaagagcttgagcaaccccagggccctgtcctctcccccacccctttctgggcccctggacaggggcagggaggaaagtctgggtggtgcctgtgagtgatccctgccggggatcccaccacacgtggcgcaatctattcagatgagcactgccctctgctcctgcaaaaacagtgacacatcattgaaggagctgggatttgaccctggctctaaaaaaccatgacatcatatactgagcacctcctgggcaccaaatgtctcacacgaatgctcatgttcaatgaggaacctgcgagggtgagcgatgatagcagggaggggtgacgcatggagagcaaagggcgtgccagggttgaggacagctgatgactaggcaacaccctaggaagcaatgcagtgtcatgcctaacagagggacctggattagaggcccagccctgccacactctggatgtgcaaccctgggcagagcactccagctctctgggcatcagtttccccatctgcaaaatggtgataagggagggcacaaggattaaaagacataatgggtagaaagtgcattggacaggcccaccatacagtaagggcttaacaaatgttattccagaactattatcttgattagaagccaggcctgatgagggcaccatttcataaatgggaaactgaggtcctgagagaaaacaggactggccccaggtcccacaggccgccaatgacagccctgttacacaactaatgcacaatggcaaggacaataacatcccagcagggcacaggggctgaagactcaggtttcccttgacattctttcattctttttttttttttttttttttagatatcactctgtcacccaggctagaatacagtgggatgatctcggctcactgtaacctccgcctcctgggttcaagcggttctcttgcctcagcctcctgagtagctgggattacaggcgtgctagtgcacgcctggctaatttttgtatttttagtagaggcggggtttccatgttggccaggctggtctcaaactcctggcct

SEQ ID NO: 68610 - DNA, 703 bp, Homo sapiens
acacagcaaacgtggcacagcagctctccgccccgtgaccttgccctcctcatgctgggcaaaggccccaccgaggttctgtaggtcctgtcaacggtgaggaccagcagagagggagagctgggggttgggggggggcactgaggcctgtggttttattcatgaccccccaccccaccccaccaatacccctctgctccataaaaccacaggagctcaaaagccctgaggattcagctggtcaaaagccacatttaacagaaggggaaaatgaggcaccaagcggtaggggcaagtcagggcatggaccacggagctggcagagcaagttggggaagtcccagaggtaccctcctaggcagcgcccgccccctccccactcgggtccatcaagccctccaagacgatgccagggaaagcagcattctgataacttcccaaaaccccccagaacgaccccagcacatggggctcagggtggtggccagaggtgtccatccagctcaggccccaggcccgcagatgagctcagcgctccagctgcagcgtggggagaggagggagggaagggcaagagggatgctgattggctaattcaaaccccaacagaaacggcccctcctctccgcccagactccggagagccacacacccgctccccacacccgcctccccgccgccgccgccgctgctctagctccac

SEQ ID NO: 68611 - DNA, 839 bp, Homo sapiens
aaatgaggacagtttatatcagagattttgggctttgtccctgaaagatggataaagtgtgtttggttataacgtgaatttatttcttcattcttaccttactccaagattttcaaaacgagactcatcaagacaaggcagtaatgcgcctgtgatttcattttctatggaagaaaaaagacaaattcaatgtatacaacatatgcttttcattttctttcaatttggatacaccaacatttacccagatccacataagtgagtacccactgcaggcaatggattgtgccaagtaccacttttttgatctgctacttgtaaagacttaattttaattaaataactaaaccaagaagcattttttgataaatcacgtgaaaatttcaaaattatttgtgtaaattagttccaagaaaaaccagttgcaaaaaggaaagtgaaacccgactacctgttggggttttgccaggtcagcagctttgagttggggagggaaggaaacctaagtctattgttcttagaattaacaaggtttgagttggggagggaaggaaacctaagtctattgttcttagaattaacaagttaaaaccgtgaattcaagagtgcttaaagtgttgatttttctcaaacctcctgggaaagcactcaatactctgatttggaagaggtgtgtgtgtgtgtgtgtgtgtgtgtgtgtgtgtgtgtgtcctgggaaagcactcaatactctgatttggaagaggtgtgtgtgatttggaagaggtgtgtgtgtgtgtgtgtgtgtgtgtgtgtgtgtgtcctgggaaagcactcaatactctgatttggaagaggtg

SEQ ID NO: 68612 - DNA, 1769 bp, Homo sapiens
ggcaggagtcaaatctcacacccaccacaaaaagttgagtagaattcacaaggatggatgcttggatacgaatcagtaaaatatgattaaaactcaacctaaacacttctccaggggatgtggccaaactgtggcatgctggggattcagtggtcaactgaacaaccccaaggttcagattttggaggggaacctgcttttaaagagcaaaacatgttccttaccatgttctgcaagtgcagtcaacacacgcctatcgggcgctgctgggatgccaaggaaggtgatgggaattcagagattaaccaagccagttccttccccttcaggaaaagcctcaattcagggaggaaaccgaaacctaaaagccccagaacatcctctgatgtggcaagtgttcaaggagctgcggttagcgcggaggggtcccgcgagcctggatgacagcaagccgcccaccaaggtctggggaaaaatctccttctaactaaaaaaaagggacccgagtctcgcttgtcccgcgccggggtggcaagttagtgaagaaacccacgagagtgagatcccaatctacgactgcccctcccaggtcctcaatcccgggagcctgctcccatcctacgaatcgcctatcccaggcgaccccatgtcttcttcctccgcctcggggagtcagtcccgggagccccatgccgcaggccctcctgggaacccccgccgcagggctccctcccccgcctcgggtcttcctttcctcggcgcccccagcgcaggtccgccctcccgggtgcctcccgccgcagggctcgctcctcggcctcggtcctctcgtggggccccctccctcagggcgcctggcccgcgccccaggtcgccgcccttcgcccctcagcccctccggagccgctacctcggatgttcttcagcagcaccggctcttcaaagccaccgcgcctgaggaaggagcacacctgctccggaccccatgtcttgtagtcgggatggagttccaggcccggggaccagtctgcctctgcggaaggggtgtttgagggggttctcgggctgtcatcgcaacggggacgcttggagggctgctcggaatcggctcgctgcatggctacacctggcgtccggcacagcagtcaagaacctcggcgccggacccgcgcgcaggcgcactgacagcagggccctggcggggagtccaaggagtattggcagcctattggcctcctgcgcaggctcactgacagttgagcccttcgggcagggcagcctagcggctcttgccttgggctccctgcgcaggcgcaatggcagtccagtcgtcctcaaatcaatcccgccagggcgctggacgtgaacgcgaaagggcgtggctagaagcagaactgagggcagtgctggtggaaagggggaggaaagagcgcgcccggcaccgcacccccaattaggggctcgtctagtgaattgggggtattctccttcgaatgagtacactacccgccgcaccttggccgggtttcagatgccccaaacttaaaagaagcctaaaaggccgtcaggctgccagcaccttcccagtgaagaggaaaacagtcaaggtgctgaactggaagaacccggaatgatttcaaatgtgacttgagggtgtcttcattccacagtattgctggtcaactagagggccctgggatacctgttgtctggtgtccacacaggaggggacttcagacttctttccaactagagacagagccctccat

SEQ ID NO: 68613 - DNA, 1185 bp, Homo sapiens
cccagggtggagtgcagtggtgcaatctgggctcactgcaaacctctgcctcccgggttcaagcgattctcctgcctcagcctcctgagtagctgggattataggcacccgccacgacgcccaactaatttttttgtatttttagtagagacggggtttcaccatgttggccaggctggctttgaactcctgacctcaagtgatcagtgaactcctgacctcaagtgccttggcctcccaaagtgctcagattacaggcatgagccaccgcacccatccagaacttttattttctgtttttgtttgttaaaaagtataatttattgccatacttattatattttccctaattccctactttcaaggggcctttgatcttgcgctaggtcattagttacttgttcagggtcaacatggctggtaagggacagagagaggattcaaaggcagtgctccctcgctccaaagtataggctctttccagtttgccacttcatttaactcctcttacagtcctaacgatccttttccatcataattccacagcctgggaaccaacacccactggacacaggccctggactctggccatagtgagagaaatgactgctcaagctgccctcttctaaagtcaatctcagtatggttaggactagaaaaaacaataagatcaattaatttaaggcccactgcccaatgaccttgaataagcccagcaagctttccctgaccttatctatttaccttccacccagccaggcaagctgggcaattttatttctggcagcattcacctgtggtttttacatctcttcacagcttccttttcagccagtgttgctggttctcaatgccagctgccaccaccctctgcatctctgttttactgccttttatcatttactgaacttagcctcctcaagactttttttcccatctgcccaaattgcgaagctgagccaaaaaaatttttttttaagtattgattttcttacctgttaaagataatgctcaagtaggacaggcgcagtggctcacgcctgtaatcccagcactttgggaggccgaggtgggcggatcacctgtggtcaggagttcaaaaccagcctggccaacatggtgaaacaccgtctctaccaaaaatacaaaaattagccaggtgcacgtctgtaatcccagctactc

SEQ ID NO: 68614 - DNA, 1362 bp, Homo sapiens
aggacgatgctctgacggaggaggaaacgtagggctgagatcagcttcgtgtgcacattggctttgatcaaactgctgcacagcgaccggcagctccaccctggtgaagcagagggtggaggttaaacggctcagaccctgggtctggctccatctctaaccgtgtgaccttgggcctgtagcttaacccgtctagggctccgcttcctcttgcgtgaaatggggatcacagaaggggttcagacggaactgagggtccatttaaagctctgggcagtgatgtcttggcatgcagttcattttcactttaccattatatttgttcttactgatttaagggcagcaccatgacttttgtggcgcttggcggggtagagggaagtgtggtcaggaagcctggggtctgagcggcgcgggacctaggccgctcctttcctgagcttcagtttcccgcctcaaaatgatgggtggattggctgagctacacccacctttcccgcccctcggcgcttggctgcgcagcgaccctcctaggtggggaaactcccaccaccccataggccgaggaaggggcggggcaggggtggggcctggcgagggtagggtccggccgccccacctgctgccgctcacctctaggctgtagttgcctcggatggcagtaaagtcgtccagggcttcggccgcgctcccctcgtccaggttcagctcctggcacagggcctgtagcgcctccccggctgcggcgaccaccgccgccccctcagcgtggggcttgtcctcgaacatcccttcaggccccgcgggctgcgcgccacggcccccgacttctttctccctcccaggcgcgctacccacaaccacctgcgccaaagcgcgcgaaaatctgcagctgcgggacgtgttgtcatccaccgtctgcctccgcttttctcctcaaaaaaagtccgtttttcctccggagctcctagcagtccctccccggaaatgtgataagaagatgtacctcagattctgaaagacctgtccttggcccttggctggtcgcggggggcccagccggcgggacagaaaaagagcggagggatcctcagcccgcgcgcagagcctgctgggaggtgtagtccatctcttgggagatgaagcccgcggcctccccctgtcttcctggttaggctcttgggttttggggcagggctgggctgcctactgcgaggtggcctcgtgcagcgtagtgagatgcctcctctatccacgggccctgggtttgtcactgtccctgggcgccaaacataatctgagctgtaccccttgagttaggagatggaggctggaagagaaaaaagtagcccctggacgaag

SEQ ID NO: 68615 - DNA, 2423 bp, Homo sapiens
gcggtatctaccaaaaataattttaaagattagctgggcgtggtgtcgcaaggcagcagtcccagctactccggaggctgaggcgggagggaagattgcttgagcccaggatgtcgaggctgcagtaagctgtgatcgcaccactgcactccagcctgggcgacagagcaagatcccgtatcaataaaaaaggaaagaaaagaaataatgcttgtagagcgttcggcacagtgtcgggttatactgtaaacattcagtagttggcgctagttattagagcggtgttcctggatgagccacctccatgttgagcctgtaaaactggcctaatatgttctctatgagtcactgcattgctctgcaaatcagataaaacgtcactcgtaggtcagttattaacaaccccactgataatctttggaaaaaactgacataattttctttttcttttttttttggtgagacggagatttactcgttgcccaggctggagtgcaatggcgcgatcttggctcaccgcatcctccgcctcccaggtccaagcgattctcctgcctcaggctcccgagtagctgggattacaggcatgtgtgaccacgcccggctaattttgtatttttagtagagacggggtttcaccgtgttgcccaggctgatctcgaactcctcacctcaggtaatccgcccgcctcggcctcccaaagttctgggattacaggcgtgagccactgcgcccggccagaaactgccacaattttctaaagaggaaaaaaaaatcccttctaagctatcccctcccgacgagacccttcctgttcctttaaaatgggccgggcagcagaaagacgagtgagtgacagcagacaggccaatcagaagcggccccgtctcgggcccaccccgaggcctggcccaaccgcgtcccggtagctcccggaataggagcgttgcgagacggtcggttccaagtgggcctgggcgcgggggagaggcgggtctgtcctcgggaactgcaaggccctgtgagcgggaggactgggatcccggccgcggctgctggaagcgtcgaagctcagcggggccgcggacactgacctgtgcttagaactcatcctggcccgcagagcctgccgcgagtccctggcgtcccctgtggcgggctcttggagccactttcccgagcggaagtcagcccgcggctcggactccggcgggacctgctcggaggaatggcgccgccgggtgaggagttgcgcgtggctttggggagagggctgtcgcccgcgggaggttactagtcgccgctcgagagccggccaggcgggatccccttcccctgcgggacaggggcatgggcacaagctctggctggggcgctctcggatcgagggtccgaaggagggctgcgagctggtgggagtgcccgcgacctggcggggttggtgcctgggggaggggtgcagcgcggagctacgggtcgccccgaggctcagccgtggggaccgcggacgcgcttagcctaggtctggcctcattcatttcactcgcgcgggcttctgggccaggcggcctaaggttctggtcccggcgctgccccttactccgtgtgaggttttgggcagattgtccttctttgtgctgtagtttcccattcagtgaaaggggcaaagaaaaccctcacttctctctgggagcctggagcataagttctcaagtgacactctaggtgcaaacttgcagtcggccacgtattcattgtgtaacccaaagcaggttacttaacccctctacacctcagtttctcatctgtaaaataagttagtcaaattagtcacgttatctgcctcgttgagttgctttattaagtgaaataatcttcgtgcttagtttagaacagtgcatggccctaggtaagaactaagttaactgcattggaagttactgagtagacgctgtgcagggtggaatttcatgtagcctcatcgtaactttggaagcatgtactcttgttactaccatttgacagatgagaagttggaatcccacggaagggaacttacttgcccagggtgacacatgaatgagtcagtggctcaccgtttcattatttgagaagttcaggatagtaaagtggttaaaagcagactttggattcaaattgcctgaagtttgattttcagtgatgtgtcctagggcaggtaactacttctgagccttactttcctggtctgtgaaatgcagaaaatagccaccttgcttagatgttgtgaggatttaatgatttggtgtgtgcaaagcacagcatagcgtgggcatacctaacatattaagtgctcaacttttagtcagaaaagttactgctctcgttaacatggagtgagaagattaggattctgacacaggtgctgttttaggggaattta

SEQ ID NO: 68616 - DNA, 541 bp, Homo sapiens
ttttgtcttgtttggaaattcaggtttcattttctcaagtgtatgataacagcaagcatcccataggtgtcgttgaatactctggggcttgtctctctgtaaattgcgactctgctgttttccaacttgtcatcttaatggaatgagtttcccatggagagaatctaaattgttatgttcttgacataagcagacagattcttgctctacattccctgacatattgacttgataagtggtggttttacacaagggcccagtcatctcttaggaattaggaaaccattcggggtggaagcagcaatctgtttaaccaccagggggcctctcctctcccagtttcacccagaaaagcaccatttatattttccaaattatctgtattaagataatagaatctaataagtcttacatgtatacatctatcatgttccatcttaaaaagcttatcttccagaattatagataaaaatatatgaataagccataaaaaagaatgaagtgcagatacgtgctacaacatggatgagccttgaaaaca

SEQ ID NO: 68617 - DNA, 1749 bp, Homo sapiens
acccgttttagctcaccagctaccagttgtgactgtgctctgctctgggagatggcttagctttgcataggacaaaattctaatctagtttcgcgcagttcttacgaatttgttacaatgagacgggccaagctatacagcccattgcgatgaataagtaacttttttttttttttttttttttttttgaggaagagtctcattctgtcgcccaggctggagtgcagtggcgcgatctcggctcactgcaacttctgcctcccgggattcaagagattctcttgcctcagcctcccaagcagctgggattacaggcgcccgccaccacgcccggctaatttttgtatttttggtagagacggggtttcaccatgttgaccaggctggtctcgaactcctgacctcaagtgatccgtccgcctcggcctcccaaagtgctgggattacaggcgtgagccaccgtgcccagccccgagaagtaatttcttttgttttctttttaattaaacaaaaatgttgctgaaacgagctgagtgatataggagcttaaagaattgacaagctctagatttcatttccccaaacctctttgtccagctcgaacccacagaacagggacaaaagtcgacaaaacccagcggtgcctcacccagaaacctggcaacgcgggcggaacagagccggttggttgctcagtgcgcgtcacttccgggactcagggtcgcagggaactacttccgggggagcggcgcggcggcgcgggaggtgagtgccgcagctttgcggtggggtgggaaccgagagagagccgtcctcggtgcggtggcctggctttcccggccggcctgtctccagcggcgccgcttggtgggcccggctgtcgctccgctcagggcctgaatacgttccctcggcggttgttcgaaagttacttccggaggggaatttgagccccccgggaggcggagggcctcgcctggggcagccctgcgctttcgtgcggaggctgggccagaacccagggctcctcatggcctggtccgggcctttcctcccacgggtggagcagtaggagaaccctgagctccagagtgaatctggccagggttcgaatccgtatggctctcttaccgtgggcaagtcacggttcctctctggccctcagtttcgtcttctaaaatggacatacacgcttgtactgcggggtaaaccgaggtggtgaatgtaaagcccttagtaggtgcacagtccatgtttgttgtacgaattctaagagaagcgagaaatgaatatgagaaacatttttaaaatggtgacaacacatttagattaataattatattttgcagggcatctgcacaccagtttcagcccaccggctaccagtgtgactttgcccagagaggtggcttagctttgcattctaatctagttttgcgtggttcttaggaatttgttttaatgggacgggccaggctgtacaacccattgccataaagcggtaacttctttttctttcctttttttttttttaaagccattctatttatttatttagagacggagtctctctctcgtccacgctgaagggcagtggcgggatcttggctcactgcaacctccgcttcttgggttcaagcgattctcctgcctcagctttccgaatagctgggattacagacgtgtgccaccacgcccggctaatttttgtatctttagtaaagacagggtttcaccatgttggccagg

SEQ ID NO: 68618 - DNA, 2353 bp, Homo sapiens
acatttggattcagaatgtcacattctgcattccatcctggaacaccctgacttcatgcgtgtgtatgttggtgtgttttaaaaactgggtctcactatgttgcccaagctggtcgcaaactgccgggctcaagcaatcctcctgccttggcctctcacagttctgggattatgggtgtgagccactgtgatggccttcctatgtctttttaaaaatatttgcatacattaaactttactctttgtgctgtcaagatttttgggttttgacaaatgcttaatattttgtattcctaattatagtgtcatacaggatagtttccccttcttcagggattatttttaacttctttcagatttcacctcagcattcctgttggccttcaccaaaatatatctgtaagctgagaatttaccacctccacagctaccaccctggtgcaaatgtgtcttttgactgttaaagtagcctcttcactggtctccttgctttcagtcttgtcccctacagtctgttgtcaacaaagcagccagagggatcattttgaaatgagtgagaccatgtgatttctttgctaagaaccttccagtagttcccttttcactcagagactggccagagtcctcataatggcctgcagcttgcttacttgactgttcttgatcatgatgcttattcctgcctcagggacttggcccttgccgtccctccatcctgggatactctggcagatgtttaaatgacttcttcctttgctttcttctttcctctgttgaaatgtcacctttgcagagaggcccttccccgaccacctcatattaaatagtactatcctcttcttccttcctgtatgtattgtaatactcacccctgacattgcatgtgtatgtgtgtatgtgagtacttctaactgaatggaaactccgtggcagggattagaccagtgcctggcacatagtagattcacaataaatatttgtccaatgaattaatgtcttacgtcaccagtgtctggcattcaggggtgaacttcgcagtgtccagtaacctcatgaaattatttgccacgttcagtaataattaattatgcaccttttgttaaattctgatggggtatgaaagtcccctggtgtataaaaacctctacctgtaagcaagtctggagcaggacagggctagagaccaggatagcagctctgccctgactcatcaggagagtctagggaaacctcgtggcctctcagctcctccttgtcgttaaatgatgactctgttggttgaggcatctgctcttgctttcgaggtgggaaacagaggcataggcttagtcatttaccaaatatttatgagtcaggacctggaataaactcaagatgtacccaagatccttgctgttcaagagattacaatggatcaaatagaaaacagtagattccagtgtaatatttctcaaacaataagaaataacattctaaaatttgatccagcacatgcatgctcagatgtagatggatgttgaaaaagcttcaggatataataccggcccttaatgtgatactctttgatattttctattgttatttacctacttaaataaagtgctggctaataaaaaatgctggttgcagccccctaaatggttttcctggctcactaatgggccacagcctgcagtttgaaaacgattgacatactgggtaagcgccctgactctggggaagccagcccctttgaatcttgcctttgccacttatcagccaggttatccctgggtaggtcatataacctctccaagccttggtttcctcatcctcattagtaataccacctcccagtgtggtggtgaagtatgcgagttgctgcctgtaaagtgctgttcgcaacacctggccgttcatttgccgactgctgctgctgctggaacaatggccagggaacaaaacctgtcacagccagtcgaaggggtgtctcctagttgagatctgcaggatgaataggacttgtttgactttggtcatcaggaaaggaaagcccagaaatactggcaggagggctgggaagtaaagcacagaggtgcagagagaactagatgagagccgtacggcgcacagtgtgtgtagagcagtttatgtttccagaaccttttcacaaccaccctcctgttacacctgtgctgtccagtagggaacctttggccacatgtggctttttattgttaattagttaaataaaatgaaaaattcagtttctctgtaacatttaagttttcaacagccacatgtggctggtggctaccatttggagaacacaaatacagaacatttccatcactgcagaaagctttattggaca

SEQ ID NO: 68619 - DNA, 2166 bp, Homo sapiens
tgattggtagcgtattccgatgtccaaggggtaaatactcccactgtggctgacatggagctatcagtgtgacattcttgaatatggagttgggaagagatgagcacagttggttcttgcaagtaggtaagggccagctccagcgtgtcactgggtaaatgtccctgcctcccccccgagcccagtatggccagtaaaggcctttagacatgtctaaggaatggaagagggctgagaaacctgctcctccagctgggggcccgccctgagccctgggaagctgcggttaatctttaagccagccttgcaaacaagtgcggccatttcaccagcccaggctggcttctgctgttgactggctgtggcacctcaagcagcccctttcccctctagcctcagtttatcaccgcaagagctaccattcatctagcacaacctgaccatcctcacactggtcagttccaaccttcccaggaatcttctgtggccatgttcactccggttttacaggtgagggggctgggctgggaagctgatcgacttgtccaccccacagcagaggggcagctagcctagatgcgaacctagatcagtgtagagtaaggctttgctcattcctggtctcctggaaggtatgttgtacccagaggcctttgccttccacattctagggtgctcctcccagctcctctcagcagggacctttgcccagggaatagaagcctgacctgtctgggccttaatttcccatctgtgaaatgggagaactttcaaagaaggaatatggaggcaggtgtgatatttaaagctggacccaggcccacctttccctgtgctaggattccaggacaggtaaggagccaagggtggggtgcccagccccaaaaggatagccctggagcctgcgccagggggtaagaggggagtctttgtggcctaaagcagcatttcctcaatgtcccgtttttctgctacatttcctgccctggttcagaggtacttagcctctttacttacttggaagtgtgactgccactcagatgccctggtcagcccctcctaagcagtaataattagaactaggggacttccgatgggctgccagggatgttttgcccttatgcacttaaaatgaacccgtaactattaaaataaatgtcgctcctccccaccctgtccctcctgccccagcccctactttgagaaactcaggtcaaggctaaagtccaaggcctggttcttgtcagtgcctcagtttccccatctgtaaagtggggcgatcttccgccgctcaggccaggtggtggttaggattaaaccctgaagtcgacctgagcagcttagcatggcgcctggcccagagcgggcgctccacgcccgctgatattattaccaatcgtgatttcgggagaggcggatctggggcgtagaaggtgggtgggttggggagggcattttggcctgggggcggatggggcccgcggggtgcggcgccctggcggagtgggaggcggggcttctgtgcccggtgtccccaccccgcccggacccccagctcgggccgcccctgggtctctcccgggtcaccggcggggaatccgtccccgcgcgcttcctccttcctcctcctcccggctgcctgccgggcccctcctcccagctcgcgcgctccctccctcctcttcccctccccgggccgccgccgcctcctcctcctcctcctccctttctctctcgatctgtctctcccggcccggaatccattccggcctgggagccggagcggccaggccgccgtctgcccgtcccgctggacgtcccgcggtccgccctcccgtgcgtccgtctgccggtgagcccgcccgcccgccggcccaggtgagcgccccccgcccctccgcggaccccccgccccggccagcgcgggggagcccccgccccggaccaccctggcgtcggatcgcgggccggcggggactcctgtccacccccccaattcccaccccccctccgggccaagccgcgatacccaagcgccgggcgggcgcacggggccatgcccggcgcggccttttgttgtgatgcagcggggggagggggctgggcggggggggcgcagggttcctggctgcgtggggaccccctccagctcatgctccccatagg

SEQ ID NO: 68620 - DNA, 760 bp, Homo sapiens
cacagtgctacccgcatgaccctcagtgggccattcttgctcaaggacgttctgctcggagctttctcaggctttctctgggagtggggtgggctgctttatcctctcacccctcttccaaggccatctggctgctttgtgagagagatccctgggggtaggaggtggggcctgtgagtttcagcccctgattcccacctgcccagtgtggtggccccttttcactctcacccatgctgtgtgacttcaggcaagttcttcaacctctctgtgtcttaatgtcctcaacagtaagataaagacatgattagtatttacctcctagattatcatgaggagccgatgagtcaatgtttgcaaagtacttagagcaaggtccaattcaaggtctgagctctgggagtatttgaataccacggaatgatatttagtcttttcagtgtggcattgcaggaacaaagtaggatgcaaattatacatccatgcccatttagtcttttgtctattctgcaaatagttccagagcacctagtgggtgtcaggcccgtcctggtctctgggggcatggagatggatcctgcctggccctgacagccgcgagtgcacagtggagggcactgggtggaccccagtttgttgaccgtcttgcgttgctgtgacgctggaaggaaacgcaccaccacacccaggtgtttgtcttctaggggcagaattatggggcattttcttttattttttcttttctttttttttaatcttc

SEQ ID NO: 68621 - DNA, 554 bp, Homo sapiens
agggcctccccaaccccacattctctgagctgggtggtccccagggagcatgcaaaccatacccccattgtgcagctgggtagcctgaggccccaggggcacaggggacaggctgaaattcacacaggcagggggcgtctcatagctgggctgggcgctcagggcaaacagccttgcccgaggacccagccagtcagggggccttttccccactcatgggttctcagaggaaattctggaccgattcccaggccttctgcctccccaaagaataatcggaacctgcctccctggtgtgtccagaattacacaatatcaataacggctgaggtgacctgtgatgcccctagcaccctacagtgtcttgtgcatttatcacaatgaccccatcgttacagatgaggaaacggcacagagagaagttaagtcacatgcctaaggttacacagctatttaggggtagagccaggatctggatgtggagagcccagctccagagcccactctcaccaccatgccataccctgtctcgctcttgctttgagagggttgaa

SEQ ID NO: 68622 - DNA, 1179 bp, Homo sapiens
gaagccagggtgtgggcacagccacaaagtgaggacttgagcaacacctgggtgaatgcacagcgtcagccattatggtggctgcaaaactcatttctggcttgggtgagaggtgctgtccctgggaagggcctcacttcctccctgggtgctccaggtcgactcatgaagtgccacatgcagatggcctgagccagcagggccacagagattggcctgagccccaaccctcggacggaggcccagcgactgggaggaacgggcccaaggtcacacatcaaaggaacctcgaggcccactgggacaagaacctggattaaacatgctggtctagaatgcagcttcccccagagccccacagttagaaaagcagatagtagtgaaatgataaccacattacttactgagccctcacggtggggctggcccagtggttaaaatctcattcaatcctcaaacagctccacgggtaggcactatggaatccccattttccagatgagataactgaggcttagagaggggaactgactctcccatggtctctccgctggcaggaggcggaggtgagaggctctggccagcctgacccccaagccctcatgcttaggacagtgtctcattttggggggcgggtgggctccagaggtgacctcttgttctggcaacagccttagaaatccctgggccagctccacatcacccctggcttccaccagtacacattgcatttgctaacacatgaggcacgttcaaagtcctgctcagagggaacatgactaacccagaagtgacaccggttgagttggaaccttggtcccctatctgtctaggctaataagctgctttttaggactttttttttttttttagacaggatctcactctgtcacccaggctggagtgcagtggcacagtttcggctcactgcaacctctgcctcccaggctcaaaccattctcctgcctcagcctcccgagtatccagtattacaggcacgcaccactaccacctagctaatttttgtatttttagtggagacagggtttcaccatgttggccaggctggtcttgaactcctgacctcaaatgatccacccgcctcggccccctaaagtgctgggattacaggcgtgagccaccacgcccagcctggacattcttaataatcacagtccc

SEQ ID NO: 68623 - DNA, 998 bp, Homo sapiens
gcttggggatgaggaggacgggcagcagccactggaggcaatacatgatctctgccgggcagggccttcaccaaggctgccgggcaccgctgcaggaaccgacctaatgggagccagcgggcgcaggcggctgccctccgctttcttcaaccctcactctccaggagctgagccgctgtgctctctggctgtcagcccgggatcaccaaggcagcagggatcctgaagagaaaagtcaacacaacagacaaacagacaaagaacagacagacagacaaaaaaaaaaaaaaaaaaagaaaaaaaaaaaaaaaacaggaacagaatgtatacttatttgggaaaatggatcatggttaacaacagcaaatgtgaaatgccctttcctccctgcccacccgtgaaagttctactcctctccaagtcactaattcgggaagcttcctgggatgtctccccggggcttctcctgggggatcggggagagggctctttggcacggtttcacacagtgggctggctttgcctgggccctgcccagcagagatcatgtatcgcctcctggggctgcagcccgtcctcaaggggcccagacctcacaataccgcccagtggttgccaaaggacgaccaagggctccctgctgtgcccccacgtggtaaggacagggttctgtatctagcatctctcacagccataggtgctcaggcactaagtgcagagttaaagctgttagcggggcactgccggccaccagaccacaggcaaaggatcctgaggcagctacagcctcgaaatattttaagatggcagcctaggctaagcttgcctttttcaaacagcccagcgtcactttgccagaatctgccaacttctccgaaagtcaatgtagaaaaaaagtcactatgctactttgtccaaactgaactcgtttggatcattacacctccatctgctgctggcactgtatagaacctgacctctgggagcttttaatgaaa

SEQ ID NO: 68624 - DNA, 3043 bp, Homo sapiens
aggagccaacaccccaaagggagattctgaatttgcagttaacttcccccccccaccgcccccaccccccctcagagatttaaacgtgtgcactcatgcacatacacaaaacactagtcaaacaacaatctcttttccccccggtaacctctgacttcctctatatgccccagagacacgttgtcaccatcttccctgggagtgatcctgtttatcctcccctccccgacttgccctcccacagggcccatgcatgccccagcaggatccagattcctgagcatttccagagcaggaagtcagagaggcaggcaacgcgtggttcttggtatatcgcacagggacaggcttgaaatggaatgcatgtgtttcaaagataggagaacaacaacaaaaaaagacagtctaacccagattcctctttgaaacaacatattacagattaaaggttaaactgtttttggcagcaactctaacaagactaatttcagatatggaattgacctggtcactggaaaccgaccaggcttcccgtgatcaaatcttttaacagatttgcttgacattaattagtctctgatttaaaacaaacaagcaaacaagatctaacacttggcattagcacttaagctggaacttttttttggtcccagctttggtgttgccgtccagaaggctgacgggatgactggaccatgtcaggcagggcagagaagccgtccccaacacaccagttccctgaaagggatagacgatccaaacctataaacagaaaggctgtttctttccgaggacagaccccagtctcccaacattcggcgatgaaatgggacacggaggcctggaaggaaactaaaggagatttggaaaggggaaggaaaaaacaactgtcccccatcccccatgcttcctttccaggccattagtgcgccaggcattccgttccttcagctgcccttgagggccactccccacgtctatagaaggaaagggaagggatgtccacccttgatgtaaagttggagggagtaagaagcgcccgcgactcttagcagagcgtcagcctatcaccccagacaccgaagcggagcctcaggagaccctctctcccctcacccccacgtccccccacctcccccccaaaaaagcaactaaagcaacgcaactaaactgatggggacagaatgacaggcctctcacaagctgggcaccctgccgtggaacccggggctgcagagatggtggtcgcgctcccagccccgtgcccccggctctgcctgtctcatcctgcaagggcgctgaccttggacaaggccagagccagcacccaggagtactatgacccacctccgggctgggaagggaccccccaaggcccaggctaggtccaatcacggcaatcacctgaagccggacaggggcgccctgccttcccggggtatgcggaaggaaaaccccagtgacggggacccggcgacgcctaaggtgacccagaagggacaatatggcggcgcggccgcatggagggcctctcatcccgccccaagcaggttgacgccacggtacctgcaagccctgccatggcgccgccgccactgtcgccgtctgccgcagcctgcctccacctcagctcgccaccgacgccgcaggaagccggggagacgcccccttagtcttctagtcgagccggccgaggacccatcctgggatcgggctgtctaccgcaaacgcctgatcacaaggtccgaagtgggggctcatcctcgccccatttcccgtaaatatcagccacagaccacctttgaggactttgtatgcacttttacaaaactctgggagccccgagatcttcaagcccgaataatttttatcaggcgcagtgtggacagccccgaagcgcggccgggtcccctcatgcatatgcagcagattgtgatccttactccgtgagcgctgggcgggccgggttgtgttcatgttggtgaacccgcttcgttcttgcccgcgtggatggtccgtggactccgggaaaaccttctcgtggctcaaagtccaccccctccctagcgtttcatcatgcagccaaggctcaggagctgaaaggtccgggctcagaacttgggactgccttgggtcaggcctcggctcccccacttgccccgtaccttgggccagcgagcccctcgcccaccccgacccggcttctgttgaaatgcccaccttagggcttttatgaggcttgaatgagtccgtgtagtcatttattagctaattaagcatattccttgggcgcttactgtacccaagcgcagtgctaagggcaggtagagtcggtaacctgggtctgtccctgacctcaaggcactgccagtctaatggcgggtaggcggggagacagtcatataatcactgtatattagtgactttaatcaatacataattacacatcatgggaagtgctgtgagaagaagtagagagtgttaggagaaattaatggagtactaatgtagggaaagggtggaacctccttgggaagatggcatttaggttgagaaacaaaggacgattagggtaagagtgagaggggaaatgttctaggcagaaagaacatttgtcccagatctggagctgggaagcggcagagttggggtgaggtgagcacagaagaaaacaggtcagctacatactgaatttggcttttctcttgagagtcagggaagccattttcatcaggaagaggatagcaaattaggatttctgaaaggccacccaggccgcatggcttggaaagcactcaggagtgggtgtaggcagaccagttaggaggtggttgcagctttccagacaaaagccaatgctgactcagacagggtggtagcttggggaggtgaagggaagggtggaagattggacttgggtggatgtggaggcattggcaataactcctcgctaggttttagccttgagtaaatgaaagggtaaaagattccttgaccaagacaataaagcctgaaagaggaacggactgagggggaagatcaa

SEQ ID NO: 68625 - DNA, 1118 bp, Homo sapiens
cagacacagagaaaggccatgtgaatatagggagcagaggctgagacaggagagatgtatctgcaagccagggaacacctaggcttgcccacagccgctggaagctgggaaagaggcatgaaactgattctccctcagggcctccagaaaaccaaccctgctgatctcttgattttagacttctggcctgtagaactgtgagagaatacacgactgttgtcttaggcccccaagtttgtggtaatttgtgactgcagccctgggaaacaagtccagaggcttagtgtatgctgttccattgcctggaacatgatgctcttctctttcccaaacagtttctcaactttgccctttggtgcttgtaagtggacatatctgcagagaagaaaggagacattttcaaagaattgctcttactgcctcctccttgtcctgtggctctcagctcaaatggcacctcctccaagaagccttccctgattttctacccttctctgtgctcccagtttcctggactgcccgtgccacagacgtgctggcactgtctgttgacatggcttgctctctacttccccactggactgggcactctgcaagggcaaagactgtgtttggcccctctttgtggctgcagctgtgccttgcacaggttcaggcacagtacgggtgttcactaatgtttgctgaatgaatcaatgaacaaatattcccttccagttctgctccacctctggactcctgccccacaggggagaaaccctttttgaaagcacctgtgacatagttcaagatcaccaatgtcgggcgagggtaggacatgcaccctggagtccagccatacctcagcacagccctcctgcccacatcgccaaggccctgtcagaggcatgacaaacagcttggctgatggcttataatgtcaaagatgatggaaacagggaggcgacggctgaaagaatgggttggggacgcttgtcataactttatttgtgggaggtgagtttctgtcggctgggtgatggatggtggcagggcaggcacaatacagaccctgccactgcctctctcccctgtctctaagccaaatgactttggggatgaaaaatgactttcttggg

SEQ ID NO: 68626 - DNA, 1391 bp, Homo sapiens
atttaaaactttctactaaccacatttaagaagtaaagagaaacaggtaaaattcattttataatatatgaatttgacccagtatatccaaaatatcatttcaacctgtaatcaatgtaagtcttagaaatctggtgtgtattttatttacacttatggcacatctcacttcggagtagccatatctcaagcgctcggtagccatatgtggctagtgagtaaagtattggatggtgcagttgggagcgtcagtttccttttctgtgaaatgaggataaatcactggaagctcgtgagagcgcacacgaaacacccggcactccgccctggacactagggacgcgcaatcaagtttggtttcttctggtccctgctctcccctcccgcccctcctctaagtctccgccccctttccccgccccctcaggctccaggcggaagcaaccctgttccaaatgcagcgcgctttacggcggcgcgtccttttaccgcggtgtggccggctcgcttgtcgctcgcacttttgccctattggctctgcggctccgctcgccgcactttacggcagtgtggctggagccgcggctgacgggcccgcggtctgggcgtgagtgcagggaagtggagtatttgctgggccgggtaccatggacgtgggcgaacttctgagctaccaggtatgaggggcagggagggccgagcgaccgcgttctcacctgggcaggggtcgcaggagccagagccctttcatctcacctcctctcgcctcactcccgggccctctaacttctcatgccacccggggtctcagcccctcgttttactttgctctccgaagccctcctgggccctttcgattcatcccttctcaagacctgagcccttcacctcctcttcctcaccctggggcctggttccctgaaactcctctgaaaccccagactatcctttttttcacaaccatgtcctctcagctctcatgtccccccagtcattgaggtgatggtggtggcggcggtgggagtgcactggtctcacttggatttgatctccagcttctccactgactggctatgtggcttttggacaagtcattccccccctctttgaaccaagtttttgtatctatatagtggagacactaataactgccttagtagggttgtttgaggactgtaccaactgatatgtatgaaagctggttttaaagtgtggaaagctgtgcttgtgtttactgcgatttgcaggagatgttgggaattctagcatggaatgagtttctaggaatcttgctcagggtcccccttgcctaggaaacttgtggggaaactgtatgggacctagagagcagaaagggcttgtccaaagtcactcagaaacaaggagctgga

SEQ ID NO: 68627 - DNA, 747 bp, Homo sapiens
aacagttgcttttgtcattccttcatcttgagggattccaaatacctttcggataccaaaacaaattaatctccaaaggtgactggtaagaatggcttaagcctctggggattggttgtgtaagacacagggagagctcagcctgagctgttgacctctgtgacaggctgtgagtgttacattctttttgtggatcaagagccctttggcttccctttggtgaaatcagtttgacagctctgagcttcttccctgcttacaattcttgttttgttttgtataagcagtcactctctcagtggtgactattgggtaaatataaattaggaagtttatttcttggtcagggtgttgagttagcttcataatttttagtgtgactctttcacgaacagacaggacttcaactttttgcgtccatatttcactcaatgttgctggaaaggcaaatccattttagcttgtatcagggagctggaacccttcagatggaaatcccctaggcctgtgctgttcagtactatagccactggcctcatatggctgttgagcacatgaaattgggccagtctgtattgagaaacaccataagtgtaaaatacataccagattccaaggacctagtgtgaaaaaaagaatgtaaaataacaaatgaataattttttaatatagattacatgttgaaatgatactattttgggtatgttagattaaataaacatattattacctgtttctttttaaatg

SEQ ID NO: 68628 - DNA, 746 bp, Homo sapiens
aaagaaaatcatactcagaatctgtgtttatagcaaaagtgtttttgcataataaagaagaataagctaattaaaactacaacagaaaacgttttctcccacatcagaaggctcactgttagcagaatagggagcagtggatgactctccaccatttcccacaaccccccagttttatagaggctagcattcacattggttctggcgtgatcgacagcctgatgaacccagacaagactaagataaactacttgtcctccagtagaataaatatttcaaataaagtcaacccaagaaaggcaggccaaacagctattgatttctaaaagcctgaactcaagcccagtgaatattccaaagttcacctccatgctgcttgcctaagtggtgatcaatatgcaattactgccccctctaaacatgtcttacactgcctacctcaagaaggattttacttttaaaatcttttgtttgttgaatttgcttaggcaggaaaaaaaaagagaggcttggctacaccagagtcttttgaattgtatttcaaacagttctgtgttatttgtgaaatggtttgagcgtatgctgaatggtaactgaaggtgccctattttatgaccgccattcatttcaagaggccttttcctgagtgactaaacaatacagatattatatctcaatgtcctaaattttgctcacatggttatctgtcctagtcatgacttttataaattcaagcttgtaagatg

SEQ ID NO: 68629 - DNA, 1743 bp, Homo sapiens
agggaccccgcccaggagtcaggggcctcgcccgactcgccgtgggacctcagagaagctaattacctgatttcaggcgcttccttatcttttaaatgggaccacagttccgccctcctgtctgtcccatcagccccagtaacacggcttgggaaggaactggaggactttgttggattcttgctcttgggaatgggaatggtgccctatccccctcccctgccacactcacacacacatacacccacgcatacgcgcgcgcacacgcacacgcacacacacactcatgcacacacacaccatcaaggctcattggtctagggaaggagcctacagtccagaagggggcgatcccatccaccacataaggtccagtatcttcaagagccaggagccgcaacaactaactggcctgtctctctcccattacaaagactcgaaaactgagtcccagaaaggggaacaccgacaataataactactgagctcctaccacgtaggcagcattatgctaagcgctttgcatgcacgatttcgcaaatcctcaccaggacccccgcagacagctattacccctatttctcagatgaagacttcgaggttcagagaggggtagacacccggacgcgatcacacagcgagccgaggtcggcggcagagctatcaccaggtcccctgggtctcagcccaggctcccaccctacctcgccctcacccccagccccactggcccctgaccccggccccgccctgccggtaaagttaggagcctctgagtgcgctggcctggcggcgggtgccctggcttttctccctctccccgctggacggcatttctgtggctgaagcccgttgggtcgtgctttgcgggaaccgcgtccctggggtggctctctccgccccatcccggccccgcctccgcactcgggcgggggaaagttgcgggtaccgctttaaaaatcccagcctgggcaaaactttgatgataaatcaagcggcagatccctccgccgcctgctccgagcgggaggagggaggggaggagggaggggaggagggaggcgggaggagggaggagggtgcggcggcggcgcggcgtggccttccgcggaagggaagagtcccgcagtcggaggcggccggctgggcgtgcgctcgctccccgaagccggggctgggccggagccgggcgagggctgggagctgggccgggtccggggacagcgggcgaggggcagctgccggagccgggcagccaggccgctcagggcaggggacagctggcgccggttctgcggtctccggggcccagatgtgaggcggcggcgcccccggcccgagagcgcacgatgggggccccgctcgccgtagcgctgggcgccctccactacctggcacttttcctgcaactcggcggcgccacgcggcccgccggccacgcgccctgggacaaccacgtctccggccacggtgagttcggtcgccgcccccgcggacttccccaccaaaccccaacccgggccgcgccactccaacttggccgccccggggctcgaaccggcgccagtcgtggcgggcatcccggggcgccccctgccggcgcggtggacccgccctggcaccctggccctgcagagaagggggcacccggggcgcacccccgaacctcctccccacacactcgcgcggatacgcacacctgcatggccacaccgatatgcacagccgcggacacactcagag

SEQ ID NO: 68630 - DNA, 2536 bp, Homo sapiens
tagagacggggtttcaccatgttggccaggctggtcttgaactcctgacctcaggtgatcaaccctcctcagcctcccaaagtgtaggattacatgtgtgagcaccgggcccggcctactgaattttttcctggcctgttctgtgcccaaacaatttacttttctttgctaggataatcttgtgtttataacctccatagtggttgttggagaagtgattagaatattctaattcatcgtttccacttcaccgcagaaagatgaggcctgcgtgggagacaatttttgtttaaaaataaaaatatctttgataattagagtggcaagggaaattatgaaaaaacgcaccaaaagcggggagcagatttctatttacacgtgacacagttgacagttttccctggtgccaaagactgttagaatgcaaatggtttcatttgattttttcccctttcaagagctggaacaatttctcaagctacagcgtggtgctctcccagcttcaaggaatatttttatctgggcaacacccagcaaagcggtgccacgacccagttcagtcatagctgcgctctgacttacacagcatgaaaatgctgcaatgttcattttctgagctctttttaacatgctaaatatgaatgtcgtatttgttggcaggaaaggaaaagaaaataagccactctttttgccctgcaagatatccacataaaatattaacagaaaagcaaaggaaaaacttgtgcaaagttcaccttcttttattaagcaagagccaaactcttggaaggactgttttgggtctcatttctttgcttttaaaggggcagatgccccagaatggcaggaatgcacgttccttctcccacctctgtggcttagagcaagtgattttgcctcatgaacctgtttcctctttctccaaagatgatcacacctggcccactctcctcacaggtccttctgaggctctgaggagaggaggtgcaggacaacactttgaagtatatgatgaaaacagtattccttcttttcttccagaaagagagagagagggacacagagtctgaggcataattaacaccaccaatcttagcagcactaccatgccatggataattttcagataccctgaaaagggcaaaacatttgtcttttgtttcactcataattttctccatactgacttggtgggggtatcccagttctcagccaatgatgttctaatttcgcccattattttcaggaagaaacaaatgcaatatactttgtcctctgcatgcctgaggtggggagcaaatgccatgccatgcaaccagatggctggcaagtgtagctgtgctctcactccgagaggcaggcggcctgctgaactctaaacacgacaaattccaaaccgcacccttgttggctttaagcccctgggagctgagcctgaggcccaggaggtctgatctgagtccttagcgccaggctttgttccaaactctggtgtcactttgtcctggggccagttcctgcccagccttagctgaaaccagagagtgaacagctgaaagccaaagttgttgaaaactccttttgcataagccaaagccagaagacaaagacaggacctctgctttgaagtgactggggtaactgcctggaaaatgttcccaatacattttgcgatgcgcagggatggctgttgaacataccaaatggccagttccatcttttttcaaacccaaagagaaacactttttaaaaaatatatgtacaccatttaactcctgaacaaaaatttctttctcctccccccaggcccaaatcagtggctccagagagcacagttatcaagagattatctggtccccagagtatcgggaggcactcagctgtgccacatgcctccgagtgtcctgaggcgagtgattatctctcaataacctgtaaggccgtgtagcttaaatgataacttgactttaaaaaatttagaactcgctgttaggcagtttctaagcaactgtttccatggcaaagaagcctggtgtttatactgatttttcacttaaaatgcagttttattgaatttcactccatgcaggcagccatttgcctgcacttcagccctatctacaactgacggctatcagtaagtacctaataaactccagatgccaaaccagaagtggctccttccttcgtgatcagtatgggggtgcccctagtgagcaagctgggggcgaggaggtgggaatggggagggaggaaacgtgctcctggaatctggtcagctgggtttaagttttatctcttcatggtttatcaaacgtttactaaagcctggtccagcccaggccctaactgaggtgcttgaggcacaaagagagagggacaaaaaagcctctgccctcagggctccctgtctgctggggtagactaagggatcacagaggcccatggcacactgttgcaagggccagcctagaagtgatgtgcgggtggcaccaggcatggcttcctgaggagaggcacggcaagttgcttctct

SEQ ID NO: 68631 - DNA, 2693 bp, Homo sapiens
gaagaacgtctcctaaactagagtctgcccacaactaggaagttataccacgatcaggaaattttaaaaccctcttatgtctataacttaactccctaccatcacccccgtggcagtaagaaaaacaaaatttctctgctgctttgatacctgggatttaaaacttaaaaaaaaaatagggtcaaggtttagagtctcagatagtgttttgttttgtttcagagaagagtctcgctccatcgcccaggctggagtgcagtggcacgatcatagctcactgtaacctctaactcctgggctcaaggtatcctctcgcgtagctggaactgcaggtgagcgtcaccatgcctggctaattttcgctgttacccaggctggtcttgaactccagtcctcaagctatcctctcgcctcggcctcccaaagggttgggattacaagcaagagacgttgcgccaggcctcaaatagtgtgtctcaacatgaggtcaacagacacattgggaaggctaagttagttccctccaccttttccctaaagttaacacctcacttaagttcgaaaaagtcaactggacccgcagacggcaaaagcagcacgtaataataccctgagtgagaacccacttaagagccgagagcccaaatgtgtgtttcatgacggcgctgttacagactaaaaggtcaaaacaggacattaaagggtgctccggggggctgagtaggagctcaccaggtgagaaaggggatgtcactttcggacagagaacgagcgccagggcgtggaggcgtgaaaagggcacgtgggtggcttggaagaaccaaaactaagtgttttgggggacagccagagagccgaacacatatggaggaaagatgcggcctggggcccgccagattagaaaggaaatccccctcccatatccagatcatgatctctcagactcaatgtcccctcaggatacccctctacagggtcccagctgctgggctccctctggttcccgccactcttcccttacctcgtcttccagcctttctctcactctcccgcctcctctgcctcgccggaagtgacgcgctaagtagcgcgccgtatcgcgccagaaaggttccgagggagcgggaaaaagggttccggcgagatccactgcgccggtgtgcaggctcgagcggtcaaagctctttccgggggcccggggaactactctccttgcctcgctctgtctccttcgaagtgctctgcgcgaggttcagagcggccgccgcctccaaagggacggttttctagagctccgacgcctctcggtgcccctctgctccggcccttgccctttgacctcgctctcgcggcagggtgagaggtcgggtggccatcttgtggcggcggcgcgggcggctgttactgcggagacccatcccctcccccttctcgcacccctggcagtctgtcagtcggtaaaaagtcccgcagcctgtcaggtgaggccccggcctcgtgccgtcgctcttcccgccgcactgggcggcccaggccgctccctgccgggcctcactgccgccaccatgtcctccttctctgagtcggcgctggagaagaagctctcggagctgagcaactctcagcagagcgtgcagaccctgtccctttggctcatccaccaccgcaagcacgcgggacccatcgtctccgtgtggcaccgcgagctccgcaaaggtaaacaccaaatccccaccccctggacggtccccggattgtcctctcgcccacatacaacctaggcccctctaagcctcttcattgagccttgctttccaggcctgatcgagcttctgagatgggagacaaagttagccccatttctcgaagaaggaaactgaggcccgggaaggtttaaggtacttgcctgagggtccacggactgggactcaggtgtccagacttctagttcatcaagccattttcccttcagtttccccctgacatttgtggctgttattatctcggctgcattcactgccgtactggccctagcatgtcgggcccagtgctgggtatttggagtaaaagccagtgggctccggagtcagactctgcagatcgagtcctggctcagctatttgccagctgaataatactgggagagtttcttcatctccctgtgtctccgttttctcatctgtaagagggaggcaaggatagctaccccttacaaagcctttacttcataccagtcactatactaagacctttgtgtgtatcctcgcactcagtccttagaacagccctgtgaagtaggtagtctctcccatcttaggttaaggggccacccagaccttacctctcctctcctctcctctctcatgcagttgtcattgatttcaggccctgctcaggttctgacagacaattcattgaactcattctgttatgtgccaggcactggcttggacacttgcagcatgttgcctctgccaactgcctagaatttaagcctgactttgccgccttactgaccccagcaacttaacctgtctgtgccttaattttcttatctacagaatggataactgaaatttactatgtctttattacatgcgaagtgcagtactgatatctttacatacattgccattaaaaaaaattctcggagccctatgaagtaggaactttgcagaagaggaaaaactgag

SEQ ID NO: 68632 - DNA, 1959 bp, Homo sapiens
gtagctggaattacaggcacctgccaccatgcccagctaatttttgtatttttggtagagacagggtttcaccatcttggccaggctggtcttgaactcctgacctcgtgatccacccgcctcagcctcccaaagtgctgatattataggcgtgagccacctcacctggcctatttttttctttaaagagtaagatcaaatgttgtttagttacttggcttctggttagttgtggtttaattctagttggcatgacatgtttcttagctacagatctgatctgcctgcatacatgtttcctggaggatcgagtccaagtactgatagtattgaagaccctttctatctgaactagcctgtttttccagattcttctcctgccacttcctcacttacactgtattctttggccaaactgaattgccgacagtttaccctctggatgctctgttggcactgcttcctttccatctgctgttacctctacttgatgtccttctaccgctttcactgtgtgatgaactcattctccaagaatgcaactctcattctgacatcttccctggcttgtctgggcccatgtggtcattccctccttgttctctggtactttatacatgcatctgctatagaacctagtcatgattagcatgtgtgacagtatccttcactgagtaacccttttgtgtacccttcatgatcctttccaggtctggaattatttgcattttgcagtgggtaactttcctgtgaaaccaaaggttagaggctttctgtgaatgacataagtgctttcagactgcaggtcattgttgttttacttggtgttgctagaagataattttaggatcactcaggtgattggtagcttctgaaaagcaagatgtttcctgctttggattctggtgtttttattgtgtcctttggaggtcttcagtacagctttggggaattactcagcattctttactctgccttagagttcattggtaaacagtgctggtttttaagaacacctttgggcaagtaggagagccttgaaagaggatgtttgaagctaatgttgaatttcaatttaatgtacatttgctggacacatactttgaataaacagatatgctagatgctataggaaagagggagaaaagagtgaggaataggtttgcactctgggaatgtgtggaatttgtggcagtgatagtattgggaatagcttcagtgggtttctgatttttttttgaaagtctagacagacattaacaataatagaggcagtttcctctaggtagaggataatgctaatctaaagataatttctctttctctattctataaagatgaaaacacacatcaaaagatttcaacatgtgtgttagtcccagctgactcactctgtcttcactctctggacctgagttatcagaatattttaccacagtcctttcaaatgttgatgagttctcgagaagtttatttccaaatttgagtagtccttttatattccagctttgattcatgggtaattctttgtcttcaggcaacttcatggagtttacctctgaaataaaaatttttctatggaactttgacagttcttacaacattagagaatgcatgagcttaggaattctgttttagaactgggtattaagtttataaacctgtctctcaaggtgttctaaaggtgtctctcaaaacatcacactgtaccctataaatatatacaattattatttgtcacttaaaaacaaaatttaaaaagtaagaaaaggagaaaagttctctactcttgagaatactcaaggtgttgcttgactgaatggaacttttttatttgagccacatgtgactcatgtagtatacggttgtagaaggatttagagagagagggtagatacaaagggactagcatttattgagcatccgttatgtaccagcctctgctggctgcttttcata

SEQ ID NO: 68633 - DNA, 2226 bp, Homo sapiens
ccaaagtgctaggattacaggtgcgagccaccacacctggccacaacacacagttgttaacatctgatatttatacctttattctatactggaaatgatacatcatttgaaattaagcaacatgaaccaaactccattgttttgaattgccaaaaacatgttcttttagaattaaaaaataataataattattcagaatttcattcatgttctgccatggacttagataaactaattttgtggattttcttagagtccgtgacattgacttacatgtaagctctggggctaagaacagttttttttaagaaatggcaggaatgactgtttttagaatttgcctccacctcatttaactccaactaattttctttaaaccccatgtcttaatgggtagtgttgtttgtgttttcatcttacagactgaggaactaatcaaagctttgcaggatctggaaaatgccgcatcaggggatgctactgtccgacagaaaattgcttctctgccccaggaagtgcaagatgtttctctattggaaaaaataacaggtgagaaggtagagtttgggtgaaaggtgaggagagagggacataactgtaatgcagtaaccctaggccatacttaacgtctgcaggtatagactactttccatgttgtattggttgctctaccatcttgggatttgcaaacataactcacatggtgaacaaagaaacttttgaaatagtcaaagcttgaatagtgattctaggaattattgcagaaatgctggtgtgccacaacctgtggctctctaaataaggtctgttaaaaacatagtacaaattgtgtgcgtgtggggtgggtgggggagattaggtattattctgtctgttagactcataaccctcttactaaaagaaaaaaaattatgattcagggctgtgtgatttgtgccctgctctctgacaagccccgtagatgatagtgcgttcagtgccaggaatttcaggtgtctgttagacatgtcattttgccctagtcgtgacctccctagttaaacagggaggggcagttgacacgattcctgctttccttatgggaaattgaaaggaaggaatgaagcatgaactaatattgacagtaggctttgcaccggtacttctgttctttgtgatagtctttggaggtgactaaatgtgtgtctccatattgcataggaggacattgaggctttgagaagataggtgtcttgtccaaggtcacacaagtagtggatcttgggattctaatctaggctgcaaagcctatgttcctccccttacaaaagctcagacctttcattccattgtcttccaaaggccaccattttcccactccagtcccttgacttggctgcttctctaacttcttccatatctatctaaaggaaatcaaggtcactgatgaaatatttccctcaacaaatatttgaggcccacctatatcccctcaagtgaagtgtcaagaaggaaaataaagcagggcagtgggagcggaaaatgattgcaggcggtattaatggtattttaaaggtgtttggggaaagcctttctgatgagatgaccttgagcagagacccgaaaaattaggaagcaagccatgaggatatccaagggaaggaagggccaccaggcagtggaagcagcacagggaaagacctcaggcagtgggcgtactgggttggagaacacagctcggaggccttgtgagtcacgcaagaagcatctcagcccctcactctgctttcccaccccaggaattcaccccactgggacctgcagtctcttgattcctcccccacctcttcctagtcctcgagtcctcattttcttctttattcagattggagtctctcttttcacttcctcacacacaccttcaacccattttcttctctttctcccttcagtgtagtctcctggcaaaatccctaaacaggttaaatcacattttaaaaatacttactactaaaaggaccacttcatttattcttactgtcaaaatcataatctgcaaaaattgcaagcaagttaatgtaaagctagccatgtatgtaattttgtttctctgtttcactgacctaaaggtctcatgtagcttccttttaaaatacttttttaattttgatttttaattgtggtaaaatacatataaaatggtaagctacataaaacacaaaggtgtacaatttagttgtgctaagt

SEQ ID NO: 68634 - DNA, 1209 bp, Homo sapiens
caggttcacgccattctcctgcctcagcctcccaagtagctggaactacaggcgtccaccaccacgcctggctaattttttgtatttttagtagggacggggtttcaccatgttagccaggatagtcttgatctcctgacctcatgatctgcccacctcagcctcccaaagtgctgggattacaggtgtgagccaccgcgcccagccgtttggaggtttatttctgactttatccatgctgcggccaagaagttgtctgcctccaagatctatctgtaattagctcttaaatgtcacagtagtatttatatagcacagttctcaaactgtaaaagacctcatttctaccctgggttgaggacattagtctgagtgaccttggggagggagttcagaaacatttcctcaccatacacttgtttggcttcgtaattaagtacatggtagtttaccctcagtacttgctcccgtgggataacagagccagcagtgtggatttttgggaactttgctgccccgggctgctgcacttccttttcaggaatgtctgctcttctttttttaagagatatggaaaagagttgcagccagtggttttgtgaaggaggacacttctgagttagagagccagtcatgttgtatttcaagaaatacttcttaaatcccactcagagtagacaagggacagggagagccatgtcacctccatgctcaggaaacgtgctctggcacagaaggagggaacattgagctatctctgaggctgagatcattgtatttgcctttcagcatggtcatctgacttgaggggaaatgagtggcaggcactttttaccgtatccttacctgcagtgattctgggaactgtgttgcgtagtggtagcaggaacttcacattcgtagcctgcttgaatgtggaagatgggaaagggctgtaaaaatcctacagcttagatttagacatcggcactgaccagagatcctaaagggagttttacaggcagtaccagacggtcatttatctgaaatgctcatctttcactgaggaagcattttcagcactgtgccccgggactaataagagagtgtaattaatgattctggttgtaagtcaccatgccatctgttgaactgccccttggcgacacattaagggctttctctgatctgtcagacattgattatcatgagcagctgttgttgggtaga

SEQ ID NO: 68635 - DNA, 555 bp, Homo sapiens
tatagagagagctgtattccagtgtagtaagtaacctacagactgtcttaccctgggcagatctgccagcactaaaaactacaataaacattgcttaaaagaattttacatgatacaaccaaatacacaagcacacacacaaaaaaatttgtctgttagtttgtctttttcctttctaccctttgtttctcagctgtcctccaggaatgcttgactttaccagtatttggcttaaaatgagaaacctttgtctgtacctttgatgtttgtttgcacaaaaatcaataatctggctttccattaaaatagtccttaaagaagctagtttgtggggtctttgttaacttgtgcaaagcatacatttttgatggtttactttaaaaaaaaaactaaatagtttgtcttatactttagtattttggttttactggttttatgtagtgagggaccccattccataaatgtaaggatttttgaaggatccaggtccatttattaatctgtatctttttaaagcattttatgagcatctgttaaattgaaaatatttagctt

SEQ ID NO: 68636 - DNA, 2427 bp, Homo sapiens
tcaagctatcctcctatctcagcctctcaaggagctaggactacaggcatctacccacgcctggccaatttttttcttttcttgactttttttagagatagggactcactatgttgtctaggcttgtctcgaattcttgggctcaagcaatcctcccgccttgacctcccaaagtgctaggattgtaggcatgagccaccacagccagcctcagctttcttacctgcaaaatgtagtattggactaaattatctctaggttttctgcgagccctaaaagctacgattgttgtgctgcataagaagcatatgggactgaagtctgagaactctggatggtatatcctgggcacgcagtactatttgttagagaaatgaatagtatcaccattgtgctgtgtatacataggaaaccctggagaccatagtctaaagatcggggcacaggagacagtgccacgaccgggaagatgggagtaaacacagtagttcactgcacaaaattcatatttggtttatttgggatctttaagaaaaagccatttgctagcatggtttcctcttttactttctcctggaataattcatctggctaaagctcatcgctcactgctacctctgtaggattttccatttaaaaatcatgcttccactctgaggcacagattcaattaagaatccattctcctgtacagtaggttgggattcatacagctttatgtagtgttgaaagcccagtgtgttcactttttttagactcaaatagttattttgcattaaaaattcatttctaccattggtttgataaatattaaaattagcaggccatttatctagtattttttgtgaataagaggcagctgtgatgagtgaaaactcatatcttctcatctcctctcactatgatgaccttgggcaagtcactcagcccttggggacctcagctgcttcttacaggaaatgagtagggttgattacgtaacctctgaagtcctgtgactaggttttcagaatatttcttcctactgagaatcttaataaactcagtacctgaataatgtactccatagattttaaaatactcactatacaaattcttaggaaagaaagtagttaccaacatacttgttaataactgagatgtttgtaaaaagggcctagtgctttggtacaaattagggactcagtggtggctgttactatgttaaataatgaatgcaggtatttataaacacatgtaacaagattaaaatagatgtctgctggaaggagtaatagagaccacatggctagaccatctgcagcatttacaacagagtggtcaaaaacctgtcatcctcaacccccctcacccactttaagggtatgaaaagagtcaggagttaagaggtaaaggaagaggatttgggatgagaattatttgaaaagggccattggtgtgtttggcatctccctagtgggagcagtgggtgccacctacactttatctcaagattaggggaaagggcctccatggagcttagtatgtgtccctgatctggtggattaaacagacccctgcctggaaaagtctgaaggatgagatgccagtgctggctaagtgtttgatgacgaagcaagggagaggctgggtgcagactccactcctagagtttgtcagggcagagcatgcatgtagaagaactggcctgcatcctggggtgatagagcctgggcaagaggcccggggtttcaaggaggcgaacttcagactcacagtgctgaggaaggagtagagcaaagagccagggagaaaccctcaccccaagagaccccaggtgatgggagatgaggatgggagactgggggaagggaggggaggaaccactccaaggagcatctgaggagcccatgggggaaggaagctgttaaactttgttaaacttttgcccagcagcgcccagtcaccaccaccagaccttaaggactgtctcttgctgctgcttcactcccactgctgtgtccctggaagggtcagaaacggtaaacaagggaggcctcccttcccggatgctggcctcccttcccagatgctggcctctcgcccccagcagacccagagaggtcaccttcacatgataggctattttgattgtaacatgggcttgcacatttacatctctgaaatgagactgtttttacactttaagtgtgactacaggaatttttttaaataaaaatgactagagaagttatggaggcctgggtttttctttgagagttacaggatacattagccccacaaattggatttcaagggacataggagacaaagttgctttgcgattgcagttccccaatcctgcctgtgtactatggtggttacacacacatgattcattttaggacctttaattcttggttcccctttccatttttgttacttaaa

SEQ ID NO: 68637 - DNA, 3073 bp, Homo sapiens
aaaagacatttccaagagaggtgatatacccagcacaggctttgagggttctttactttcctgtatggaaatattccaggccagaggcaggctcttatgcaaccacacaagggccggcagcctgtgtctgcctttcccaacatctttactatctgtccccttacaagaaagagtttgccgatctccagattaatgtgatatgcacttcagcccgcagagatcatgatggcttctgagttattgggttctgaattaatgaggtttctgtgtatttcctaacatgtgctatttcaaactctcagatacttagattgggcagttctcctctccttggcccaggggcccactgtgtcattgtggcctgtcagatctgcatccgggctcaaagccaggttacatgcattctgcttccctggataggatctctgtgacattgctaccctggaggatttgtttctacttcaattaaatcagattagtccactcacatgctcttgtcttgggcaaagagccctgaatttggaacccagttgaagtcccaactccatcactgcagaactgggtgacttgggacaaatcactgcttggcatggggctgacgtatcaagaaggcctaagtatttccgcatctccctggaagccttctccccatgtttaacatgaacagctgcaatgagagacagcactgggatgcttacaggcagcagctccagacccccatgatctgagtttaagtctggatctcattacctaacctgctctttggccaagtgacttcacttccctgtgtcttggtttcatcatctgtacactgggaaggataataataggctctatctcataaggttatggggacttcatgaattgctattgctcaagtaacaagctatatatctgccaaatcaatacaagttgtttgctgatacagaacaatctgtgtaaactcagagagtgacagcctgagatggggcacagctggacccaatcaggaggtcctggagtatgaactgtgtccgcttaaggtcacagctgttgtaagaagatcctggagaaggaccctggccaattgcaggagggtggccaggcctcaaaatcaagttctcccaggaaggaatggatgatggggaacagtttaacctgtaagtgaagaaaaagcaaggacagtgggactcaatggctctggatgaagatggagcataaaaatggttcttgccttgaggttaaaactggggcaagagacggatgttccagtggggagggcttctgccccatgaccaggaagacatgttggccccaccgaggctggctgacccttctcggctggggtgctgtaaggagcttcttggttaaggtgcagaatgggatgagatgaagcatgtaaggcccctcccagatccaatggtccagactaatatttctgttggctttgagattggactgctgataagtgtggtaggaacaaagccattgctattttaacattccaaactttgaagcttgccaagaactttataaagagtgtctgctcaaatttcccaggccgcctcctgatgaagtgctcagtggcctgacattgctatgagaccctccccgcttcctcccatggattatgacacagggatggtgatgacagctcctggcaaggtcaggagtcagctcagcctggcctgagtcatgggaaagtaatttatatgagagctgtcattgcttaagaacccaaagtaggtaggacctccaaactctcttgatatttgccatagttgcctttgaaacctcaaaaaggccatccagacctggcccctagtttacccggaatgcagtggtgtctggactttatttgaatggcctgcaagtctgtaaagtcattcctagtggtagatttcttatctcctcagccaaaacaagcacagagagttctggttatgaggcaataaagtttattaggctctgggattacattatagcatgacctgttatacacggtttcagagatgctgtggttccagtcaagctccccccaccatcatctacccggccaacaatggaacagactggtagtgaactcctggtccctggaggcagcaaaagaagccacttacctgagaagtatgttatagagggtattctgcaaacttaagtagaagaggggctgcaaccttcaatgcctacaaaggctgagaaggcagtgaggaggagggaatttggcccacttggacaggagagacagatggtgtgcctgcctctgcagacggccactgctcaggtcaaccaggtgttggcatgccggattgcatcgccagattgtccgatttttctaaaaggaagctgaaaacctagatttgtatgtaagaatctctcgattttaaatgttggaaactaatttggatcttgttggaacaccagtttgccacttttgcaagtagagttactctctgctgagtatctagggcaggagtctgcgcagctgaccgcggtctcagtaagaaccccttgttataagaagaatctgttagccttgggtcacagtctgtagctttcttcaagttcatcctggcctgccacctgcagccttgtgtggagccattggcctgagggtgaaggggccttggttctggtcccagccctgacactgatgacctgtgtgacctcaggaaagtctctgtccctctctggcctgttaccccttctggaattagcctagtgtgtctctggcccctgccagctcaaccagtttaggcctccacctgggagaaacccacagtggagaattttccaaagcagagctggttcttgatttggggtaaatgattgttttctttctttccttctttcttttcttttttttttttttaatttaagagacagggtctcactctgttacctaggctagagtgtagtgtgtagtggtatgatcataggccactgtaaccacaaactcctgggctcaagcaatcctctggccttggtctcctgagtagctgggagtacaggcaagcaccaccatgcccagctaattttcacattttttgtagagatagggtctttgtatgttgcccagactggtctcaaactc

SEQ ID NO: 68638 - DNA, 2626 bp, Homo sapiens
aggtgtaccctactggaacccctatctcccagaaaagggtatggaggggactcaggacctgagttgcccgaggcacctgacctcaagcctgccctgaaaaacgccctgtgctccccgagaaggccccgcatagtgcctggcgcagagtgtgactcaaaaacattgattcctttttctccatccctttgaactttcagaacccttgagtattgtattttttttaaaattcacattgaagtatatcatgcatacaaacagagtgcgatcatgcatatgcggttgacacatcttcccatgttgaacgtgcttgtttacccagcacccggatgaagaaaatcacaaccatcccaggcccctgcagcccctcaggctgccttcggcctctctaccaccaggggaagcatgatcacggctgttggtgaacttcacatgggtagaaccgtgtagtcctttgtgtctgcctatgaccctcatggtggggttgtcatcgtagagcctgcgttctcaaggctgtatgcaccatcatttttccatcacttttgcttttgatgggtctctttggcctttcccctttgaaatggaacacagggcttctcggactcccagacgtgtctctgtgcctctgcccaggcctgttggggagggaggtggggaggctgggggagtgtatgttctgacccagtgccagccccaagtaaacgtgcttctaggaggccctggcttggccttccaccctctgcccctccttctccgactccatcaacattctgttgttctgagcttggcttgaggccaatgggtgagctggcgggcatcctaggtaaacaaaggcagctggacagaagaaagtctttaggggtgggagggtggacccaatcagaagccctctccacgagggctgtgagagcttatatggggttcctgccctgagagccctggaacatggtaggacgggagggtgccggtagaggttgggccttctccaggctaggccctgccccggggagggaagctgcctgggttcaagtcccagctctgaaacttaccagctgtgtgactttgggcaaatttcttaacctctctatgcctcagttttttgatctataaaatgaaggcagtaaataactcattgcatgtaaaggatttctgacctgcagtcaatgttggctgttaggaggatgatgtgccgagagacagctaggtacttgatgtgcactattttattgaacctgcgcattagtcatggaagtagacaccatgtcatccccatttggcagataaggaagtggaggcacagagagggtgacaacctgcctgaagccacactgtgagtctgtggcagagccagctctgatccggagtccaggcccctggcaccaagctatgagcagagcttgggtggggattggcagccctgacctgccaaagagcagtgcccagcactgtccttgtggggcccagactcagccctcacatggggtttgaggggcaaggcctcaggctcattttctctgtctgtaaaatggacatatgtgccccaaagagtcagtatccttccccttcctgggttcctggctagtgggctccccggagtggggcaggcttgggggctgatcagggaggcctgtgcacctgcccagtgtcagcagccctggctggagcagccctgcccctgctgtatagccgggaggctgttcaggcctggaagccagagttggcagcccttgttggggctgtgccctgaccctgccctcagggtgctccggaagaagggacaggcacagaaactgctattcctaactaaggctgccgagtatccagtatcgtaaaggtctggggaggtcaaggcagttggctgcagtccaggaaggcttcacaaaggaggcctccttggggcagggttttgcaggttgagtaagagttcattaggtagagaggatagtaaaagtgtttttagcacagggaatggcaataggtcccaactactccatccttgcccttgcttaccctctctgtatttcagggggctggaagttggaaaatgacattttccagagctgcttcccagccggtttcaggttgggatctgccagtgggaaagaggcctgaggaggggagatgccagcctgcctctggctgcagcctcaggtggcttccgcaggctctgtatttcccagcagctatgttggttctagggctgtgggcgccagctcgtgggctttgcagctgcttcccaatttctaggtcacactccttctcccatctgctcctctgcccctttggatacttctggaatgaacttcctctatgaactccctctctgcctgaaatagtagtgcggtttctgttttccagctggtgactcactgatacaattatcaagccacccagccagcaccaggttgtagcgtccaaggaacagaaggattcggcacccagaacacgtgatgtcatgtttttattttgatttattttttatgtgcatgtcatgtctttctacatgacttcccaagggtggggactgtccccatcatctattcattcaacagatactcatgagtgcttcgatggtggggaatgagatgaatgaccaagtctgcacatccacggaatcgcagtctagacc

SEQ ID NO: 68639 - DNA, 3739 bp, Homo sapiens
tcccagcactttgagaggccgaggggggcctgaggtcaagagtttgagaccagcctggccaatatggtgaaaccccgtctctactaaaaatacaaaaattagccaggcatggtggtgcacgcctgtaatcccagctactcaggaggaggctgaggcaggagaattgcttgaacctgggaggcggaggttgtggtgagccaagattgcaccactgcactccagcctgggcgacagagtgagactccatctcaaaatgaaataaagtacaaatctgatgtcaccactcctgtgatcaattgtccttggttccccatggcccttgaggtcaaggccagtgccctggccatggcccttggccctgcagggtctggcccctgaacccctcctcgcacgctgtgctcctccacactggcctccagcatgctctgcctctgccagcttcaaggcatcggtgtctgcaattccctctgcctggaaggctgcctgccaggttcaggttgccccatcatttgcattcatagcacggctggagatccttcatccttccagtgtacaggcatgtgagggattctttaattagtcctccaaggccagtgagggatctgtcttatgttagatcctggagcccagcacaggcctgtcattgactattttgtcaaatgggatgaaggagtggaggaaggagagaggagaggaaagagggagggagggaaggagtgattgaatgactgactctccccaagatagggacttaaagactcaaacagcagaacaggcagaggagggcacagaggtcgggagacccagctgctttcagctgtgtgacctgggaccagtcccttcatgtctctgggccttggttccatctctttgtgcattagtgatgccactgaggactcatcatcattcccaatgtacaagaacacggatgcacgtggccctataaataggtcgcagcacagatcagggtcctcagacttgtccggagggagggccctgcatacctgccaacgccctgtttgctgggaaaggggctgatgttgcaatgacaggttaaacagcaacaggacattgactggcatctgcaagctgagctcagctcagagaggcgaggagcacaggggagggaggaaaatcccggtgtggatctcacccacacggcccactgggtgctcctggcagacggaattatgggtgcttttactctctcattttaaaaatgtgctttttatgtgtattgtaaaagtaacagattcccagaaaaaaatatctaaaaaatgaagagaaacaagattaggcgtaataaggtaatctgtgggacttttgttttacttttagttttgattgaagttgagtttgggagtgggggagaagggatgcgacctttgccctggggccaccatcgataggccagggtaagagcttactggttggccctggattcctgccaggagatttgtaggagcttcgaggaaggaggaaggaacagctatgacctccccctcttgcctggtttctgtccccctgaggcctgggcagggctcagccctaaggctgccctcagtgaaggctggtgtcctaaccacaggtcttatcccaccatgcagtgggcctgaggacagaccggaggacgggggaggtctgtctctgctttccagggagccaagtgccactcttgccccaggggtggtgtcccgggaggcctcctcatcagtctaacaggaggctgccccagcaccgtgcacacctggatcagagactgaccctgctgctcaccagctgtatgaccttgggcaagccactcccctctctgagcctccatttcctcctcagtaagacaagctaataatagcagcttgtggggatttgtggtgattcagagagaggccgcgggtgtgggcacagccttgtctgcccattcccagagcaagcattgagggggtgctcgggaacagcacagtgtgtcatggtgcccgttacggcaaacgtcgtccatcagtgctggctgattcatggacattgaggaagtacagtgagggatccggctaagaaagctggaatgccaggctcccctggaaatccccaaacccaagcctaaccggagccagagactgtgctaagtgatctctccctggtattaagagcttcctatgaatgagatcagtcaccattgtctccattttatagatgaggaaattgaggcttggaggcatcaattctcttgcccaagtccacccaggggttagtggcagagctggattcaaacccaggcagtccagctccagagttcatgggccaattcaccattggctccccacgtgaactccacggccacagtggtcagacagcccttttcttggccaagttttccctggctccatcctacacagcctgggaagaggctgcggggaccagaacacagccctgcagtgggcagctgaggggcaggatctgctgctcaatcttcaggcggccacagcccagggtgaccaggatgaccagggtttctgccggtgagcctggggatccaggtcttggatttcggggtttttccaggaaaacccatgggcttctttgaaaagaggtgttttagggctctcagagggaagtgtctggcatgaaggagtttccacaagaaaaaggaattcagaggtcacggggaacaggcagtcccaggcagagaggcaggagtcagaaggcaaggacagccgagctgagaacctaggttaggctgccctgacccagcctgctggtgtggaggatgtgctgggggccctgccaggcaccctttcctgggccttagcactggttttggaatcagaaaagctggaagccccagaccagccttttagattgagcctggtaataataatagtcgtgacaataaatagtatcatcacataagtattttctattatgcacccaaaatcattttaagcacttcccacattcatttatttatttagagatgaggtctcgctctgtcacccaggctggagtacagtggtgcaatcatgactcaccgcagcctcgacctcctgggctcaagtgatccccctgcctcagcctcccaaacagctaagactacaggtgcaccaccaccacgctcagctacctcacacatattaactcatttaatcctcacaaccatcccagtataaaggtactaccgttgtgcccattttacatacaatggaactgtggttcagaggagttaagtgatttacctaaggacacacagctggtaagaagcagagctaggatttgaacccaggccttgacttcagaatttgtgctctctctctttttttttttttttttttttttttgagagaggatcttgctccgttgcccaggctggagtgcaatggtgcaatcatagctcattgcagccaacctccaggggtcaagcgatcttcctgcctcagccttctgagtagccaagactccagacacacaaccatgcctgctaatttttattttattttatttttttgtagagacaaggtctcactatattgcccaggctggtctcaaactcccggcctcaagcaatcctcatgtcttgagtctacgttcttagccagcatgtgatgctaacccattctcataagcaccatcatcagcctggcaacaatcatcgacattttctggccttaaattttgaagatttttgttttagatttattttacttttttggttttaaattgctcgatattccccctctacattttagaa

SEQ ID NO: 68640 - DNA, 5297 bp, Homo sapiens
gtggtgggcgtctgtagtcccagctactcgggaggctgaagcaggagaatggcgtgaacccaggaggcagatcttgtagtgagccgagattgcaccactgcactccagcctgggcaacagagcgagactccgcctcaaaaaaaaaaaaaaaaaaaaaaacaggaccctgggaaataaaggaagaacttgactttgttctccttctcaggagagaataaaaagccatgaaaaatcagagccaattcattttctgatgtattttatgcatcacggtcataccaccatttcatttatatcccacagcaggctacggggttgctgagcagttagttttgcaattatcatcatgatattcagatgagaaaactttggtcaaagcctgagatcatacagggaagatttccctatggtttcagggtaggaccctccctagagggtcattgaacattgaaacctgacccagaggctgctgggggaagcctcagggtgaaccccaccccaggaggccaatacctcctaacacaccaggaggttgaggggccaggggtgcaatggttcttgctttgtgagttttcccagcagagtctcaagaatttgtacaggtggctggatgataaatgaaatttatcatcaccagtttagagaaccagcccaggctggcccactggggagtgagaaaccacgtgaaacagatgagccattggctgagccagatggtaggagcctaaaggtcaggctggctttactgactccagccaagcccagcctagacagccatgcatggctgacccacagacttgtgagaaataataagtgattgttgtttttagcccctaaatttcaggcttgttatgcagcagcagctagcagatacaaccagatcagcagttcccaaagtatggttattagacaagcagcatcagcatcacctgggaacttgtttgaagagcaaattctcaacccctagtgttttaagactctcagtgatcctgagaaccactgatctgggtgagggtttaaagcctcttcttagcacatgcctagcacacagggctcaccccagcacaactccaagtactgcctattgtttcaatacatgagctttactgttccctcttccccctcccaggataccaaccagcttcacagttcccaaaggctctcctagttctttctccaccttgaatccaaggctgccgcctttgctgtgtgacctcagggcagccttggccctctctgaaccttcagctgtttcagggcctttgcatccctgacagcatgaagtgggtgactctgtgactcactcccacctgtgcagctttggctgcccccagacacagggccgggcacacagaagggcctgagatggttgggagagacagggtgtggcccttacctgcccaaaattccaaggtatgttcttgatgaacttggccgagccctggtagataaagccctgctgggtgaggacatactcctgccgctcctcttccgagtccaggtacacagcatccgctgcaggcaggaagaaagggacctcagctctgggtctgcggaggcccagggtccctgcaaatctggagtcaagggtgccaattccctaggccaagccagcgtctcagggatccatccttcttttaattagaaaaagtaaccattaatgaataatcccacgtcaatgagataaggtgttatcggttagtgacaacaaaggctgccatttcttcaacactcactgtgtgccaggacctgtgataaatgtatgacctgtattaataaatttaatctccagaagagccttatgaggaagggatccttgaaagccccattttaaagaccagaaaactaaggctcaggaatattttatagctaggaaaactgagactaaggacacaggagcactggaccgggagtcaggaaactcctgattctcacttgctgtgtgaccctgggtaggctactttgccttctctgcccaccttaacacctcactgtgtcagcccaaaatgcagatctgaaaggtgctttggaaacgaaagccctgaggtagcgtgagggaggcgcatgattcaaggcagagagaactcagtagcagaggggaaggccaagaaagggttcctgcagctcaggagaggtggggtcctgtccagcttgagagagttacagagggctccctggaggaggtggcatctgaatgttgtcttaaaaaatgattaagttttagagagttggaacctggagggtagcattctaagcagaggaccagaaagcacaaagctttggctgctggaaaatgcagggcatttagttgtctgtggccagtgaggggagaagaaggagctgaggaagttggggcaagatggtaggagcccaaaggtcaggctggctttactgactccacttaaccggtgaagaaactgaggccaagaaggggcaatctggagccccattatgactttggtgagccccaggcactcttgacttcatgcattccttcctccattagaaaaaaggtaattgaatgttatgactgccttggttaattacagctatctcaatattacatattaaaacctattgttcaacttaaatgttcatttttttctcctgattttaaattacattaaaacatgttcacgggcccctaagagtttctcaggccccaggcacagtgcctgccgggtctaatggagaagctggcctgggaaggaagcagctgccggcccctcagacccctgggctttgtcatgcccgtctgcagcaaccagcagccctgactttcatcgtagtgaggaaaaatgggaaagaggccaagtctcttgtgtattctgatctttggctctggaaacttctataaaaattaaccttgaagtcaatgaactataatggctctgcagcagccggggggtgtgggataagaatgaaagagaaagaagaacccacagtgtttcaacattagaatgagtgtcagcacttgttgaattgtccccaccccagctcaggatgccaagactgtgacatccccagctcaggtccccatctggtaaaggtgggggcactggggacgtgaagccttgcatataactggcactcgatcatattggtcttggaactgacatacaggagggtcccattttccaggcagacccggccctttcccacccatcagactgatttcctcccgcagcgcccctgcgctcaccccagcccaacttcctgcctctgcatcaccagctccacagttcccgccccgggatgtgggtcactttagtcactgtgccgcttggctgaccgccactccaacccgccgccgggtgaggccaagcaggaggaagggggccatcccccagaaccacgcttcccattccctgaactctgaaaccttgtggtgtggacgagggtggggacaccggcgtgttcctgtcctgttggcagagctgccaactagttgctaccctctgcagattgactaaaattcaaaacaaacctatggggcggggggggggatccagtaaggccacttctgtcccgagaaatcattccattggccacagggtatgaagcaagggtgctcgttgacgcatggtccctgcgtgccatgagcctccaggcacaacctcatgtccatcagtgggggctggaccatccacatgggcaagaaacaggacactcaacgcccttagaaagaatgagcagatgtggccgggcgtggtggctcacgcctgtaatcctagcactttgggaggccgaggtgggcggatcacctgagatcaggagtttgagaccagcctggccaacatggtgaaactctgtctctactaaaaatacaaaaattagcccggcgtggtggtgcatgcctgtaatcccaggtactcgggaggctgaggcatgagaatcatttcaacccgggaggcagaggttggagtgaggcgagattgcaccactgcactccagcctgggtgacagagagagccttggtctcaaaaaaaagaaaaaaaaaaaaagaatgaatgagcagatgtatgcagaccaatgtggacagagcctcacggtgtattgtgaggggaaaaaaccaagttgtaggttaatgtatacagtgggatccttttatgtttgtgatagagagacagagacctataaaatacagcaatttctccaggcacatacagactgacctaaggaggtgagcccccgcaaaatatctaacaatggtgtcccccaaggaggaggggtcaaagggggaggccatttctctgtagtcttgaagccctccccttctctccccttttttggagacagagtcttgctctgtcacccaggctggagtgcagtggcacaatcccagctaactgcagcctcaacctcctggactcaagcgatcctcccaccttaacctcctgagtagttgggactacagatgtgtgtcatcacatcggtctaatttttgtattttttatagagacggtgggtttcgccatgttggccaggctggtcttgaactcctgcctcaagtgatccccctgcctcagcctctcaaagtgccgggattacaggtgtgggattacaggtgtgggattacactgcacctgggcttgaagcttttctaaagagaatgctgtcatggtttactgttatactgggaaataaaaatcaaaatatggaaaggtgaaaaattttaaaagctttctgctcaaatataaaatgcctcaaaatagagaagaaaaaagataaagcagtgggccagcaagaaggtggttgtctaacagccaggaggccagaatttctgcccttttgaagagggacacccgattcccaggaggggcctggcccatgatgcttctttccctgctttgtttcattagaataggaaggaaacagatcattagatctgactgccttgctagttagatgggaaaatcgaggcctggggaggtgactggcaacccctgcctcctcccccttgctcaagtcagtttcctttgttccaagctctcccctctgactttctagttttgtccaaggttgtccacttatttattcaaagagattccaaaggccacttcaccactctgagcctcagtttcctgtgtgtgaagtggggaagtgtcatctcccccttgggattgttgagaggcccgactgagatagtgtataaggaggcagctggacggtctaactgctcctactcacccccctcccccagccctccccccaacctcacctccgggtttcccttccccaaaccagtctgggtgagatttaaaacagggcctcccacctcagccgggcacggtggc

SEQ ID NO: 68641 - DNA, 881 bp, Homo sapiens
caccccagcctcctgagtagctgagaggacaggcgtgcaccactaattttttcatttatcagtgagctgggactataggtatgtgcccagctaatttcttcatttttggttttgccatgttgcccaggctgctctcgaactcctgggccaagtgatggctcctgccttgacctaccaaagtgcaggtgcgagccacagtgcccagctttgcctaaatcttttaatcacaaggtcgtgaccccctgtggcacttcctagctgtgtgacctccagcagccatgggaccagcagtatctacctcccagggctggtgtgagcaagaaatgaattaatgcatgtaaaacacttagtacaatgtctgttgtgtaataaatactcaataaacacgagctattctattgctatcagagggttcttttggtttaagcaggggcagtatttggtacaggtcaattacatggcctttgcctttagatccaatgttcaatttacaggaaatacccagggctgaggaacaagttaaacacagaaccaggatgcagttgacaaacttcatatactgggaaattattgacaaagggtccggtttctttaataaatagattgcaagaaagaaaatgaaaaaaacattgaagagagaacctataaagagaaacttaaacccgttgtgatgtattgatctatttggatcttgatttcaaaaaagtattttaaaacatttattacatgtatgagacaactggaaatttaaatactgatggcataatggtgatatcaaagaatttttgttaatttgtttgtgttaaaaaaaagagagtccttatcctttaaaggcatatactgaaacattgacagatgacatgatgtgatgtctgagatga

SEQ ID NO: 68642 - DNA, 1703 bp, Homo sapiens
tcatcataactggcatctccaggatctcccagccccactgagccctgcttttgagcatgggggtgagaagatgcattgaggacaagcggccaccgaggcgacacatcacagtgtgttgggagctgggcccgagggaggcaggtggctgagatcacacagcagggtcaggtgggtccacagttcctgccacccattcctgctccacctgccccatgtccctgtcccacaccccttcctgggggttgcaatgggtgcagaagccatccccagatgaacttgacccaagagccagctgggattctgggtccagcagtgacatcctccattgtagaaatccctccagctgggacctacgagagtgctgcttgtgtgtggggagggagtcaggggcaccagtatgaaattagttaagcctctgttccactcctctcgttcctcacagatgcaccaaaggctggagcagaggaccagggcacggtcagggtgacagatgggtgggggtcttgggggaaaacaaatctcataaaccttgtcctataaaataaggacactgttgtccttattttataggtgagactcaacaattggccaaggtctagggttgcagaacgtgagggcgggaagaacaagcctgatttccgaaggctcctggataggatgccgaaagctcctctctggccgctggagccaaggactcagccaggcttggcttgcacaccaccggcgtggcatgcacaccacctggtcctggctggcaagaaccacccaaacctaagtgttctgaggccaggccagcaccccctgcacagctccaggcacacatcagagagccagcccccactgactgactgaggacacgtgccagtggtccgccaggacagtactttacagtttacaacaccccgtcgcgttccattgcctcacctgatccagggaggcaagggttaatggttatgcagtgtggatggggaaactgaggctccaagcagcattgagacgcctcctcacccagcccggtctgcctgttgctctccaaatcaggacttagggattcagctcccaccgggtcctgacccccaatgccccggggcccctgagtggcggctgcggtgactctgatactcaccctcggccatggtcgggcgggggcggtggctccttccactggcggcgagaccctccaagtgcgaccactggcggctggcactgccgaggcggagagcggcgctaacttatagcccgctttggggcgggccgggggcggggccccgcgggaaggcggcgacctgggaggccacccattgcccagtcccgggcccacgccgccagcgctggggctcacccaggggaccggagcccgagggagggacggcggccggacgagggcgccccctgggggagcggacagggacacacaactagcccaggatacagacacacctggacccacagactcagaccttggagaacagacacctggacacacacactcagatacagacacacgcagcaccctcatagaaacacacaacggaaccggggtgcacctggacacacagatgtggactcttaggtcagatctgggatcaagaacacctccccacccccaacacacacacacacacacacacacacacacgcacacactcacacacatactcagatatacatacacagagagcagacgcagacacaccaagaca

SEQ ID NO: 68643 - DNA, 3139 bp, Homo sapiens
gccctgagatttggcatggaaatatcaagtatcccagcacctggctatttcgggacctcaaggagagacgggaggcatggggacagtcagttctgcagaacaaaggctgtgtttccacaggcgttagccctgccccagatgaaaggatgggtttggccttttctaccaggtattttttcctttaaaaccctcagcctgggagctccctagaagacagggagccacctaagtattttatttttttgagacagggtcccactctgtcacccagatcgtgtagtggtgtgatctttgctcactgcagcctccatccctcgggctcaagcgatcctcctgcctcagcttccctgagtagctgggactacaggagtgcgccaccatgcccagttaatatttctaatttttgtagagatggaggtctcactatgttgcccaggctggtctcaaactcctgagctctagtgatctgcacgcctcgacctcccaaagtgctgggattatagtcatgaaccactgtgcccagcccacgagagatttttaaactcttcttgaccacagtgtccagcatggtgcctggctcaccaccagcccccaaaagtgtttgatttgagaaatcatcaattctatcagcagcagcaccagctccattctgaacattgttattccctcttcctgcaggcctggacttagttcattacacagagtgggtatgtcacgcagctctgggtttaaattttggcctcctcactgtgtagccatgtccactacacagcaagtcacttaacctctgtgcctcagtttcctcatttgtaaaatgggggcagtattggtacccactccccagagtgtcatgaggactgagtgagctaattcatggagagtttgtacagcagcagccaaacagtcagccctcaatggatgctggctgtgagaagaatcccattagattattcctggatcccagcacagggcttagcacagaattccaggcctgtcccgcacccagccagctgcccccacttcctctcccacattccacagaactatggccacctgagtgacgcatggcgttgagcaaccccaggatgtggccagccggggtcaggactggcttctaggaagttggcagacagaggccagaacccaggcttggcccagagacctggattccagtcccagtgaccaggcacccttgcccctctctgggtttcagttttcccatttgttcaaagggactgggaaactgtgccctgtcttacctcaccggggctgtaaaggtttcaaaactcccctgagtcccagagagggtgatcatggcctcaagatccccagacactgcaatcagggccctttgtcatctattcaggggaagtgttgtgcaatgcttagagcaggagggctgtgaggtcactcttggctgtgtgactctggataagttactaggcctctctgagcttcagtttcctcctctataaaattggtatcgtaagagtccctgccactggggattagagatcatgtttctacagtgcttacaggtcacatagtaagtactcagtaaatgtcacctaagctttatgatgatgtcatcaagagtcaggaccctctccagaaaagggagagtccccgtgtgtgggtgaagcaggttgcagtcaatgtagcatatttatttggtgggtgttgctcagaaagactctctgtctcacaaataaatcttgttctcacagccactgatgcctagaatcccagcgttagagagattcagtcccttccacaaggattctcaagcctcaaggtggagacaaaggtgaatatttagaaactttggaataacccactaccagccagatattccatttaaacctcacagtatgattcttatcatttgttaaatgaggaaccctgggttcagagaggggaagtgcctcacccaaggccacacagtcaggaagtgggaaagcagggcctgtgctggctccgccaaggttcagaggtcagtcctgtctccccgtgccctgcagggcagtcctcaggggcctgggccatgtccagttctacagcttttagcaagtgaggcctccgaggactgcagcttgtgctcctaacacatggcatgtggtatacactggatgcttaataaatgtttatgacctgagggaggaatgagttacccacagctggagaaagaatagaaggaaggaaggaaacacagaaacaagattaaagttcagcaaggttggagaaactgcctaaggtcacacagcatgaccaggctctcgggccctggctcagctcagccactcctcaaggacaaggtgcctccaggccagagacagacgtagacagctgatgtgagagggagggagggcggggtgggcaggagtgtgccagggcatctggaggcttttctaccaactactgactaaccgggatgagcagtgtctggtgtgagggagcatagggagggtggggcaggctctcctgaggtgggatggggtggggcaggggtgttaggttgcggacttaaggaaaatgtcaggaggcaggtgtgacctttcaagccctttgagagaatggcctgtctggggcaggatctgggtctcccaggctgtggaggacagagaacagggcatctgtggagggagggaggattcttccagcgtgtccactttgcagatggagaaactgacctggttgtcttgtcctcagctctgactccacaatgtaccaccctccaggtgtagtgcatcccccttccaccgtccctgcagccggcacggggtcccagccccttgagcttgatgggccatgggtaggcacttttattcacttctctgaagcatcagtttctgtttctgtgaaagtgagaatcacatcccagacctcatgaggcactggaggccctgcagggctgacccagcttacccttcaatcgcatcttccacattcatcccttccagcctcaccaggcatggtacttgccctcaaatgagccctgcaaacacccacctctagggctttgctccagctgtgtcctctacccaggatggccttccctcttcacctatcgaagtttaacccaggctttacccatcctccggaaacccacccagagacttccttcttgctctattggccc

SEQ ID NO: 68644 - DNA, 375 bp, Homo sapiens
cagactgagtgtgcgtgtgagaggcgtgtcaaaggtgattccaagggttttgacctcagtaggagggagttgtcattgcccgggaagggaaggttgcaggagttgctggtttagtggggcgaaagcagaagtttgagtttgagacatgtgaagtttgagttgcctcagacatccaaatggaaatgtcaggtatgtcatcattaaataaataagccctgctgcctcctgaggagcacatgacttcaacagcatggactcagctttctaagaaatggcagcttggtcagacatgagtgtcagcattcgagcacccacctcctggccactgttttctctgtctgctcagcttcttaatatactcgcctcatctcccat

SEQ ID NO: 68645 - DNA, 644 bp, Homo sapiens
gtggggggtgggcattcaggtcagggtcaaagggaaagaggattttggcattgccccagtctgaccgcctggctggcctgcaggcctgcagcctgaagctgagccacgagggaagcccagcccagaccagacagccccactccacatgcagatgggagagtgagaataagtgattgctgttttgccactgagctttggggtcatttttcacacagcaataactgatacaagtccacggctgcagactgtacagccagctgcctcccatggacctcctagatgcctctcagccaccaaccgccaacatatcagacccaacctggcaacttcccaaacctgctcctcccccagtcctacctcggtgatgaccccaccgcccagtcaggctcctaggccagaaatctgctcacagcactgcttctcctcctgcctcccaacccacaatcagccctcagtgtgtcccacaccacttcccctccaccaacagctctccagccaggtgctccgcgctgtcccctgcccccgccctgatccaggcttcaccgcctcttccaggaagggatccagaaggcagtcagcccgtccccctggcagtcagagtccagaagagggaaaactgggcccaggacccaggatcacctgac

SEQ ID NO: 68646 - DNA, 855 bp, Homo sapiens
cctcaataaagaatcgcaagctataaaaggtgttgcaggttatacctttgtaaattaaaatacaccaacaatgtgaaagctaaagaaaaatatgtgatgtaagaacatttaatgatatggaaaaacattcacagtatcgtcaaatgaatatccatgttgcacaacgctgtaatacacaagtctatgtacacaaaggcatgcatacatgcacacaccggtagaaagaaaaaactgctggataaacgccgcaaatggtgtccacaggtctctctgagtggaggggtcactgctggtctttattttctttcgctccctgggtttgctgttttcccacgacgtttcccacagtgtgtccccgctggagtccatggctgactcagggaggctgggaggaggtggccactccacagctgggaaaaccgcagcctcccgatgaaccctggctgacgacctgtctatgtttactttttctccctgggcagacaagacaggagactggaagaaggggccagaaattcagactcagaagccccctccagaggccacaaggcagcctggtcctctctgaaccagtggctcccactcactggccccttgtctctgcctggactcctgcggatgagtggaaggccaagagggcgccctctggtgcccactagatcgactcccaattaatcacttaactgtgtgaccctgggccaactactcaacctctctgtgcctcgggtcctcctctgaacatggggataaagacagtgcttgcctcgtggggatgttgtgtgtgtatacatgcatacacacgtgtgcaaagagcttagagccacgcctggtaccatttacatgctcagtaaatgt

SEQ ID NO: 68647 - DNA, 870 bp, Homo sapiens
tcagtgggatagagcgcccaatacagctaatgaatggttggggttcaataaacagccatatgttccccccttcctctgagatcactgttaaaaatgtcataaaggccttaaagggaaaatagtatattggctcaggtaactgaaaaatccaaggctttcagtcaaggaaagacccaggtgctcaaatgatatccttaggaatctgtctccatctcttggctttgctatcctctgtgctggcttcattgcccagcaggctgtcaccaagtggtggcaaaatagtcaccaggagcttccttattttcccagagaaaagagaataccttattcccaatattcccagcagaagtcctgggactgactttcattgggccagcataggtcagaggtacatccttgcagcaatgactgtagcagaagaagtggactatgccctttggtcagcatggcccagagctcagtgtggggtcaacggcactaacaatgcagggaatgtgtgaattctccaaaggcaacatcggggggctgtgacccgtggaaggggagtggatactgggtgggaaaaccagacagtatccaccagagtgggtctctcctctctagagactgggttctcatgctagtcaggcaattggtggtctcagtcccctcctccccctctcacaggctgctcctggaactgaagcactcaaatattggccccttcccggtgagtctgaggcccttggtggcttcttcctccttctgacctggcggcggggagggggacatgtcataggctcaaggcattatttaagaggctactggctcatttgcatttaatttggttgtgaattaatagttcaaggagcttcgtgggcagagggacct

SEQ ID NO: 68648 - DNA, 2476 bp, Homo sapiens
cgagaggcaggcgtttgcacaaaagatgaataagtgcagaagaaatgctcagtgttgctaattgtgtccaacagggttcaggcaagaaaagagaatccaactgcattggttcttgggatttgattaaagtggctatttctagagttgggggacaagcttgaggaaaccaaccagggactgtttttcctaaggctcaagcagcaaagaaaagcatctgggtatcccagcccaaggagataataggagccaaggacaaggccttatcaggagggacacagccaactgccacacttgtgatctagagaagacagcagggaaaagtgccctgacatctgacctcctgccatgccaccctctggctgaacccaagtagagatgaggaaactgagtcacaaagtgcccaaagtcaccccgtgggggagtcaggattcaaatccaggccatctggccccagagtccataaagataaacataaggtttgtttattcctttggcaattatctactatttgctgctcagtattctagacactatggattccaaattctgggtttttcaaaatcttttcagtaacacttttgtagtgagaatattatcggtggcgagtccgcaacactcccagcccttgtcttctcagaggaaagaattcaattgagagacgcaggcaagttttaaagcagaggcaaaggtttattgaaagaagcaaagtacaattgagagatcaagtgccccgctcaacctttggctcggggcttttatacactggcttggttctggggtttcttctcctccttgattcctcccttcggtgggctgctgcgccctccctgcatgcgcaatggcctgccagcacttgggaggggccgcatgcgcagtgtgtttactaaggttgtgcgcatgctcacttggggtgattttcccttactggtccgtcgccgcaagaaaaaggtcatatacaagtcagactccaacatttgcccttctgctcgaccttaccagggaattgtggtttgctggctccagatgatgtcaactatctgttagggaactcctctccctcttggcgccattcgtggccacttatcatgtcagagggacagttttatgatcgcctgtccatcatttgatgcactgccatttctgggggccctctcctgcacaagaacacaataaacagccttgttaaaagagtccctatttcactgcaataagactgagtggtggccagagtggtagcagctgttgcttttgtggaattggatggacagcctggtaggagaaaggcccaggggttctgaccagcagtggggtcgtgctgctccctgaggcctctgctgggtcctgggccatcagcagggaccttagccagcagtgggcacctgcaggggtggaggccaggcctgggccatgtggcagctctaaggtccaaagattgctgctgtgggaaattcccacccctgcaaatgactcccagccagggacatccttaaactgctgccagaggaagagtgacatctatgtccccataagatccttatgctccagaatgtcctcccccactctcctcccctcctgggcaggctgaggtccaggaagcaaaggcccctaggcacactggggatgcacctgtgagccctttcctgctccaaagcctcccaaaggctggctccttaccctgaggcctctgctcagcttgttgcctcccaagagaaccctgccctgaccagagttttggaatggcatcctgcagacctggacttaaattcctgctgggtgactgcagcctacatcacttcaccctgccaaacctcagtttcttcatctcaagacaagactaaaatatccacctggggttgctgatgcaaggatgagaggagacgtgcagcttaaccagcacagcgcctgcacatagtaggtgctcaataaatatcagtttctttccaattcctgctgggtgctgcaaggatctcaggaaatggaagactcagccgtgcctgcaaggagccatcagactggtggtgtggggactgaggggagggacggatgaggatcccaacaaacctcagccccagtgacaggagcaacacggtacagaggagcagagaggcctggactgtggggttccctgtgcttaacgtgggacattctgatcttaacctcagtgcctgccagtgctgtttgtgacctattgggagtcaccctgttaatcccaccacattcagttggttgaggccatcatgaaaacctgcccaatttcaagggaagggggcagaaacattaccttttgatggaaggaatatcaaagaattcgtgggcatatttttaaaggaccacaattatcaaaaagcagagtggttaatgctgtggtggggaaagcgcaaagggttctgggacctcagaggggaccctttctagaatccagagaagcatgggagtggtcagggaaggcttcctgggggtgagggcaaagcagaac

SEQ ID NO: 68649 - DNA, 3087 bp, Homo sapiens
tttggaaggccaagcgggaggcttacttgagctcaggagttcgacaccagcctgggcaacatagcaagacctcgtccctactaaaatacaaaaaattagctggacatggtggctcacacctgtagtcccagctacttagggggctgtggtgggaggatcacttgagcccaggaagttgaggttgcagcgagcgatgttcatgccactggactcctgcttgagcaacagagtagactttgtctcaaaaaatgaaaaaagaaaaaaaaattgtacgtatcaacaagcaaaaacttttttaacacttataattctacccccacaaccagagacaatgcctcatgactccttgctaaatattttccagattgttgaacatagaagcctattttgaaccccccaaaatagaaccttactctatggtgccattggaaacggatgcctcatgacatccctttccttgccaagaaatacctttatttctgcagcctcactttaagggacatgtcataattcatttaaccaatgcccttctggtggatacatgaggttgggtctcacttctcctgtcctgtttcccacagcatagcagtggtatcttggagcagtgatttactggcacactgactcaattatgtatttaagggcaagtccctgaaattgaattcctgggtcacagggcatgcaactgtttaaacatttgccaattgccttccagaaaatttcaccaccagcaaggtttgagaaacactgttttcccattgggggaaacatttattttttaaataaacgagccaatatattttaaaaaagagagtttggttggtgccagatgtagcttcactctcaaccctgccgtctgctgggggtgagatctcaagggagctatgtggcttttttgaacctcagtttcctcatctgctaaaccaggccttcctagccgagctcttaagagactggctgagatgaggcaagatgaacagtgatgaatatggggtctttctgtggggagggtggacagggatgatcataggagtcaggcttcctcatccactgatctaggcagtgaaaactggcttctaagtatgaccttatgacttcagtgatgtcgcaagcaggttccagtccctgtgcctccccttcccgctcccaggaacccatccagcctcaggaactgcccccagccatcgagccttggctacttaagggacctgggcccaatccacagctgggacagtcctggcccactgcactgggaatctaggatgggggccttggccagagccctgccgtccatactgctggcattgctgcttacgtccaccccagaggctctgggtgccaaccccggcttggtcgccaggatcaccgacaagggactgcagtatggtaagaagccacatctgctggctggacttggcaaacccacgctccaggctgctctgggtacagtggggacagggagtggggacacagaccggaccctctccctggggcagtgccaccttctgggtcaggtggctctggctcctattctggccttactgcccaccagctgagtgccctgggcatgttatttgtggtagtgaggtcctccaccagccaacagaacacagctttgcgtgcaagtagttgatttgggaaatgattccaggaaacactgtagggaatcggtactgagatgaggaagggagggcagccaggagagagtgtgcaattaaaccagccaccacctctgatgatgggaaccactcagctgggaaaattctgcgtaaagtttggaaacacatgcctctgaactggaagtcagaattgtggtcacctctagaggcaggcagagaccctgaagggcatgagggaggtctgccggggtgctggaagttgccatatcttgatccaggtggtgatcacattcctgtataaacattaaaaattatttagcaatacctttaaaatttgtgcccgttaggtactttatgtatattattcctcaattttaaagaatgggcaggccaggcacagtggctcacgcctgtaatcccagcactttgggaggccgaggtgggtggatagcttcaggccaggagttcgaggcaagcctggccaacatggtgaagcctcgcctctcctaaaaatacaaaaattagccagtcttggtggcagccaactgtaatcccagctacttgggaggctgaggcaggagaatcgcttgaacccgggaggcagaggttgcagtgagccgagatcatgctgctgcattgcagcctgggcaacagagggagactgtctcaaaaaaataaataaaaataaaacaaagaatgagcaaaagtaggagtatttttttttaaatactgaaacaaagcctcccgactatccaggtggcatgggaactgggatatttatacaccacagtgattgattgagggcttctgggccgggggtttgtcaactccccagcacttctgtcctgttgcatgtacctgctttctgcagttccaggacaaaaagcctcgggacatacaggctcagggaggcagacattggcagctgggagtcaactgtcactcactggaaagactcaaggatatggacaggcactgaccacatgtcttctcacatccctagagcctcaattgccttacctattaaatgagataacaacattcccttagatagggttgttgggagcccagactggctcgagacaggcagagggaaatcagggaaggattccaggatatagtaaaatggaaaagacagtgggaattacccagggacaaggggtagcgttccaggcggaaggaccccaacatgtgcgtttgctagagggagaagagcaaattggaaagaggtgaaaggggaggctgctggtcatctgtgtacccatgtctgccttggggacagaaacctgggcccctcagatctcggaacagtgggacctggtaactgctacttgcattgaaactgtaaatcagggaagtttctcttttgttcctttgcactgtgcacacacaccatgtttatgtaaccagtcctctgaggttggacattttggtcctttccatattttttttttttttgaaacggagt

SEQ ID NO: 68650 - DNA, 3197 bp, Homo sapiens
aaataaaataaattagccaccacacctggctaatttttaaaattatttattataaataaataaatctcattaatattttttatattgattacatgttgaaatcatactatgtattactaaaattaatttcagctctttctttttatctttttaatgtatcttctggaaaatttaaaattacatgtgtggctctcattctattgctttagaaagacggctggtttatatgttacctacatatgcacatttgttctagttccatgaaaggaactggccacactctcttaccctggcttttgtcactgaagtatcttaaatatctctttctatgggcatatgactatctacctcattttttttcacttttttgaatgtgcttttaaaaattgataggaaattcacggaacataaaattgattatttgaaagtatacattcagtggcatgtagtacattcacaattttgtgccatgtccacccctatctgactccaaaacattttcatcatcccaagagaaaattccttacccattaaacaatcattccccatttcccttcccccagctccagacaaccaccactggggttggagactcctggaatagaccacattttgccccattgttctcaaaggctgcataacattgggtgcccacagcttattcaacctgtcgctgctagcggacatgtaggctgcttcctttttttttttttttttttttttttgctactgcctatgatgcttcagtgagctgccccacaccacgcgtatatcttggcaggaagagctacgggataaaggcttagaagttaaattactgggccaaagagtatgtatgttagaacgaggagagatctcactgatttgtgtttcagaaagcttgtgccaatgtgcactctcccagccacagtgtctgggacttctgtttactcgtacattcaatagcattgagtactaaaacttcaaaagttttttttgaatctgataggcgagaactggtgtcattgttattttcatttttaatgacttttacatgcttattttgtactgcatttcctgttcatatctttttttttcttttgagttgttctttctttccttgttaatttatattggcttgttctttgtatattagggaaataagctcatatattaaggaaattggctctttagatgtctcatactgcaattttttttttactttacatatggcattttttttgtccactgaagttttaattttctatgccgacaagtttatcaaggatttcctttatggcttatgagacttggatattgcctagaaaggccttcatccagccctgcctggaaatactggatctgggctttcttctagatcttttatggctttatttgttattcttaaatctctgctcagctccatgtatttggaggtcagaactgagccttctattttccccacaaatggtggcagacccctggtctaggaactaaccatggcttctcttacctcctccagcaaactacagggctcctttgatgtcagtgtcaagggcatcagcatttcggtcaacctcctgttgggcagcgagtcctccgggaggcccacagttactgcctccagctgcagcagtgacatcgctgacgtggaggtggacatgtcgggagacttggggtaggtctccatcggggcactgccagctggactcctggttgcagctcccggccaatccagcgctcagcctggcctccgataattgcaatgatccaggtggcttgcacaggcacttgaagatcattctctggggaaccctgttgagatgaacagacttaagccaggaatattggtgcatcattttcattaaaaaaataaactttcattcacctgacaaggggacccttgtcaggtgaatgaaatctggctatttggaggaacacagaaactttggttgaaggagagtttgcgaaaaacatacaagtccttggacaagtcatttcatctcttctagtctcagtttccttgattagaaaagtgtgaccgggtgtggtggctcacgcctgtaatcctaacaatttgagacgccaaggcagaaaatcgcttgagctcaggagttcaagaccagcctgggcaacgtggtaaaacctgtctccacaaaaaaatacaaaaattagccaggcatgatggcacatgcctgtagtctcagctacttcaggggctgagttgggaggatggcttcaggccaggcgacagaggttgcagtgagctgagattgtgccactgcactccagcctgggtgacaaggtgagatcctgtcccccacccccccgcaaaagaaaagaaaaatgtggattctcaagccgcttccccaaatctgctgaatgtgatcatgcgattgggtgccgcaggcactgggaagccagacacaccgaatcaggctggatgtgctgggacacagcagggcgccgggaaggggtggagagggctccctttgtggactggcctgaccagggaccagggcctggctttcccaggcacccggccatccccaagttcagtggcagactgtgcttctctccccaggtggctgttgaacctcttccacaaccagattgagtccaagttccagaaagtactggagagcagggtaagaaggtccaagcctctggcctcccccgagcttggcgagggctgaatggaagacctcactgaccaatggccctggaccaggccatgggggctggtttagacgtacttgggcccaaagcccagggaggacaaatcatttgcccaggtcatggagctgttgtggggcacgctggggacaaagctccaagtccgttcggttgggcagaaaatggtcaactgcttgaccaagggttaaacagcaggggctaaacagagactccagcccctccctctgctccaccttgctcagtgccccacactgccctgcattccaccaaggtccgaaaggaaaccattcctcaggcgcctgcaagagaccaggcaggaaagctcagcgagggcgtgggccaggtgggaactgggcgagctcatgagcaccagccctggatggggaggcagcaacactgtcagactggcctgttaaaaaggagtatgtgaaatcttcagagtgtatcatctttgactaaatcaaaaagatgtcgtgttaactttcagttcctctaaacactcattcatcccaaaatcccgt

SEQ ID NO: 68651 - DNA, 994 bp, Homo sapiens
ctcactatctctatccccaacttcccaaaatattaccagaaaggggtcctgatccagaacctcaagagagtgttcttggatctcacgcaagaaagaatttggggtgagttcataaagtgaaagcaagtttattagagaagtaatgacggaaaagaatggctactccacaggctaagcagcaacatgggctgctcagtcgcgtatacttgtggttatttcttgagtctgtgctaaaggggtggattattcatgagttttcctggaaaggggcgaggacttcccagaactgagggttccttccccttttagaccatatagggtaacttggaaattgccatggcatttgtaaactgtcttggcactggtggtcatgtcttttagcatgccaatgtattataattaacatataatgagcagtgaggatgaccagagggcactctcatcgccatcttggttttgattggtttggccagcttctttaccgcatcctgttttatcagcagggtctttatgacctgtatcttgtgataccagtcctgctgacctcctagctcatctggtgactaagaatgcctaacctcctgggaacgcagcccagcaggtctcagcctcattttgcccctgttctagatgaagtcactctagttataacaccactgacaaaaacaccctgggaagcacttggccttgccattgtatcttgtgagtgagaaccaaaaagcagagagaggttctgcaaaggtcaaacagccattggggactgggcaggatttgaatccaaatttacctggctttcctgctgcacccctaaccactaccccagtcgcatcctcaggaggccctgctgtgtgtctgcaactcaggcatcccatgcctcccctgcccagtccttcgggtccctaaagactggggcatccaggctccaggcttttgggatggtctgatgggctactgtctgaaggaaaggcaagaaaggagcggtcttcagggagat

SEQ ID NO: 68652 - DNA, 686 bp, Homo sapiens
gggcacctaaagtcaacctctcaagagtgggagggtttttagctgaaataaagatttaagttagccatgcaaaagtcagcttctcactgagtttccaaaataactgcagctgttccaactattcttctgagaggaaaacctttagaaatgttccctgggagatgggctcccaggttgccaagcccttttctggagggaatgttccagactcagctcccttgggactttccctgctgtctgtacgagtctcagacgtgctgaagcagagaatcagatggtagtggctgctgatgtttggtgcccaatggtctggataaattctttttgtttccattagaacattcagtttccccaatctatgtgctcttgggaggtggagagagaaaatccactcattccacaaatatttattgagccagcactgtatgccaagtgctgtcattgtgcttgggatttatcagtaaacaaaacagatccagaaaattcccacctttataaacattacattctaggatgggaagagacaggcaataataaatgagaacaaaagttaattagatagtaggttaagagatgataatggttatgggagaaaatagaacagagttataatccaatctttatccattttgttactcaaattatcccagctttagtcgttagaaatgacttcaggatggccccta

SEQ ID NO: 68653 - DNA, 1583 bp, Homo sapiens
gatctccagagggaggctcaccccccagggaagagaagggtacccaggaccctgagagccatcatcacttcacaggcagattccatctgtccccacccagagtccacaggaaaacagacttctggtaaaaatgcctcggctgtacattcagcccaccagttctgagtatctacacgtggacaggcaccgtgggttcaaaatcaagaaaaacagccaaggcctctgccctcagagagcctttgcagtttccctactttacagaaagtcaacctcaggggaatgaaggaacttagctagcatgtgaccccaagcgcagcccgtctcctaagtcacgctttgctctgcacccgctttgccagacagttctcagaactcagaactggctgagctcattgactgtcccctctactgcgtcccacagaagggtccttccccaaggtgcgcagaagcagcggcacttacccaggggcattctcaccccgcggacagtggaagcccctcagggggtgcagatcagagtgctgcaggagagagagggcgctggctggtgcgaagccgtccgaggtgcagcacagcccacaaggcctaggcaaggaaaaagcacggggagggggctttagtacaaggcccggggacagaagtccagactctgccccactggagtgctggcagcgtcttccatttaaaccacagctaactggtctgtaaaatgaaggttctaacacctacttttaaaagttattgaggggaaaacgagttaacggtctcaaggacgtggcacaatgactgacactttgtaggcaacagtcaagtggctttggaggcttccaatgccaggagtcgggggcgggcagctaaagtcgccgagccctgtttcccgccatccaggggcactaagcctccccgcagagtagctgcgcggacagggggtctgacgaccgcacgtggccggctcagcactgccgcggccaagggcgcgactcacccgccagtgtctttcccgaggacacgcgaatcctggggggctcactccggcaaagaggacgagacactgcaccaaggacagggcctgacctctctggccgccttccccggggcctcagtttcccccgatggtgagagtggagccgaccatgcgccctgctgtggactcacccggcgccctggcgtcgagtggcggcggagacctgacagacagcgtgggaaaaatcaagatgtctgcagatttcgagagatggggtgcggtggcgtgcgatggcgaaggacggcgagggacggcgaaggactgaggccacacgacaaggaagctacgctcgtttcgcgccggcggaaatacagacgagagcgcgagctgcggcctagagcggtaggaaccgacgcgagcagtcctgcagcgtcccctggcggagcggaggctcaacgccagactctggaggacttgggataattttcgaaaactatctggaagtttagaagtaaacttctcccacttgctttgcttttctgtttgttctgaagatgttccttggtcactgattcattattaatctgtaggaatggccaattttccatgataggagctg

SEQ ID NO: 68654 - DNA, 1503 bp, Homo sapiens
gaagtggatttttttctatttttttgcttggagaggagggtgtgtggacaccaagctggccatggtccaagctgacctatttgccagccgacccctgtctgggctgccataacaaagtgccatcatgaactgggtggcttataaacaacagaaatttatttctcacagttctggaggctaaaagtccaagatcaaaggcaccagtagatttggtaaactaggaagcggtgagggcccacttcctggtttatagactgatggctgtcttctcactgtgtcctcaaatggaagctgatgtttcacaaatattttctgggtaaatggatgggtgagtgaactcatgaagggatgctccattagatgaacgcttggataaagggcgttagtggagggacagaattgcagctccgtcctcccagggggcgctgcaggcacgtctgcttgggcaggggcccggcggaagcgccgctctaggctgcagccgcgcccccagccgtatttccgcgggcgctgagcactagagagagcgtcttgtggctgcggcctgcccctcagcctcctccgcgcggttacccctgtacccgccgccatccgtcctggcgctccggatgagtcaatgaggggcagggcccgaggagtggtcttcccaagaacccctggtggcctcccaaggccggtgctgtgtacctcctccccgacaaaaggggaaactgaggccccgaggggagtgggaagagccggctggacgtcaggcccagccgctggtgcagtggtccgtcccctctgccggggtgggcccctcgggtttcgcgtgtcctcgggaaagagactggcgggtgagccgcgccctcggccttcgctgggctaagccgaccccatgcagacgtcaaacccccctaggtcggcacagcctctctgcggggaggcttagtgcccccttgagaaacggcttggcaacgctgtgcccggggccttgcacgcgggctgagggggctagagacctcgcgacttttactcccccgaccccgatctccgactcctgactttggaagcccccaaagctgcttttcggttgcctacaaagtgtcggtcattgtgccacgtccttggaaccgtgaactcattttctcctcaataacctttaaaaagtagctgtaaaacctccattttacagaccagttggctgaggtttaaatggaggacgctcccagggccccagaggggcgaattccagactcctttgccaggaccttgtactaagccccttccctacgcttttccctgcctaggcctcgtgggctgtgcggctatcctggagacagatgacagctctcccttggatggctttgctggttccgcaccagccagcgcccccatttttcctgcagcaccctgatctgcactccctgaggggctcccactgtccgcggtgtgaggatgtccctgggtaagtggtgctggtcatgagcactttgggggacccttcaaattcccttctggggg

SEQ ID NO: 68655 - DNA, 961 bp, Homo sapiens
cgtttttcttgcttttgaacccatgatgtctggctacttgtagatactcaatatttgtgggatgaatgaacaatttaagccttttttttttttaaccagaaattggtcttctgtgactttcttgatgggggcagatgagatctttgtactgcattaagtggatagcgctcaggtcctttgggcttggcgctttggcaatctccaggcagctcactttggcctctgttcctggatcccctttgctcttttctgcgcctgcattcgtaagtgatcacgggctgcccgtgtcctggtcattggtagtgcaggcagaggaaatgcgggaaaggttgctgtgtttggagggtccacatcttcaccctcctgtcccaggagctttcctacactcctccttctcaaagctgcacacacctggggcctccaggggattgggggctgccgtgtgtgttatatcatgattagagctttcacttcctgctccctgctgttgggaaccaggctgtgtgtgttgcttaaattccccttgatgaccagcagagtcactgccactcagccatggcacactgctgtaaacctggttttgatctcctttcaatcttttgctgattaactacacattgatcagtgttggccaccctcaccctgccatagaccatccgctgtcttcctctgtagagttaactattttctcttttatgaggaaatagtgtgtttgcttaggagtgtttactgtctggtaactactgtgctaagccctttcctgttgcctgccatccctgctgcgagcagggacaagctgggtgctcactcatggcatcttatctgttgcagatagtccactgtgtgcagaggcatgggagttgtcatgttgggaacatgctagacctcagtatccttgaggtaagatctctggttcattctctggaatgttggttccttgtatctagtacagttctgtaca

SEQ ID NO: 68656 - DNA, 483 bp, Homo sapiens
tgcaatatgtcactacaatgtaaagtctaaataaaaacaaaacaaatgttaaaaatactcagacctgaagggtaatgaaaatactgtattatcaaaacttgtatgatgtatagctaaaacagtacataggagaaatttatagcctcaaatgctttcattgggaaagaacttcccaccagtaagggagtgtgtgactcattacacaggttagacggaagttcagagagttctccctggtgtctttggcatttctccaggatttttgcagcactccgagggaatcagagccccagtaactactgagattgaatgagccactagtgcagtacaatgcagacacagaacagattatattttattccacaaagaaaaggaatgagatcttttcccaccttacctttgtgaaatatgttccatttccattggaggtgctgaaggaaatcaggttttaagtcatgttttatttagatctgctagagagac

SEQ ID NO: 68657 - DNA, 1549 bp, Homo sapiens
gaaagcaaattattgaaagtggtactgtttacaaaatgtctagcgcatggcaggtgctcgaagtagtatctcttagtattattactactgtcttatctcgatcagattcagctctttaatgagaggctctaaatcttatgttcgattcacctttgtaacccacaccgggcctggaatagagcactgttcataattaatgctgtgcccgtgtaataagacggcggcgagcaaagggcatcatttcagaggaagagtgctgtaatggtgggatgggagaaattcctagaacctaggtgggagccagaatcttgcagagaagccccttatccgtctgcaccgaaagcaggtagagtggatgccgtaagattcctaaggacgcaggtagagcgcctcctctgtgccgcgatgaggtaggtgcatccgtcacttcactcctccctctccacttgatccggaatgggaggaacgcaatgcgtcccgcgcggcgatctgggatagctgcgcaggcgcagcttccggctctgtgtctcgggaattatttgacgccaccggttcagccccgtagaaagctctgattaggcgcaccgcgcacgcgcagtggcccacttggctggggagttatttgacgccgccgcccctggcagtcggaagttgcctgagcagatcccagccggctggctcgagtggccttcgtcgtcccttggcgccctgggagagtcgctgacgggtggactgacggaccgcctgaggacggccggccagggcggtgaaagcgccagccctatggcgcgggtcgcgtgaggcggaaggccgaggacggccggcggcggcgcccgccccggcgatgcgggccccgcccgtcgcctcaggtaaccgggcagccggccccgccgcggccggaccctcccctctccttccctctcttccccacctggcggtcaagggacggctgaggcttgtttctcggctctgggtgctccaggggcccggcctttggaagctcatctgcaaatttttgggagacccacgggggcggggaaagcttggccctggagtgggcggctgctgtcgagtctgtgtaaacccggtctaatccttgggagctaccccggccaggcgaagctctctcctggcaacctgggggagggggcgggtctggagcggagctagacaactcccgcaaagaatttggtccagcagaaaggttaggcaagttgctgccgcccagtggggacgatgctgcccattgcacagtgacactttgatgagggagagttgatgatgggagtaaacagctaacccccattaagcgcttcttatccgccaggcatcatgccaggccattacgttctccacgtctaacttcacagcaaccctgtgaggtaggattgttgtccccattttactgacgaggcaactgagtccctgggtggttgggtgacttaattacccaaggtcacatagctagtaatttgaaccggagcatccgacccaagtgcttaacaattagggcagtggctctccaactttgctacactgtagaatcacc

SEQ ID NO: 68658 - DNA, 424 bp, Homo sapiens
acacagcacacaggccctggggggctttctgggtctgagggacctggaatgagtctctgcgatagtgagaggcctagctgatggcaggctgcctggggaggtgctggcgagctgccagggtgcagggccaacaggtctgagccactccactgtgacctaaccggcctggccgatactgcaggtggggggctgggacagggctcagccgggggtgaggaatgttgccctgagcgtgggtacactcacttctccaggcttcattctgagtatacgcgcggctctcccggaagcgaagagggcacttccttacagaggcttgaaagtgtggtcatccaagattcaggccactctctcttccttcctgctttcttctgaaaggttccttgcacctaaggaaggtaacaatgaactatgttttcagtct

SEQ ID NO: 68659 - DNA, 968 bp, Homo sapiens
gaaggggcgtgggcactcataggctattgggggagaggttaagaaacgtagaatttcgcagccagaatgggtacgtctcagcgatcctgaaagcagccttgacagccagaggcgagtcaagtggaaaggctggccgggcttcgagaagggagggggcatcgaggtacttaaaggcctgaatcgcgcggcgtgacgtcgggggcgcggtttcgcggcgtctgggcggacactgcgccgaggggcggggctggacgcgcgctccaagatggcggcgaacgtgttcccgttccgcgacgcccgtgccgcaccggacccagtgctggaggccggcccggtggcacacgggccactgccggtaccgctggtgctggacaacgggtcgttccaagtccgcgctggctgggcgtgtcccgggcaggacccaggtcccgagccgcgcctgcagttccgcgcggtgtgcgcccgcggtcgtggcggggcacggggcgcgtcgggcccgcaggtggggaacgctctgggcagcctggagccactgcgctggatgctgcgctcgcccttcgaccgcaacgtgccggtcaacctggagcttcaggagttgctgctggactacagcttccagcacctgggtgtctcctcacaggtgaagggcggagtaggctgggctgggctgggtttgaggggaggggtgcggtctcgtctccgctcactctgctctcggagaggtaacagtcacttcagtagctccgattgtcttttagtcgaccagatgctaggcgctgtgggtgtagcagcgaataaaatgctgctccttgtatcttggagcatacctttgggcatatatgcttgtttgttaagaagcccatttattaacaaatacgtattgagcacttactctgtgtcaggcactttttaggcatttggagtacatgtgtgaacacaaaacttcctgtgcttatggagctgttaat

SEQ ID NO: 68660 - DNA, 372 bp, Homo sapiens
taattattaaaagattgctttaactttgctggtagtctagctgccttgtaggatagcagctgtcacacccttctcttagagttgcgtgtgtggtggtgtgactcatgcaagcagcaagtcttccacggggcccagccatgagctggcaccatcagaaggctttagagaaggcgggggttggtgaggcttgtataaagtaggaaaggtaggagatcaaagcaaagcccgttcctggctttttagtcttcgtgttcatgtgtgcttttttaaaaatagcttagaaaaattttcatagtttttatgtaaggttttagaacattgggcaagatcccagttcttttttgtggcactaaaatgatagaactgaggcct

SEQ ID NO: 68661 - DNA, 603 bp, Homo sapiens
cctgctggagccaggaggtggggtaggggagagccagctagtagctaaacactttactcattccagacactatggtcagcactttataatctaattctcagacaaccttatgagattatagtccccattctacagatggggaaactgaggctcagatagaggagatgacacatctgagatcaaaccactgggaaatggtggggtctgaattctgaaccactacacgtgtgtcttcataccaggtgcaatgcttaggtagactgcatattccccaacagtgtgctttgatggcttctctccagggtggaagtggttggagcaaaggtcagactggccctttcatcccttgggctcagagcctggcactaggcttgctggcagaagaggaaacaggaaggctttgggctgcatgcagatccccaactcttaaaacctggggtcaagtttggctctctcatacattctcatggtggagcaagcatgggtcaagtgtgggggtattggagcctcttaccagctgagtagattggggcaagttaattaaactcactgtgcctcagtatccccaactgtaaaataggagctcattagagcctgcctcac

SEQ ID NO: 68662 - DNA, 1351 bp, Homo sapiens
tttagatggaatcttgctctgttgccaggctggagtgcagtggctcaatcttggctcactgcaacctccgcctcccaggttcaagtgattttcctgccttagcctcctgagtagctggaactacaggcgcacgccaccatgcccagctaatttttgtatttttagtagagacggggtttcaccatgctggccaggatggtctcaatcccttgaccttgtgatccacccgcctcgacctcccaaagtgctgggattacgggcgtgagccaccatgcctggccatgtcgttgttttttaaagctaaagagagactgtttttgaagtgattgcagcagtaagtagaatgcatcgaccacagaattggcaagatcttggaggtcaaggagaaaggagttcgtttcctagggaggaagacagaggctgcaaggactgagggttgggggtgggatgagcaggtggtgtaattggacagttgaccaggaatgtgtgtctggtggtcagcccatttccagaacggtcttcaggagagtttttctgcattgcagtgcttgtttaccctcagggtgagtcaaagtccaggatcctgtggggaggggagcagcttaactaaaatttggttaaatcatttaccgctgggcgcagtggctcacgcctgtaatcccagcactttgagaggcccaggcaggcggatcatctgaggtcaggagtttgagaccagcctggccaacatggcgaaaccctgtctctactaaaaatagccaggcgtggtggcaggtgcctgtaatgccagctacttgggaggctgaggcaggagaatcacttgaacctgggaggcagaggttggagtgagccaagattgcaccactgcactccagcctgggcaacagagtgagactctatctcaaaaaaaaaaaaaaatcatttagcaagcatttaatttcggttgataaattgacagtttaatcatttcagaggaaaagaatgagaatttgggggactgtgtttgggttgtcctaggaaaaggaggggtcgtctgagcgttctggaaatcctatggggaagggtgattctgtgcagtcagccattccccagaacacaaaatgtgggggttttgtttaaccttcctgttgtccagtatctcagttcaacattgccaagatgatggtgcctaccacaaagggtgttctagggtcaattgtgttcttatttgtatagaactcagcccataatttgtacctcattaagcattaggcagataagtacatttagaagttccctgcatcatgagaaaacctctttcgtctaacccacatccttcaggctggagttaattcctcttccttcaatgctc

SEQ ID NO: 68663 - DNA, 1163 bp, Homo sapiens
gtataaccacggttggttggggttttacaaggcaaaaatcgatgaaatgagagaagactacccgagggtgtaatcaaaggagcagtcctaatacgatgagccggtattctttgaatgaatgaatacatggttaaaggcaggtgataaaggcgatatggttggccatgccaaagcactgagagcctaggagcagcgtggccagagtctccgggagtcggcacctgcctctcctcgttgtctaggcctgactgtccctggccttgcacggccgcgcagcggggcgaccggcagggggcgcgctgggatggccaggagctcggctctccccgctctgtccctgctctgcggcccgcctcgcccctgcaagtttaaattcctcttagcaagcccagcatcgcagccaataacgcatcagggggcggagccgtagaggcttgcgccccgcctcgctccgctattggaaggaaagcagccaatgggagagccgaggcggggaggtgcggccaatggcgcgggcctgtttgattcaaaggttgcctataaagcgggactgcacgccggtttttgtccgagggctgtcgagtccgagcgccgccatggctctgctgtccgagggcctggacgaggtgcccgccgcctgcctgtcgccgtgcgggccgcccaacccgaccgagctgttcagcgagtcacggcgcctggctctggaggagctggtggcgggcggccccgaagccttcgcggccttcctgcgacgcgagcgcctggctcgtttcctgaaccccgatgaggtgcacgccattctgcgcgcggcggagaggccgggagaggagggcgcggcggcggcggcggcggccgaggactcgttcggctcctcgcacgactgctcttcgggcacctacttccccgagcagtcggacctggagccaccgctgttggagcttggctggcccgccttctaccagggcgcctaccgcggcgccacgcgtgtcgagacgcacttccagccccgcggcgctggcgaaggtggcccctacggctgcaaggacgctctgcgccagcagctccgctcggcgcgagaggtgagcggccctccagggccctgggtcgcacgggagacccccttcaagaatgggaaattgaggcctgctgggagtacgggccgg

SEQ ID NO: 68664 - DNA, 1726 bp, Homo sapiens
ctttcccaaatttgttaatctgaagaattcaggagcttctcaaaatgcaggttcccaagccatgctccaggacatcgattcagaattggatcaaggcctagaatctgtgtttttaacaagcatttgactcaagggtatcaaattggaggaagcactgagttggtggactaccttaattgatctacccattttcagtctcttctgccaacccattcgctccaccccacccccagtccgtttttccgttttgccctcaaggtccctgaagacttccatatcatttcgcattgttttatttggggcactgtgccgcactacctgggcccacagcaggcgcgcaatatttactgacaaatacaacccacgaggtagttcctattattacccttcaatttgaaattgagaataaaacagaagtcgacaagttgaggtagcttgtgacatcagtatttcgtatttaatccagaaagcactgcttcaacgcccagtgcgtgcaaggttccactctcgggccagcggtcctctcccaaagcccgttcttcctaagtgtgcggccgccatccaggacacgccacgctcgtaaaaggtcacctgaagcatctaccctccacgctcaagaggtaggcggaggagcgcgcccttttctccaaaatggctgagcagggtcacgtgggctcgggggcggggccggtgcgctcgccggagcctggaagtgggtcacgtggctcagacgggggcggtagctgtgggggcgtggccgtcacacggcgcgatccgtctgggcagcggctcttcgggggccacgccctccgggccctgggggcctagcgcgcgacggtggggtggagctagcctcgtgaccttttaccccaacatggctgcgcccgtgggaccggtgaagttctggcgacccggtaaggcccttggtggaacgctgggcagatgcggcggcctgacttcggtcttggcgccgcggccggcgccctggggccagcagacctgctcgcaggcctgacctcggcgagctgggcgctgccgcctctgtgcggggggagctctggctcaggctccccagtggtcccgagggatttgggggtgctcccctagcgtgagcagaaactctttgtgaccttgttaaagtggtccagcctcctcaggcctcgtcttcctcgttactgatgcttgtcctgcccaccccgcgagatggggaatcctaaagctccctctcgtgtctcgttagcgccctggggttgcgctgtggcccgacagacaatgctgctcgctgctggaggcttgcaagcccaagttatggagtcagactgtccgggttcgaattttcgtctctgccttgtagtagggtgaccttgggcgagtcacttaatgcctctgagccatgacttctttacctgtaaagtgggcagaacaatagcttctatgctgtgggcttaaatgacaagcagaacgcgttgtcagacttagaataaatgctcaaaaaaagggaaagtgtgttattttcttttaggataattgttgtccactccgaatgtctactagaaaagggaacagtccttcatattggctgccagccacttcctctcttacagactaacacgaatcacaatcacaaaatgctttacttgttttgtcttgatatttactcattaatcaggtttttactgaatgtgcatatgccagaccgtactagatgcattacttcctctctgca

SEQ ID NO: 68665 - DNA, 1074 bp, Homo sapiens
ctgggcaacatagcaagaccctgtctctacaaaacaatttttaaaaaaattagctgggcatgctggcacctgcctgtggtcccagctacttcggaggctgagccagaaggatctcttgagcccaggagttaaggttgcggtgagttatgatcgtgtcattgtactccaacctttaccctatctccaaaaaaaaaaaaaaaaaaaaaggcttaaagaaaaggaagtagggcctttagtttgtggcctttacctggacaaacaattaattctatttccccaagttatttttgttctgtactgagttttaattattgtgtcgttgttttgcccaaagttcattttctaatggtgttcaattaagaagttatacagttttagaagttatgtgtgtgtgtgtgttgtgtttttgtatgaaaatggggctaacagtttggaaaccaagttgcaaatgctgctggagttaatcttttttgtcactaaaagatgactcagttacctaaaattagaacaatttttcctgtttgtggtttggaatcccagctcttaatcagtttgcatcttagttccaaatttgtagccatggataacttccatgaaaccacagctttctcttgaaagagcaaagagcatgtaatatattaatagagctgtcaagtttgaaatgctacatctcagaaagtactttatgtgcagactaaaatctgcaaacaatctcagagcctaaaaacagattgcataagctgttgcttgatctctgtgagaggcaattagtagtgagtatgcttgttgaactcatgtggtctgggtttgacttcaagaccaggtaggtcctccctgacctgtgattcagaataagctctaacacctgtcttatttcagtttcctcatttgtaaatacaacagtgtctcgtctacctcatgggctgtgtgtctatttaatgagatacaaatttgtgaaagcttagagcacagcacttgccagtagtaggtgctcagtgattttttttttttttttggtcttttacctccctttccttttggtctgtcaaaaagatagtatttgtccagtctagt

SEQ ID NO: 68666 - DNA, 1234 bp, Homo sapiens
aggatgctggagaggctactcatgggctgtggttcatgatgccatctgagaagtgggtcctctggcccagctcttccagggcccagccttctgggtcactgtcagctgaggcccagacatgcaggagtacagacaagctgtccctcctgtgccctgtcccaattcctgacctggcttctggagcttggtttggagatggagcccaccttgacaatgctgtttccctgggagaatgggccccctcttggctggcttgcaggagctctgggagtctccttcccctgtgactcctaggggcttggtggctctgagctgggcagctccacattctctcaatttcattctgtctgatccatgttagttttatttactttttatgtattttttatttttctgacatagaatctcgatctgttgcccaggctggagtgcagtggggatcatggctcactgtaaccttcaactcctgggcccaagggatcgtccagcctctgcctcccagaatccatgttcgttttaatatgaaagcaacgttttatgcgacaaccaggagctctgaagggttttcacgtggatgagccacacgccgggatttggaattgcgggaagtgcccagcgagtagggtaggaggaatgttgggggtgggactggactagaagggaggctgggacgtcgtcgagaacgagattgcagggacgctgcggtgggagaagtcgaattcccaccctgttcgtcctccgcaaagagtgactgaggctcaaaaagccacagccttgcccaaaacggatgcagcgggcgcaggcacggtccacaccccgaagcttgccgatgccctcggcggcagcccgtcctgcagagccgcgttccctgcgcccaaagcaaggtcggacccccaccgggattcccggaaccgggtgtcccgcgcgtccccagcgcaggcagagacggcgagacttccgggtcggcgttgcacacggcggccggcaggcggcgctggagccccgcgtttgggcagccaggacgcccttgcgctgcttcgggtcctgcgagcgcccagggagggggtgagtgcggggaggggtcagacccgtgtcttgcccggtgcgagctcaccgcctgcccaccgggcacgtccacagcagctcagtcccggtctgagcgcatcggagtgaaaacagcccccgcacctctcgtgacggtgtccccttctctgtccacgttgcaagaagctat

SEQ ID NO: 68667 - DNA, 582 bp, Homo sapiens
aacagtgtatgagggttctaatttctccacatcctcactaatgccttttttttttttttttttttttttgctagtagacatcctgatgggtgtgaggtagtcctaatgcattcttagtaatgacaattgtatcagttttgctccataaaaactactttaaaatcagaggcttaaaacaaccactatttactcaggtcatgattctcttgagttaggaatatggactgagctcagctgagtggctcttctggtcttggccagacttacccatgtgtctagggcaagctttgtgttgacttgtctaggaagacttcagctgggatgactcattggtgcttcatgccatctctcaccagaaagccaggcttgctcacatgaaggctgggcagagttccaagagaacaaactaaagcattcagtggaagtggcacaacattacttcctctgaattccactggtcaaagcaaatcaccaggccagcccagatttaaagtgtggggaaatctctgtctcttgataggagggtctgcaaaggcaaattgcaaagggatgtggatatgagaagtgaataattacaaccaa

SEQ ID NO: 68668 - DNA, 1552 bp, Homo sapiens
agggatgtggagaggaatcaaatacggtccctgggatggaggagctcacagatcagtgatggaggggaccaaaaaccaaacagatcctaataggcagagggtctcgatagacacttataccaggtgcgaggaaatctgttgtaattactcatgcctggaatagggcatcaagggggccttcccaaaggtgagctgtaagtggggaggtgctttagatagataagagcacaggctggcctttcctggtggagggacagcacatgcaaaggccctgttttgcaatgtcctggtgtattctgggaatggtaaacttttctgggtggctggaagagcaaggttcatggtgagcaaaaagactcagcaaatttgggactgatactgaatgccatgctgagacatttttactttgctctgttggcattcaggagtcaccccaggcttaaaagtaggacaaggaaatgatcagatgtatcttctaaaaatcacctcttggttttgtggactggacagggatgaggctgggagcaggaggccagctggacacagggttcctgcatgggctacttctttctttgccaccatcaggctgttcccagattggatgatccatggaaagatatttgcttcttcatcatttcccctttactttcaggacctcatcagcttgggagaagtgctctttgcctgcttagtaatcccatgtagggttatccaagagaaccccagggcatagctgaggacaggggaatgagtcactatttgtcattgtttgccacataccagatactttacttacacaagtcctttcatttgcttctcaccatggctctgagtggttgcaattgtgcttcccaagtggaaaatgatgctcagaccaaactcaaggtctcagaacctgtaagtggcagagctgggatttgaacctgcctctactgactctcagtccagtgctgttggctgctaagggtccctgtgtttgcctccccatggggctgctggggaaggctgtgtgtttgtgtgcacctgaagctgggcagcctgtgtgtctggagggcccatcccacccggaggcaaggcagggaggcccatcagctctctggtggctcccctttgctgtcttcgacctgtctcctgcacagattaattgctgctcacccgaggtgtgatgtttcctggttccctgttccggcaagtgtgggttagtggggagcggtgcagccatgctgatcgggagtctgcactggcacagctggcggcctgcacagcaccctcatcggaaagtgatccatcacccgacagtcgtgttgccatccaggcccagctgccaagctggcatcttgaggcctccccaggtgtgacaggcctcccggctcagagcctcagggctgggcctgcgtgtctgccccttgcaggactttcaaaggggagtgggagccttgcctgactaaggcttttactcttggcagctttggggaaagcccccagctgaaatgcggtgtttccagtggggaaagagtaatttttgaacatagcccctgttttcccactgaaa

SEQ ID NO: 68669 - DNA, 937 bp, Homo sapiens
aataagaaacaagcctggatttttttttgttttttttcctgagacagagtcttgctctgtttcccaggctggagtgcagaggcacgatcttggctcactgcaacctccacctccctggttcaagcaattcccctgcctcagcctcccaagtagctgggattacaggcgcacggcaccacgcccagctaatttttttggtatttttagtagagacagggtttcatcatgttggccagactggtcttgaactcctgacctcgggcaatccacccgccttggcctttcaaagtgctgggattacaggcatgagccactgcacctggaccaagcctggatttttaagtaaggagagactttgttcagctaataatgtatgagtcaaagagcgtgaatttggagagcctttggccttgtcataggtaaacaaggagagggcacctgtgagtcttacctaagacatgtggggcagggtgcaccattgcaataatctattttctgggacaccaaagggtgggagattttttaacttccacattttccaagatcacagggcttggataaagttcaatattgtcactggattctgatggatcccttttgccgactctgtgtgcccatcccccagcttttgtgggctttgctgctgactgctcactcctgtgaccctcttcagagggttgcccttgggtgcagaagcccataggggtggggataggttcctccatcacagcctgaagtgcctgggactttgttcccaccattgtcatgactggtgtgggagtacaaaggcctagctcctgtgtccaaagctggacacagtctaaggtgcaactcactccagaactccatggaggatgaggctggggctgaaacttctccgaaattgcacctttgttcagcttctttcctttttctatgttgcttccttcattccctg

SEQ ID NO: 68670 - DNA, 551 bp, Homo sapiens
ttccaggttatgaggactactttgattgaattaaatgggtagggcagaagtctgctgagcaggaggggcacacaaagggagaacacagtaggaagggttgaggtgggaggagcctgcacttgtgatcaggacttagaatgtgtgacaaaaactagtgctgcacatatcacctgagctgagactgggaacctcttctgactcatcctcagatggaaataaccccagtgactgctccctgcatcccacagaaaagcctgcttctggtgccttctgtttctgagttgttttaccttgcagcctctaggtggcgcacctgagttctagctgctcaggcctgtggaaagcgcagggatgactaacagaagaactgggagttatccaagagccgaggtcctagggtgaagaggtgcaggggagctcaagccagtgtttagtaataattttaaaaccctaattgcaaggggtgaagcagattataacagttacagtgatgatatgaagagcagtataatacagattttaattaatttttcattcagcacatatttgtt

SEQ ID NO: 68671 - DNA, 570 bp, Homo sapiens
aagcttagaagaacaaagtgaaggacatttcaggcaaagtgggcatttgagccaggagttcccaaacttgacaggtgatttgaatcacctgggagctttaagatgattctgatttagtgactctcaggtggggccccagaatctgtattatttataagcacctgaggtgattctgaattatcagccagagttaggaataagctacttgttaacagaatgaatagaggcagaatagtattttttaagtcacatactaacattgcaacttaactctggctggaattgagtcattcaggaggaatgtgttgccctcaccttctccattagactcatcaacaagtcctgcctgtcctgtacacagcctactgctctaattctgctctcctttctccagctccattgctactatgtggtgccactcatcctgcttttgaattcactacctctaatctctgtcccttcagtagacacagcctccactcacagcagctttaactgtccttctaaaattcaactgattatactacataatggctgttacccacttaaaaaccttccacactcttcatt

SEQ ID NO: 68672 - DNA, 651 bp, Homo sapiens
tcccaccttcccccactgctgttcagacaaggcagagggcaaaggggagaggtgaggaggttaaacgcttgactgcagagacatcttttcatcaggttttgttgagagcagggcagacaggagtagccagggtgtccgtagggcaatgacagcttgtgtctgtctcttgctgactgtacagccccatatgaacttatatgggagaaatggggagagagggccaagagaatgtaatgatgaaaagaaagatgaacaaaaatataaatactgaagtataaggctgtgcagttggagctgtccagtgcaaaatacatttttgccctaagacagttctctctaacctaaaaatcaatagaaagttatgcaataacctactgtgtgctaaaaaaaaaaaaaaaacttgccccaaataaaaataaattgaaaatattggtaggagaaaaaacagcttctttaaacacaggccaaatgcaaaacaagtgaagagagaaccctcagatgtgatttattggtttctatttttaatctttggggagtcaagggaataggagagatgccaggagtttggaaactggatacaaggaatgtttttatttacacatgatttagctactaattaaatgtgtcgtttactgtctatcctgcctggaa

SEQ ID NO: 68673 - DNA, 485 bp, Homo sapiens
caggtgctgagttccagcaaggaccagaaaccaggtagaaaccccaagtcagaaaataactcaaagaaggcatttatatactttctgagacagtggtatagggtgcacaagagagggagaaaagctgataatttagagggctttgattcaaagggttgcttaagagtattatgtaagcgtcaacccagctgcctaggtggcaggctgaaggtcgtttctggaaagttttacaaactttgggaatgaattcctcttgatactgataaggaacaacactccctaaagtgaatgtgcaaaaagatcacctgggatattgctaatattcactttctgatttggtgggcctgaggtaagtctagtgatgctgtcattctaataagttaacaggtgatgtcaatgctgctggtttgagtggcaggtatgtagtacccttctgctcatcacttgtagtacccaagtactcatccaggacaatgattccaggg

SEQ ID NO: 68674 - DNA, 689 bp, Homo sapiens
tactctataaataataatttattgaagttgcctactatataagaaaaagaatatattaaagaagccgagctaattgaagctggcagttaagttccctgaatcgaaaccaatcggtttatctacatgactctaaagatttgggatgaaaattgctcattatagtctaacatcctgatacccaaagatccagttgtttcacaatatattgacatggccttccaggaaacctatgtgcaatattgagcttaaaatgttccgatacaattaaaaataaattggatcagaaagagcctttactcttctttagttgggagatgaagggatttgaaagatactgaaagctgtgcgaccccagtcagcaagattgctggttctaacttggatgaccacacagcttaagttgccagtgactgtccagtttatacctttggtcccaggataatgtttaacagggcatccattccctccccaagtatcttggtttgaacaatcattgcataatcactatgatcatcctggttaacccacagtgagagagattggagagggcacaatctaatgaggtaaaaacaggccctgaggaagaccaagcttcaggtggtaagagagaatacaaaccaagaggcagaattggggtccaaggaggagcattgtctcatgattcctcaaacatcttttattttgtgtga

SEQ ID NO: 68675 - DNA, 1208 bp, Homo sapiens
aaagtgatgtgatacaaagatagcatgcttggacataagaccctacaatgctgagccacctggaggaatatgactctccatttccatcccctcacacggaattcacaaggaatactgaagagtgttaagacttccacagaccattgaacccattaggtgggaagaagggaggttgagtcatgtttagcttcctctccagtggaacagagatctgcagctggcatctgaatagcattcctctcatgtaaagggtggagggaatgtgtcaacaccaactgaacacctaagccttatctcatgtaattctgacaactgcacaaagaaattatttgttatccggattatgcttaaaaggaaactaagtttcagagacattaaggagcatactaaatttcactcagttggtgagtgataaacagtattttaaatccaagattgcctgaccctggcccaataatctttcgattccaccacaactgccagaaacatctatccacacatcaggtgtatccacagctgtttggtttgttgttgctgaaatttaagtataacacctcccttagcaactgaaaaggcccttagctacctgcaatatttaacaactactttctacataaatagcttctgaaggttttatcttacagcatagtgggttcatgacagcttttatctgagatgatgaaacaacaaaaatgcctggactatgacctagagcctgcccgggaggtggttggtcaggtgtagtctcttgggaagtgctggggacacagatgttccagatggttgagacatttctttcactagagcatggagtgtagaattagccaaaatacccaacctctaggaaggaaatacagatgttctaaaattgtggtatccaactcttacttttcagatttctaggattcaacagaggttcctgagaggccattgcaaatgtcagggggaaaagtaattcaattaacaacaacaacgataacaacatagcttataattgaatatcaccaggcagtgttctaagaattttgtgtaaattaacacatttaatcatgtttttatccttatgggctacatataacattatcaatagcctcattttacagatgagtaaactaagacaaagaggggttaaggaaattactcaaggttttgcagtaagtggtccaactagaattttttcacaggcagttttgtttcattgaccatgc

SEQ ID NO: 68676 - DNA, 1762 bp, Homo sapiens
caaagccagaccctgcaagagctgactccaaatgcacaaatgatttcagttctcatttgtcagtgctcgggcctcactagttgttggaaccctgtgaaacatccgcactattcattacatccaaaggaagcaatctaactccctaattgggtttttccagcctctctcactagacttgaggcaaggggaccacatcccctacccaccccttcttggaatggcagtaggaaaaatactccaacacattttcccaaagaaattctctctttaatctagcacctcaatctttttatacctttcatgtggcttttgaaccttatatattgagggtccgtattaaatgttcattcactgaaattactgctgacaatcaatccctacacaccacacacacacacacacaccacacacacacacacacctaaatgtgcttggctataagaatttcccatgcagcagactattgaactacagatttttcagcattggcatttggaaaaggctcaaacctgaaggcagagaaaactaatagcctaaggcctccaatctaaagatagattctactaatcctaggctggctgccttgtacagctttgcaatgtctcctccacatgtgagcctggcccgcttgcctctcctgtttctacattctcagttccttggctggctcccccagggataactctcagtgcctgcctgatctgtgttacaaagcagacatgaatagccaggccagagagccatgtactaatttcctgggtggccaatccctctctctcatatcctagtgccattttaagggaaaagaaatgtaggacatggaataaacagagggaaacctgcttgatttgttgttaatgtgtcagtgttttgttttgtgggtttaacttgtagaaggcaggtctttgtcttgttactctctggcatttaacagggcctgccttcagtgactcagccgggtttccttagacagaaaacagccacttagtgccttttacaccaccaagaaaatgagattattccttgaggagatcagcagctctcggctgctgtcgaaagggcgctttgcctgtttgtttggctgaaaggcaccacgcagcccaggcttgtttaaaattagcttcctcataaatcacttgcacaatgaagtgtctgcctctgccctctgacatatttgtgtctctgtttatttttaatgatgacatggctttttctgtttccatttggctctttactctccacactcccaagcactaacttctgtggcaaaagtacaaaatctaagaaactgcagggaagaaagagttccttttctaccagcacataaatgtagtggggaaactgagttagccttgggggtatttctggaggaaattgcctcctttctaactttgtcagattataatatcctgaaattgtactttttgaaagagtaagagggtgatggcaatattctgtaacttgataggggtctgtgttacacacgtgtatgtgtttgcaaaactcaataaatgtatatgtaccttacatgtaagtttttacataaagaaaaaagtaaactaataatgaactctaataatatttatacagaactatttaagaagaagtatactagttttctcaatttactttgaaatgcatccaaaactgtgataaattaattgatggatagatggacagacgtgataaaacaagtagaaaaaaaatgttaaaggcaaaatatagatggtaggtacaagtctgttccctgcaaaattacttc

SEQ ID NO: 68677 - DNA, 1056 bp, Homo sapiens
tacaattaacctgtcttctggggaagggaaatatactcctcccgtggaagagagtaaggaaatgaacaataagctaataaaccttaatatctaaatgagtttcttttcacaaatgaagaccatgtacccttattgacaaacaccagctcttgataaatgtccagtttactcattcatggatgagtaaactgaaaaatattttaaaatatatttaattggctataaaatacacctacaaagtaatcttcaaagacaagtcttaaaaatgacataagaaaaagtaaaaggatcagacaaaactccaaatcatgcaaaaacagtctgcatttgaggtggtaaataaagaattaacactacttgaacttaagatgtgaacataaagtacaatttgaaaagttctcaaaaaacattgatgagaaagacaaagggagggagagaaacaggatacaaaccatagacttgaatgtattccgcaggaagtacccaaactgaaaggaaacaacaaaaataaataaataaataaagtcagagaaaaggtctgagagcacattgccaaggagtcaatagcatttcagggaagttagtgaagaggagccaagtgtggttccctgcacagcagccatgcaaaatgagttcaaaggttaagaaaatgaggattggaaagttttgttagcttgaccaaagcctagatctagaatgggatctcaggaattttattatcagaatcataaatcagaaatatcaagtctgtaatattatttgaaaatgctgaagtgccacaagtgaccattttgagactgaactcctcaaagttgtcacctctctctgaaactcattgtgctttaatattcttgccccattgccagggaacaactaaataacttcctttgctttatttcattcatccatttctccttacaagcagcattaatgttgtgctgccttattggacactttaacatagatccctgtccaaaaaaagcacaaatttcagtagtgtaggtaaacaacttcaacataacatatggagtacagagggagagagagaaaaaacat

SEQ ID NO: 68678 - DNA, 3096 bp, Homo sapiens
tctttaggttaaagtggatacgttatcattaccctatgcaaaagaatctgatcattgccctgaagataattttgttatctcacattgcatatgtgatcattaccctgagggcagagatgcaatcattggcctataggaatacttatcattatggcttggcaagtggaaaagtgataattaacttgcacgaatagatgggatcattgcactacagatagatctgttattgcatttcctgaagaaatgcaatctctagtgtgcaaaagacaatgtgttatctacatttatggtagagatatgctccttatattgcccataatgatgatatcaattgcatttcaggtggaaattaggattgttgcattgctgataaccttgttataattacgttacagaaagagatgcaatcattcccttgcatatggtccgtatgaagacgggatcattacaggaaaggtgaaggagatacagtcattatgctctatatacacccatttttatggctagcggctgaagatgggatgctttctttgctggaagacctattacctgttaggttgcaaaagatgtgatcatcttcctaaacaataatttagagtcccataacaattttaagtgtgctgttcatgaaaatttgaatacattgtattgggaatataatggaagtgagatgcctcatgtcgtgagaaaatctgacataaactccttaagcatgagaggccatgtgggtatggaagccctgaaagggaggaaaaaacagccagaccctagctgttccagtcatcccaactgaggtgccagacttgtgattgaggccatcttgcatcatctaggcctagtagagctgccaactgactgcagacacatgagtcaatccagctaatgccacatggagcagagacaagccgcccagctgagcccagtccagatgacagaatcatgagcaaataaggttgttgttcttttaagccactaaattttcgggtgatttgttacacagtaataaataactgaaacaactatgtacagtttaatgatctgaaatcaatccatagtgttatgatagcctttttaacaaaattgaaatgataacttattcatttacaatgcaaatcaatttaatggcaatagttacaactgccctgaaatgatctaaagcctcatgaagttgatttaatatctagctacccaacatacttaatcacatgttcacagttgatgaatagtgactgaatctccatgagcaagataatagtaaagctctttttttctctttctctttttttccagatgaataattttacatttacactgataaaaagttaaagttgcagctctgttttcacactacctgagggatctttgtagattacataaaccctaagcctcctgtgtaagttaaggaaaaaaattccaaactcacagtgttatcgagaggattaaataacataatttatgcaaagtcttaaccatagttgctagcatttaaactttaacttttgtccatgtctctaatgtaatttaaaatgatcttactctttaaggtttgatctaatagaatatttgtcagacacaaagaccaagatttgtcccagttgatgaaccctgggtataactcaatagcatattggcagtttttattttctgttaagtctggatccattcaattagtgatttatttcttaatttgtcaaacattacattaacaaagtaacaacttttctatccatattatattgtggttacaaaaaatggatcaattatatttgaattaaaaaatttaattgccaccaaagaagagaaaaataactagagaaaaataaaagagatgtgtcaagaaggaataaagaggctgataacatgagatctcttctagctttgaaacatgtcttgtgaaatgactaaaattttaaaagctaggatcaagtattggtgaggagatgaagtaattctaagtctcatccattgctaatggggtatacattggtttaaccagtttggaggactgtttggtaatgtccaaatatttattaaagttaaacctactcctaagtcttatagcccagaaatttcaaacctaggtaaatacctaagagaaataagagtacatgtcttccaaaagatctatacaagaatgtgtatagcagccatagtcataactccctaaaactggaaatgacccaaatgtccataaaaagggaaatggatacatgtatcattacatatttatctaatgaattgctatgtcgctgtaagaatgagcaacccactgatacatgccacagtatcatgaatcacatagacagtatgctgcctgaaataagccaaaataaaaaatgtcttatttcacttatatgaagttctagaatatgtaaacgtgatttatgatgacagaaattaaaatagcagttccctttgcatagggggagcgtattcattacggaagtgtatgataaaacattgtacattggtggaatgttctatatcttcacttgagtgtttaccaggatatatgtccacaaaaaagttaggaatccatacttaagatttgtgccctttataatatgtgtgttatacagccactgaaaataaattgatagataaaaagtaatgtcttctaggttccatatggagaggactgatgaagccagcattaggcgtgatggggacgtgcataaatgtgtatgttatccactgagacacagattctgaagcaccagaacattaaaggcacttctacttgtttcttctacccagctgaaaggacagaaagcttcttccacagagccaggacagtccaggggaacgtagtccttcgactgaaagctatgcttcctattttctaacaaagaggctaggtcatgttgaccacccagttttggcctgcctggcttgctttttattccagcctggaggactttcagggttgaatatccactcaagccaaatcccaagaagcataacctgctattagactcttgtcacttatcgggtgaggggctgtgcggctgttccagtgcttccccacttgggtcttgtgacataccctggggccaagccaagccctggaggttagcttctacagtctgtccttaa

SEQ ID NO: 68679 - DNA, 731 bp, Homo sapiens
tgggcccagtatcctggacataatatacatcagtgtgcaatagaaggtccccaaaaccccacctccttataatcaacacatgtgggcactgactgcaatggcctacaagagatgtccatgattatgttcatctacagcccccatctagggacatccccaaaggcccctggggcccttcaaccttcagggtgcccagcctggcagggcctatgagcagtagctgtgcctctgccccggagaccaacttctccacatccccccccagctattgcgggaagaggcatgactcattcgagggaagagggttggcaccttctcccccagccgcatggggccagccagcaggcctgtggttaaaggacctgcctggattgcaaaacaagccagtttgctgcattctggggtcacgtgatgcagccgggcgctgtggatggccttttcttccctcgcccactgactcactgcatgcttgcttgcaatcacatgggctccctgggcctcagctcccccaagtgttctcgttgctgagctcatttggagaagaactaaattggaaggactacttccttttttcccttttttattgcaccatgactatataaatatattctcattatgaaaaaagtgtaaagactatcaaatatagaaatatagaaatgggaaaccacccctcaggccctaccacatggcctctgcagttgtaaatatggttaatattttcctgagtgtct

SEQ ID NO: 68680 - DNA, 523 bp, Homo sapiens
tttcttggcacctaagggactgctgccctgacagtgctccagcaaaccatgcctgtgccatcttgcccccacatgtgctggagtcatggagatacctcctgttgttctatccctgagacttgaggacaggaagaagcagcaggagaaaccacaaggggccggactctgattggaacagcaggagggctggaggcctggcctgacctgcaggcctgcacgatgatgccagagccccaggttttggcagagcctgaatcctgcttgccaagggaatttggaaactgccaaacccctgtgcagatgaagacaaatatcagcctcgtgtttctgattcacttaggctcagctcatcaaagtgctatttggtgaaagctgcttacatctcaacaagtcaaaggacctcctgtggaattgtgatttagctttgtccaaagatctcttggccacggcggaaggattcaagtcatgcctctcccacttcaggaagaactgtagccactagatatgctttgagaaatgtact

SEQ ID NO: 68681 - DNA, 1089 bp, Homo sapiens
gagcagggctattgaggaaaaatggtatggatgagatactggagaacagaaatgaggcaagcaagcagcaaggaggcaggcagaaaggtcagctggcataaggacttgggcaccctccagacaccccagtgccctgaggggacaaagaaacaaatgagggtgttcacccagctccacatggagtccaggcagctgctgcctgaagcactgtggggttgccgcaattccacctttaggtgtgaaggcttttgcttttccacccccatcccctccatcagactttcctcttctggtgtctcattggtctggacagtaggtggagcagaccatggacattgggaaggggcagggttcagggcaaaggcagggcataaatgggggaaaggagaagagctgaaccagactgggaacagggacacaagaggacaccactgccagctacatctgcttccaagagctgagattccacagccaaaggtcttaaactccatgatatgaatttcccttcctgttgtgcaatgaccaccctggcattgcaccagagggctgcggtccaggggtcaggcccctttaggactgtaccctggcctcatgctcatggccatgtgttctctgggcagcagtgctgagcctggaaggagggaacctcctactggagacacctgtagggcactaaggagaaagggagagaaggaggtatggcctcagcttctgcctccacagcccaagcgtcagcccgcaaagaagcaggaatggggtacaaggctgtgagcttcagggcaaagaaggcctcccacagggtgctgctcagagacagaggtggacatctgcagaagatatgcacaaataatcgcccagcacctcagaaggtagatactcccaggaggcaatgcgcctctccccaaaagtggcatagaaacctctttctccttctatatcccaactcaaaagctcactaacaagggctaagggcctctagcttaaaggcaaagaggacatttgaaaagactttgctcctcgtgtgtgtgtgtgtgtgtgtgtgtgtgtgtgtgtgtgtgtacatgtcaaggtgtacctgtgtgtttgtgc

SEQ ID NO: 68682 - DNA, 1295 bp, Homo sapiens
tatgccaggcattgtgctagaggcattacacacgtccagcagcccatccactacgggcctgccttcaatggcacttctaacctattgtgctttgaacacctctagtgataggatactcactacatcacaagggaaccagatagattttcaaacagctctaaatgtctaatacagaaccatgctcacaggaaacatggagctctctttgcccacaacagcctcttggaaatatgagggagtggtcctgatgtcagctttctctctcccacatcaggagcgtgttccctcacagaacatgactgtgaggtcctatgtctccaaggtctcactctttccctccactggaaggtctccagtacctctgaattaaatgagagccacccgtgagggtgatctaagcagtgcagaacacaatgtatctcatcccctgctcgggacactttcttctattcatgcagtcaggggttgcatcagcattttggcagctggaacacagcatgtggccctgggcaaaccatttggtttctctgagtctcagtgtctatccataaagtaaagacaatacaggcacctaactcataaagctgttgggatgattaaatggaatgatacacgaaaagctcttaacacaatactgaaaaagtgtaggtaatattgggagccggctaaaagccatagctatgcctctttcacatgaggtcttttgaaactgggtttttcccatctttggtcttttccaacaaagtcagcaagactttgtcagactttaactgagtccatgttaaatatgttgactaagaatggaccaaagaagaccccttggcatggtccagagactccccatcaagagtgccatgagtgcactgatgaccattccgtgggaatgaatgctctgccccctatcacctccctcagcctcgctatgcctcccctgtcccctggatgtggagatccaagggctgaccacgctgttgcgttcatctctgtgtctccagattcttgccgagtgactggcccaagaacatgaattgaatttcccctattcacagatggcctagagccaggaagacagtttttgtgaggtctctatttttattctcattttacatgaaacagcattaatgatcacaaaggtagctgttataggcattcagcaggcatcagatcttcctgtactggctcaccaaatcctcactacggcatcattgctgcctccactattcaggtaaggaaactgagactcagatgaattaagtgatttgcccaagaccccatggacacaaagtgatagaagc

SEQ ID NO: 68683 - DNA, 1777 bp, Homo sapiens
attactcctttaatcagaaaaaaacaaagacaaaaaaggaaatatatgacaaaagtctgtgtaaaaacgttacaccaggaaaatcagcaatgtttgtcttacagtttcagtaccactgggtattcctgatactgactcgagtcaaggctggtgggaaatctgtgctccctccagccccagggacatagcaggtctgcctggagagtcgctgcttgggccccagagaaagtcagcagcatctaaagccaaaacacgggatgttttctggagtcctgcacacaggcacaagcaacacacacagagctctatgcacaaatccccctttcagtgcacattatttgttctcagcaagccctggtctaggccgtggcagatccggcttccacagctgactgcccctgaccctggacatggcattgttactttctgacccttgacttgcccctctgcaaaatgaagtcagataaaagataatgcatccaaagtgcctattgcaggacctgatacatggtaggtgctcactaaatagggtttatgaagaagaggaagcccacagcccatccccgctccctgggctccagccagataggagtatgtcataggaggcctgctggccgcctggagagagcagagtccactgatcttatcaggtcagcctcactctgccccacgcagagctgacttctgtcctctagccacccagacatgtggtcccagatgaatcagtacatgtgtaacatgatctggtggccccaaggctcagagtcatcactgcttacctatgagggaagaaagataatccccttttgcagatgggaaagctaaaactaaggttatttaacttctatttttacatcttctgtcattgattcatttgatgtttaaatgagatgtgtgtgagaagtaggcactgcatgaggcttgggccaggaggagacagcagtaaaccagacctacaatgtccatgctgccacagagacaggaccagcttcaccggcatgcgacctgcatagtcacacaggactctgcagttagaaagggcaatgcctggtttaatgttctgctttggccatcttgaatgtcttaatactttttaaacaaaattttattttatttccattttgcactgggccctgcacattatgtaagtggtggtgttaggagttaagaggtcataaatccaaattaacagtgcccagcagatgaatatatctacaagggaatcagagcaaatcttggaaacatgggggtttaaccatggtggaggtggggagtagctgacccaatctaaagctttagtccttgccttcctaagggaataacattttggcagtagcctgaaaggcaagtagaaatgggtaaagaggtggaaatgaagtttcttaactataaaatggaaacagcgatctcctgaccccacaggaccagccatgacaaaattttactcaattcattccattcattcattccagcaacatacagcacccactctgctgcaagtgctgaccaggcaccccatacatccctgtcctgtgaaacgtgtgttctagcagataattatttatctattcctgggatttgtgcaggaaagaggtgtacagggtgctaacggagcacgtgatgggggctggactgggttgggggcacagttctcagccccgcccagggctgggcacagaggaggctctaggagattgcaggctggcagagcctggctctgcagagcagtcagctgtggacacaggcccaggagggagctatgggccctgctgatttg

SEQ ID NO: 68684 - DNA, 631 bp, Homo sapiens
gcagaactgtcccttcactgcagctggattgtcttctgagtgtactgggctaggcaacagcacagagcagctttaccaaccagattgatttcttttaggagggctgctggaaaccatgctgcctaatggatgtgccatttgaggacttttattttgttgggggggaggaagagcagagcaaacctctaatcttctcttccttacataacaaatccaaacacaactatctctgggatgggaggccaggccagcagactgcaggctgcagagggaagggttacgcaagaagccagttcagagttttcctttctgaaaacagaagggcctggagtgcagattttgcacctgaaagcctgcaagggaatgaccagaaactctaaacccactgtctccagaagccaggacaggaagagcttggggagtggggatgagagagcaagagagtagggggtttgcctggtgtggcagaagctgcaactccaggtcacagagaaagccaagtgaccagcctggtggatctggcgtggttcctggcagctcccactgcagtatgggtccaagaggcctctgggcgggcacaggctgaagcagtgggtaggagtcgagtgccctctgacaggcaggggcgttg

SEQ ID NO: 68685 - DNA, 957 bp, Homo sapiens
agttaaacaagaaaatggtacaaaatagaaattattaccatacatgtccagcatgcaggattaatatttttaatgcagattttttgtatttttctatataatcgagcaggcaataaaactgatgagatttgggcgccgagcgtcctaactgaggcctgtgtctcagggctgagagccagtgttctccgaactctgacagacaggtccgtctgtccttccttctttcgctcagcctcgcctctcgcctgccgggacgccagagtccctctcctttcctcgttgctctcttcctggcgcggactactctccgggcagcaaagcagctgtcccggcttaacgcgcaaagttcagaaagccaggagtctccagatggccttggtgacttctcgggactatgcctcgccgcccttcagcctggagagaagttactccgggacctcccaccctctcgtctctctctccggctctgctcgagtctaggaggcggcgctggcgtgcgctactctcgccttagccaaggtcccctgcccgcccgcgcacccgcccgtcgcccgcggcccgcgcgcccttcctccctctcgctcaagtcaaacaggtcaaggctggggccgcggcagggacagggtccggggtagtctgggactagggacgtgggacagggagtccgggccggggcaagggcgggggccaggaccggccacgactcacagaaagaactcgggagaggaggggctgtcgctggtggagcccgcctccctgaagccggagttggcgagtttctcgcacttgaccttgtaggcgtctctctcgcgggccagccgggacacctcctgcttaagctgctccacctgctgaatgagctgcgtcttctcattctccaggtggtgcttctgctggacgcgtttatacctgcaagactgggcgtagccccggttcttcagggtccgccgcttctgc

SEQ ID NO: 68686 - DNA, 2491 bp, Homo sapiens
gctacacggagtgctgagcggtgtggaggacaccgagccggctggctgcaggcgtgtgcagggcctgcccggacgctccgcgcgccccagtggctccttcttcacgtcgaacttgagcaggtcgaagtcgttgacatactccatggccagcgggctggtgggcagctctggccccatgctcagctccgcggccatcgctgaagcgaggcgcagccgccgctgccgcccgggaaactttgcggccggccggagcgcgccgagccaagcgcgggggggaagagcggagaagagctggggaggcggggagcgagggcgcagcgggccggggccgccggccaagcctttgtctggggacgcggcggcgcgccggagagtcccgaggctgcctgcaccgccccagagctctgggctgtgcccgcgcagggaccgggccgggtagagtcgggcggggtggagaggcaagcggagcgcgcggtggggctgaggggaggcgtggggcgagtgcccgttgctcgctctctagctctcttgctcttacgctctctcgctcgcagccgctcgcagctcggcggtgcagctgtgctggatccggcggcgccgcagccttttatcgcctcctgatgtcactggggtgcgggggcccgggcggcccggtgcgcgggccaatagctgcacggcctccgcggcccagcggcgcagggcggggcgcgcctgacagctcccccgccccccgcgtcagctgactggcggcccgagcggccccggagcggcggaggcctggcggagcgctggagcggagtgggacggccagcctgggcccacccccgtaccctgcaggtcccggcccacgcacgctcgcctggagtgcgcgccccacctctaggccaaatcaccgctttcccctcctcgcgcactctcctccctcagttccctttgcaccccacccccatcccgtgtcacccccaaggaggctcagaatgagcgccgggacaacgcctcctgggccctttgttcccaagcggcccccgcccagtgggcgacgctctgtgtgtcctcgcggcttctggccgtgtgtgtcgtgcgttcctgtttctggagatctgcgcgtatttgtatgttggggagggcgggctcgaggctccgagagttgtgttcagacccaactcttaacctcaggggacctttctcaggccaagcgagggcccctcctggcgggtgcagtcgcagagccctgaggttcgactccactggccccgccgctccccgcgttcaccccaccgcacaatgttcacagtgaaggcgacgggaaaagcagcagcccaaaggctctgaattcctcttccccgccacacgcacggaatcctgagcccccggagcctcggggccgaggccggcccgggacggtgctccgagtagctctccactgctggggagccggccctgtttttgtttgaacgttttgtaacgattaagcagatcccggcgtcagcccgccgcggagaggctcaaacaggcataaagtgcgaccccaagtggccactgtgcgcaaaggcgccgcgaccgcccggcccacggccggaaggcttggacggcgcctcgtacccagccaggtctcccctacctggcccaacccaagccagcccagaacgcatactatgtgtgcaccagagcccaggacaggttcccctcgagcgatgtacaggtcctcgggtcccgtcttcgtactcagccgcgagcctcgagccgcgagctccgctctggtcgccccgttgaaattccgtgccccagcgttcgggggtgcccgtcggctgctccctgggccggaaggtcctgggcggaggaaggccggtagccaaaagtggaagcgccacagtgaagcggcccagggccaccgggtgagaaacctccccggagggcagacggggagaccgaagcacaccgcactaggcatccagactgggcttgggagccgcgcaccctccctacccagatccaggatggctagaattaacgggttctttctgagacctcggctcaggcgccgaaaccggatagatcgcgaattcgctggacccggagacccgacccgcctcccgcgtcaccttcttctttctagctttgggcgcgcgcagcgaaaggcaggagaggcgcgcactgggtgagtgagtcccggccgctgtctgcgctggaccagcccgactgacctcgcgcgtaggggtcgcgtgagccacaccggtgcagacgcgcctagattatttttaaatgttagaaggtaaaatatttgcctccaattaatctgaaaactctctattctcttgcgccctcggagaggctggggtacggcgtggtattgggccgcctatttttaataaaatgagtgtattttaactaaaacttaactcaatcttgtggggtggcaaattaaatgctggaagagcgcgtctacaaccctcttcgagaagcgtgctctccgcagaaatgagtcggccgc

SEQ ID NO: 68687 - DNA, 2156 bp, Homo sapiens
actggggttaaaccggacccttggttggttgaaaaattaaaataatttttaaaaagtgggcgtgaaataatccagaagttggagggcctggacaaaggctggggaggggactcctcccaccaggcggcctcagggtcggcttagcaagaaaggaggcgctggggagacctctggggtcccagctgccaaggtactcgccgctccaaggagatgcggacgccggataccagctctgcccaagattgctgggtcccgccgcggcctttaaaggcccaccacgtggctgcgcggccagccctggtccggaggcggtgcccgggtggcgcctgcgcactgcctagcagaggggctggggttccgagaaaaagcgtctggagaggaaggggaggctgcttggggtgggacgccgtgggaggagtcggctccttatgcaaatcacagcggagcgcgcacggtccggaggcggggcttgcgatgcaaagacaggtccgtctggcgaacagcgagggggcgggccgcaaccctctgcctctttccgcgagcgctgacgtcgccgacgtgttgtttaaaagcggccgcgcaggcgcagtgagcccaaatgcgaacttaggctgttacacaactgctggggtctgttctcgccgcccgcccggcagtcaggcagcgtcgccgccgtggtagcagcctcagccgtttctggagtctcgggcccacagtcaccgccgcttacctgcgcctcctcgagcctccggagtccccgtccgcccgcacaggccggttcgccgtctgcgtctcccccacgccgcctcgcctgccgccgcgctcgtccctccgggccgacatgagtggggaccacctccacaacgattcccaggtacggcccggcctgaccctggcggccccggaccccggcctggccgtcccgcgacccccggcgcaggccccgaccccagccccggcccggcagctttgacaggccggagcccccggtgaggggccgcctgccggagtagatcggctcgctaggccgcgagcgagggccgcgaagttacagttcgaggcagggatggctgccctctgtggccacccccgggtccccgtcctccccgggggcgcagggtgagccagaccccggccgcgcgcgctcgccgccggaggggttaaagtggctgttgtttgatattctctccttttctttttccagatcgaagcggatttccgattgaatggtgagtgtgccccctgcgccgactccggggccccccagccgccggccgcctcccccgcgccctgccggtgccgggcagaggacagacatggcgtcccagagactaagtcccggctcctcgctcaccggccccattgttcccatcgggccgcctcttgaccccctttccggggaccccagctcctccagatcccggccctcccaagaggggacaacggagaccccgtgtcgtccgccaccgggcctcgggcggtctttccgggccgggattcctcccgggaaagtcgccttgtcgacggtcgggacttagtctctgcgccattttctttttctctctcctctcctttctgtgcctgtgtctctttctctccctccctcggctctttccttgagctgcccagaatgagctttctgcagagcaaagccgtataaatcacatacttcaccagagagggaaggctgggggactgaattattattttttaaactttattttgggggttattccctttatgcttcatgtttgtttccttttctgcttccagaatgaaagatttccttaagcaactgttaattttttttttgataggctgtttatgataggaattatggctctaaaactaaagccacgctttgtggagttctttatatttccaggttgtttttcccaagttacgttctttgcaaaggtagcagtacctccctaaagaaagtttgcaagttctctgtgggtcacccaatgtaaatgttggatttttaaaaaattatgttagtcactggaacttttcattgtggtcgaggttcccaatgcagtgtttttctggaaacgcagtttagtgtacttgttggaaggaaagattgttgagcatctcttgtggacctggtgtgttggccttttcgtttgggttgtaaggaggaaaaaaagatt

SEQ ID NO: 68688 - DNA, 688 bp, Homo sapiens
ggtggaggttgcagtgagccgtgagcatgccactgtacctaccccgttttgggcaacagagtgagaccctgtctcaaaaaaaaaaaaaaatcatcatcatctttggcagtgattaactttctcctttcacacttgggatggtgcaatatttggcatctacttaggaagctaaaattttcacgtttaattgtaaatggaaaagtttaagttgccatattcattcatacaaacattcagaaagtgaatattgtgactagacacagatgaacaagacaaacccacatgcctatcaggatgaactttgaaattagtacgttgtaggtatatacagtcacttcctctgttgagatttttcattaggcctcagtacaaaggctgctgtcatacaacatgaatggggactggaggtactttctggcagttaatatttcactatcagtgcaagagagtgacgtctccatttagtcctaatcgtgagtttttccccccttaaagaaattggagacctaggaccttggatttccaaagatttccaaactcttatttcttaaaatgttacaaaaaatggtttttttttgtatacctatatacccattaaacttttttgcctgaaataggcaaaaagatttaagttctgtgtatttatttcctgttatctttttgtatcagacatccatgttgcatgaat

SEQ ID NO: 68689 - DNA, 641 bp, Homo sapiens
gatttgggtagaattatgttatctcttttctagaaggagaggaaaatgcgcaaaatctagaggttacttcctatactgtttttacctttataattttgttttcctcagcctcaatttcctaaaataagcccagaggtcccctctagtttcgaaacaactagatgtttattgttacatattctcacttcactgaatgacagaaaggatttattagaaatggttgtaagtgtttgcattattgactgggacaaaacactttgagagttttgcttccttgaatctttgaactttcagtttcatttgttaaaatttttgacaattgtgcctggtactctggggtcctttagacaaggagaaaagcaggtgccctcttcaggcatgtttcataattgttctaggaatgcagaataatacaattcaggaagcattagagctgcaagctgccctaggaattttgatttctgagataaagtgactgaggaggcactgctgggctaatctctgccaagagactgccttggatttttattaaactgatatgaataaattttttggacttggtgcatagtcatgaattcattttcagactttttgggttagaagattaggaacacagccttctttgaggcagtggtctctat

SEQ ID NO: 68690 - DNA, 637 bp, Homo sapiens
ggtggcttctgcctccacctccatctcagcttatttgagagaatcctagatccttggtgcagaagcccagccagcctgtgaagaaaagttggtctggtagtatcctgtgaatgacgtgcgggttgggtttttctaaatctcgtttacctgactcctaccttacattccagtggtgtgactaaggaactgagcaaacgtaaccctaggggactttgagacaggctttggtagtccatgtgcactagagtgaggggaaagaggccactccagagttgggtactctactgttgaaggtgagccttttgtgtccaatttttccgtgcatgtgtaagaacagttgtcatggagatttactactgacttgtgcatgaggacagcttatatctcaccttttcttattcaccctgttaaatgtcaaaatgtactaagacttaggtattttttctgtgtcaccaactactaaatcacccacccatgatagcaggtagttactgaaactcttgtagccaaacaagtgcataacactggtacacatgatgtgagagtgcagatgactccttagcttaactgtgtaagcttttaatttctgagtacttttaggattgagaagtggaagacattcttgctctaggtatct

SEQ ID NO: 68691 - DNA, 1798 bp, Homo sapiens
gcccatgcgagggacagacacaaaggccctgggagctgcaggtcagaccactggacagcgcggccgcggacctaacgcccctgtaaggggtgctcacgcttggggggaactctccgaaagagaggaccactgaaagccaccctggcagcaggggcggaacagacagacgtgggtctggccgtcgccagaactgcctgcggaccagccccgcgctgccgggggggcgggacatgtcggctgtccatcagtgcccgcgaccaatccgcaggcagccccgcccccgcccctcccgggagagggcgcgcggaggacccgccgccgccggtgtgaggcggcccgtcctggctcccttgtccgggaagcccgcccaggtaactgagtttggccgggcattcccggaggacgcgccatcccctcacgtcccgtcccggtcgctgcatgggcggtgttcgggacgcgggggctgcgtctgtgcgggaccgcggggtagcggccgcccgtgcgagtacgcctgactgacgcgccggccgccgggcctgcggcctgtgggcggggctgccgtgcgtgacagggccgctcgtggccgccgggctgtgtccggggccgcgtgagaaagctctgcgggactgagggctgggtgggtcgaccgggaacggcgcgcgctcccgccgccatcgcgcctccgtccccgcctgcggcctgtctgggggtcgcggggcgcaggcgcggcgggccgacgggcgggggtcctccccacgggtgcgcgggcgcctttgttcccggcgccgaagcggggtggggcctcagggcagccccgccccgccgcgctgaggccccgccccgtgtccgcctgcaggagccgccgccgggtcccgctcgtctgccgcctcagcctcagccccaacctcagccgccgccgttgcgcttgctcccgggcggtcctggcctgtgccgccgccgcccccagcgtcggagccatggcgggcgccgcgtccccttgcgccaacggctgcgggcccggcgcgccctcggacgccgaggtgctgcacctctgccgcagcctcgaggtgggcaccgtcatgactttgttctactccaagaagtcgcagcgacccgagcggaagaccttccaggtcaagctggagacgcgccagatcacgtggagccggggcgccgacaagatcgagggggccagtaagtgcgcccacttcctgcctgggcccgccccgcgcgggggtcgtgggagcccggcccgactgcttgcaccccggccggccgccccagcgacttgggcaaactttcgggccctcccagactccctccgggccccgcccccgcttcgtctcgggtggtcactgggggcggggggcatccgggtcctcggtcacctgacaggacaccccccctcccccagctggggggagtgttccaggcgctttgccctgaggcctaaaaatcctcgcgggctggagacctgcggtgcaggcatcgggccccccagaccctgggagtggtggcggcgtcggcgaggggagctaaggcagtggcccccaccctgcacgggaacctggggcctgaccagacggtccccgcccactctttatccagaaagagcagtctgtgaaactctccgggcccccaggctgggctcttatttgcaaaggaatctttgggttccctaagtagaacttaggcagatgttgggtagggctggtcttggagcagagctgggcctactcatctccctctgggggagagggaggaaggtggtcttgtttggtttggagaagcctgagag

SEQ ID NO: 68692 - DNA, 2463 bp, Homo sapiens
caaacccacatcttcctacctcaactctgcctaggccattcccctgcttcaagctcttacagagcctcccatggcctacagtataaattcctaactgtttcaggtggcatttgagaccgatggtatcaggtccctgcgcctctccagtttcactgtctgctactcgtttccctccttatactttacacccaagcgtaaatctacttatagtacctgaaaccccatgctgggtcatcactcttcagctttacatatactcctctctttgacgagaatactcttctcatccatttggcaaattcttcaacagacttcaaacctctctcaaatgcctctacttctgtggtacagtctgtccagaactgtgtcttgtacatttttctactactttgcacctgtgcctgtcatacaacgatttctccagtttctccggttttttttttgtaattcactgaccattattaatgtcttctctgctaaaagtataacaacactcagctttgcacagagcagttacttgggaaatgtttgcattgctgaacacaggcagcttccaatctcatgggaacatcaaatgaaatgcagaggatacatgctatacaacacagtcaagaggactgaaagcaggcagcaggagaattccacaatattcctgtttaaaatgttaaaatgttggtggctgccagagctcaggaaaagaaaatttttttatgtggttacagctcactctaacgagtcaattacattgacctaaagcccatggtgctcaaaactgtatttctctctccaaaacctcattcttttataaagctccctcctctgtggaatgaatgtgggcaatcgcttttgcagtgtttgacgatgccagtttatggctatgtttttctgttcactgaactggctcatttcttcaggagaacaaactgttctccactgaagcaggaattggctgggttctaacaaaaagatttttcccccctgacagtgtttttgcaaaagacccaagtcaatttatagccaagtaacaaaaggtcagaaaggttagtcaagcaatgggcgtaattcctgtgtgtcacagccaataaaggaaatgggtggggataaatagtatgcaattttaacctgaaattatttgtgcaaaactattcttgtaaactatacaaaattacccatgacttccactatataggatttctcactctgatttttttaaaggtacatttactttggaagaactgagatgacctcaaattcctcattcacaaatggaaaatgttaaaaactttcttcacactaatataagaaaaacttggtcattgttttgcagccctgaaacagaattgttcacataaaaaaaaaaatctcatagttaagtcacaattaaatacaatttgcatgactgaatttaaaataaattgcaaaattcccttgccaaaagggaaacaacattgaccaaaaggataggtcaagaaaagaccctacaaaagtgacagttcctctgttttaatcatgctaaaagtataacaaactactgcattattcagtgagcataagaacaagaaaagcctgcctttaaagcagacacgaagaactgacatcaccagccaagcaagcggaaggcagatgagtaatagcctgcactgggcggccaaccaggcccaggcccatcagtctgtggagtaagaaagcctttcagatatcaaggtcgttgggaggcctccttcccccagttctccaatacaaagtctaatctactcaccatttaaaacaatcttagcatccaaaagatgaatggttaaatagaaccctgtcaccgttcagacaagatggtctaaacccatttctctccccacctccttgtaagcacaactgtaaatcctgaaaataacacaaaaggcaaccaaaggagaagtctgaaagaaaaaggaaggtgaattacttagggacccaggattggaggaacaacatagcagcacatcttatgaccacacccccattcaatagaagaaggtggccgagggtgtttcccaacccccaacctagcaacagagggcagcagaggattgaatgggagttctgccgacaataccaagccagctggaagcaccaacaagggggatagctcaggaccccactaacaataaagcagtctggggaaacacttttccccccaactacagggcccccaggaagcaagctgcatcccagcaggatggagactccctcctctacctagatatcaggcagcatggcctggggaaactccttacccccatcagacagcaccaacagggactagtgggagccgtggcagcaccagataaaccaagtggaccaaaagagtactgcaaaggctctgaaaagtaaatcatcgttggaaccacaagagtaaatcccagctcacatgctgcatctaaacactgtgaccgcctgctaaaatggaagatttaaataggacccaga

SEQ ID NO: 68693 - DNA, 1718 bp, Homo sapiens
tctctctattcttttcttatctctgctcaaaaccctccaatggcttcccatttcagagtacaaacaaaaatcctttccatgggctaaaagccctgcatgatctatcttccccactcccattactctataacctcatctcttctcttctccccttgattactccacatctctggtaatcacagagttttgctctgtgtccccacccaaatctcctctcaaattgtaattcccacatgtcaaaggagggacctggtgggaggtgattggatatgggggtggtttctccatgctgttctcatgatagtgagggagttctctcacgatacctgattatttaaaagtggcagtttcccctgagctctctctctctcctgccaccttgtgaagatagtgcctggcttccccttccaccatgactgtaagttgaggcctcatcagtcatgtggaactgtgaattaaactgcttttgttaataaattacccagtctcaggtagtatctttatagcagtataagaatagactaatacacgtgaactctgtgctattcctcaaacatgctgctgacttgaggcctttgacttactattcattctgatttgaataacaggaatcaatcatttatcccaggaatccacacctgttccctttatcttcctcagaactctgcttaaatattactgtttagagaggcctcccctgactacaccaccccaagtagcagtcagactcccattctatcattctctattcccttattctgctctattttttctttacagcatgtattaccatttgacacattatatttatttataatatgtcttaccttctgtgttaggcaggctctaagatggcccctaatgatctctgcgtcctggtattcatgcttttgtgaaacctcatctccttgagtgtaggccagacttactgactcatttctaacaaatacagcagatatgatgaaatgtcacttccaagattaagtcatataaagaccatgacttccatcctgggttctgtttcttactttctcttggatcatgccccgaggggaagccaatacaccaagtcatgaggcatccctatagatgggtacttatggtgagagactgaggcctagcaacaaccatgtgagtaagcttggtagtggggccatccctgtcctgaatcaatcctttagatgagactgcaactccaacctacagcatgactgcaatctcatgagagactgtgagccagaggtacccattaagccctgctcagattctcaacccatttctgttacataacaggtatttgttgttttaagatgctactttgagtcatttattatgtagcaatagataatatactctcatgtgtaaaatataaaatatcatgggatgtattaagaaagacaccactctatatgcactgtgatgatataaccagccctttaaaatcaaatttggagtaaagcaaggacttcattttattatttatttatttttgagacagggtctcaccctactgcccaggctgaagtgtagtagcacaatctcagctcactgcaacctccaccttctgggctcaagcgatcctccccactttagccttccaggactataggcacatgccaccacacctggctaatttttgtattttttgcacagatagggttttgccatgttgcccaggctggtcttgaactcatggcctcaagcaatccacccacctt

SEQ ID NO: 68694 - DNA, 1194 bp, Homo sapiens
gcctgaacccgggaggcggagcttgcagtgagccgagattgcgccactgcactccagcctgggcgacacaacgagactccgtctcaaaaaaaaaaaaaaattatcaggagccaaaataactaactcattacaagtgtaagaatttgtacattcgcaagaaatgaaatagtaaaaggtgacacacacagtttgatcttctcgttcagttggttgtcctttataatgctatttaagttcataaacaaccaaaaagtaaagataatgagattcatgttattaaaagtgcctaacatttgtggaaagcaaaaaggactttgttcagcaactgcccatgaactttgggtaaaagcaaaactaaatttctggagtctattttgcttttcaccttatttgatctcacttaacatcactcatgccaagttgagtttttttcctcttcttttcccttctcctcaagttcataaagtaaaaaaaaaaaaaaaaaaaaaaaaaaaaaaaaaaaaatacatggcagctctgttacagtcctcactgttctcccagcaatactatgtatgaaatgcggctttctggaatgggccacagagaaagtaagataagagaaatatccaaatactacctgtcaccacggggatcaccaggactgagttgacttagggccaagagatctgagctcaagttttccacatctataacatggaaataatactacttgccccaaaaggtgatgtcacaagaaagtccctagcacatggtgatgctcaagaaatgctcatctcatccttttttccccaccttctgccacacacgtgcacatgagctctgcccattctaaaactacaggggtccttaagtctactatttcccagatgcccactccaactttctctaccctgctctctgtcttggcaggctaatcattatgaatcacatcaacaggtccctatgaccttgacctctgattgggtttagccaatgctaagtcccagaaagagatcgggggaggaagggagaagcgagggagggaataaagttgagaattcattctacttgtggcgtatgcatccctcaaccaaaattcactgctcctctcaaggtagcctcttgacacttgataatgacaatctcttctggctcctgataactactttcatccattttcatccatttgtctctttggagctaggggtagta

SEQ ID NO: 68695 - DNA, 2973 bp, Homo sapiens
tcccttgtctgaaatcttacttcaatatgaaaaaaaaaaaaacaaactcaaaaccaaaaaccaaaacaacatggggaacatttttttccaaaaattaccacacttcccatgcaatgtttgcctgtcatgaaccactgcacaaatcaagccccgctcaatgtatcaaggtcacaaaaccaacttggttaatatgttgatcattacatagtggctctgtcctctacagcaactttgataccatctttccaaggcagcaacagaagggcccttttcattcattttctatgtgtctttgatactattttgcgcttctggatttttccactgtatgtctcttagaaacaaattaagctcgaataagttgttccagctaatgaagtgcgcttttggctccttctccgtggttcagaattatccggcaaaataccaattgttttaggatgcattttctcttagttttgaaatattgcaatactaagttaccacaaataaagagcattgagataacaacacacaagaacgtgtataaatggaaactactgtaatccttttttaaattaaggacgtgtggacgcctcatgaataaacatttaggatatctggataaatatatactatgtgttcacatagataaaaacagaaaggagcattccttcctacctcactcccccaccccaagtcacataagtttctcgcagggcacaagcccagggcaatcactgctcagaaatgtaaaccatgcaactcaaaatgactcaagccctcaaacactccccacctaagtcctacatcccatccactcctcaatcacttccaacaggcttccctgaatgaaaatcccaaactgggaaggcttaacaagctccaaactccactcacacgccactcagggaatccgaggacctggggcccacgtgtagtgttttcgcgtgggcagacaagggtcccaagattcagggtgctactgtaccccgagtggttcgagtcctggctctgccgccttcactggtcgagctgacgctctttacaccgggggcatgggctgccacatcccagcagagtgcaagggccctcgggcgtggacgcaggcggctctcgggtgcacacgcggaacgcacactcgggcatgcactctcacacggtcaggcgggcctgcgcgaacgcccccgcttcccctctaccacccccttttgcgccttctacgatggtggcacgcggggctaccctgacccctaggacccctggacgcccgctcctggagcccggggggtgatgacagatggcggagggcggggctccggggggaaggggcggagcctctcagcatgggggtgctggcggctgacagaaagaccaggggcagccggcgggagggggctgactgagactgcgggccggccgcgggccaggcgtggcgggaaggagctcgcgcagacacagggtctgacaggcagagagagatacagacaccggggactgacagccgcgggggcacgcggggccggctggccgtggcgggcgctcacctggcagcggcggcggtggcggcgcccgcgaccgggccgctcttcccgcgctgcgggcctccctccccgcggccgggcgggcggccggcgcaggccccgcagaggcggcggcggcggcgacgccggagccgcggactgctgagcggcggggacgcagctgcaccaaccgactccgggccgctcggctgggctcggccgctctcggaggcgctcggctctgctcggccttgcacggctcccctcggccttgctcgactcggctgggggcgtggcccaggccccccagtccgcccaggtcgcctctggcggccgcggggcggggctttcgagcgggtgcgagccccctgacgtcgcggggagcggaccttgcccccggcgcatgcgccagcactcctcctcccccctcctccccgccccaccgtgtggaggctgaagaagacggggaaggaggcgctgggggcggatgctgcggtcccagaggttcctggcttttgtactccatatcctgctctttccagaggaccacttaaagaaggtcacaccaggttacactttcaaaaggatgtgtgtgtaggctggcaggggctctcgctcctgtctgcccccactcctccaattccagtgtttcccaacaagcgtcgactaggagtggtcttttatccaaccaagggttcactgcaatttttaatattttctgttttcttaagaataataacaaaaaaactaactcttgatcactgttttaacattgagtcttcaagtacttgaactttcaaacatcagtcagcctcctcgagtccactaataccgtcctttcttcatagctgttgtataacctgtaatgcctgggatggggttgggttctttcctgaattctcgtcacatgatccaggcacctttttagttatggaaccaagtctgcagcaaatatgctcagaaagtggctcccacctttagaatccagtgattagtaaacagcaggagctctacggtcttgacacacctggatgggaatcccagatctgcattaatctagcaggttaataattgtctgagtgactttggacgtgttaatctctcaactgtaaaagggcaatgaaacatgagtaaatcagtagaaatattaaaagggttaaatgacaccacatataaagatttctgcacagtgcttggtgttcaataagtaaggctgcctttaacttcaagtaactttagaaccttcagatcctgaaaaccagggagcatatacacaagtgtgagcgatgtgtccaagtaaacaagtcgatagtcaaacacccatacgtggcaccttagcttgctcctttcacaaccttccctacctcagttcatgtcaactccattcttctgatgactccagacaaaccattggagtcatcctggactccactctccctatcatatcccacatgcaacccattagaaaagc

SEQ ID NO: 68696 - DNA, 1792 bp, Homo sapiens
gaggccagtcacttccaaacaggttctgtcaccctgagtcagaataatggcagctacctctcctcctcaccgcccagtcgtttctaagcctggctcgtcgccgttgctgctccgccaagcctttcctcggtgccctctctcttttagaacaaattacttcatctccaggcccttctcagggcagcttctttgcaggggccatagggcgtcggaaaggtctttggtccaggaaagccgcgagccacagatccaagaggaaaaagccgttcccggcccgggccttgcccaaggcacgagagtaaatgcaccttccgcgtgcctcggcgcacctgggctcacctgtcccctcccgcagtgcctgcagacagggagggagcgcggctgggccagaaggctgatcaccgcctgccccctgctggccagtgtcagtattgagcccgctgccgctcgaccagaacgtcccagggatggaatgaaggtgcgggcatttatggagcgcctgctgtttgtcaggcgaggtactgataagcgctggagtgtaaggatgtacgtgacctgctctcagagttcaaatttaaatgaagagatatacattaatcaagtagtcattcaagcaaatatgaaattacaactgtgggctatgcgaacagatgacgcgaggggcctgtccagtctgggagatacgggtgggttcaggaaaagctgcccccaggaggggacgtttgagcgccaggagccgcgcaaagtcatttcatgtcatctctaaaatcctgcaaggcggctttcccccttgacaaaacaggaaatgggatcaaattgaggaaggaattcacccaagatcacacagcaagctggaagcaaatctgggaggagctaggtccgccccgttccgaaatccacacttttctggaggtggggcaggcggtggcacagggacttggggcggggtctggtgggcggggcatgaagtctggccccgcccccgcctccgaggccaaagggcgccctgggcggggatcggagcaggggcggggtctttccagggagtggagcctgggcagattggggcctgtggaggccgcactaggatcgtagaaggagtggagccgtgctctcaccctgtcttagaggacccggaagcgccaagtgactgagggccgaagacactcacctgtggagcctgtgcacgtaggtagaggcggcggctctgagtccaggagctccagtgggcagctccccaggtagggcccaactcggggggagaagagatgaccctctcccctcccgccctgcccatctgtcctgccatcctacattccttccttcctgtccgcgggcctgggtccacccctagctgtaagatggggacgcaggggtggagggactggcctcattttgtccctttttccctggcccagcggctgcaggccccctggacacccagaacgtagagtctggagaggagacgtcgaaacctcccaggggaggctggcccagctttaccccagcctgactgtgtgaccttgaggaggacagccactttctctggtacccagtgtcctcagttgcaaaacagtgactggcccttgccctgcttgccctgagactgggcagatcagatgctgtagctgctgggggctggggtggcgctttctctctactggggcactaggagtgcttactctcctgctccctctggtcctcggtggagagccacacccttcatccacccaaacctgggagccccgagggctgagagcctagtcctagggcagcttgctctggcttccct

SEQ ID NO: 68697 - DNA, 446 bp, Homo sapiens
cttttggctggagagtaatgagacagggaaaaattgtttatctaaaaaaatgaagaatttggcaaaacaaggcgagagtgtgatcgtggagggtcctgctgagcacagtaaggagtctgaatgtcattcccaatgcaacaggaagtcaatcgaaggccacaagcagcagttaaaatgatctgacttatgctttagcaaaggccaagaaacacgtctgtcatctaggtcaaaatgactgtccagccaaggtcagtaacctcatgcaaaggccatacctccgcctgccaggccagtgtagaggctgagagtgcagatgttcgaccagctccaagaacagcaattgtttccccatcatcatccaccactttgaagtccaggtcctcattgtattttctgcgctttacttgccttcccgagcgtcgtttctgtagggcaaacacacccgt

SEQ ID NO: 68698 - DNA, 1368 bp, Homo sapiens
ctcatctttttccattttatccctatcaataacatccaactattcaaaccatcagattgttattacaatgttcagattcttgaggatgtagtcatgttctcacccacacagattaacctcttatcagaccaacacaaaagaaggaccatccaaacataaaaacagagaaagagaaaggtggttaacttttttgtgaaaaacatgcctgctcaaattatctacaactcccatctgaactaacatttggtagaataaatacacatgctaaagtaaaaacagaatgagggacagaaaaggaaggaaagagaattatttaagaatttgttaaaatataagatacattacttcaacaacaacaaaaaatcactaagcaaagagacagcagaaataaacttagaacgagagagtctctatagtatctcctggcttggttctacagagacttgtggccgctatttatcatgatttggagaatttgaaaaattgtttctttggtattggataccagctatttggctttctgctccaaaaatagcctgaaaatatatagctaagatttatctgggtggccgctttgtaacaagcagctttaacttcagtgcaaatagagtccaaaggtcagagtggtatcctgtgtgaatctgtgacctcaagctgtctgctacgtttctcttgatttttccatctactctgacctcaaagattctcctatagaatctgggggctatttctgctctaaggtcaagtaaaaagattcaaaaaaaggttatacattaagaaggactttccaaagggaaagcgctaaacatttgctcctttacgtggacatgtagtgtgtgtgtgtctacacacactacacatatgtgtaaacaaaataaatatatgtgtagcaaacacaataaacaaaacaaatatatgtgtagattattgtatgttgaataaacagattatcttccaaggctagtgggtcagtacacttcagttatttttctagtaatagagacactagacaatccattctctccctctcttggagtacaaattctataatcaactgtctgggttcacatcttagcccttgctagttgttagccacacagccagagcaaatcacttaacctccttaactcaagttttcccatctacaaaacatgacaatcatataaggattaaataaattagtagatgcaaattacaaagtacagtgtctggcacatagaaaacactacatgaggttaaatattgatatttaaacaacagccatcctaggttatagaaaaaatacgtgataacagcagtgagaataaatgacctatatggatttcagtcttcaccatgattcatactcctcaaccaaataaactttag

SEQ ID NO: 68699 - DNA, 1704 bp, Homo sapiens
aatttggagaacagggtcctacgagctcaaaattgaattatactgccttattagatcccacacgactgaaaccacagtcacattagtcataactggaactaggaatactttatgtacacaaatataaagtgcctgcttatgcatttttaattgtatcaaataaaactgaagctgcaaacaaactcaaatttcaattatctcactagtgaggggatttcctaataacgcctttaaaaaaaaccaagtagctgccaaccctctgcacatccgataggcatgtccctggaaatctgggcgcaacggactccgttacttctcaacagcgaggaaaataaataccttgaagaggacagatagatctttttttaaagctccaacatgcgatctaataatgcacaaaacttggcagcggggttgcaggacccctcctgggctccaattttcggggcgagtgcgcgctagtgcgtaagaagggggcggagggggtgcgcgatccgaggccgcgcaggggcccccgccccctcccggaacagcagcctggcaccagcccaccctcctccacccctgcaaacagacgcaggacgcgaatagagcaacttctccgcgggggcggcggcgggaatagcggtcacccccgccccgccccagcgcggctgggcccgggggtcccaccgcgcccgccccggggggggcctcggcacgccccgcccccgcccgccaggcccgcggccggggtctgcccggacccccgcccctgcgcgcggcccgcagcggcgcactcccaaggacggccgcccggcccgagcgaaagcgggagcgggagcagtagcctggcgtggcagaggccgcccctctccccaggccgcaggccgccgcctgccctccgccaggccgcccgcccgccggccccgctcggaccccagcccggccgggcctggacgccgccgcagcccctcatcccggctccattcataggggcaccctaacccggccggcggggcggggccggggacccgcggacaaggccggtccgccgaggccagggaggaaaataaaaagttaagagaagaacttacctaaaatggctcctgcagcagccaaaatacaaacagctattatttggtgaagtttagctcagacaccctgcaaggacaccctaacccatctcgggcccgccttccctgtcgcgccattgggcttcgccggtccaaaacacagacccattggtcatcccggctgccgctcagacagaagcccatttcaagcttgcttgcaggggcgagtgatgggctcgctccattgtgctcgtatttgcatggatgtgatcgcggccttgattggccggcgctgagaccgccccgccccctgcctcgtgccccccgccttggagacgccgctgcgctcggccccgcccccccgggactagcggcagggccacgggggcggggcggggccggggtcccgcgggccgagggggcggggcggggtcctgcacgctgcagatcgcaggcagggggcggggacctggcgcgctcgggcgccggcgggggttcagcgcccaggtggaggtctctcaggtagctggctagtgatctggaagacccggggctggcgtctccgggggtgggggaggatgtggctggggtcccgcgacacaggggttccgcaggggccgaggccacgcgggcagatgcaaggagaagc

SEQ ID NO: 68700 - DNA, 2250 bp, Homo sapiens
caaatgacttgattaatggtttattccctaaggctctaaagcacatggaatggatcattttggctgctgcagaaaccatgggtaagagaacatggtgaggtcctatagagcctaccaacccaagtcaaggagagccacaagtttcagtgtatgcaaatatgaggtcagcgccggtttggggaataggaaagacgcaggggctgtgtcgacttttggaggccagtccagaagtcgagtccaggcgatggtaggagctactccccagacctgagcacctctcctaacagcagctcaggcaaaggccacgtctcggaacagttggctgcacaggtcacgtgacgcgcccctagcccggctctatttggctgcaagagcgctctgtcgcctgcctcggactctgtttcccagaagtcttcctggaaactacatttcgcagggggctttgcggcgcctacttcctcctggctgattagatgggactggtgccgttggccggacgtttttgggagcttcacaggctgatggggaagggcgaaacctgctcgattaaaacaacccgcatttcgaggcgaggaagcgagtcacggctcggcccctccctttgtgaggagaaccaggcccgcctcggggtcccctgggcaatgtagtaacgtgaaggtctccgagtcccgctagcactcccggggcgtgggggtcccaagtgggactggaaccaccgcgaaagaggcggggctgcgcggatcttccacaccagctcctcccttccgtcagggggtgctgcgcatgaacgttttcccatctctacctcttggttatccctcagcagagattcttcttttactctgtacagttttcagcatccctcaagctgatatttcaattaaacaaattttagaattctgagaaatggcgaaataatgtaaaagaaacaaatgatattggccctaaattatcctccagcccctgctgctcatcggacactttatgaggttacaaaggaccatggcgctgcgcatatgggggatccattttacccaccgtacttagatcaggctgtgacttccgccctcgaggagcggctgctgctctaccgggtgtgctcatttagccctagcgttgtttgtgcgtttgaggacattcgctgagccaagctgcaagggtgtcgttatcattttacgaggggaatacggagagcatggtggataaaaggtggttgacctgcccaggctatacagctagaagtgccgttagaacttggtacaggtggaactgattctgatacttgtctcaaactgttaccagtggagggtgttcaggttcttggtgtcttgaacaaataattggacaaaacggcacaaacaaagcaagggaataatgaagtaacaaaagcagagatttattgaaaacgaaagtacatttcacagggtgggagcaggctgagcatgggggctcacgagcgctgttatagaattttctgggggttaaataccctctagaggtttccattggttagttggtgtatgccttatgtaaatgaataggttaaaagttacaaaggcattgtatgccctatgtaaataaagaggatatttcggcggggagttgtggcttacacctgtaatcccagcactttgggaggccaaggcgggcggatcacctgaggtcaggaattcgagaccagcctggtcagcatggtgaaaccccatctctactaaaaataaaaataaaaataaattagctgggcgtggtggcatgcgcctgtaatcccctggtggctgaggcaggagaatcacttgaaccgggcagaggtcacagtgagccgagatcgcgccgttgcactccagcctgggcgacagaacaagactcaaataaataataaataaataaataaaaaggatgtgtcttatcatagctgaagtgtttcatttgatttaattctagcaagtccttaagttccctgcctccaggccatattctgcctcaagacctatcctgtttacttcgtgtagcattagtttctttttcccaggtttgctgctacttacttggttaagccatgatcatctcggctgtactcacagtctcataaatccggtgtttattgagtgttagcaccgtgccaggcagtgtgttgagtgctgggacatggtgttgaacaggggcagacacaaccttaccttcatggtgtttacagcctaatggggaagacagttactgatcacataatacaaataagaataaaatgtcaaa

SEQ ID NO: 68701 - DNA, 903 bp, Homo sapiens
gggtgtcactcctcctgccccattaaggaaaggaagcagaaaaataaatagagaaaccaatgtctttctccaaatcaggaagttttaacacagagtacagcaaagtatgacctatgaactagaaacctagcctgcctcctgtttgtgtaaataaagttttattgaaacacagccatgtttatttgcctacatatcatctacggctgcttcccagctacagcagcagagttgagtagctgtgatggagaccacatggtctgtaaagactgaaatatttactatctagcctttgatggaaaaagtttactcattcttccttccaaaggcctgaaggcaatctaatagctgtcacccagggcatgcaggaaaccaggagatggatgacggcagcttatttttgctagtcccaaaagttgctaccactacaggaacatctggctttctaaaaacctcttcttctgaaagtgacttatttttaacatacaatttttttcagaggaaacaaaaaaaggaaaagaactaaggtccagagcctctgttggcaggcctcccccagcaagttccacttcctggaacagtgagtacactgtcctgatggctcaaggtcagtagagtcacatggtccacacatggctctctgtggaactctggagtgccctttgaccccactccacatctcagctccattagtgacctggcttaaagcagctcaggagagacagaagccaggtgctcccaccttggcccagtgaggatcagagggaggagaagacaccggtaatccccagaagagaacatcctgatgtcatgcaaagctttctcaagttctaccctgggaaaatcagcctttggtgcccactcaataatccggaaccattagatgccaggtactttccaaccact

SEQ ID NO: 68702 - DNA, 2611 bp, Homo sapiens
tactctcctggtcttctccctacctcgctagtcactcctcccagtctcctttcctgcgcttaaatttcagagtaccccaggcgttggcctgggtcttccgctctccacttaaacttactcctttgaggttttcaatctggttctacagctttaaatagcatctccattgataaactcacaaaataaggcactttcaagtcagtggaggaaatgatagtattgggacaaaggactttccatacacgggagaaaaaaaatcgttcgtcgctgtgggagggctgccgggtctcgtccacgctcccttttgagcacctacagtgagcgtaggattgccacggatagcccaatccacaagtgagtcaagctgccagggctccaagaaagacccatggagggagaggggaacgtccggggaggcgaaggctgcgagtgagacccggagaggctgatgtcggcgggtctgcgcgctcgcaacgcgacctccgcccggtcagcaagacctcggcgcgcgatcctcagattctgcgaaacaagacaagcgactgggtccgagaccgcggtccccatcaaaacgagcatcaaccaatcgctgggagaaatccgcagcctcgttttaagccaccaagcagagaccgcggcgacctattatgataacctcgagaaccaatgaaaaacggggattcgctcagcccgcctcccgagcttcaaccccgaagagatcgcgcacagttttataaaaggtacaaattagaaagcagttctgcggctggattagagacattgtgttttcaaagacggtggggagggctagagaaaaatcctagaagctagcaagaccgcactacaccgaaacgtcgcgggcaacggactcgccagtcaccatctagcccagggacgacgcgggacggacgtgccgctgcgcgctgacatcacgctccaggccccgccccaccggccgcccatatagcgaaagcctggcgcgcgcgcgcgccattgtgtggctggactcggccgcccctgtggtgtgaggcgcgtgttcgggctcttgccgtccccgcacccgcaccgcggttactggcttgcggtccgccgttcgacaaccagcccttgggtccccgcccgccacggacatgccgcgcgtctacataggacgcctgagctacaacgtccgggagaaggacatccagcgctttttcagtggctatggccgcctcctcgaagtagacctcaaaaatgggtgagtcgggcctgggcgcccgcgcccagcgtcccaggcctggtggcggcgggaactctccaaggaaagaagcggccaaggccgcggcgccgcgtggcagggcctcaaagatggcgacggcgcggcgtcgcgggggcgcgcggtggggtacgggcgcgcgcacgtgcgcgtcctggctaacgactcccccgcggttgtccggccctcgcaccgcccctaggtacggcttcgtggagttcgaggactcccgcgacgccgacgacgccgtttacgagctgaacggcaaggagctctgcggcgagcgcgtgatcgtagagcacgcccggggcccgcgtcgcgatcgcgacggctacagctacggaagccgcagtgagtcccacccccgcgcgctccgcgcccttggggaccctgggggcgggggtgggtggggtggggcctcccagcccgggcaggcgcgagggccgggggtcgtttgacttgggtgtccccgagccccgctgccttcacgtctgcccggggcagccatgggacgccggagcgcggggattgggtttgggtgtttggttttgtttatttgccaagttgggaggtgggtggcttcttctggccccttgtcagcactgtcacgggttcttcccacagaggaagtaaggggtggctgtatttgttgtattctccttacttacctatcagtgcattagttagaggttcgggggcaggctcgggtggaggtggggtagggggcgcgggggacggggaaggggaggagcataaagtataggtcttaaagctatggaacttgatgggggccaaagaatgtactatttttaagtaatgtggtattgtaccacaaagtagatctaaataagctttatgctgtatttgaactaattggggcatgttattgggaggaggttggggggatttttggttatgttaaatgtttgatgtttaaattgttgcatgttgaattcaaactttttaacaagtccttgatgtttcaatttgaaagtgaccaatggggctgaggctgtgtccactgaggctaagatgactgcctttcctgattggccttggcttttccatacattgtgtgacccttgccctatgaccctttggctgaccttaccggaagccatgacgacagcagccttttgccattagacgcagggtgatggtgaggattccaagggttagacaaaactggttaatctgaactaggtgactgttaccttgcgtgttttgtggccaaaccaccaccaaaaacctcacactgtgatgtaagtacttagtgtaaaactagtaaacatttttgtaaaatgtagaaatgcatgtaatcagttaagttttatattttacaatgttctgtaaaat

SEQ ID NO: 68703 - DNA, 809 bp, Homo sapiens
gtacctgggtgtaccagaggccaaacctgtggccaggtagatgaggtgctagtggtgctagctgtcatgagagatgctgagtgtgccccagacgggccatgagaggagctggctgagcagggagatggggctgtctggggtatgggcaggtattaggatttcgctgatgaacagagagagcagcaggaaggcagtggcacagaagtgtggttggtagggctgaggatggaatcccagaggctttgtgggtgaatggaggtggaaaagccaggctgaaaggctgacactcagggagagagggcaggacaatctgtgaccaacagggagggtctttgacaagagggcacttggaggtgctgcattgatgagcatctggaattagcaccaggagaataaagagccaatgctcctggaccatggacagaggctgggaaaaccccttgggaaagtggccacattgcacaaggccggccaaggctgacagcagtgagtggggccaggtttgtcaaagcagccagagggggatgaagtccaagttggcacgtgccaggccccaccaagggggaggccaagctgagcagcatcggtcatcagctcagtacagctgcttgaggtaggaggttggggccagtgatcccagaggcagaccaggaagcaaagccacaggcaacatggagctggggagtgggtcagggatcaccctctagtgctggcataggcagtagtacagaccgggctggtggaggaaggggaggaactggagcttgaggcaatggcagtggccagaggggtggtcttcagcctggtca

SEQ ID NO: 68704 - DNA, 704 bp, Homo sapiens
ttcactgactttgtgcagtgagaaggcagcaagtactcacggctggtgctgtgggacctcacagcttctaaggagaggggctgggagggcctttgccatcagatctgccaagcacctaatgcttgcctgtggtgaaggcaagatggaccaagggccttggagaaaagggctcccaggcttctgaactttgaggcctcagcactttctgcattatcgtcaaactctttggaaagaaaccaaatcattaaaaagtagaaagaaatctgcctcttgtctgccctactgcccctttacccccactctgtccccaaatgatattattgcaccttgacctgggagcgcagagaggggagggagttggcagagacttctggtgccctctgccctcctagcaacagatgccacttatattttggcccctggcagcctcgcccagcccctgatcagcccaggcctagggcagttaggacctttctgtttattttctgaagcagagagaatgatctcagagtttgcaaatgaagccttttttgcactttcattcacatgcactttggtggggttacatttttgtacttgcctcttgtgtgtgcacatgtgtgtatgtgttctttaagagaatcttctggcttaagctaaggtgactcttgaaggagaaaaagttacaaacaaaatgtggtgtgatctgtcagtgtatcaaaaca

SEQ ID NO: 68705 - DNA, 824 bp, Homo sapiens
actggggcccatatctgggctatgtatgagctctgttgcccaagagtctgttagcccatgtgggtaatagatttttctctggtggccctgtgtctgttattccctttgcctatgggtgaatctgcaggtggggctgggggtgggaatagggctggagccagactaaggacagaaaagtgggctgaggaatgtcaaagtgaagggaatatttctggaggtagatttccattggttaagtctcttgcttttcccttatgcctgagaacatgacttttaccttcatacccaaacaacaaagtccagccagggagggtgggaggggaaagaaggaagagaggaagatgggaaggagacgcatatctgcagtggcctatctacacatatctgcacgagtgaccttggctatttcctgcagtatcactggggggaagggcaagttcagcactgctgctagccacgttggttggcacaacttgttacagtcatttggtagagagttcataattaacccagcactcacacttaacaggagttcatctgtcagaaatactagcggaaggccacaggatattaaagcagagatgtttgctgcagccttgttggaaatattgtgaaactgctaacagtcaaaatgtccatcagaaggaacagtaaatagggaataggggttgtgaaaactccacactatgaagtgtggtgcagctgcttaaaagatgtatatatgaaaaaaagtgaattactgatggcccattttctggaaaaaaaatggatgcagttatatagattaatacatatagattaagattaatatacatatagattaa

SEQ ID NO: 68706 - DNA, 3615 bp, Homo sapiens
tggtctcgatctcctgacctcgtgatccacccacctcagcctcccaaagtgctgggattacaggcattagccatggcgcccagccggattgtcaccctttagttaacagcagctgcctctggaaatgagattgaagatgggctggagggaaagcttttactttttatttgacattcttctgtaagttggaattatttgatacactttatgcaaccaataccagtatgtggcgtgtttgggggttttttaagcagctctggaagagcagaggagagggagcttggtggcacagcagcagcagcagcaggagctctggaaagggcaggaccttgtgcgctgccctgatttgctctgtgcacttgggccagctacctcccctatctggaccagggccagacacatgctgctatgtgtgttggtggaggtggggtgtgtggccatgcagggctcctccggagcacagcagagcagccggtgtttaaggcaccagaattaccagaaagttgttgacattttaatggaaaggcaatggaggaagcagtgtgaaagtcagcctgctcaggaggggtcactgggcagagctttccttacctgtccaggggtccaggccctgcctgtgccctgagttagaacccagggccggccaggcgcggtggctcacgcctgtaatcccagcactttgggaggccgaggcgggcagatcacaaggtcaggagatcgataccgtcctggctaatgcagtgaaaccccatctctactaaaaatacaaaaattagctgggcgtggtggtgggcgcctgtagtcccagctactcgggaggttgaggccggagaatggcgtgaacctgggaggcggagcttgcagtgagctgagatcacgccactgcactccagcctgggtgacagagcgagactctgtctcaaagaaaaaaaaaaaagaacccagggcctgggaagctttgggtcaacccccgagaaagccttccctgttctccagggtgaactcatctctggttcctgagcctcaaatctctgaagggcagagtggggcataggtttcaactcagctgtgattctcccagaacggtgccagggcagtgcttggtcgggtaggctgtgggtggcagtcttcggcttaacacaagaaattgccagaggctggctcagggggaaatgagctgcccagtcctggaagtttccatgaaatgactgaacataggggctggtggcccccattagggaaggggtggaggagggtgttgtgtgagaccaacctttcagttgctggttcactaggttccaagcgaaagggaagatgactcagcggagggaatcagggaaggctgtgtaggagtcagcacttaagctggaccttgagagagtgcggcagttccagtgttgaaagggacttcagaaaccgtccctccagcaggacacaccatccgtcaccaattcacatgaggctcagggagctgaagtcagttgcccatggtcacataacaagttgtgctttaaaaaattcagagagtcccccaggcagggcccatccaggagccagtgtgtgcagccagcttggtaattcaggtccagtggttaattagtaactggaaggccccgaagccagcttccagcaggcagggctgggaggttgaacttgagccggtttgggagccaggagcgagtgggtgacaggtcattcctgactgggaaggttgcttgacaagtcaggattgtgcctccagtcagaaggaccatgaagagagagaagagggcagagccgtgcatggggctgctccccaggacctgagcaggaacctggagttttcaggtgagaggctcacctgtgagcaggatacctgcctgctcgcctattggtctccagattgactagttacctagctaacatctttcctagtacctgtttactttctttccttcctttcttccttggcgacttctttcccttctccctccttcctttccttccttccctcccaactatctgctttctcagctgcctaattttcttcctccttaactaaccaacttacatcctcacttccttcccactgacttcattttttccttttctagctttctattgtcttcctgaaattccaggccgtgggctttgcagtcagatggcctgggttcaaatcctggttatgtcatttattaactgtcttgatcatgtcacttccctgtccttgcctcagttttctcctccttgaaacagggacgatgatagttcctaacccgtggggttgtgggaacaaaataagatcaagttggcacttgaactgggcaggcgtgtaaatgaacaagttacagtgaagacagggacagcagcaggagagggtgcatgggatcggagggtcatctggcttccaggaaaggcaatgagaacaggtgaaaaggtgagctggaaagaccaggtttgttggggaatgttccaaggagagagaactgtgtgacactgtcccacccccacaccccatttggcagggccagggagctgtaagcaggtccatgtaacagtgggacagagggaggcaagtctgggctgtggcaagttaggaaagggacaggcttgaggactcatggaggggcttgagtgggagtttgcggagtctgaagagttaggagaatatattgatgtccagcttctggccagaaaattagaacaccgtggtgcgagagagaagaaagccttaggaactgagggctgcttaggcatgggggtcacagtcaaggtgatgggggagggtgtgatgggccatgggcatgccaggttcccaccaggaactcagtacttgaatattaactcaacagcaatatcttgagaagctttacacaatagtacaaagataaaagttaaaataaccggccgggtacagtggctcacacccgtaatcctaacactttgggaggccgaggcaggcggatcacctgaggtcaggagtttgagaccagcctagccaacatggtggaacctcgtctcgactaaaaatacaaaaattagccgagcgtcgtgacacatgcccgtaatcccagctatttgggaggctgagacaggagaattgcttgaacccaggaggcggaggttgcagtgagcagagattgcgccactgcactccagcctgggcgacagagcgagactccatctcaaaaaaaaaaaaaaaaagttaaaataacctaacctaagaacccgctgtgaccttgggtcatgaccctgcagtctttttttggcagctgtgctcacaaatgtgtacgtgcagacatgtcttttgtttttcttttacaaaattggtacccctacaacacctactattttgaaacttggttttttgcttgatattgtatcacatgtatgttcctgttttggtttatataggttttatatagtttttggttgtgtaattttccactttatatatgtaccaacatttatcaattcatttattgattcattagtcaaattgtactgggcatctactatattccaggccctgtgctcagtgctgaggattcaatagttgaacaggaagtatttgccctcctggagctgatgttctagttggagatagaaaataaaaactaataaatacgtgataag

SEQ ID NO: 68707 - DNA, 1027 bp, Homo sapiens
acacctctaaaggcaggcacagagcgctttcctgggtagtcgggtggcctgttggtagttgcaggcttctggtttcccatcttaatggcgatggcagggcaacctgtattggtggtgcttttgcacaagcagttctttctgccgggaacgcccttccccagcctttgccttaatgaataccactctctcttcaaatctctgctcaacaggggcgcctttttgaccagcttagtcgttagactccctaatacagttcatagttttcacatttttgtagaatctattcaagttctaactccccgccatgctcgccggcgctcaagcctagtaccatggcaagcaaagatgcggagttaataaaacagaattatacggtttatcattctcaacactaaacctgcgcacccttttccgttaagtagttcctaatagtccagcacagccttccgcccggccccgccctcgcctggctccactctgctcctgcgctttgggaatcgaagctggggcgttctccaacccccccgcgctggaagccttcactattctcctccctgtgggtggagcgaagtttgggcacttgggtcctaccgttgttattagtctttactcgtaattgatactaaagaacaaaattaaatgggtttatttttggtgaaaagttaattctccttatgtttggatttgcccctcatgcaccaaatggtacagccccacatcagtcaggctgcctacccctgacgcctgcgacggagaggcgccttccgtgctgtcgtcatcacgtcggccggagctagcgctgcgtcctgggccacgcctcccggcgcaccgacgcgcctctccggttactaagcggccttggatacctggccgcgggatgctgggcggcgtcaggtgagcggtggtcgctgggcctcaggtaaagggcgccaacagtggtgggccggctggggcgttggtgcggcctgggagctggcgagggactcgccgcactcttcgaggccgctgggccggtcatagaacatcc

SEQ ID NO: 68708 - DNA, 790 bp, Homo sapiens
gaggcgggtggatcatgaggtcaggagatcgagaccatcctggccaacaaggtgaaaccccgtctctactaaaaatacaaaaaattagccgggcacggtggcgggcgcctgtagtcccagctactcgggaggctgaggcaggagaatggcgtgaacccgggaagcggagcttgcagtgagccgagattgcgccactgcagtccgcagtccggcctgggtgacagagcgagactccgtctcaaaaaaaaaaaaaaaaaaaaaaaaaaaaaagagaaaccagagtttctgcccagctgtcagccttgacaaattgtggactttggtcagtgagcagacacaggtgaatgctgctaaaaacaagcctggggctgctcccctcattgatgtggtgcaatcgggctactacaaagttctgggaaaggaaaagctcccaaagcagcctgtcattgtgaaggccaaattcttcagcagaagagctgagaagattaagggtgtcaaggggacctgtgtcctggtggcttgaggccacatggagggaggttcattaaatgctaactacttaaaaaaaacaaataggccaggtgcagtggctcacgcctgtaatcccagcactttgggaggccgaggtgggtggatcacctggttgggagttcaagaccaacctgaccaacatggtgaaaccccgtctctactaaaaatacaaaaagccaggtgtgatggcgcatgcctgtaatcccagctactcgggaggctgaggcaggagaatcgcttggacccgggaggtggaggt

SEQ ID NO: 68709 - DNA, 1665 bp, Homo sapiens
ggcctcgatctcctgacctcgagatccgcccgcctcggcctcccaaagtgctgggattacaggcgtgagccacacgcccggcgcaggggtgtttttaaattcaaacaagtgttccaacttcactcttaaaaataaaaaagcaacgacaaccaaaaacaaaaccaaaagaagaaaacatatataccagtcctagcaggtaacagtgtaaaaataactggagatcgcgccactgcactccagcctgggcaacagagcgagactccgtctcaaaaacaaaaacaaaaacaaacccctctgatccccgagttttctgggagactgatttgagtaataatacaactctggtctcccgcacagcccgctccgcgcgtgaattaccctttctctattgcaattgccgtcttgataaatcggctgtgtccaggcagagggcaaggtgaaaccccttcggcaaccttacagggctgcccttccgcagctcacagcctaattgctgagagaaattaacctaataatagttgcaaacggaacaccgggcatgcagtgtgaggggctggtccagagcctctgacccacactgggaagtcatggaccgttcaggggtcgggggcgacacaatgtccgaggtctgcgacgtccctcccttgctccctctcatccctgcgactttctttcacccgtcctccacacgaacgagaccacgccaccgagaagaagcctctggggcgcggggctggttagagccccagagccgtcgcagcccggctccaggtgtacctgcgcacaggcgccccacggtgacgtcagggacgcgactcccgcgatgccccgcgggccgcctgatcccaggcgcgggctcagactgggatctcggagttcccctgcgccctcctgacggtgcagtctggcggcccgtggcgcgggcgctgccatggagcatcctggagcctttggcctcggtttacatgggaggcccctcgaaacagggcacgtcacttgccccgggtcacctgcgggcggcgagactctcgggttgactccaaggcctgacattcccctccggttttcacggaggagggtgaggatgttgccaggagctgccgtaaggctggaggagcttgcggttgggtccacccgcctctgggcaggccttagcgttcacccgcggtttctccctgactttgaacccaaactccctaccccgcaagtccttccctgtttgattgctgaactccaagtgacagaagaactgaactgcaagtgacagaagaactaagtgttggcgaaagctgatgctccagagggtgcagagtagaggtcaggggtgggggcctcgccatggggtatgtataatgtagcccagggtcctggcaccgagtctcttcaggaatgcaagggatttggattagatggtgtcttagagatctaaattatccccctttgcaattgcatacctaaagaaaccgctagggctggcatgagcctggaaaaacacaggcagggttaatggccctgtcctttagtcagtggccccacacttcttccagtgactcagaaggggcccctggagtcatgcaaatggaacatatccatcatgcgccaaaacgtgcttgtgtctccttgtaatcccttcctctccacaaccattgtcactttagattggtt

SEQ ID NO: 68710 - DNA, 989 bp, Homo sapiens
caatttgcaacgagttccctttagtacatggaaagtatcctccggaacttgtttgcaggaaacaacgcaatgcatgaaagcccactttgagatgttaattacctatttggttcatttattcaaaatttttttttatttactctgagtcacactgtgctaggcactgggaacagttggaatactcaccacacccattcatttataaattttaagacaatgtgaaaatgcttagatttaaaatggaaaaccataaatgacaaggtttctctgccaagtctactcaactgcctttcaccaaggtcagagaactccagggtgtgggtttcctcctaaatttactgaggctgccatgggccaggcagcacgctggtctctggggttagagtactgactatcctcatgcgtttattaatttaaaatgaggcccaaacacagggtcacacagtgtccaaaatgaaataacctttggaccgacacagcttgtttcaaaacagctgagatccgttgcctttttggcatttgatttttggtgctgggccaaaaaaaaaaaaaaaaaaaaaaaaaaaaaaacccaaaaaaacggggaggtgtatctaggaggggatcataaatgcagctatttaatctgctgtcactttgtaagagccccattgaatttttgatgggaaaaatgtttttgcccgggttgagcttcaggacaaagaagaaatgcaaggaacagagagcagaattgatagtgtttaaaaatatgttaaaagatcttatactttgtaacaaagttggtaagctacaatggaagaattcctgacacagcagaggcctggccaaacccctcccctgggggccccgggaataaaagcttcctcctccaagctgtcagttgaaagaaatcgtcctgcctgatggccatgtgccactctctcgatgcttgggaacaaaattgtgatgttgcagactatacattgtttttccagaataacacagaaatg

SEQ ID NO: 68711 - DNA, 1389 bp, Homo sapiens
aacggtgggccatccatcagccctggccttggtttccccagtgggatttgcagaagccagaggattaaagccctcccagccctgaggcctcattatttatcttagtgggtccacagtgaagatgaattagaataactcattggcacatgccatgccttggagtgcagttttctgttttctgggagagaaaaggcctcttaggacagagccccccactgccctcctgggtctccaggagacagcccagatctgggtcagaagggttcaatagtcaagaacagaggggtggctctctgcctgggaaggcaactggggtgaaagcggggagctggcctttctctgcatactgctaggtagcatgcaaaaccctgcctgttccattcctgttctccaggggaggaatctgaggacgagaggggtaagatccctgcccactgccatgcagcagcttagtgcagagcctggacttgaacctagatctgcctgcttccagagctgtgctgcaccagtgttctcgcagctcccagtccaaaggccgacgttgagacagcgcttaaaaatatatcagcagtgtttacaaataccatttcctgtgttatctggtactgacagaaggaagtgaacctggcactttgtctgtgttaggtttggggttagaggcataagtgccaagttcagatgacctagaaaaacctttctaggtcaaattacaatttcaaagatttcttttcttcttctttttgaaccgctccaagatcgaacgctgtcgttgacatatttcccttccgacaacacgagccttttgtggcatgattgagggcttgttttgtagtgctggggagaaaatatcttccacatcatctgctcattgtctcagtcacactcgttccccccacaccacagtgcaacccgacgtacgctcatgcggcttttagttaattgcctttggtaagaatcagttttgggacttgttcccaactgcttggatgatagataattgtcaaatacaaatattggcagcgcagggcaacctgaggctctagactgctgactgcatcccagcctctagggagagctgggagctggccagctccatgttatgggaggtaacggggcaagacctggcaggagtacagccttctcattagagtgtaggctctggagttgaacttcctgggtttgaatcttcattccaccccttcctagctgtgtggccttgggcaagctacataacctccctcgacctcagtctccttttctgtaaaatgggagcctcagtaacttaccttgtgaggttgtcgtgaggattataggaacggatgtttgtcattcaattaagagtgcctggcttgttgttagtgtgatgtaaacattgcatgcattcgttct

SEQ ID NO: 68712 - DNA, 674 bp, Homo sapiens
cacagttagagcgaggtaggtgggagggggcaatgattcccacctcccagaggagcccaggtacctggcagccctcacctgtggtgctatagtgaccactgccatttttacactacccctcgatgccttttattgactgaaataggtggcaccatccaagccaactcttgttgggggtggggacaagggtcctgaaggggcccacagcactgagcttgcttacaagggacattcccagctcctgcggcaggcagtgcccaaggcgttgtccttgcttctgatagttaaggtcccaggcctatagtcatgaggtcaccttctctggttcacgtggcttggaggcagtgggggtgggaagccaggatgtactcttaggagtcagcagcctggacttcagactcagctcaggcaggtcttggctgtgtggccttaggcagatcccctaaactttccgggcctctgtgatggggaggatttatcaccaggcagaatacgaatgtgcgttgtgcccagcaaagcaggcacaccaatcaggagaaaaacatttttgaagaattgttaatatctgatattttaggaacaaagcatgaaaatcatcgttgttgggaaaaatcggccctggcagttggactttcttataaagactttaatttgcaaattttatttcaaattac

SEQ ID NO: 68713 - DNA, 1292 bp, Homo sapiens
cgccgctgccccgcccccttctccaatcctgccctccttctgggacggaaaggtcagtgttgccctaacaaggccattggatctcagaagctgctcccaaaataacccccagccagcccagccttcttcaaagcgggaaggaggggtatttcaaatcgcgcccgtgccgcagacccgggcagtggctggaggcatgaggaaggaggctgagaactgagtgcaggcagcccagggaacctggtgtcttttcctcccgggaatgagagctcccttccattctcagagtcccctgggtctgcgcgcagggagggcaccggggaatcggggaagggaggggagagggagaccagcagaacacccagtcctggaacactgaaaatcccccagagcgaggaggttggcagatctcagccccatcaccactcacatgccctaaggggacctggggttacagcaccactgccagccccatcaaggaatccagtgacctaaagagaaaggaatggagacagtttcacatgtgcttccgaaagcagaggagggaagtcagaaagagaggggaggctgtggaaacagggtctggaagatacacagaatctcagtccagtgctcactcaccaccctgagctccctccacccctggaagccggggagaacttggtgcaagaagcaaccatctattccctttctctttctcctgaagggcaaagagaagggagaggagcctgccctcctctctgcctgagacacagactgggcgtcccgctagcttcctctccccaccccttgatgcctcggcgccctccctgccccctgccgcagacccagcagaccctgaaggtcaaaggagtccccttcctgtcaacacagggttgtgttgtaatgaggtcctctcagaaattctcaagggtcatgattttttaaaatttccctttctgagctgtcttttgctctagtgtcctaggagcctgtgaggccagacttcagaaagctcttggggcagggccaggagagaagggcctgggtggattcccagccactcaggttcccaccaaactccagtaaaaagaacaaataaatctccatggcaagaagctgtggccagagctaatgattgtaaatcccagctaagcccaaggttaatgggagtatagaggaattctgggaaaggtaagagccaccaagactaggaagatctgtgtgtgtgtgtgtctgtgcgtgtgtgtgaacgtgtgtctgtgagagtgtgagagagtgtgtgtgagtgtatgtgagtgtgtgtggtaagagtg

SEQ ID NO: 68714 - DNA, 1068 bp, Homo sapiens
tttttacttctgtttttatcctgttttgtttttgtaaatttttctataataagcatgtattatgttacaatcagataaataggatattgttttgtaataaatatatagagatttgtcctaataagacaaataccactaaggaaaacctgttgaacaggatcatgctaaattcctggcaaggcctggttagtttatgagtcaatcctcagatatcccatttgtaaactggcaacaatataaaacaactagaatgtatgatacactactacacaagtcttattctgcttagtcatgctaatgactcaccccttctcttatttcattttctcaaatattctccttcccttcttataattttactcaaggcagaatatatgctacaaatataattttactcaaggcagaatacatgctacaaatatataattttttttcatttcagcttttactttagatacaggtggtacatacacaggattgttcatgggtatactggacccaggtagtgaacacagtaccctataggtaggttttccacccacattccgctcctgccctccccacgccagtagtcagcggtgtctattgttcccatgtccacgtgtgttcaatgtttagcccccacttctaagtgagaacatgcagcatgtggttttacaaatacataatttttgaccatatattttgaaaaatttttaaataatgttccaagtaatttttagggataccaaaatggcttaattttactttttttttttttgagacagggtctcgctctgttgcgcaggccggagtgcagtggcatgatctcagctcactccaacgtccagctcccgggctcaagtgatcctcctacctcagcctacagagcagctgggactacaggcacgcaccaccatgcctagctaattctttgtttttttgcagacgggtttcaccatgttgccgaggctggtctcaaactcctgagctcaagtgatgtgctcaccttggcctcccaaagtgctggaattacaagcatgagccatcatgcccggcctggctttattttacatttcaacttcttaa

SEQ ID NO: 68715 - DNA, 3091 bp, Homo sapiens
ctagggatagaagcccaaactccatttccgtaaggactagaatctcattcctgccctccaagagcttacaatgtaacactgtgctaagaggctctgaacctacatatgtaacttttaattataccatgctgacttaatagcatggcaggtgatcaccctagatgttaatacaaactttacattcctgttgacacactaaaagatctatcatctaaaaaccaaaacaggccagaattaaaatctggctacagactaaaacttcaggaatgaagttctgtctaaaccattttcagacttccagcatttttttactactcactttttttctcagttattttagccaagagcaaatgagcgttaggcataaccttaagagctagagaagagcatgtttgtaattataaaaggctcattatgctcctctgcatccccagatccccattcaaagaaagggctgtacaactaactccggacaacagatataattggcttgcctttcttcattaatattaaatttgtgggagacagtcttggcgttttcactgcagtgaactcgtgaagttgaacaatctccaaagagatgaaactttaaaaagcctattcgaagttaaagtcaaatcacaccaggcaatttaactttgcctcggattttccacaaccttacaaaaattacaaagttcttctaagttcctccatcaaaaggccaaattcctggttttttctttcaacaaaatggatgcgtcacaatcttatttacatcttgccgttttaaccaagacctccttgaatcccaagcctaggtctacacttccaggcccctgagaagacctaagaacgatcaagaagggatgcgcgggtaagcgttgtcatcacaacattaaagatttcgaaactcccagaccaccagaaagcgtagagtatggggaagaaaaccaaacccagcaactctaagaggcaaactagaccgggaggaaacaatcggcccccaggacaaaaagcacattcacacctctccgtgcaacccactcatccctttatactcgcagcgctgcagccaaagcacaaagttctttcttttcacccagagtctgtgcctgtcgcggttaaacatgaacggaggaaaattcctagtcagaacccagaggggtaggacggggcttggagtgtggggacaacgccaagcagggagctgtccaggggcactgcccgcccggggtctccagctgtgaagttgcgctcctcgggagattcctggggtcagaacgagaggctggagtcggagcgaggcacaagggatgcgggagaagaaaggagtggggccgaagaggtagccaaagagaatggggctccgaggcgagagagaaaggactggaaggggcaaagggcggccaaggagggcgaaaaggggaagctgccgctgggcgggagacggcggaggagcgagacggggcgggggaccgcgggaggacgggaaggcgggaaggggagagagcgtggagctcggagctccagcaggcacaggccgcggcagataagggggcgcggagaggcccaggcccggcccaggcaggaggcgtcgggagacgacgcgacccaaggcgggcgggcccggggaaaaccgcccgcggccagaccggcagtggaagctgagacgcagtgctgcggcccctccccgtcacgtcagggcacttacctcctcgcagctgggacgctccggtgatgcggggcagtcagttcagagcgtctctcccaaatctcggcacccgactgacccggatccaaaccagccaagggggcggcccgcgcctcgggagtcgcgttgcgcctgcgcactccggcatgcacccctccccctgcttatgctcctcccaccccagtgactcggcagcgcggcagccgacgactgcgcagacgcagggcggcggccgcgcctctccaacgccccgcacccgcccccctcagaagcacgtgcgccttacgtaatttcctgttattcttcggtttgcctcctcccagtggcgtggatttgctcccgacccgcttttggggcgtgcctgcttcctcctctctgttaggtgagtgagtaggcgtcattcttcacagtagtcctctgcctccaccgccccgggatctccttgcgctcggtcctctacgtggagtcacctatgcagaggaattccacggggcgggggcgaggacagggtgcgggggtctttatggcagacaatccccggctgagcgcttggccagagtttctgtgatgctagaatctggactgcctgcgacctctccgggactcggacaccagccctcgcctcctggtgatcttttaggtcctgcagagaagtgaagaggtattggacgtggccagggtcaatagtgtgaagccagaattagaattgaattgaaatgccttcggttttgatatctctgctgtttgtcttgaggcaactgcttttcctcctttgggcctctcagttttccatctagtaagtgaggaagttgaaccttatcggtgaatctcgtgttttcaggcgtagactcctttgagaatctggtgagaactgtagatcctcttgccaaagaaatgcacctacacaccaaattttgcaaaaagatttaggcagttcaccaaaggagatgaattttaggattctttacatttttctgattctgaatgttgctcagatggtaggcgggaaaaggtgatctgtgcaacagctgccacccgctccatcaccaggactggttctgctgatctagctgtgcctctcctcgcctgccaatctccagctccacgtctgcactgctcaaagcttcgtgagaacagatgattttgcgcaattgagttggatggcgttgattgtggcccacccctagagtgagggtttttccctgaaccaaaactggccccatccaccgtcattccccaataccttagttgtagtcaactagataggctgccgaagatggtttaactgtgtccagcttaactacagccaggctttggaatgcctggcctatgtctgtaaatgaaatctaacaatttattgtataacgttgttaaacatgaagcatgatgttggccctg

SEQ ID NO: 68716 - DNA, 1437 bp, Homo sapiens
gtcccacctcaatgctgttgcattggggattaagtttccaagacatgaactttggaaaatatattcaaaccacagcactgagtgctctttatgttacagcagggagtatctatgatctccactcacagtcctttaaggctaacttccttccaatctcagttgcttttaaaaatgacaggaaagtgaggcttcttgaaaatggatgtccgcataaaaatcatggtaacatatctatgagcctttgtgtgtgctgtccccactgccttggattcccttctctgcctaactgcttgaactcctcctcatccatcaaaacccaaagaattgctgccttctttgaaaatattccctgactctccagggcctctggttgttccctgctttatgttcttggccctgaccttgccccagcactcagaaccctttatggcaggattggttcttctccatgagagtgaaaactcttccaaggcagagatggaccaaattcatctttgcaacaccagcacacagcttaagctacaaaaggatggactttgaaccacaatctccacgcggaggggagtttatcattccaccccagctcccagctcacagtgtgagcccaagaagggtttgttgctgccaaaggaatctgaacagggaagttctgcaacaggaggggattctgatcctggagccacggagctttcaacagacacttcctggacgtgccaagcaggtcaggctgacaaacgagtgggcactaaaaggcacaagaagctctcacatgtgtacaggcctccaggactacaaagcacttgcaaaggtgacctcatctgagtaaactttgaaagtgctcttcagtgttgcttctgtgaggcctacttcactttttaccaagagaactgctcccaagtctggctgatcctgacctcaggactgtaagacatgaaggtggcacacagggaaggagtaagtcaagctaataaatacatgtctgaacatgcatttatattacaagacatacggggaaaaacaggagcaactctagccataaaataacccgtatatgacaagttaaattgagaaagaattacctactttcacgaagtgcgctgaggtttattgggctctgcgcttccttaagagtattagaaaagaacacacaaaatgctgaaatatgggatttcattatctcagtttactttaatttgcttgtttacacacacgatctgtgtgtacataacagtggcaagagccattctctaaatacaatctggtacccagactatgacagatgcacgtggaaaatgaggcgtcagtgaattaatctcaacatagaaaggcaaaataagcatggcagtattctatgatcacagatgcccccagagcctgggggtaaccgacacttttcaacataatacaggacaattttaacaaaagacccagactcca

SEQ ID NO: 68717 - DNA, 1509 bp, Homo sapiens
tcaggacacgccagagacacttattctggaaaacacttaggctcacatcaagggagcagttttatctttcagagtttccctttatgaccgcaacagagtttttgtgcaataaacttactaaccgggagttttgaaaaaagcaagtaagcaagcaaaggagtggatgggtggagttaaggagatgtctcaaagcgcccagctgggattgcttttctgggccactgccatgcattctgagtggctgagatgatccaaggagatccaggggaaagggcacagactagggggttccagccctctgtgagtatctcacaggcgggggctctgcctgtcacaggctggggcgaggctcttccacaggtcgtaaagggattctgtcacgcgctggagggatctgatctgacgcagggtggggtctgcgcggggtctgccacaggcaggcaggacagaggtgagatggcatctcccaaacagggcaggggtcagctcctaactccaaggggaggcgggggagtggtgacaggggctggttcatccccaccccattccacacccctacatatacagagacacacacgaccccgcttgtcaccacctgcccagtcaagctcatgctgcccaaagtgggtctgcaaacactaactgctagtgacaccagctaccccggggcctcccaggcgtgacacgcgtgcagatgctgctgtcacggctaggaggaggacctcccctccaatgactcgtccaccacggcagctagcaccggcttctctgggcgaggcgacagcgggccggctcgggcggggacagcggaggaccggggtgcactcacacgttgaggacgttgcgcttgttgctgaggtagctctcgggcaacggggacaactccttgaggagggagcccgccagcatggaggccaccagggcccagggcaggtagcgccgcacggccgcccgcaccagcgttccccgcaacaaccactcgcagcgctccagatgctccatgccggatctcgtcagccaccgtcctcctctccgtgccctctcggccaccgtatcgcccttcgcccggacctgcgcctccacctcccttcgagcgcatgcgcactgcccgcgagtcccacagcttgaggcgtgcttgggctccggagcccgcgcgctccccctcgtggccgctgctgcctctggcgcgtgacggtccccgaactcgctcgtctcctctgcgctctcctggccgcctcctctccccgagcctccgcgtcttgctctggtctgggaaaaagcgcttgtgaaagtatttgctggaggctggaagaggataaatgtagccctggagaattggagcagtagtcacagcatcatttgatctttcttggagcctcggagacacctctgccatctgagtcttagttttctcatctgtaaaatgcgagagacaagaggagatcaacctttcccaaaagctagtttatgagctcaggggttcattacgttggcacacgtagagggaca

SEQ ID NO: 68718 - DNA, 1825 bp, Homo sapiens
caggatgactttgtcccattggcctggaggcagccccatgtttctccacccctcatatcactcaccagtttgtaatagtatctttgaatgacgatctgattaaggtccgtctcctccattagtccacaagtttcgggggtacatctactttgctcatttccatatccccagagtctagcacaaggcctggtacatagtaggtgctcaataaatatgttagatgaaaggaagataacacctctatgtactagcagtgagactccaggcatgcaatttctctctgtccttcagtcccttcatctcaaggtttaatttaaatatggtaacgcctgtatgcaactcccagcatccagtaggcactcactaaacacagttctccaccctccttttttcctctgcccctccctcggttttcccactacttcctgcatggtgacacacccatagtttggagccataaaacccaacccaggttggactctcacctctccagccccttctgctccggccctgtcctcaaattggggggctgatgtccccatacacctggctctgggttcccctaaccccagagtgcaggactaggacccgagtggacctcaggtctggccaggtcgccattgccatggagacagcaacagtccccagccgcgggttccctaagtgactggttactctttaacgtatccacccaccttgggtgattagaagaatcaataagataaccgggcggtggcagctggccgcactcaccgccttcctggtggacgggctcctggtggctgtgctgctgctgtgagcgggcccctgctcctccatgcccccagctctccggctgggtgggcttggccatggtcagcgtgaacgcgcccctcggggctccagtggagagttcttacggtaagtggggctgggggaagactggacagggcgggactgcggtcagctttgggaggccatgggacacctccccgtgtgtttcttacgggcccaaagctcctcctggagctcctctggaagggcaggaagccccacggaggcaatgtgaccgcttccctaagctctcaagccggggcatggcctgcttggtgcgagaagtgctgggaggggccgagaagccctggggcagaggcttggctcattttgtctgtccagaggccttcctgggaatgcatctcaggggtctttccaaaaccccacagagggtggggcttggaagcaccgtcctgtttcgatgcggggcaaattgaggtccaccaggagaggcttgctgggcctaggtcacgttgctggtgcattatcaagctgggcgtgggaccgggcagctcggtcgctccgcacctccgttggctctggataatggggaggaggtagaaagcgccgcgcagggtggagcgttggaaaatgagaatatcttgtgcggacgtgtgaaactcagatgcagggctagaaagcatgtgttactgagagtgaaaggctcaggctcactccttagggtgacccccacattggaagcaacccaatgtccctcagcagagggaagacgggtaaataaagcgtgagacgtctttacagtggaatgctatcccattgttcaaggaaacaacgcacatctgtgtgtgacagggaagaacctctcagttaaattaagtgaaaacggtacactgaagaactgtgtagttgctgatagcgaaacggatatagatgtatatatgtacacacgcgtatacgtgtacattccacgcatagaaaattcgtggaatgacacaataaaattggtgacaggtttgtttctgaggagggaaattcaagagaatgttttatc

SEQ ID NO: 68719 - DNA, 2902 bp, Homo sapiens
aaaaaactgggccggccacagtggctcaaaatgctgtaatcctggcattttgggaggatgagtggggggatcgtttgaacccaggaggtcgaggctgtagtgaacaaacatcatgccactgcactccagcttggatgatagactgagaccctgcctcaaaaaaagagaaaggaaaataaataaataaatgaaaatttaaaaggaaaagaaaatatttaaacgctatttcaaacaatctcaaatgtacctggaaacagttgggacaggaagtcatgaagggaatggggcagagttagagaaggtcagagtacagccatgtttcacatcccagctgaaactcctccaacagctttgtatcgcccttcaaatacaacctgagctctttttctttctttctttcttttgtttttctgagttggagtctcactctgtcatccaggctagagtgcagtggcatgatcttggctcactgcaacctccgcctcccaagaagctgggattacaggcgcgtgtcaccatgcccagcaatttttgtatttttaatagagtcagggttttaccatgttgccaggctggtctcaaactcctgacctcaagcgatttgtccaccttggcctcccgtgagccgccgcgcccggccctgggctcttttctttgaccaaaaggctctcacaggctctgactcttgtctgatggtctctcgtctttctccctttggtcactgcagtcagccacactggacttttgttttttttgtttgtttgtttgttttgcgacggagtctcactctttcacccaggctggagtgcggtggcgcgatctcggctcactgcaagctccgcctcccgggttcacgccattctcccgcctcagcccccccaagtagctgggactacaggcgcccgccactgcgcccggctaattttttgtatttttagtagagacggggtttcaccgtgttagccaggatggtctcgatctcctgaccttgtgacctgcccgcctcggcctcccgaagtgctgggattacaggcgtgagccacaacgcccagccacactggccttttgacaatccttcaatcacgccaagcacactcctgccattgggcctttgtacttgctgttctctctgccaggaatgcctcttccccagatctttgcatagctgatttcttctcattgtcagggccttagttcaaatgtcctccactcagagcagcctcccttgaacacccaaatctaagcctgccccacctccatcccttgatagcaattccattatcctctacagcgctgaaattacgtattccttgatctgtttatcatctgtctccttcacagaagttccatgacagcagggagttaggctgtcttgtcccctgctgtatccccagcatgtagaacagtgcttgacacacagtaggcgccccataagtatttgcggaatgagcaaatacagatggggacagctgagtcagtagggtgagcagctggatgggccagtagtggagggaggaaacggcagcctctgcctgggccttgccctgggtaaacagacctctctctccccagacagccactgtttgacgactgtctgccatgggcctggctgagcctgggccgccaaactgccaacgcctctgtattctctgggacaagcagtggaggcagccatacctccagcagagtttgtgaaggagcaggtcagaaagttgtcaaaacaggcatgacgaagggcagaggaggtggggagacagggagagagcaggcggccctgccctgggcagagccagagaaactggagggaggcctgggtgctcccctgggcagcttcccaggcaaacccagctgcctgcagggctcagcgctgggagcaggttgtggtcccagctctagccctgacacacacaggatctcaggtacttgacatttgtaggccttagcttccttacttgtaagttagaggctatgggcagattagtggctttcaaacaattttttttgttgttgctttttgtttttgagacggagtctcaatcttgtcgccgaggctggaatgcaatggttcgatctgggctcactgcaatctccgcctcccaggttcaagtaattctcctgcctcagcctctggagtagctgggattacaggcgcgtgccactactgcccagctaatttttgtatttttagtagagacggggtttcgccatgttggccaggctggtcttgaacacagcaagattctgtctctacaaaaaatacaaaaattagaggctgggcccggtggctcacacctgtaatcccagcactttgggaggtggaggtgggcagatcacttgaggtcaggaattcgagatcagcttggccaacagtgggaaatcccatctctactaaaaatgcaaaaattagccaggcatgctggagcacgcctgtaatcccagctacttaggaggctggggcaggagaatctcttgaacccaggaggtggagattgccgtgagccaagatcgccactgcactccagcctgggcgacagagcaagaccctgtcaaaaaaataaattaaagaaaatcccaactttcacctcctttaaaaaaagtgaaggtctagcaacactgatacctatgagacaacagtctcctggagccactttagattctcatgcttcctctaatttgccgtagtccccactattccttagtgtccccatacggaaacttattaatgaacataaatcaccatgtttgctgtattgtttttcttagaggaacgtgtgaactttgctcacaccctatctgttccatttatttcagttacttctctgggtattgagggcacttgagtgtgggacccctgatcactgagaccaaagcagagttcatttatttgcacgagcaatcttct

SEQ ID NO: 68720 - DNA, 1058 bp, Homo sapiens
tcctcaaagaccccccccacccccgtacattggaacaaggtgctgggaacagaagtttagtaggtggtggaagggcagcggctgctaccctgggaactggttttaaaatcttacgttctgattgctgccgtggccatgtgctggtgtgtgatggggagatgttcttttaggtaactaaatccaacgagctgtgattggtgatcgaaccgagcaggcctcctctggatttggagagacatagtgcgtctgggcctgtgattggcgggattgctgtgattggtgaagtccctaaggctatctaagtttctgaacaccagttcctgcgttggccacgaggaggagcccaggaagcgcaaagcgcagcactgcggagagtcttggccgcctcctccgggacgccctccggcccagcgcggtgcctgccctgccctgcgccctggggcaaccgcgggatgaggtggggcggcaaagggtgtcagggctcccagctgcggcccgggtggccacgcttctctgcacagttcctttggcctcttcccctggctcccagccccacagaagacattggctgacccgaggggtggggctgcgggttcgcgaaggtttgtgaaggcccagatccaagttgcaaaactgtggagtctatcaagtgagacttagcagccccactccctcaggtgcgccccttgccctcctcagagtccttctctcaagtttagcagcctccaccgtgccctttaagatcctcaaagaacttttgcaaagtggcatctcattggagctaaaatgacctgtgcaggcaaaggccactagctcaggggatcgtcctgcccatccccaggtgctatcacatcgcgctgtgcgtcttcactgcacttaaccactgtttgtaattgacttcgtttttcatgtatttacttgcttatgtctgcaacccgcctctccaccaaaacgcaagctctgtgagggagggtgtagggttgcccgacacaacacaggacacccagtttcatatgagtgtcagatgaacaccacagtttaaaagtataagcaggtcc

SEQ ID NO: 68721 - DNA, 1054 bp, Homo sapiens
ggttcaagtaaacctcccatctcagcctcccaaagtgctaggattataggtgtaagccaccatgttcggccaacatctgtatattttaaaggtttcagatgattctatttcatcttcagagatgagtctctgctttgttagacaaaacttctccaatgggaaaccaaggccagggagggaaatgaccttgcccaaggacacacagtggctggaaccagagctggggcaggacacccagcagcttacatgaagccctagggcaaataagaaaaaggcaccccactctgggcaggcagagctccatgggcacttcgcttggcaagtggaacaagggctgggtttccatccctacctgccctcttggctggagaacctttgtgcagtgagcaacctgcacaactgtacagggcagtaactctgatctgagcctcaggacttccaaacacttcaccttagtgacctggcaaatccctggggcccctcagaacaagagtatggggagaccaagggtggcttctgggatgtgggctcagccctcactccccaaaccagagtctgggtcaggcaggggctcccatcagccttcaggccccacaagggccgggaaggccgcatctaattcccaaggtcacccctgcagataaattcaggaacataaacaggagggatgaacataaacaggaggacagcaacaccctcagcccagatgtcataagccacctggcaggaggcagcctgcggagaagctccacccacacagatccaagtcctcctggcttccttcctgatcattctccagaccatactctctgccctacctccggagccttacagtcagcatctcccacagtgccctgctctctgcccttctcctggccatctctcactggcatccctggaagggaagggtagccctggagttagaggcacagactctagagacagactgcccaagttccaattccacttcttgtttctcatcagctgtgtgagcatgggtatatggctcaacctccctgtgcctctggtgtgtaaaaaattggtgaaaacattg

SEQ ID NO: 68722 - DNA, 1707 bp, Homo sapiens
gtttgcagagccgtcttgttcaccaatgtctttcaagacattgcccgggtccacagagagcccaccattcattcccatgctggctggagcccctgaatacccgaggtgaccttctgtccttggacaagtcacttccccctctgatctccatctccccatctgtgcaatgaggggatggggctgaatcagtggttttccaaccctcaaataaaatattaagactacatgtaaaagggagtcgctggttgaagctgggcctgtggatgcatacccttggctcctgggagcctcggaacccagcttgaaaaaccccagcccacatcctcctaaagattctcctggctctgacactgcagagttctagaaccccaagctcaaagctgccgcttcccatccctgtttggaaagctctcccccagctgcctttatctctctttggtaacagagcaaatttgctcaggacccagcacagggggaacaagcagactgttgactcttgagcaaagcctcttctttggagagcagccgaggtggccgtgggctatgcgttgggaggccagcggcctcttgcataaccctggaggcctcctgcccacccaggccttttcagggttaggggtgaggaaaaccgcaaactcatgcccagttaattttttaaggcaaaatcaacaggctcagcaatgattagcagctgggtaagttggtcttaatcaggctaaggacagggagggaggaaggaggcccagggatggggcccagttatcagttaaccacatgaatgttgcttccttccaaacccactggccttcagccccaagctccctcatcttcctctcggaaatactcctgtgacaagccagtggccacccatcatcgggtgaacaagccagtggccacccatcatcgggtgaacaaacacaatgccactcatggtctgtgatgaagtagaaagtgctcgttgttaagacaaagctcacccaccaccgctgcgtggacttgagcaagtccctttcaccctctgaggctccgtgaggggccccaggtctgggccccaagtctatggttcagtctgtggccagctgccactcccctgacggcctcagtgtttccgtccactaaatgggtgggttagccaaggcatcttttccagtcttgaagctttgtgggtgcctgatttgattaagccacagtggcctttgccgagtgcagagggtggtatgagtggcattttaggagctcaaggaagagaaagggaggggacctacctggtatctgccgttggtatcagcaagtgtcagatcccagctccaggaagagggctgtcctctcagatgggaggcaggggtccagtggggtggctgtggctgcagggacagcctagcagagcctcttggtggcccagaccccctgtccctggaccttggaagccgctaaaggaagcagcaagaccaggccagctggtggctgcctggactggagtttggtcagtggttggggacctatattgtgagatagttaggactttgtccacaaactggaatttgaaatttcaaaggggcaaaactgaagggccctaccccagagtagagatggctcttggcttctttcctccacgacttttgttctttgtcttgataagtcccagttttctctgcacctctcccggagtggtgggtggggaagaaaagataggagataatggtgtgg

SEQ ID NO: 68723 - DNA, 3527 bp, Homo sapiens
caggaaccaggactttctaagggttgggttgcctgtgactgcactggcgatacccccacaaagcccactctgaaggtaggagacgggtggagagaaacagggggatggcaagggggatacgaaacagggagagggaggagggggaagaggatggacgtctaccaggccccacttggtgcttgatttatgccatctcatttccttctcaaaccaccctttgaagttgattgtacattttacagaaaaggaaactgaggctcggagaggagaatcatttacccaaggtcccagttagtagacggtaggtgcctgaatgtaaatccaggtctctgcctgctccgggagggggtgggggtgagggaaacaggagaatgtgatgggaaaatccgagatggagccagcctgggccagaaacactgggagctgtgggagacggagaggggcagggtgggatcacagggagcaggagcggggaattggaggtgaatctggccctcccaaacttccagtccattctgctcccaggggaaccgggaaactgcgggggaactggaagggagctcccagaacaaggatccagaagattggcatctggggcctgggatttaggtttctaaatcgtgggccatggggcagccttatctctgcaaaagcattgagggtagaagtcaatgatttgggaagttattgaattaggggatctcggaggtaggctgtcagtgcctgatagtatcagttagaatgcctgacttggggtgacaatggcttggaggggtgggtgagtcaagggtcaaatgagtgcccgtgagtcatgatgcctgccttgtacaattgataactgaacatcggtgagttagggccccagcagttgtaattagcaccccgggtgtcagccagaaaccaacaaacagccaaatccctgcagccccgcccagcctatccaccggcgggggaccgattaaccattaacccccacccctccccggcagagcctccaccccttcacagaggctaggccaagactcccagcagatcttcccagaggacggtttgaaaggaaggcagagagggcactgggaggaggcagtgggagggcggagggcgggggccttcggggtgggcgcccagggtagggcaggtggccgcggcgtggaggcagggagaatgcgactctccaaaaccctcgtcgacatggacatggccgactacagtgctgcactggacccagcctacaccaccctggaatttgagaatgtgcaggtgttgacgatgggcaatggtaggtgggggcagatgtgcccaggtgtgccagtgggggcaggtgtgcctgggtccaggagcagatctttggcactcaactttggggtgggaggagaatgatacaaaatggtaggttggtcctacaggccagcacaggtgttgccaagtgaagcccatgtgcccaggcacagtgatcacaggcattctgggtgaagggaggcctgcaagggccaatttccagcaaaagtcgatcccggctattcctcccaggcccttccagtcctcactgcctcacagtggctctgcttggcgcttggcacagtgacgtgatggtgagctcccccttggtgcccagctccagcgattcagcccagcacggccccttcgtgaaccccttgggcctaggttcagagagacggcaagggatgttgtatccctggagatggtggttggagacataaccgcatttctcggtgtctttgggactttcctagggaaatgaaattggcacttagggaaaatggagctctcagggaagttttgctaactacgaagccaactcagcactgtgtgtgttgtgtgtgcgttcgtgtgtgatagtgagtttccatgtaggttgtatgggtggggtgatgccttcaggaacccatttgcatatgtgtgttcatttgtctctgtgtgtgagttctgggtctattttcctttgtattcattgagtgggtctgtgtttgtgtcttaggagttgcccgtgttgatcttgcttatgtatgtaagtgtgtatgtgtgtgtacttgtgtctgtggatgtttgtacatgtgtgctgtgtgtgcgggtcatagagcacatgcgtttgtgcatgcggacctgttggagtgccctgttcttcctgcatctttatcctgtatgggcgttttgtcgtgtgcccatatttgtacctgctgtgtatatatgcagttccctgtgctgcgggcgggggtcagcggtctctggtgtgcacgactgcacagacccaaatgcaggactctgttgttgccactcaccaagtgagattcatatcagcaacatgtccgtttgtctctgagcagattttgttgccgctgcgtctcgccagattgaggcatcccctccgacatcactggagcatatctggaggggtggacagttctccacagggaggtaggggaaaagaggaggcccggaaacccctcctggagggaagagccccatcggtcccaggccagcctcagaggagagggggcaggcagctggctgaggtcagcctgccaccctgcttccttctgtgtcttggagccactcagccagtatgaggctgcagctccagctgaggtctggaatcttgtggtcagctcagctagggtgaggaggcagctgctgggcactgcttgttgtcagctcagcaggtgctcacctgcccctgccgtccagtcacgtgtgaccttgggcatgtcacctcccctatcctggcttctgtatcttctacaaaacaggcttcattcccccaggcctgctggctggacggcttttaggcctgtctgaggaccacgccaggagcgcaaggcaaaaacacaccagagatagcaaacaagctgctgctgcactaggtggagtgttgtgtggccccacgaggaccactgccctgccctgggctgctccccgcccccatcactttttccaagcccaggaactgtgtgctcctgaggcagaggccaagcccctgaactgggagtcccaaagacaagaccacctccagctctggaaccagaaagatctgggctcaaatccggcatagatccttccaacctgtgtgaatgtggcaaggcaatttcctctctgagcctcagtttcctcacctataaaatgggaataaataatagtgtctgtctcccagggctggccagaggataaataagatgaggtgcctgggtgcttagccctggtaaagggcctggccccaccatgggtcatctcaagggctctgagcatctgtaagcagggtccccacattcctcactggagtttgaagtggtctgaattggggttatgtgaagttgtcctctgaagtgttttgagtacatcctgggctggtgtctgaaaggctccaaggatatttctcccccgtcctctccccaccccaatggagcagcagccctgggtggctccttgttcattagaggcccagcagacacctcaacatgtgtggcactggctggagtagcccagcaagcctggaccataaacccatggct

SEQ ID NO: 68724 - DNA, 3125 bp, Homo sapiens
acccaagaggaggcggttgcagtgagctgagatcatgccactgcactccagactgggcaagacagcgagactctctcaaaaaaaataaaaaagtaacgagttcattttcgaatctcttcatttcctgctcctctaaactcaacctttcccagctctgcgactagtcccagaccttcccttctagcccacagttgtgccgtaccagccaaaccttggtctagtcctgctagttcggtacaaacacccctcacccccatcaccccagcacaccccagaagcaggaacgtaggacccagcttgctccagggcccactgagaaggaggggaggggaggctttggtagactctctttcccctgtatctgctcctggccccctgttttctctgccccctcccttggaaatatcttctatgtctcatccttatgggaccttagtctgggctcatgagctgtcttggaaaatctgggcttgctgatcccgatgcaggagtgggtggtccccaaggcctgctctgaacgctgcaattctaacatctagatatcagtggttctccaagggcaagaggggctttttaagctgcaaatactccctcctctcccaaacccagttttcaatggggttaagcctgtctcatccacttcaacttccattttgtggactgggaaagattatgaatgggaacctgatgcatgtgtgaacagttggaggcaagaaaaagattgagaactacagtctaaggttccaacatttctgtggttgtattagtcagtgattccattatcccaaaagcctaagattttaggcactatgattcctcataggtgtcatccagagggcactgtgtttgagagaacagctctctcacagtgaaagttcaggtctgtgacaggcagatgggagaggggttggcagccctcctgagtggatggctacccacctccactgcgtgtggcctggtcctgcgtgtggtcagttgttataaatgtcttttattagacatccagagtcattttcacttgtgtaatttagggacatttctgtctcttctgggctctagttttcccatctataaaatgaggacattggataatgaacccttcagccctatgagtctcgctcctcactccctgacctacctgcacaagtcacactgcccactaggatgggtgtgtttgttccctggtcccttcttttttttttttttttagatggaatttcgctcttgttgcccaggctggagtgcaatggcagtatctcggctcactgcaacctccacctcctgggtgtgagtgattctcctgcctcagcctcccaagtagctgggattacaggcatgtgccaccacacctggctaattttgtatttttagtagagacagggtttcaccatattggccaggctggtctggaacccctgacctcaggtgatccgcctcggcctcccaaagtgctgggattataggcatgagccactgcgcccggcccctggccctttcttgagctgctgcaaagccagcaaaccccttactaggctcctggaagggggatgagagccccagaccattcagccttagctcagccttgaaaatagctgcttgcttcctggcccagggaaacggacatgctgcccggaggataggagagttggctgatggcgagtgagcgtgggttagtcgatgctagtgtttgtttacatgcctgggttacctggaagatcatgacacatgcagtcacttggttgttttgagaacgggccagagtgacaaagtgttcagttgccactgtggtcaagccataggaaatgagggtattcctagctgtgcctgtcttctaggccccaccacccctcctcagcctgctgggaagctcccaaagccaaaagaaagtctcggtggaagtctcactggccaggagagttgggacaagtttttatttctttttcttgatgaccttaggagaatttgaggactgaaaccctaaaatagtccctgagaaccagaaagtgtgagctggaaaggtaggatttcaagaccagctgagtctataagaggtcatcaaatctacctgctccccactttacagaagaggacactgaggctagagaggtgatgtgacgggtcaggggtggagtcaggtctagaactcaggctccccagagctgagcagacaccaagctccctggagtgaaacttgcagtgatcagcttgggaggcacatttcttgatctagatggctgaaactttctctcgaccacagagaggggcttcaggtctcatgggcctataagtctctgccacaggatagtccaccatggctggaaggggctccctggaaggccaaagaatccagggagaaccctgggggtcagtgggccaacagcaggtcaagaattctttcctgcaaccgaaagccagggagacagacacctgccttggcctaagctgtcaggcccaggacaaatattcggctcctggcatcaaaaacccagcccagaaagcggacccagagttgcaggaggtgagcgtaggtgatgggccaggggccatctgaagaggccttcctcggaagcccctgccctgctccccacagccccctacccaggagttccctgggaagacaggctcatcacctctccgcctctgcccaggtcggttaatattcaatagaagttacattaggtccccgaccctgctaatactgagcaaacatttggaaaacatcattccgtgactgagctcgcgccgggcactgataacgcccgcctaaccttgaggagccctatccgcagctgctgacagcagccctttcattccgcccgccggccactcggcgccctgatgggtgggtgcgggtgctggcaggaggctgccgtgggaggggtgtgggcgggtggggtggacggcccggtcagggaagccgtgctctgagctggccccgtccacatggtggtctgagaggaggttgcttgcctctggacttctgttctatccactgactcccgggctcaagtgcaaaggatttgacttttattctctgattttaacaatgtgtcaacatcaagagaaagttgaatagctggggtgtcaatgttccctggagaaatagggttcttataagaattaga

SEQ ID NO: 68725 - DNA, 892 bp, Homo sapiens
gttaagaatggcacaaagccccagcccgcgtcacctgtgccttcatggcatagttattattttaaacgcttgtacagcacacactgtgtgccagggactgtgctcactgctttgcaaacactacctattttaatataacaatgctatgagggaagctcgattatttatcctcatcttatagataagaaaactgaggcacagagaggttaagtaacttatccaactataaccagctatcaggggcagagccatttaagcagggcagtgcagttccagaatctggtcctttaaccttgatgctttggtgcctatcaggtgacctttgaatgtcatcgatcttgtgagtcatgttggtaaatggagcttgggtcatgtgaaagaggtcctagaaagccaagttccaagctcagccggatgactcaaggcagcttatcttctgaatctgggcctcagcttccttacctgtgaaatgggagtcaccatccctgcaggtcctcctcccacaggcaccagctatcttgccaacttaaaagccaaaactagaggagaggggtcaacccaaggtgacttcccatcctccctccctcccaacccttccaggcaatgactacattgtccctcggcactgcccggagctggcggagatgagccgggtgtccatacgcatccttgacgagctggtgctgcccttccaggagctgcagatcgatgacaatgagtatgcctacctcaaagccatcatcttctttgacccaggtacagtgcacacctcctaagccatccctgactctctctccagaacgctctgccagacttctcctattgggttctgtacactgagttcacagcctcatctcatgttaacgacagccaggagaggccgttttcattt

SEQ ID NO: 68726 - DNA, 513 bp, Homo sapiens
acacaaccggaaaatggcagagcttggatttgaacttcagaccacctgtcaatcccaatttctctctctcaagcccacattcttacctaccacctgctatcccacacttaccagagggtgagatttctagttctagttccctccacagcctggcccagcctgtatcctctgtagtgctcaacacgaggctggactggcagaattgttctgcaaaatgggaaggatcactgatgctgagtcagaggcagcagcctccagcaatttgaaggggcgggggacctagttcaaggcctggcatgcaggaggtgctcaataaacatgtgtggcctgaatgaactaatgaataagcatgattcagtggagacagcccactagaaatgtgggtgaatgttctttctgccacttcctttgtccatgaaagaggaaataaatgcattacctccatgaaggttgagattaaatattgtatgaccgcttaagttcctttctaggctaaggatctagaatttattc

SEQ ID NO: 68727 - DNA, 1635 bp, Homo sapiens
ccccatctctacaaaaaatttaaaaattagccaggtatagtggtgtgtgcctatagtaccagctactctgaaggctgaggtgggaagattgcttcagcccaggagttcgaggatgcagtgagctatgaatgcaacactgcactacagcctggatgaaagaacaagactctgtctcaaaacataaataataagtaaaaagaataaaagcaagagatgcacttgagaatctccagccagatctgtagccactgggcttctctccaaggctaaactattacaggagggtggccttgtgtctcggtcaccacagaccacagcgttccattcactcggggttgtgctggagctggcttgtgagaactgactgttagcttctcttcccaactccatgtttgccagtgccacactgatagcttgaaattggttattgccggagtgtttacaccacaaggactagcaaactctacaaatccgggcttttgttcctggagagcccgttgttaacattcaccagcacaccacagcattcggcaatggctggaccatgggatgcctacatatggggacatcctccttggggatgagggtagagcagggcgatcctttcacctcttccttaagggaggggacaaaagttctggtctgggaagcacacgttttgctgatcagcgtaaccttgggcaggtcactccaccactccgagcctcatctgtaaagtgggaatgatatctccctccagggcagatgtcaggattcaatggaatgagatcacagtaactgtgagagctcccgttacatgaggagtacaagtgaactcttcatgcgcccctttttagcgagaagttaaccattaaactctccaggcttcagagcacccattcgctgtctacctgatccctagggccgctcccgccttcccctgtgccttccctccactagtcagcaccaggaaatgttttcgataacgttgcaacggaggccttgttcatgctgccgccatcggggacaagcgcgggggggggggggtggaggccagaggagactatttcagtcctaaattgtgcttaataaacccatatcaaaaccataaacccttggctgccataaattcctctacccttggatcctccacctcatcagccctttgccctggttaatctcaaatctcagcgcaggcagccggagctttaggtttggtttctacttcagttgctaaacagcatcagctcaggtggcagacagtaaaattcccattttagagatgatgaaactgaggttcagaaaggtgaagaaacttgtccaaggtcacacagctagagaccccagccaagacctgagcccatgcttccaccacccaggtagcctgattaagaaatgggaattcttggctgagcacagtggttcacccctgtaatcccagcactttgggaggccaaggtgggcggatcacctgagattaggagttcaagactagcctggccaacatggtgaaaccccatctctactaaaaatacaaaaattagccgggcacagtggtgcacacctgtaatcccagctactcaggaggctgagccaggagagttgcttgaacccaggaggcggaggctgcagtgagccgagatcatgccactgcac

SEQ ID NO: 68728 - DNA, 1226 bp, Homo sapiens
gccatcatagctctctgcaacctctgcctccagagttcaagcaatcctcctgcctcagccttttgagtagctggggtacagtgtgccagcacacctggctatttttttcttttatttttagtaaagatgaggtcttgctatgttgcccaggctgacttctttttagcacctctgaaaagttgtttccccaagccatgctactagaagcttcttattccatcattccatcattgctcagagtggggaccagaagtagaagggaccctgggtgacaggctgcttgaagatccaaagaaagtttcatgcagtgtgaatggcctgtcatcccaaattggtgaaatcgtcctacttcctcatttgtggaacccagataacctttgagctacacttctcaaatccacgtatcatatgtaaattccaggatgtgatctcagaggcctgaatcacaggatcccaggcagctgtttgacaatggtggagttagacaccaaatcatgatgccaaggacatttactgggctcttcctctttgccaaacatggctggacataatttaattcccacaacaacctctgaggctgtcattcttgtggttctgtttcacaaatgaggaaacaagaccggtcatggtggatcacgcctgtaatctcagcactttgggaggctgaggcaggtggatcacctgaggtcaagagtttgagaccagcctggccaacgtggtgaaacctcatctccattaaaaatacaacaaaaaaaaaaaaccagccaggcgtggtggcatgtgccagtagtcccgactactcgggaggctgaggcagcagaatcgcttgaacccgggagacagaggttccagtgagccgagatcatgccactgcactccagcgtgggcaaaagcttgagaccctgccacaacaacaacaacaacaaagaggaaacaggctcaggaggagagaggaagggacttgcccaaggtccacacacagctggtcaccaatccatacctggtgtggccgctgatctgatgctcattgtctgactccaggggccaatatgaggcctcgaggaagacactggtgactccatcactgcgtggtgggcacagaagtagtgtgaatggtggaaagctcatctcatgacaaatgttgatgggcagagccctgtgccgggaaccctgggattatggagaagcaatagcgtgaggcgcctccctcccagagctttcagttt

SEQ ID NO: 68729 - DNA, 484 bp, Homo sapiens
ataatagtggtgaagtgagaatatccatgctggtgtgtcctgcacactcttccctttgtatcaaatgagtggaagaatgaatgagtgaatatcactgcaggtgctgaggtttcactagcagattccagccaaggatctgagaacgtgatatttttagcgaagttggggccataaaacttgttccatttcccaacttgtgcaacgcccagcccctccccctgtggctctgagattgctccccggccttgggaagggctccccaggcttatctaggggggagagtgaaactgtaaaagcctttatggctttgagatcacgtctgcaaggggcagcgattgtcgttataaacttgagctggccctgcaagggagggcaatagcctgggctgagaggagtcaggggagagttgagcaatgccaagggagcggccgtgctgagccgagcattctggggcctgtggtcagggaccatcattcatttacct

SEQ ID NO: 68730 - DNA, 845 bp, Homo sapiens
atgattcatttatcaacatatatcttggctgaacaactcttctctgccaggcacagtgctgggtgctagggattcagtagagaaaagatgatcccgatatctgccctcctgtggctcatgagtggatggggacacaggcaaacacacgggcacacatgatgtagtgatctctgtcacatggtaagcacagcagctggggtggggactgtggtaaatgaaggaacaccaacccagatattcaggagggatgtgagcagaaactgtcctcagagcaaacaggaagagagaggacttcaaccagagaaggaggtggtgttgtagactgtgttccaggtagcgggaacagccagtgcaaaggtccaggggtcaggggagagagccagcatccagcacatctggtgaagcaaaacaagttctgtatgggttggtatagagttgggggtggggggcggtagaaggcagagtggccagactgtggccagatgactgagaacctagtaaaccatgtcaaggagtttgaactttatcctgagggcaaaggggagccagggaagggttttaaggggcagcagagtggcacaatctgcttggtagtttggaaagatgcctctggctcctgtgtacgggtttggaaggaggagagacaagagacaagtctggaacaagatcccaggtgagagaagaggcctgagtgaatgggaggtgggccccagagagacatttcatttacagtgtggggaatggacagggagttggtggcagtgtgggttatactggtaacctaggagcccaggactcctagattttatgattctaaaattcttggccaggcacagtggctcatg

SEQ ID NO: 68731 - DNA, 1682 bp, Homo sapiens
acaagactccacctcaaaaaataaaataaaataaaataaaataaattgaacaacataactgtgacaggcttacccgttgcttggagaaagagatgggaggccagcagtggtgggcctgaagctgccagtgcttagtggatcagggttgggcttagggtgtgaggccagagagctcagttcatttctttgcacacagtaggggctctgtaaacacccgtgaaattaaatcaaattaggagtttaagtgacacaagctagcatgtgcaccaactatttccggaaggcgatgagagaccggagagtgagatggctttcggggtgggtgttggggggctgggtagctggggtcggggtgggaggaagacctacttctcattttatgcccttttgtaccttttgaaatgttttactttcaccacatgcacacagagcagaatcaatcaaacaaacaatcacaattaaataaacaatgcagggagccaggctgtctcagagctccatggcttcatgcctgctcttcctgctggtgagatactgtttcccagctttctccaactggggaagtacacgtcctccaagaagtacacaaatgtcctgtcttctggggcctgttcctgcctccctgtgatggttcttctctgcttacccacctcatccacacacgagtggtccaatctccaaccctgtctgtcctgctctgtggcctggaggcacctgtgccttctgacatcacaatacattcagccaaggggaggaatcggcagagataaaagggcaggatgagggagaactgggcatgtttatgccacccccagctccctccctgttttgccttaattttggcagtggctgaatttctccatggtcttaactcctgtcttagcctcacttatatggctccagctatctctgggtcaagtaacaccattctctctctcacctctttggccttggggtgctaacagctccccactgttgccagtccctgcatgcctcacctctgcaaacacttccttcattaagtttgcttcagttaagccagtggttcacaatctggggtgactttgcccccaggggacattcggtgatgtctggagacactttaggttgtcatgactggtagagaagatgctactggcagaggcaacagatagtgctaaccatcctactccgcacaggacatcccccacaacagaattagccagccccaaatatcaatagcacggagactttgggtctcccactgctccctgcctgaagcccgacagttcatggctgggattctggactcctgctggcctctctgctttgtggtgtgatctgccagtttccacacctgctgttgatctcctcttagtgacacagagatgaaaagaccccatccttgccctcaagctggccatagtgcagtggagagagaccctggtgagcggggttccccagcagcctcgagtccttgagggcaaagtctctttgtcagtcaccacgtagccccagtagtaggagagcagcagacatttgccaattgaaacaaaaggtcctttaaaaatatcttaaaacaaggccaggctcagtggctcacgcctgtaatcccagcattttgggaggccaaggtgggtggatcacctgaggtcaggagtttgaaaccagactggccaacatggtgaaaccctgtctctact

SEQ ID NO: 68732 - DNA, 1850 bp, Homo sapiens
atatataatacacaaattttttaaatcccacagagcgatatgccctattataaaatctttgataatattctctaactgatgggatgtttgcaaggttaaaatgtgataaagtttgtgactctcttgctacattttaggctctcatagtaagaactcaatgttaaatgtaaacagcattgttaaatgtaacagcagcattcatacagcatcgttattatcatggctttttgtatttctctctattgctgatagactggagcgccctcgagtgtttaatttgttatagtacctcagttattacaaagagcaccctaaacccaagtttgtagtctcaatgccaaagggcaatgcttttcttttctttcactccagtgccacataaaaaaggaccaaaacatgacctcctgggagcaaagaaacaccaggttgcctaaggagaggtgaactggcccaggctggaaacagagcaggtcaaatctcacgccctgatcagtggtgggatcacgcctgtgaatagccactgcagtccaaactgtgagactctgtctcttaaaaaaaaaaaaagtagcaaaattcacatcaaatcaatgggtcccaaggccaactcaagccctgcccatggtcactccctgaaatgtgtcagaaggaaggcagaagggaacacgcagctctacctccctttgatgcaagcacattgcaaatatcatctcgtttcacaggaactcacataatatttgaatgtggcatcatactgactacaaaaatcctttcatattactaatagtcacagctagctttcagtgacagtttcctgtgtcccaggtaccctactaggagctagatgtcattgttagctttgatctttaaaatggcctgtgaggcatatattcttttgtagcctgcttttttcccttcagcagtacgctttgggcatctttccatgtcaataaatagagctgggtcggaagtaactgattcaaaggctgagaaacttaaacagtcagcagccactgcccaggtgaagatcaataatagttaacatttattgagtgctttattacacaccaggccctccactcattgtttaaggtgaactctctcgcatttgatccttgaggcaatcccaaggtagcttctattattattcagatggggaatctgaagcccagagaagcaaaggaacgcagtcaaggtcagacagctggtgttcaatggcagaggtgggattcaaacccaggtccctctgattcaggcgctgggctctcagccagcacatttggaggacaacatggaggaggatgtaaggggagtcttcgaagtgggaaaaggatccactagcaaaggctgaagacaggcaggagggtggtgtgggcccaggccactgtcctccatggaagtgacagtaaggcttcctggaggtgacaccgtttggactaattctatgtctccagacaataaaggaggtctttttatagcttaccagttcctgggcatacgtccagtgagacatacgtgggttcaaatcttcattgtgccactctagtttaaaaaaaaatcagcattatcgccagacacagtggttcacgtctataattccaacactttgggaggccaaggcaggcgagtcacctgaggtcaggagttcgagaccagagtggccaacatggtgaaaccccatctctactaaaaatacaaaaattagctgggcgtggtgatgcacacctgtaatcccagctactcgggaggctgaggcaggagaatcatttgaacccagaaggtggaggttgcagtgagccaagaacgtgcctgggtgacaaagtgagactcagtctcaaaaataaaaataaaaa

SEQ ID NO: 68733 - DNA, 4726 bp, Homo sapiens
ttttgagatggagtctcgtgcagtgttgcaatctcagctcactgcaacctccgcctcccaggttcaagtgattctcctgcctcagcctcccaagtagctgggattacaggcacgcaccaccatgcctggctaatttttgtatttttagtggagacaaggtttcaccatgttagccaggctggtctcgaactcctgacgtcaggtgatccacctgcttcggcctcccaaagtgctggattacaggtgtgagccaccagcctggccaagggtgattattttattacaattgaaccacagccatcctatgatctggccacttaccccaggatacagcatcctcaactagatggcaaaaagccacttcctttgcacttagtcagtgctgttagcctggaggaataacaatggcaccatcgattgtgccaggcactatcctaggtgcttttgtatgttgaatccttgcaaagccctgtgaggtgggtcagtgtttgccttctgtatgacagatgagaaaactgggatgtagtaactagtcattggccaaggtcacacagcagtgaagtaatggtgctgtgatttgaatctatgtagtttgatttaggatctagaagtttcgctaatggattacctagctcagaactagtgaaagagcccagtcacaaaagcacctcctgatgcccaaaatcattttcagctcctcagacacagagcctgaagcaaagattaggtactgtgtgatttataaaggaaagaacctgtaagggatgaagggaagcaagacagggagggaaacaagaaaagatgtggtctcaggtaaagtctagcaaaaaggctggctttgtgtacctctgtacgagtcagctgttggctgccagccaccctgtgggtgaggggaataaactccagggtgaggtgattcctgagatggcagttctccgtagaaatggaaatagtaagccattcgaagccaacaactgaagcatctggggggatggtgttggtgtgctagcccatgaagggctcaagaggttcccagaggcacacttcttgcctgcctaatgaatcaagttctagaacattctggaacattcacttcctagacttgttttggagaatcctccttctcactgagaccagcatgttgaacaaacccagcctgtgacataatcaaagcataccttaatttgtatctcccagtgtcctttctaagatgtatttggtagagaaacattttccctgccactgggtgaaatctccccattattcttctgcttgttctgaggaaacaggcaattctatggtcactttaggtcacaaacacaacctcaatttagaaatgagaatgtccagtcaagcttctaaccaaaattcccaatttgatttgggtttaaaccttctcccctcaccctcaggcctgcttcagggaggtggtgtgggtgactccttctctatctctccttccctcacccacccgtggggtacagtggggggtgttggagatggcaaggggagaggaagggtctcccttgagctgccaccatcctggctggcttcaagctgcccctttctgtcgtgggctccatggagatggccactgtcacaggggccctctcactcttaaccttgggggatgcatctctcctcataggggtcccttgcaagtccttcgtcagcccttaggaacccaacatccaactcaagcttcttgctgctgccacacctctgcccctccaggaggctctaggggacaggacccaagaggaccccttgtaggtgctctctgccaacactggcccatgggaaacactccagccagcagcctgtactccgaaagtcctgggaatgtggcttaccttagcacgcccacactggctccttcaccagttcagccaggcagcccgtttctctcagcctctagatgtccatgcccacatgagaccactgggccccctcataatggccacacattattctctacatatagtggcccctctcatggaagagcccccatgaccccattccacccttccagggagatggtcaccaaagaactctttgcttcctcttcccatcctaggagaatgtggtgggtataggggtaatagtaaatgtgggggttttgggtagccatggccaaattttagcagctgtgggtttggactgggctcttttttgttgttgttgttgttacgtaaattaacccatttattacaggccagtgatgtctcaaagagtagaggagcgtctactggtctttcaactccttcaggcttctgatggcggactttaccgtgatagcggaggtggtattgtatgtccaggcaccgccagccactgtcttcacgcgggaaccacagtgccagatccccgcagctcatctcttcatcttggttttgccacagaaagagcaagtgtacttggcctgctggctgatttcaactttcttcaccattttccagagggaggccccatagcgggtcccgtatttaccgacgatcccgactttcttggtaggtttggccatgtcaccgcgaactaggtccgagcccagagagttggactgggcttttaaaaaacagttactggttgtcacagcagagctttctagaaacatcttacaagtcatgtccaccacccccagcctcagttttttcatatccttactgcgggtggcagcaccttactgggtgggggtttgtggtgagggctgagtgaagtagtgaatttgcggagctaacactccagaattccacaatcacagacctgcaaattccatctccgtgggaccatttacaagtgatgtggcttctctgagtctgtttactcctttgttaaatggaagagcctctactccattgcatctctgtaaggttagttaagtgaatacatatgacatgcttagcacgggacctggcacctggtaagaactcagtccatgctgggcgtttttaatacaacggtgggtggctggtactgacggaggggatttgggatctccaccccttccgtttccctcactattccaggccctgttttggaaatgcttcagccaggctgggatccagggcccctgggaacagagaggacatactgtacctccaagcagccatgctgactcaggttaggaaatcaatgtgtgaccacaaaaacacagccaggttcttcccacttctgggaaatctgcacagccaacccatgggcatctctttaccctgtcccgagaggtggccagcttcgttctaggacctgattctgcagcttgtgagcacaaggctggcacatggagaaacaggagtctctcgctccttagggaaccccaggcccggggtcacaagctttgcacgaccctctgattggggtcaaacatgtctggtgtttgcgaagcctctgacttcccccagcctgcgtctggacacttctcaagccaagccaggctccggaccactggttgggcaacgcatgacctcaaactgggtcagacccatcagatgagcatctgtttaagagtataggacactttgttctttagaatcccaagggtcagagtatgaaccctccccgtccccaattcaaactcctcctccatcacttactgccatttacttactctgttactttgagcaagtttttcagctctctgagttctagttttcctagccaccaaatgcagactaacaagtaccttcaccttccagggttgatgtgagattcgggtagtgaatgtcaaagaatggcacacatattagcaggcactccataagggggagttattattgcaaacaggggcactagacaccaagtaaaaaacagtatggtacatatgctacagtggatgagagggcagagctgaaagccagactgcctgggttccaaaccaggctactggccaggtgcggtggctcatgcctgtaatcctagcactttgggaggccaaggcgggtggctcacttgaggccaggaattcgagaccaacctggccaatatggcgaaaccccatctctactaaaaatgcaaataaaattagctgggcgtggtggcatgtccctgtaatcccagctactcaggagactgaggcaagagaatagcctgaacccaggaggcagaggttgcagtgagccaagattgtgccactgcactccagcctgggccacagagtgagacgctgcctcaaaacaaaataatacaaaacaaaacaggctgccctgccacctcctgtgtggccacagggaaagtctctaagcctcagttttcttctctgtaaaatgggaataatcataatacagttataaggattcaattagattagttgcactggaaacagtgcctggcacatagtatcacctaataaccattaacgattttttattttgttttatttttccagtctctgccccagttgggaagcatgaactatttttaattagccacacaagttagtaatgtcggtaatggtgctgaaatcacacgggtcagtgttttgaacaaaattcacatggaagtcatatttagtgagcatctacctacatacctggtgctaacagaaaccatacatttagatacatgtatatgtacatgtaaacacacatatgcacacacacatagtgtgaagtaagtgttgctgtcctcattttttaaaacctttatattatagagcaaaacagttgcagaaaaccacacaaattaaatttgtagcagccaggtgcagtggcttacacctgtaatccca

SEQ ID NO: 68734 - DNA, 749 bp, Homo sapiens
gcacccaccaccacacccagctaatttttgtatttttaggagagatggtgtttcaccatgttggccaggctggtcttgaaatcctggcctcaagtcatcctcctgcctcagcctcccaaagtgctgggattacaggcgtgagccaccgtgcctggtcccatgattctgttattgacaatcaaatgaaactatccatgcaaagagcttatcactgtaccaatgaaagcattcagtgactggtagcagttagtataggattttatggttgatgaaaccaagggttggagagacagataactgttccattgttacacagctggtaagtgacacaggctttagactcaggtctgtctgaccagaacctaacattctttctcccacactagttcttaattcagagcagctttgtctcccagctggtatttggcaatgtctggagatacctttggtttttatcactgtgaatgtggagtgctactgtcatctagtgggtaaagcctaggaatgacattaaacatcctacaggacaacatctctcccatgcccccgaaacaaagacttttccagctccaaatgtcaatagtgctaatgttgagaaattatgccctatactgtggtgccatcctaaataagccttgccaggcagggcacggtggctcactcctgtaatcccagcactttgggaggctgaggcaggcagatcatctgaggtcaggagtttgagactagcctggccaacatggtgaaac

SEQ ID NO: 68735 - DNA, 2580 bp, Homo sapiens
cccatcttcttgggactcctcttgcccctggggtaggaaaatgaaaagactgtttaaggtcgtttctttaggctcagagttctcctggaccaccagaggttctgcctcagagggacctaggagatttgcctcaaagttgcagttgcacaaaatacttgcgggcggatcttaatggactggggtgggagttagtaaagcctttgtctggagggaacgtaatgaaccccaaagcaggaaaaaagtaattattgaatcaggctccagagcaagaatcaggtttcaggtaaggaaacggaagcacaagaaggaatggggacttgctccaggtcactcagttaatgacagacagatgtcccctggtttggagtctccctttttggagcagctagtcctgatagcagccatagtggggggaagtctagaatgctaatcctgaggtccgggtttgaagccctttactgccttgattgccagtttccctttcctgaaataggggaattgcataaatatgaggagttaatgagatcatggatgttaaacaacaggtacatgttagcatgttcttggaaaatggcagcttctttccttccttctctgagcctcagtttccccatctataagccgggtttgacaagcggctggtgccccagctcctcccagccactccaggtccgcagctcggagctccggcagccaggtggggactgaacaccaacgccgcggggaggcgtcgcacatgcgcgctcctaggcggagccccgcctcccacgccctggatcgtcacttccggcgcgagaggccgggcaggccgggcagggagtgcgggtcggttctgcgtgcgctgccggacgaggctcccgccgccgattgacccgcgctccgcccgtagtcgggccggtgagtgcccgcgagcccatccgtgtgccctgggagctgaggagagggacccctgagagggaaggataaccggaagtggggaccagaggagcgagagaccccaggaaatggggacacctggggagggggtgacagccggaagtgggggcctcggaaggttgtccacgggatatggggtctcgggggctctaggagagatggcttcctgacctctccttgttgagaggaaggggtggaaaggaaagtgatgctccagaaaggatgggctccaggtgggggagatctttggcttcaccgttaccaatggtgtctgcatctcactcatatgtccgcctgtcagctcattcaccagcctgtgactgagtcctgctgagcgctcggcactgctgagtccctggagagtcaacatgaagctccaggtggagggtacagattagaagcccagggtggggctagacgcatccttgctctgcctcaccgggtgtgcccccttgggcgaatcgcttaacctatatcctccgctgatgtgtacagaccactgccatgtgcccggcactgggggtggcagtggacatggcagacaagccctctgccctcgtggaacttagattctaggggacagtcctttttgtcctcctttgtaaaatggcaacagtaatagcgctctcaccaaataacgtgaagattaaatgaggaaatgggtaaagggcttagcaatgcttgatacatggtaaaatgctcaagtatgcattctcttcattccactataatgtaagctttattaggcaaggaattgtattgtttgcgtctgtgttcccagtgcctgtgagcacagtgcctgacatatatggtaggtgatcggtaattatttgataaatgagtgcgtggtgaaactgactctagataaatgcccatagcattggactgtaatttctaaaaaagaaataggaacccagttctgtggaaaactggagggaatcaccctcagggagtttgggaaggattcactgaggtggtgacatggcagctgagcctgagctgtcaagttaggaacaaattagaagaggaaattccaggcagagtgtatcagaagtgcacgagttattccaaggatgatgggttattagtttgttttgactggcatttaatgtgcatcaaggtggggtgcgatggaaaatgaggctggagaggggctttgaggtgaggcttgtaccttgtgaacactgatgtttgatgggattgcaggcatctcttggttacttccatagaaacaaagccatagttgttccattcctcacttagcatacctgtgccaaccagactaaagtcattcaacaaatatttatggagtgcagattatgtgtctaacaccatgttaggcgctgggtttcaggtgatgaacaagacaaacttggatgttgctcacaaattgccaacagacaattgcaacagggtgggagaagtgcgggggaggcacctaacctggctgggggtcagtgaaggctacctactccaggccaccagcatctctcagctggattattgcaatagcctctaaatggtctgcttcagtcctcactcccttagagtccattctcaagacagcagattggtccttttaaaatatatttttatttatttatctatctatctatttatttatttatttatttatttatctga

SEQ ID NO: 68736 - DNA, 869 bp, Homo sapiens
ggattacagcatatacattacagttgttttaattcacatttatttaatgatgaataaggtcgagcacctattaatacatttataaggaaggccctggtgtttattagggagtgtatagtctgctgtagctgctgcctgcctccctggggactaacagcagccggcctggggtcagacttgcgtgtatggtttagatccagttcattgcccccagttgagaaacactgccctgaggttactcggtttttacagaagtgttcctgtcccctacactgtactgccctaggatttgaaataagcacttgttaactttgcttagggcttctctgttggcagggaccttggtagctaatgtccgaagaaagtgactctctgagaaccagcccttctgtggcctcactctctgaaaatgagctgccaccaccacctgagcctccgggctatgtgtgctcactgacagaagacctggtcaccaaagcccgggaagagctgcaggaaaagccggaatggagacttcgagatgtgcaggcccttcgtgacatggtgcggaaggagtaccccaacctgagcacatccctcgacgatgccttcctgctgcgcttcctccgagcccgcaagtttgattacgaccgggccctgcagctcctcgtcaactaccacagctgtagaagaagctggcccgaagtcttcaataacttgaagccatcagccttaaaagatgtccttgcttccgggttcctcaccgtgctgccccacactgaccccaggggctgccatgtcgtctgcatccgcccaggtatctccctagactgttgtggggtgtgtgtgtccagtccttctgcagtgtgtccattcagcaccctgtcctc

SEQ ID NO: 68737 - DNA, 645 bp, Homo sapiens
agtttgatggggagtggacacctccatgcactttcctccgcctttactcattccccaaactctctttggaggctaaaccattctcttcagactttactatgtatgtaccaagaccactgttaatggcttacctgccattttaggtacttgccaaaattagtggtgtttattttaaaataagcaatgcagtgcagattttagggcgccaggagacttagaaaccagtcagcaggtttttctgctgctcctctgtactcaactcataagaatattacaacacagtcagatattacaacactgattgcacctttgcttgtgtagtttcaaccctttgcttgtgagatgaattttttccccatatgtctggagcagatctggacccctttccactgacccagcgttttaggaagaggcatacacagaaaggtttcttctcaattgggtatcagctttgcctttgttaaagctcttttgagacatgtgattgaaagggatgatatccagttacatagaggcagggttaattggcagcaacgttagacagcaagctggcacaatttggggacaaagatctttcacgagaattttgcacatatcaggtcaggtgtggtggctcatgcctgtaatcccagcactttgagaggc

SEQ ID NO: 68738 - DNA, 4029 bp, Homo sapiens
tgagctaattctctgaccagcttggggcactgtttcagccactggtcacattccttgcttcaaactgaaattcagtttggctttgagtatagggatacatggtggattcatgtacttcagtgtttgttttgaccaaagtttatttttctagtgcattttctaagtcaaagtggtgaaaatatgtaataattttagtatgcatgactcagtctgaaacaataaaaatctctgaaaaatgtgcatggggttcttttgtgatgatgacagtttggataaaggttccaaggttcattattcacagcccgggtagaccacctcctctgcaggtgagggagggaggggcactgtgataggacagtgcattctgtagatgcgctggctgcctctgaagatcatacacaattagactgctgcagtatggagaggagaatgcagctagctacacagagcagtagaggtgatatgcaaatttttacattcttgaggcccagctatacttcttggactggccttgagtctttccagtgatagccagcgatttcctcaatgtgcgcatgtgggctgggcacacatgtgttaaggacactcataaataatgtattttaaccttcagctacccttaatgaagctgcattactgttcctgttggcaaaatgtagcttgcccagtgacacacaactagccaaatactaaggatgggattcaaacccaggaagtatgacaagcccactgttttctcctgatggctggagacaaataacgagtccccagatagaagagagagagaaggcaggactctttcatagagtaagaaagaaccagaaattgactttttaactggcttcttgaaaatacaagcagtggttgttaacctctctgaaacccaagttgtaacaacattttattccagaagtaagcccagactccttgaggggtaactggagcacggcttgcccaactatggtcccaggcctgctaagctgtttctatgtcccctgtttatttggtactctgtgccccagagtagacaaaaactaggtccccatggtagatctggtgacttgatgagtcagttgagaaatactctaacacaggaggtacacttttgatgatgcaacaggttaagtacttatattgcagcataaccaccccttcaggtcagcctttcctgaggaaattgtggaacttaagttcagtctgtttctcacatatagaaaaatgaagctaactgttaaaatccttttctctcacagcagtcttatgaggcccttttccatgagtcagtattttcttgatgccccctgccccctccttacacagtactggtttggtacccatacactcaatggcaataaagtttcacattatcgcatttaaagggtaagtaataagaccctttagggtaccactcttctggggaaaacgtttttaacctaatattcatgctttttcctgagtaggtgccagccactagggatagctgacctagtaaaagacatgagtcacttgccttcaggtgactactaacttgtctttgtcagtgatgggtagaggagcaaacactctgtgcctgagagtagacaaaaactaggttcccatggtagatctggtgagttggtgatgagtcattagtgagccagatgactcccctacatgtctctaataaatcctgtctcttatattcttatggcccaagagacactgaggtctaattgaaaaaagaactcttaagccaagccctgggtttctctgtttcacctcttactgagtaaccataggcaagtcacgaacttctctaagcctcaaactgatacgtaaaaggaaggagggagggaaataatcaccaccttacaggcatgtggatactgtctgtttaatgcttggtacacctacccatctatgtggtttctattattcttcttcacctgagaacataggcatggtgtggcttgagtcatccagcagtaattaggacatcactgagttgggtgcctaggtaacaggacggacagaccaacacaacaggagtaaagagatgaacagcagcttccattaataagcataagcctactatctgttatcaatctgcacagatcaaatgcacaactcattatgtgaatactcactttagcctgaatgtgtaaaaacagccaggtgcagtggctcccgcctgtaatcccaacactttgggaggctgaggcaggtggatcacctgaggccaggagttcgggaccagcctggccaacatggtgaaatcccatctctactaaaaacacaaaaattagccaggtgtggtggcgcgcacctatagtcccagctactcaggagactgaggcaggagaattgcttgaacatgggaggtggaggttgcagtgagccaagatggcaccactgcactccagcctgggcaacagagcaaaactctgtctaaaaaaagaaaaaagaaccagttacagatttctttgttccttctccattcctcacttggctagccaaaaagaaaaagaacaaaacctctatactgagaaccaggtccatggctactctttggcaggcagtttctttgattaccaagagaaagttttacttcccaaccagataacccgcaagaccaacctagaaaataaaggagtccagcatggacctagaagctttctcccggctttaacgaggtaaaagtggcagccactgctattgcctttgatgagttcctagagcatgtccctgatctgaaagccagggccccaacccgcattccccaaggctaggcaagccctttcatagtgatgaaacataaaggtactcatctggaatgaaaggccaccctgagatctgatgactcaaaatactcccctgctttaaatgatgatcctggccttattcagaatgctgtcttactcatgcttgtatataattcagcattcacatgtataattcacttgagtcttgattagactactggttttcctactaagaggcagacttcactacttcttaaggtaggaccaagcaaagcagggacactgcctcccgacttttaaagagcatttgttacttcaaattaatatcagttatcatcatgagaaaaaaataaaaactttattggactttgttacatttattttacagtttagtattgtttgtattttgaattacattaaggcggaggatggggcactgtaatgtttttgaagtttaggacctttaaagctcttaagctgactccgctactgtaaagaaaagcagggtatctgcttcacactggcaaaataaggggctacatttccccatctgaccctcaaatcccttgaaacgctataccctgacataaaccactggtttaaaagacaatgattccaataatttatatcaagtcctgcttccctaccccacacctccaccctaactgagcctgtcccctctgtgttcctctgtctaattctgtaacaaaatctgaaatccagcctccatcagattctggctagatatctctgacctttgaatattgtcttattttagcccataatgagatcagcagctactgtcagtgctatgtcagtgctaaaaatgggttacactttgcaaaataactttattctttaacaatcttgtacactaggcaccaacactgaggctcagctgcctgtggtcataaatcaaatagtacgtactcaacaaataatagctgacaagtttgatagccagaaaacggcaaagctgggatgcaaacccaagcagtctgactcccaagcctcttaaccattcttaagagaccacctacctccattcttcttcgaacacatgtttttcctgtttgccacctgaatacgtggaaccaccatccacccagctggttaaaccagaatcactcagaaatctacctctccttcatattattcataactgccagtgttaaaattctaattgctggccaggcacggtggctcatgccagtaatcctagaactttgggaggccgcggcaggtggatcacgaggtcaggagatcgagaccatcctggctaacatgg

SEQ ID NO: 68739 - DNA, 1757 bp, Homo sapiens
agaagcacaggtaaaacaacctgaggcttgccattggcacagaaagtgggcacagtcttgtgagactgagccctccacttgtgtgatttgatgctatctccaagtagagagcttcggaattgacttgtagggcaccaagttggcatcccctgcagagctgactgtttgcctgatgtttgggggaaaatccccacacaccacacatcaggtgtcaaaagtgtgttgtgagtacagcaggagaaactgagtgtgctttttctacacacttggtcaattaaatcagctggagaatgaggaatcaaggaatcacgctcctctgaagtgggtaaatgagggaactcagcatattcttttataggccctataattttctctttaaaatgtttacagtttacaaggtgattaaaccttcacttcactgtcacaatcgttctcgaagagaggaatgctggggtgattatcctcggataaatgacttacagcagtcccaaaatattcaggccctggtttccaattttgaataacaatccacaagggcttctttcccttgcacctgaactgcagacaagcctccgctaaaaccccagctttgccacacactctgtagttttggcaaatcccgtgctaggggataaaaatattacttgagccacctagaactaaatgatggcaccttaagaggtgcttcgggaggaaccggagcccctcgctgggagctgtcattccttggtccctctccagctccagaggaacctagtcaggaagcctcgcagggcggagccatccgaattgtaaacaatggcggcctagcctcttccgttccccgaggaacccggagggcgagccgcctaagctggacctgagggtatcgcggatttgcgtctggggccccggagaccctctgtagcccagggcctgctgacatcccgagagcctctggagccaaggcccgtgcagctctggtctcgaggcctttccccgcaaaccgcaggtccggcgaggactcgggaccccgaactcacccagctggcgagggagaagacacccagcacagcccccatggtgacgccagtgatggaggtggccggtcctgaggctgctttctaacacggtggtaactgccagctgaggtgactccccagaaacatgacggtttctcaggccggaaacgcagccttccacagacgcacggatgcgtcacggcgtggccccgcccaccgtccgcgaccggagcggcagaggggggcgcctgtcattggctgagggggaaggtggggctaaaccatcctggggttgcaggaactgtgaaggtgtcattccttacatcatttgtattcattgtgcaaagatctggaagttacagaagtgtacagagaggcacagtacgctcagaatttattctctagttaataggagatctgacaacataaatgcaccgtgccccaatgtaatgaatacgatgaagtagtatgggggaataggctttcaataaaggtgtatttagtgcctcctattgtaaggggaaagtaatttagctgggcagtagtcttggaaggcttctctgaaggatttattttttaatctgcgaactaaaggatgagtccaaattaacctagaaacgatggaaatcgtatcctaaaatgtgggatgcaccccatttgggaaaaatgaatggctctaagggtgcatgaaggacattaagcgatattaaacagcagagtgagaacgtcccatttcaaaccaacaggctagttgtt

SEQ ID NO: 68740 - DNA, 1393 bp, Homo sapiens
tcttggcagggagtggtggctcacgcctgtaatcccaccatgctggtaggcccaggcggatggatcagctgaggtcggagttcgagaccagcctggtcaacatggcgaaacctcgtctctactaaaaatacaaaaattagccaggcgtggtggcaccttccggtaatcccagctactcgggaggctgaggcatgagaatcgctcaaacccagggggcagaggttgcagtgaaccgagattgcgccactgcactccagcctgggcgacagagtgagattctgtctcaaaacaaaaacaaaaacaaaataacaaaaacccagtctaccaagccaccacctgaggccctgtctcctcctcgcacggtccccatttgaggttacagagagataaactgaggcacaagcagcacccgcggcccaagacctccccttggcctcactgtccccctttccgtatcttccccgggccaagttccaacccggatccctccttcgcagctcagccctcgactcccacttcgtccctcctctgccccctccgcggctgcggaaggggacgcgaaccgtcctggtcccatccgagccgccgtagcgcgagtgccgcgggagttcggcagcccaggtcgccaaggcaacgggctccgctgcgggttgcgggctgcgggcgctaggctgccccggggaggcgctgcggaccggcggcccaggcacggagaggcggcgagaccgcaggtgagcaggagccgggcggccggttgcggccccaacgctccgggcctggcgtcgacacgtcgcagggggcgaggggctgagccgccggggatcccggggagggaggctgcggcccgatctttgtccctcagccgcgccggggacggcgcccccgacgccctttgaccccgccccgcgttcagggagagtccgttttcggctgtttattatatttgtagccattggtcgacctcattcgaaagtttcttaaaaaaaaaatcccttcttgtttgggggccagaaaataactcaaaactgtgcagaaaatttatttgtgtgtgtgactcttctggggccagagaggattgacttctttgtgcgtcagttttatcgtctgcaaaatgggaatcatggtagcacctgtctgatgacgttattacaaggtaaatttatatttaaaattcgtggaggtaagccctcaatacatgggagcttttattattactactactacaaggaggaccatcactgagcatttattgtgagccacggcccgggctgatagccagggtaaaaaagtgaacgagagacatcgtgtcctgagggaactccacagttttccggaggagacagactcgtaaacaagaattcacagtgattccggttatgattttggacataca

SEQ ID NO: 68741 - DNA, 943 bp, Homo sapiens
aggttcctaggaggaaaggactcaaaaaaattatgcatgaatttcctttaatttcacaacaaccctaagggttgggggttgatatctctgttttacaaaagaagaaactgaggctcagagatgttaagtgatttgctcagcgtcatgcagctagcaattggtggagccccgattcatacaggctctgacccatagcttaagcttacttgcctcccccattcccacccctcacccctcttcggctctgtctccttgcaatgggggcagaaaatccagcctttatttctccaggtcctagtagtcctgggagtctgggggatttccagctcctttgaattcccttttttggcctctactctgcctccagcacctctcttaagagtccttttcactgttgtcatagcaagggtctcatctggagggaagctgccttgaggttggaactatttggctgcttatcagcaaggcttcagggccttgccatagcaactttccaagccacccatcttgtgacctgttctgactcagggcccctgggaatcccctgggtgcagatgtttgcagtgactaggatgcagcagtcggctcccaggactctttttctggccaaggccattttaggaaggcttctgttccagctgtgctgggagagttgaggtccagagcctccaaaccttaagaatgcagggttatgtgatgtctagagctggagtttttagccaggggcttatgggttaagagccccctgtgatcataggtatggttacacacacacgcagagaatatatacttttctgggcaaagtatctgtagcttccctcaaactctcaaatgtgtctgtgacccttaaagtttaagaacactggtctagagagaacccaaagtgttgtgggccactgtgctcccttggccaccagcctctcagatgccagaatcttgagag

SEQ ID NO: 68742 - DNA, 2015 bp, Homo sapiens
acattttatcttcatgtagatcttggattattttcttagaatagattattataaactgatttagtagctaaaagatatggaaaaagttgaggtttctggatacacactgtcaagtcactgcccaaggaggtcttggaagtttacagtctcattaacagggtttgagaatgaccattttctgacaggatttccaactctgaggattctttatttccccatttgctgttgactctaaagatgagagggtgagtgacgaatataaatatgggagaaaaataaaacgatgtgtttctgctttcgattggagagctccccagagccgtctttggaattgctgttccctgaggggatatggtagccagagcatgttggcccagctgatgttttctaggattggtctttgagtgtggcatttgctgtctctgtgtcccgagggccagtggcctgcactgggcagcctgtaacatcagatggcattgtgagatcaaagccccaggagacattccagcatgaagctggcctttcagatagagcctgtaattccatcccatggtgtcaggtcctaggacaagaacacctgcacagcactccacggtgcacggaggcccttctcaacagccccaagaaggaactgcggctcctccccacagaggacaggcgggcagcaggggagaagagggatagacacaaactccctctccttcagaggcccgagagtgaaatccagcgagtgtgcatggagcgcctgctctttaccaggtgctggatgagaatcagggaatgcagcggccagaacctgttggctcagctgccaggattaggtttcagctggacatgggaaaaatccagaccaaattcctgttcccgtggagctgacagtctaactgaggaagagccgaggactcggaggctccgggagccagtgtggcctgctcggggtttgtcattttccagagcagcgggtttcaggtggggctgaggcccttctgagccgtggctgtaaaccggcctcactcacctcagagggcagctgtggccactgagtgcgtgatgtgtatgaaaacacaggcacctgggccatggtacctttccttatcgtaggaattgtcagcatcatttttatcctctgttattactgttattatcataagccattttcctgtcctgaagcattgagcggtttccccagaggcagagcgcaggagtgaacctccgtgacctgtagaaggagccacctctggaacttccgggaattcttttagccaaggaggagccagagcgtgactagggcagcgcgcaaggctgctaggaagataggcagggtgcgccatctgctgtagccggggggaattgccgtggacagtgtcctggccctcctctattttacacaggggaaatgaaggccccaagaaaggcagggtcttgcccagggttaggtggcagagcttgggtttaaggtcacgtgtctcattctttgctctttctaccataggacacctccctgtctcacctgtctgatctttgagggcccctaattcattctttaggtgtttcttctgagctaggtgttgtggggggatgtgggccttgccctccatactgatcctcttctctgtctctctctttctctctctctctctctctctcttctctctctctctctcacacacacacacacacacacacacacacctgcagcacttactggctcaaccccaccctgggtgccttctgggcacttctgccaatgtcagctaccttctaaaagcattgcacaataatttgggtttataaaacttcaaccattgaaaaaatatagacttagaaaacgaaagttccccttaatcacaaagaaccacagttgacagggttgatagatgttttttcagatttttttttcatatgtctgctatctttccccacaggaactgggttttattttaggtgttgttttgcaacctctgtttttcagttgccagtttatctcagacattgtcctatgtcagtacaggccc

SEQ ID NO: 68743 - DNA, 893 bp, Homo sapiens
ccatctgcctggggccctgagtgatccaaggagccgaaacctcactggaggccctggagggacaagcagtatgaggtcaacctgggtctctgcagacccctcagacctgggggctgtttgttaccacagcagcacaaggtagcctctcctgcctcagaatgagcaaacacacctttctgaactcagccttgcaaactgtgataagaagcagaccaagtgctatgagataaagaaaaatcacactggggtgggggcaatttagaaagtgtgttgggaaaagatcacttaaagggggagttcgccagggagaagaaagaaggagagggagaatggctccaggcaggggagctgcgtgtgcttagtgtctgaatcaggaagcaggcggggagttggccagagtgcagagtgaggttagtggtgagaaatgaggccagggcaaagtggagagggggcagggagattgcagaggccgaagcaaagggttttccacccaagtgtgttaaatcggagagtcccctttaaaaaaacctttcccggctgctgtgtggaggacaggatggcaggaagccagaacagaagaccagctactgcgggagggaagatctgattgggatttgaataacatgcgggaagtactcaaggcagcgtcagagacagtgggtgctcagcggggcagaagccagacagtgccggggtgcagaagctaggggttcagggagctgggcaggaggcaggagcgcctctgggaagggggaaagcagagccagctgcccaccatgaccagtagcactcatcccttctcacggctgcctgagaagaggcccagacgcgtttcaggtgtggagcagaggcaggaagccacctccacaggtggctcaagctcaggcaggcct

SEQ ID NO: 68744 - DNA, 1604 bp, Homo sapiens
gctggcgtacaaagctgcttccattcactgagcactcagtaggcgccgggcacagcactaggtgcctatccggcgtagacatcgggcctgatcatacagctgagcttcagagacctcaagtccctgcccaggcccacacagcgctcagcggtgctaggatgcccacttgacagacagcgaaactgagacccagaggggtcaagtcaggggcagaagcagactctggaggcctccgggttctggaccttctctgccccattgtccctgattagcccgcaagcaagccacggcctaagccgaaggaagaactcgcctgcaggagcccccgttcgttcccagggtttggacgccccgggctgggccccgctaagcccctcgggccgcccaggcgccggacccccgtccccggagcccccgcgcgcgctcactttgggcttgtcgaaggcgggcgtctgggccatggtgccctcgtgcgccccggcgctgctccctccgccgccgctcggtgggtctctgccggctcggtggccgctcggctttccctggggccagcggtggccgcggccggccacgctcttcttaacgggccgggccccgcctcccgccccgcccgccgccgttcccggggcccgccctctcgccggagcccccgccccgcccgccggcctggatcgcgcatttcctggaattctggacccggcgtcctcgcccgccgacccgaaaactacggccccgcggcgcccgaccggacccacctgtgggcgcgcgctccagccgcctcgctgggcgctgccttccccccggctcctccagcaactttcaagcgtccccctgcagtctgggcgctgctgtgcgccaggcccaagctagaagcggggaccccgggagcatcgcaagcctcgagcggcgtgccttccaccggatagacggacgctcgtcgcagaaacacacaccataattgtatagttaaggaactttcgaggggggccagccgtggcctgcagaacctgcaggagttcatcaggggtgggtgggggtggagaggacattctacgtgagagactccagggagctgggagtgaaaggaggcgaggaaggctggagctcggagggagggagaacacagacagtcccctcctgggcattcacctttaagaaacccgcccaggcgcagccagagacctgtgcagaatgttcacaccagcgctattccgaataacaggaacattggaaacaccctcaaatgcccctccacgggcgagtgggcaaataaaccggaatattcacaccatgaaacgttagacagcagtgaaacggaatgaacttcagccagacaacaacagaaacaatgtctcagaaacaatgttgagtgaaaaaaactaagttgcggaaaactgcatacaatggtgcaacttttagaatgtgtaaaagcaaaaccaaaagtatgtatgtttagacacatgcatcggtggaaaaaatgtaaagcaagggaaagatgagcatagatacgagaagagtggttatctcaggtgaaagggaaggagccgggaggaggtaaggacggagggaaataacacgcgggtacaggttatttatttatttat

SEQ ID NO: 68745 - DNA, 1368 bp, Homo sapiens
ggatttgagagagcgttcctcatgtagcctagtgggcccctccacacacagaccatccaaggccatgagtggccttgaatgccagggtgaggaatctggccttaggtggtaggcactggggagccatggaaggttgcagagcagaggaaggatatgagtgtaattgtcaattaggcaagagttgaatgtcaaataagaggacagggccctacagcggggggccagagtggctcagataaaactcccctcatccagcaccacacagagagctggtgctcagccagtgtgatcacagaagcctctgctggggtgtctataagctccctggaagaagatatccaaatgctttgcatgtgtggctttgtgtatgtgtgtgtgtgggggggggaggggaggtgctgagtgtggatttgctcagcactctagtgtgcccagcccaacgtgggggaaaggtcaaggccctgtctggcttaggcagggagttctcagcattgcagtatgactgagcctctggctggaaagtaagggagccaagagaaaacaggtttagaagttggctaggcagaagtggacctatgaaattccagctgcaccagctgcttcttttgctaagctcccgtcatcctttctctctctccactgggtctttctgaatgtcaagaatcccagccactgtttagttagcacttgttttttgccacactctgtgaagcaccttcaagcccgatcaccggattattcctccaacaacgccgagagtgagaagaatggctattatttcgattttataggtgaggaagtagaaagcccagagaggtgaagttgcttacctgaggtcacataggagtcaatggtatacgtgagatcaaacccagactccagaggcagcccccctcagtcgccagccgtcctgcctcctctcctggtctaagctggggaggaaaaacccatcttggccagcagggggcggtgtgccctcaaggataagccctgcttcccagaactcagacagaatttgccagcaagacaacagcacgattctgaaatatctggctttgagccctcatttagtcccaactctggtggggcctggagaacggggagaggggtgagagaagtataaaatagccctcaaattggtgagccaatggttcacagaaaggaaagcgcagcggcattttaacatataaaaagattctcattttcactcctaggaagagaaacgtgttaaacccacaccacctgagcaggcactgttttgctatcaaactggcaaacttatgcaggtggggatatggagacacactccttcttacattgttggtgggattaaaacttggttttggccaggtgcgatagctcacacct

SEQ ID NO: 68746 - DNA, 957 bp, Homo sapiens
agtatgcatctttctgtgactgatttatttcacttagcataatgtcctcaagcttcatccctgttgtagcatgtatcagaattgccttccttttttaaggctgaaaatcttccattgtgtggatacactatattttgcttatccactaatctatcaatggacacttgagtgcctttcaccttttggctattgtgaataatctgctatgaacatggacacacgaatatcagaggcagccttttcaagcaaagggtttttggggaaaaagccactgtccaggactctaggcttggccactaacttgctgtgtagctgtgggcacattgcttcctgcatcgtgtatggcaattctaactctctccaccttcactgcctactcacagccgtgtgctggggaccagattagaccatggactatgaaactctcagcaaagaaaaagccacgaggggctgttattgttattactcagtggggtcagggcagtggcttcccaaaggcatgagtcactcatggtggaattccagacatcaggagggccgttctgggcagcagagcccagattccagacagagcagtgaccctgacccggagcccctaggggagccacaccctttctctttggccactggctgctgtgaggaaggagtcagtgaatgtcataatcatatgggcacttagggtgagagcctccagtcccactgcctcacgtaactatttaaggaggctcagaaagggtcatgcacttgcccagagtcacacagctagacagtggtggaagctggcctgggtcagatttggacatctacagaagcccttctcctccctgctcgcacccctcttagccccagcatgtgaggaaggcagctgtctccctgagctccgtccttctatgccttgggtttagccatgttgactgctgtaacaaataactccaaaacctcagtggctttgcatta

SEQ ID NO: 68747 - DNA, 1848 bp, Homo sapiens
aggattgaaaggattaaatgaacattgagggatgagcaatttctgttcttccctggctccagcattaccaaagcacacagtaagaggactgacatcggcctccgacccagtgaggattactttcggggtggagggggaactgctaaacctcgaatctccgggactggccctggcgcgtttccagtcccagcagaaagggcaatccccatccagaccacactcctagtcctccttattcccacacagcccgtatcttgaccacccccagctccgccctctctcctcccacctccttttcccgctcccccgccccatttccttcttctccgcccacctcctcctgggtccctcccccggccatccgccctgccccggcccctgcaaccctgcctttcgctcttcttcctcctcccttccgtctgcgcccctcccgtggggccgtggcaaccccgtgcctcgcttgcccaatgagaacacggtttggggcggggcgcggccaggaccggagcggaagtggcgatcggagcggaagtggagctaccgccaccgccgccgccgattccggagccggggtagtcgccgccgccgccgccgctgcagccactgcaggcaccgctgccgccgcctgagtagtgggcttaggaaggaagaggtcatctcgctcggagcttcgctcggaagggtctttgttccctgcagccctcccacggtgagtgcggcgcggggtccgaccggggcccccgggggcccaaactcgaagcccctctctggctgctgcgacgacggcggcccagtgggtgggccccgtggggtagcggcgcgctgcctctttcgctccgcgcggccgccggcggcgaggccagacctcgcagcggcccctccctgtttccggggccgggccctttacctcttggagaggctcgggccgcctgaggtcctgccggccgggcggggtgcaactccgtactgtgccgtaagggacagcggagccggggatcccggaccctccctcactatctgcttcgggccccacgcgacccctccctgcgtcttggtcggcaagaacgtccccttcagccctgtcacctctgctccgtgctttctggtttccagaaattaaaatttaatcaaacgcggatgagttttctagccccagtccccgtgtttggctcctcctggatgagtaaggggtttaaccttgggagacagcagtgggggaaccccctcccattttgcagtaaaaccatttcatcatccttcactggttatggagcctggcaggacccaagattccctaggaagggaattgggtttgaatcaagaaaatctgtttgttggagccggttactgagtcaggccggatccccaggaaaaaatatcagggggtgagaatcggagtattttctcacagtatttaccgtcatttaatgccagattcttttgtgtctttaccccaaattcccccatattgtgtgttagcacgtttttcggtctgaaatttgcccggtggcttcctggtcggggggtggggagcggagggaagaagaggtgggaaggtgagtgcatctttgccgcaaatggagaactcccatataatggggttttcagaggtggcagccttggtaagcaatttgccaacctttctgtaaaatacatgtttcttgtcgttgccttcattgcatttctctttggtaaggctagatagcatcaggtcctgattttgcttgccctgtgtgggagatggaatttggcaagatgatgctatgaacataaaatcagcctcgggaaccaaaagagaaaggtgaagcacttataagaatatgaaaattgtctgcatttctcattctg

SEQ ID NO: 68748 - DNA, 455 bp, Homo sapiens
cctgtaatcccaactgctggggaggctgaggcacgagaatcgcttgaatccgggaggcagaggttgcagtgagccgagactgcgccattgcactccagcccgggcaacagagcgagactccatctcaacacaaaacaaaacaacaaacaaaaaagaaacaacaacgaaaatagtggctttaacattctgatgtaagactccagaaactcacccaaaaaatggccggcgtccactagagggatcccttgcgccaggtcgcctgggtgaacctggtggttgcctgagtgggtggtttgctagggaaggggttgttccgccgggcctgttccccgccccttactgggctggattcctgggcacttttctgtttgttctgctttgctccacctcctgcctcttcccatcttcctccaagccctgtgaatgaagtgggactcggcctggaaaccgtgctg

SEQ ID NO: 68749 - DNA, 1185 bp, Homo sapiens
tatgctttgacccctgaaacacaccatgtttatatcgtcttggagggggggcctttctcattgcagttcacttcaggaccgaaaaccttgtgcgcttggcttctcatcatttagacatcacctcaaatatcacttctttacagatgttgcccttgatctcccactccagtcaactctatcacatcaccctatttgtcttcttcctaaccctgattatcccacaggtctcgtttacttactgactcgcttaagactcacgtcctccccaccgcccccacaagaatgcgctgtccttgagagaagggactttttgtgtcttgttacacaggcggtatataacagctactcaacaaatactaactgaaaaatgaattgctgcgggggaggagggtttagctttcttctcagggctcagaacgaggcctaaataacttaggatgggggccaacagggcagttaacaagcaggtggaaagaaagggccgaggaagtttctggtaggatgccggagtcggaaggggctggaagggtgggagggccgggcaggactgctggccgccgcgcgaggcccgggcggtggttgcgggagttggaggagcaggcccggaggtgagatgggggccggggtcgtaccttgcgcctgcagcacccgcagcgcgcggccgtagagcgcggaggcctcggcgtactggccgttgcggaaactctcattgccggcggcgcggagctcctccacagagtctgggaatttgggggccatcccgtggccaggccggcgagttgggagctccttccttcctcccccgtgtggtgcggcacaccttccgggcgcaagcgccggcggcgaatatctccgcccaacagcgaacccgcggcgagggggcggggcctgcgagacctggaggcccggagcgtcccgccctctgcgcgtgctcggtttggaacttaggctcccttgcacgcggggcggcagcatgctctgggctccctgagttgctagaacgccgtggatgacgcagggaaggaggctggccccgctatcagggagattatgtcctagtggggtccccacaggcaattaactgataagcaaacgaagactctcatttcatgtgattagtgctgtaaggaaaacaaaacaggataatgcaatggaaagtgaccacgtgtgggctattttaaataa

SEQ ID NO: 68750 - DNA, 1272 bp, Homo sapiens
cctatactctaagctatgtgaccttgggctagatacttcacctctctggccttatgaagtaggaataataataataccgtctaggttgttaggagtattaaatgaggtaaagcactgaaaacgtttagggactgtgttaaatcattaaataaataaaaacggggatgaccttatcggcttgacacaggggattaaatgagataatatatgaagacaagtacacggcaaatgcttaattaatgttgcttatttttatgtctgcaaactgacttaaaggggaggcctttaagaaagacagtggggcaatttgcgcgttgatgcattgtaggagaaaatgtgcagggggcccgttgggaccagagttcaaccaggtaagcggcagaaaaccacaaatacctccaggcgttcctggggcagcgccgcctccccaaaatcacgcaaaacttggtttgctaagaattgtcagctcttctaaaggaggcgcttcacgcatctcagtctgtgaaatgggacccaggacccaggtagaggtgcgttctcggcctggggaccgagtattttgtgcgctccggtaacgcaggaagacagcgccactgacactctagagaccagcgggcaccgcctggaggcgccttcaccacttggcggttccgggtccgcgccccaccgcgccacaagactcacgcccgaaccacgtgatcagggccgtggctccgccccgctcccgcgccgcgcgccgcttccggtaggggcggaaagcggaagtgtgggagggtctgcggggcgggctcaggaggtccgcgggaggatggagcagtgagcgggtctgggcggctgctggcagcgccatggagacggtacagctgaggaacccgccgcgccggtgaggggccactggctaagaggacgggcatggggtcaggggaagaaaaggcgggaactggttgaggggatacacctgtgtgggagtccccggagctaagcgacccagccgatggggcacctgctgagtgaggggggggacgtctggtgggtgagggtccggctgaggggagcatctgctaaggaggttagacttgggaccggttagagggagcactcgctgtggtgagactgtgctgaggaacgtggggacaagttagggagagtacctgctgaggccgggccactcgggggaacgctatccaagcagggactcacggaggtgggggcgaatgctgaagcagggtgagaatctgtgagggatctctttaagggggtggatcgagaact

SEQ ID NO: 68751 - DNA, 659 bp, Homo sapiens
ccgggttcaagcgattcttctgctgggattacagcatatgccaccatgcccagattatttttttgtatttgtagtagagacggggtttcaccatgtcagtcaggctggtcttgaactcctgacctcaggtgatccacccgcctcagcctcccacactgctgggattacaggcatgagccaccgctcctggcctctctttcttttttaaacaaagaactttgcacttggccagagaggaggagaaagcccattttctcccttcctaagctagatccaaataaaagaaagttcagttttcccccataactattcttgggtcatgaactttgatctggagtttgttttgtttcaggaatgtgtgcacccagcttgctgatccaacaaagtctattgcttaccagtctagcttgatgaagccttttggccagaagtcaatttgttttggatcagagaaatttcctgacaaggtatatttgttttctagtgacagaaaggcaaaggaacaagtcctagttgttgttgttgttgttgaatactaaatttaagatatgtcagcttgctttcaatgagccttgggcttctgttattgcttgagcatttggaactcgagcttccagagaaatttgaggtcctcgcttgttctctgccttcaagaaaca

SEQ ID NO: 68752 - DNA, 1433 bp, Homo sapiens
gacacaaggaagcagagtcagaaactaatgatttgagagtcgcagacaggtgaagaagaaggcggagtatgagagagagagagagagagagagagagagagagagagtgggacctgggctgacagcatggctgcatagaggaagcatttccagaagctcaaactgtcacacaaaccttggagctcagccagacatgtattccaccctcagggaggtctcccgaaactaagctgagggatcagagcctacagaaggggacacacccacaccacaaggagaccccacctctgaccctgcagcccagattagaccagagtgactccaacttacactttccagagccttccacagcccaaggtgccagagttcccagggcaagcagcaccaggaaggggaagaggccgctggacttcatggtgaaggcaggagtgactctgatggccaatgccaaacctcactatttattctttcaccagtgggtgtggccccaccagaattctttcggcctctcccagctactattgcataagcaggaaacgtagccagagaccagaaatcctgacaccaaggagattgtttatctttcctatgccaggtaaggctatgaggccaacacagcaactatcagaaaagaaagggaagagattggcctgggaagttggttgattaaagaggccatctcagtgtccatctgagccctaaacatcacaagatcccaggccattagccttataggtggagagagggaagaagtggtcaattgcaaaggtgctacccggacctggaactaaaaccagacacagactccctgctgagactttgtgcaatacattctattctcacattgctaattctgattctcacattactggactctcaggcattgtgaaactctgctgattactcaatgcagtttctttctcaaaagttcagctcgttcaaccaactgatacttagttccctgaaatatttacaccgttatatccccagtgcctgttctgtgcctgacacaggaaaagcactcacaaatgaaagctgaagaagagctccgctctccacaaatctctctggagctcagttgtctcagctgtgaaatgaaatgatactaacaagtcagcccttctcagagggttatgaaattaagggcatgaagggactctgaatgaaaagaacaaatgaatagtatcccttcccactaaagagaattgaaatgaatctgagataaagggggaaagcagctcatcagtcactgtaatctacatttagctgtgagataatttgagatcttagaggattgcttcctaaaattccccaaaatcccttacagatctcacatgacagcaaaaaattaaacccattctatttgctacccagtctgcataggttgcttctaattataaagagagcgaccattatctctaaaattcagccca

SEQ ID NO: 68753 - DNA, 807 bp, Homo sapiens
cacctcaaaaaattaaaaaacaaaaagtggaccaatagtgtccaaaatccattttgcatccactgcccaattctcagaaatattatatattatcagaaataaccagagttggctctccagacagataaagccctagtcgaggttgaccactgatggggctatgtctgccagcatttaggatggcttccaatgagtcttgtatccaggtgctcctgcccctgggtggtctcctgtcacaatgaatagggctgacccatgtgacccatgcaatattatggaagagatagtgggtgacttccaagctaagtcataaaagtcactgtagcttccacttggtggctctcttggatcgcttgttctgagagaaaccagctgccgcatcacgaggactgtcaatcagctctatgtgggtccacgcaatgaggaactgaggcctcctgccaaaatagccagcaccaagttgtcagaaatgtaactgagccatcttggaagtggatcctccagcccagtcaagctttcagatgacagcaagacctggccaacgtcgactgcaacctcacaagatggagccagaatcgcccagctaatgctcctgacttctgactcacagaaacaatgtgagataatatttatgttgttataagcccctaagtttgggggtaattttaaatatcaatagataatatgggggtcttctttttttttttttctttttgagatggagtctcgctctgtcgcccaggttggagtgcagtggcacgatctcggctcactgcaagctccgcctccccgcttcacgccattctc

SEQ ID NO: 68754 - DNA, 2012 bp, Homo sapiens
tctaacagatgtgagggccttctacaagacacaagttaggagaacagagacccactcaacctcatgggactcagaaaaacagtgtggcaaagtctcaggagagatttaagctgccacgagatttaagaccagaatcactggttcagagggggtttgcaggggcatgaacagcccccagtgagggagccttgggtgatataaaccccttgataggcagtgcagttgttagcactctagagcccgactgccggggttcaaatctcacctctacaactggtaagctgtgtagctttgagcaaggtatttaacctcttagatgcagtttccctatctgtcaaatggggttactaatagcacctactctgtggagatctgacaattaaatgggatctggtataaagccctaagaatgggttcctggccacatggtgtgtatgggagggtttgctccaactaccaccaattcctgtttgcgtcctttccccaaccccagcaaagtactgggcaacatggtgccaaaggaagatcaccaatgtccaaggacctgaaattaaggttcgactctccagacacactaggggcaggttgccctcttggtaacaaggatcttacccacctcacagggttgttatagtggtcaagaaagatggcccatgctatttccggagactgccagccagcctggctgcagcagtggcctgagtgaagcaggcggagacagtggtgcggagagcccacatctagatgggtgcctgccgctcagcagctctcttgttgccatgcaggctgacagttgccaattttttttatttctttttcccaagaaaagtgagaaatctggatttttatgagaaacctcctgatttctatggatggcaactgacgcaaagatttttgtgtttgctatttaaacacagtgccacctaaacaaaaccttgaagtaggggtgatatgctgcataggccatcagggtgcatgttctgaagtcttccctcttctctaggccccttcctgccttcttacctctctgcccccaccctctgcccacccccggcatgtctggcaccccgtaggggatttggtccggggagtttcttcatgctccactgagatcaaggggatacagagcccaaaaaggatgacttgttatgaacgaaaatgacagaggcaagcagtttagaaagtaccaggttttattatctttttatcaaaaaaaatcagtaacagacaacagtgtgagaggtgcctacagaggaggtgctcactccaacacagcccaaggggaagggcactgggggcagaagaggacccagccagctgggaccctgggttgcagtggtgacgggagctaatggccactggtgcagcaagggagggtggttcccctcaccgcagccactggggtcaggaggagacacgacctgcccaggctaagccaccaggcctcccctctcaggagagggagggtcccagacaacaggccccagctggggcctcatcagccctcccccattcccccccccctacccagggagacaagggtcgtcccagcacagctgaggctgtgactcgttaagccagtttagttctctagaatagtgctgtccaacagatggacatgctctcgctgtcagtacagtagccatgaactacatacagtgacgcctctagaaacgtggttagtgcaactgaggaaggaatttttaatcttatgtgattttaattggcttaactttaaacagccgcatgtggttactgtattggatagcacagccctagagcctgaagaaagcaaaccaaagaacaccagctgggtcccaaacagaaggcagaaagggtagaaccatccacctcaactattccagccccatcagaaggcaccaggaacagggcaagagaaaaaggcaaaaacccacccagccacatgaaaattcactcactcaaccacccagcaacatcaaactggaaacaccacactatttcctgaaaaaaatatatttatctatttttct

SEQ ID NO: 68755 - DNA, 2503 bp, Homo sapiens
aagtgcttagaacaatgcctagtgcatagcatattctcaagattcattaactgtaagggtttaaggtttatatctgtgtcccgaaccccctgaatcaggtgtgcacaacaggaggtgcttaataaatgatactttcaggctccgagaggagaacctgcctagtgttgggcagagatgggcttctaacagtgagtgggtctggcctgtccactctgccaggtggcctgaatgactcattcctgtttgctaggggcagggatgcttcatagaatcccttctgtggcagattgagttccctaattcggtcttactcgggctaagaagattaattttccatccctgcacacactacaaatctatgtacacaatggggacagagtggcacagaggagtcaagcaaggttctttcttgggtaaaatcctatgaaaaagcaacaaaaaagtacccccaggaggtgccagagcaagcacatggaatatcaggcatcaaccccattcttgtctctatcacctttccctctgatgaccccagttcctccacgaggccctgggtctgcgctgggatgccccacagggtcaagtttcaagcacaggctcagaagctgactgtggtcctcagtccaaatgccaggtctgccacttccagctttgtgacttcggataagttctttagactgagttttgtgttgtacggactcaatcaggggcacaggaatcatacagcatacagcaagcatttaataaggctcctgggtgctgattaaagcttctggaatgggggattccaccacaccagctaacaatataacttttcacatgaggctcttaggcttgtataattctcaaatggaagattaaagagataacctggcttcagttcttttcttactatgtggcctaaagcctgggcctcagtctccccatgtataagaagcaggtgcttagattaatcagtggttttcaaatttttctttagaagcaatagcacctttagttaattagagcaaaaccttatgcaaatccaaagtcttatgcaaatctttttacttctgaaagaaaagtaaaaagaactttggctcagataccaggaagccagggtcagggctgaggtgggcccagtcatcaggggctgtgctcccaggaaccctctttacaagaggcaggtgagaccttccatctgtcctggatgaagccaggctctgtccctatagctcaagcctccttggagctgctggctctgttgattcccaggagacaggagttacccagcatgggcccagggtgcccacttgccaggccggttcatccaggctggccctcggccatgaccttggggagttccctccatcccttttgtcaacacctgggacaaagcattcctcaccgcacattccagtaaagaactctcaactgaggccaaatcggaatagccctttatagtgtgcaaagttatttcatattttatttttcatggactcattatatcaaccccagaaggtatcactgtacccattttacagataaggaaactgaggctcatcaagttcgaaagcttctcagccaaggtcacaaggctgccaagtgatagagtagggggaggggaagctaacccaattcgaaggagcctccagacttacaagggaaattaacttttaatgattaactcccagatgccaaacttatacagtgaaagtcctttgcaaaataaatgagaaagacttaaggcagaagaatgactcaatgcctattttccagaagactttgataggtgctttttcctctccctccaccaggctgcacagtcagagccaccccataaggaaggtgtagtctttcaatgttctagggcaacctgaataggcaaaaggaaggggcaccaaggagcctcatggctggaggcatccctgcctgcaggtgctctcccccgctgagccccattccaccttcaaggcatcttataagcagcatggggacttacctgccaggacctccgttctctcaaagatgttgctgccctgcacagtgctggacattgacaccttgttggacacatcctcactctcttcaacgggtgagattctcttggggataacctcattctcctctagtttcttgggttcggtggggacttggctcccagaccctgccctctcagggatatggttatctagaggcacctggatgggcggaaaggagaagagacactcagcgtattttggaagagactcagggcaggggacagggacattcagccaggcagagaatctggttctgccatattcagctgaaccatatggtcctggagcaggaattggcaacactgtctccacaattatgctgccaaaatccttatccccaacttttttagtatatctgtcccaaatgaaaaatgaatgcacccaagggaacagggaagcaggtgctctcctgcactgctggccactggttattctagagcaaccactctggaagcaatttggcaaaaccttagacatcgcttgcc

SEQ ID NO: 68756 - DNA, 13842 bp, Homo sapiens
ccaagtagctgggactcctacaggtgcatgccaccacatccagctaatttttgtgtttttgtagagacaagttctcaccatgtggcccaggctggaacttttcctttcaaaaaaaggaaaacactctatgggtcctccttccccactcccaccctgtcctgccacccatcctaccctcaccccacccccaccatgccctgcagaaaagagaagagcttatgaggacacgttcaggctggagctcagaaaacccagagctaccaatgacttcaaagcagcaaacagcttgtccccaggggctctcagggatggaataggttaatccattacttttgtttcccctttttttgagaaggaagaagggcactctaggaaaagtcccacaaaaatccaagtctcaaggcatggtcaccctcctggctggtgaagccaccactccctccagctttgtgcctacgcctgcccagcacaccttccgtacccagatctccagagccagacagctcaaagtcatcagattcctgcccgggccccactacatcctcatcgtctggtagggctccggagaagtatcggccttctaggaggtcctgggggtcgatgacctcagtctctcggatctaagataaagaaaggagacacatcagccaacatccccagtgctccatgacagctgatgcccaaaagctagtgaagtgggcattcagaaactagaaagagaccaggccagggcctggagacctgcgtcctggatcccactctacctctaactcaccgcgtgtccttaggcaagtctctttccattctgggcaaataaaaatagtacatgaggctgggcacagtggctcacacctgtaatcccaacactttgggaggcggaggcaggcagatcacttgaggtcaggagttcaagaccagcctggccaacatggtgaaaccccgtctctactaaaaatacaaaaatcagctgggcgtggtggcttacgcctgtagtcccagctactcgggaggctgagacaggagaattgcttgaacccgggaggcggaggttgcaataagccaggatcacgccgttgcactctagcctgagctacagagtgggacccccgtctcaaaaaaaataaaaacagtaaatgaggtaataatcaaattattaatatggctagatatcctttaccgagcacttgctatgtgctgggccctgttttaataactctggaggcatgttattcacttctttttacagccgagggagtcattttcttttggtgacacagctggcagatggaagagcgaggattgcatacgcagggctgcctgacttcagagccaggagtctccatgcacagggccctgggatgctacactccagggctctgtgatgcagtggcagctgattcacacaggacagggagtgggctcctggttctggtcttgcccagtccaggatacttttcccagctgagtcagtctgggccgggacagacagggctgcctcacgcacaccctaagacagcctcaggtcagggcgctgcccagacctgatgactcaggagtgtactcctggattcagtcttgccttccaaacatctcccacagatctactctgctgccagcaccatgcagacaccgagaggcacaatccctaccctcacagaccatccactccagtacccataatcatcactcagccactaccctgtggagacacagctgatcaggacagagtctcaggtccactcccaccaaaccgcttgccaaaagaaagtgtcaaaggtcccgggcagccctacagtacatcagttaccctgctcccatcctgtagctccaccgagtgggaacaatgtaccctcaagagcacaggaaacatttggatgcccatcacccttcctccagcttctgggctcaggcttctgtttgcccagagaacagcagctctgagcaaagttcattattctactaattaattcaaacactaaagtgcctagtatttgccaggagagttggggtttttcattaagttcaatacaccatgcccctcccgctgaaagacattcccatcttctccagacgccataactgcaggagctgggggtctgcttagaatcacagaatgccaggacccaaggagctcctgtcctcccgtttcacacaacttgaatctgagcccggaacagggcagggacttgcccaaggtcacacagagcgttcgctacataactcaggatagaaagaggtcaggtctctgtttcggacaccccaggcagtccttcactcagctgagactgccattgacaaaggagggtgtctgagaaggaacatctgtccctaagataaggttattatcattgcaggagaggcccaggaaagctgcttcagagccactcctgtactctccccactgggcttctggggagaggcaggtggaacctgaccctcatgcaccctcttccacccccacagagggagaatgctggattcccggaagggagcggggtcaggccacaaggaaggcagtggccaggaatcactctctcccggggagtggggagaatgctgaacgcttggcacccgtgggggtggaaagccagagaggttaagtgctgctcagagatgacttcatgactcgggaatcaggagctgccgggctgctggtgctggaattcaagcccccgcacatagcccgtgcctgtggctttggtttggcagagcaggaggaaggctcctcatggctgcccaagtgcctatacctaagggcagggtccctgtgctcctacctccatctcctgtggcaaatcccccaagaacccaagtgacaggccttaaccaagcacacagcctgtctaggtccttttaatagtccctttttgcagagatggaaacaagggctcagaaaagtaaagtcacttgtccaaggccacacaagcaggaagtagccacactgggccagaacccaggcttcactgacctggacatttaaccacaaacacataaacacacgcatgaacacatatgtacacggggtcaccagcctgccccaggctccaagggagccctgttaagtaggggggtcaatctagccgggagaaagaaagaatggtacactttggccagctgttgaccaggtcaaagtcctcaacaggggctgtagttccatcaggagacttgtctcaggctgagagaccttttcccacccctcactgcccccaggagccatggaaggttgtttatgcatccagcctctctttcagtatgtgaaagtgctaagaggtatttcaaaacaacccatgggattagcatgcccactggctgttaggaattacctccgttttacattagagaaatgaaggctatgagcgaaagtggggcgtgaagatcttgcagccaagtcagcagcaaaaccaaggctgaaaccaagatttattcccagttcagccctctttgtgggcacctgttcatccttaacccttcatttttatactcagtttccaaaaaagaaactagtctagtctgaagtcaccccggggctccgcggcacggcctggattcgatcctatttcaaagctctgaaaagatggagtcttcaaaggctgcatttagatgagcccaggatttccctcctacagcaagtcaaggggctgggaagaaacttcttccagctcccagtggtgataggaggacacagggaattaaatctctccttgagctctggaagccccctctctgccctgttttggtcccttctccacccatgacctctgacaagagggaaggcaactccaaagtggataagagccatttaggactaggccagcaagacgggaccaagccccgtgggattgtgggcaatcactcttttttgtgtaaaggttgggaaggcaccaacggtcctcctctcctccgccctcttttcagataaagcccattgagtctggggtgactttgaagaaccaggccacccagcagccaggcccagccctgaccagagatggaccccgccctgctcctggctaagaatgtggtctgttctcctcagctcaccccacctttgcccaggcatgtgtgttcgtgtgtatacatgcacaggcaccctctctgggctctcaagtctccttgtatctttgtccctttcatgaacacacaacagaaattaccaactaagtaagacagtggtggctaggcacagtggcttaatcccaacattttgggaggccaaggtgggaggctcacttgagcccaagagtttgagatcagcctgggcaacatggtgaaaccccatctctacaaaaattagccaaatgtggttgtgcacgcctgtggtcccagctactcgggaggctgaagtgggaggatcacttgagcccaggaggtcgaggttgcagtgagctacgatcgtgccactgcactccagcctgggtgacagaggaagaccctgtctccaaaaaataaaaaatagggcaatgggcctaggtcccacagactctgctggccctgtggctggtggggatctgggattagtgcctgggggtttagagatactacattcttccccagactgttggggagaaagaagggaggggaagtgctcttttgttctacagaaactaacacctgccaacagaaggtatctgattttataacctagcaaacagacaagacaagggattttgccaaggtcatccaagcagctggcagcggagatggacttagaacctaggtatcctggctcccagactggaattatcttctctccccttccagggtgttggctgcccctaagggtctcagcaaatccacaggcagcagctgtcattacagttatactccccatctagtcttttggctataggcatgaagctacgaaaaggtcctatcccaaccctatccccaaatcctatggcttctatcaccccaggaaaagcatgagtgactaaaaggagtatccactacatgccaagcaccatgctgggtactttgtttatacaagttcatttaaatggcaaaacagccttgcaaggtgctctacccattttgcagatgagaagactgaggttcagctgagtcacttatccaacgtcatgcaactagaaagctagagctgggattcaaatccagatcttcctcaagaacacgtcccaaccacaactaggcttctcactgccacccactcttcacttctctccagcctaacccgccagtccacaacacactggctgggccagggctccagggcaaccctgtccctgcctaggagtaaacaaaggtgaaagtgatatcacttaaacaaaggaacagaaacttggctggggcaccagagaggagttcagggtcagggcttggataactgtgaactaatgagagcctctcccgacctggctcctccccaggggaggtagggtcggggacacacttgacccttctttcaggaggcaagaccagaagggtaataactgggcaagccaaatttagtggggagaggggatggtgagtacctggggctccaacacctggacccaccagaatgatttctagcaggagacccccagcagcgtacactactcgtaactgttcttccccaccccacccacttcttaagggccagacattccccagaatggctaaaacctggggcccacaactgtgactctaccacccagagtggttgtgcatcaaggcagattcacaagtgtgagttctgccacttcctaactatatgagcttgggagtttatttcatctctgaaatcctcagtttcctcttttgtgactagggctggtagcaccttgcagggtgatgaggattaagaggaatgcatttgtgtgtgcaagggacccagcacgtgatcaatgaatagtggctgtgattaacccctacctgccttcctcctggccagtgggatcagtgctcaaaggatcagaggcctgggaaaacttgcagaggcagttctgttgctggaaggaagctagcctggggacagggagatggtgctttgcaaactgtaaaggaatataatctataataggttatcattttgcttctgagcccagagacttttcaacaaccaatcaggtcccttcagactgtgaaaaaaagatacagagatagtcagagacctgcccaaggtcacacagctttgaccacctgtcctaagcagacagaggtaaagaccatttttattttccccgaaggtgcaaatgacagtgaccagaaacacctgaaattctacttggggacctgggtccccagggacaaaataaataaataaaaatctagaaggtaaaaagaaactacacaccaatccatggtctggtgctctggtgcctgaatggttaaaccaggtctgggggtgggggtggagtgagggttcaaatgtcgccttcaaggtcgggttactctgaacacaatcactcaggagagagccaggcctggcactgcctgcaaccagcttttcaccaagcctcagggcagcccattcccacagcaagaactccaggatcctagggtgccagctagaaatgggggaagggttcaggagcctctggatgtctccctgccaggagctgacccagcacccttgttactaactccctggatgatcgtggacaattcccttctctgagcctcagttttccaatctgtaaaagacaggtctcaaagagacaagcctccctctgtcccagcccagtaaccaagctgggcattgctccgattaccggtggagacagccaggagggggctggctccctcagggcctcagagacagaggtgcattgaagttggagcttgtaatctaggcagcagatccgaaatccctgctggatccgagggctagggaggctctcgggatgtaaacaaacctcctgtgttctcagagcagagtagagagcccacgctgcagccttatctcagctgattagatcagccctgggtgctggcttcctgcctcttcccagcctccctcaccgacccccaaggaagccatcctccagaccaggtcagtctgtcccacagacggctccggcagggcttctccaaggcaaggagtatccccactctgggtagccgggccagccatgtgccacatctgcccccacgcccagaggctagagtgacaccgccagtccccgcaggcctggccactgactgctgggcttcaccaagtcactgtttccacacataccagcctctccctgcctcccctttccattaccccaggtgtcacctgaccagcagcctcttctactgtgccagagaaaactggagcagccgagctcccgggcctggaggacagggggaggggtgagatgcagcctgaaggggtgggggccgctgaataggaaggtctgggctgaaggtgggggttgggggaagcaggaggcaagaacaaggctgggaagtgggggagggaggaaggatggctgtagaaaggtcaaagccagaaagaactgctgagatcagagtgaccttttggggagtactgcagccccctgaaaaggataaaaaggtctaaaccccaataactgtaactcttagtttacattttcaacatatgcacagacaccacctccccaaagccaaactctggccgggttaagaaccctcgtctaggtgctaataaagccagaactttacaagtttgccaaacagcgatgatgacctttgagtgccacaggtgttttatagaggacactggagttcacatcaacaaagtgacgtattaactgtgtgtgtccctgggtgagcagcagagctaggacgggggctggagttttctgtaccctctttttcagtcacccagccttcagcagatgggaccagagaggccccagtgagatgcaagaatgtgcccaaggtcaccactgtgttagttaatgacaaacaagcccaagaagtcaggcttattcttctaaggttaaatgagaccccaactgttgacatatgtgttctctctcctccctctctagggcaccatgcagtgaaaacatacgagaaactggcttttcagaacactgtaccttttctgtccaccaacaccccacccctcaaagtgctatttgcaatcactcagcctccttaagggtagaaactctgcccctccagcacaggagggtgaccccaggtcctggacagtgtccagagtggtctgatacccttggcaaaccccctgccccctctccctccaggctgcaaactgttcagcatgaggctccagcaaatcccagcaggagaggtggggctgcccagaactggttcttgtttaaacataaacccattcgataattagcaaacagcccacttctaagataaacaaataggagatttggactccaaaagccccaccctagatttctcccttcccacctcccagctgtgggggtagataagggggataagggggatggagaaagctttccaggagacctgggctcagaatcttcagagataggaccccctggcatgaaggtggcctgggcaaggaagggaactgtcactaagtaacacctcctccctaccaggcatggtactaggtgcctttatttacagccctgtcgtctcctttaagcttcgccacaccggtatcatgatcttcttaacagaccaggaggctggggctcagaggtggagtagcatgactgaattcatgtagccagtaagaggtggacttcgcacgtctggagttaagtctgtgtaacaccaagccaatgtttcaatgccctctggccagccccaggaagcaaagaggagtcctcacaaacatcagaaaatcctggggtcacaccaaacctgaacagtaccagcttttgctctctgaaaaaatgcaggccagttgcagcctcagttttgccttaaagaggaaaaaagtactacctgctctgcagaggtctaaagcccaattttgaggactggctgcacaatgtacaatgtcaaagtctacatgcaggcaaggggctgtgaaagtgcgggacctagtacaaacatgtcctgtatgtcccctcgagccccggacactgaaacagtgactcccaaaggacaaggtaaaactctgagctcattccaacacccccaccacagagctgtcctattagccaagagtttgaaaggaaatgggtgactcaggcaggctacgctagcatgcagtgactcacagcgctcggtccagccccttaccccaattttaagcattcatttggaaatcacactcgcctgtccagtccgggaggttgaaggacagctaggagccaacttctcccaacagggagatggggctgggagcccagcctggcttccccagctcctcattcaggcaggctcagcactccaagtccttggaaaagccctctgtttctaggagctggggatggcaggagctgaatgtccccccgccaccccaacttctcttctgagactgggatttgtttagactcttcaccaaggaggccagcaaagggcccctcccctcatcaatgggctctctgggcaggaaggacccttggaaggcaatggtccagcctccttattttagagttggggacactgagacccagagacagggcatgtttgctcaaggtcacccagcaacgcagaagtaggacctaaggtatctaccttcaaacccagcaaatttcctcatctggaatattctgaggacactcaaaccagacaccttgccctatcagaaggacctggttctgaccttaggaagccactgcattgttccgagcatcaatttcctgtaaaaatagagaaaatggtacctcgcagtactgggagatactcatactagcaataaataacagtaatgaaccatttagaataaagttacatgcacgaatttattcattcatacaagcatttcctgagtacaaactaggggacaggtatttcacaaaaacaaatagagcagagttcctgccctcagtgtgcggggggagagagggagggattcagcatttggtggagtatgttaattccctcaagttaattccttcaagagagagacctcttttgaatagtaggtacttaagttattaatcaaattgagagatggaaaggactctggaggctaccctgttcaaacctttcattttaaggtgggggatgtcagcccagcggggaaagaggcctccccccaacctcatggaaccctccaaatcatggcccaaatattttcgtgggtgtttgataactccctgggctcaagaagtcccaagagctctcactgttcactcaagggtcctagaagcccctaggcttccgcccccacccctactcccatgtaatcaagaagaggacgctgtagaagaccagaaatgtccttaagctaaagtacacttgataggtgataggtgggggacacttccccacaaccgcctgggcccggggccaagtcagtaggctgtgcccctgggtaggaacacctttgggtggaggggactcccaaaacaaggctgcctttaattggcctgagagggagtggcaggaaggcagatcagggaatgctcccagctggacaggaagaactggtttagtatagcaagcccagccaaacagaggagaggacagctgggtactgagcctgggttcccttccaaaatatgggggtggtaaggggaatgatggaacagtcgggggaacaccacccacaatgggagggctactagtcagagatcctggggtcctggatgccctctactaacccaaagtagtaccattttacctctcacatttgggaagtgggcataatagaatccccatgtgacaggtctttttgtgaggacaaaatgcaccagatctgtcatataaaaagtactctatcactcctaactgctattagcaaagtccttctccctgggcctcacttttctctacctgcaaaaagaaaaggacacgctggatcatctcttcagtccgagccaaccgtgactatgtctgatttttccaaccacaatctagaaaagagggaggggacaggccaaaggggaagccctgtgccccagttacaggcaggaggtctgtgacattagccaggaaggggagagctgaggtcaggatgagacttgacacctatctcaggaagcagctgcccagggctgatgtctcctgcagctgatgggtcacccaggcaggactgacacagtccccttcccccaaactacatccttcagaatgcccccaggacacagctgactgctcagcaccctgaagcacctgaaggctcagcagcccctgggaggaaactggcatgtgactgggcacacggtgacctcagcaacctcctgggtcctttcctctttttccctgtactgcctaggtggtatcccttcggatgcttccccagttgcttgacccgacacatccttcagggcctagtttagagcactgtgctagaggcagaaggcttgggtcctcagccactaacattttaggcaaggtagcctttggtttaggttaagtcatcacctcactctggccttgtttccttccacctcagaattcctttgccttccagcctaaaatctcaacctattctaaacccgtctttagttaccaacgatgggacacctggagtagcacaaagagtagaagttaagctaaagcagaaacttgaaagcctggctgcctaaatttcaatctgactcacccatttattgtgtattaactgtgtgaccctgggcaagttacttaacctctctagcctcaggaccagtttaagaacagtacacagtaagattgttgttggaattaagctcctggatatacccattagaaagttattagagcaatgtctggccccccgacaaaggcgctccacgtttgcaatcatcatggcatgcctggaattgtgctggaagtattgcctagggtctcattcattcctcaagaagagcctgcaggcagaatcaaccttccgctaagtaaattcagaggaacaggagccccaaggctttcaaagaaattaacattaatggttaaactgcaaggactcactcgctctgaaaactggggctaaagggcacaaagggggcacaaagctcaggctgtgggggacagattgccttcaccagtaattcccatgccccccaacttcccagatgagattgcccccctcctcctaagccggctgcgggcatggatagagcttctgctggcccagggacagctatgacggaggccagtggacagtgagaaggaaaggtttccctgggctgattgaggccttctctcccccctacccccttcacctcactcaaggtggatgcttcaattttcttatctgcaattgagaaaaaatgaacacacttcttgcagaaagcagaggctcagctcctggctaagtgttgagtctaaaccattcctctcctctgtcctcgaaaagagcagagtccccaactttctagaaaccctaacgcagtgtcccctcttgccccattccctcagacccttggtgcagtattgggaagagattcagaagggcaggactttgccctaagtcacaagtcaatgacagagctggggccagaactgaggttagggctcagttctccttggtgtgtgaaagagggcctcgcacaaccctaaaaccctcccccttccgagtacacgcagccccccgacccccagggccatctcggatcctaaagctgtctgctctgggcgccccgagagcgaggaggggattcagcgctccaagcctgccccagggtcaccagggaagggacgagggtgtgggagttgaagagttgacaccggcttagtcactaacgagcccgtagcccgcggcggggctgaggcccggggaggcgggaagagcaacaggcgaggggcgcacggcgcgtgaagccatcccggaggctggcccgtgaccccggagcaaagtttccaacaaagtttcccgggcctcggtgtccggttgggggtagcgtacccccgatctgcccccccccatcccacgctccgacgaacaaaggaggcaccggcctgcgcccccgcttcgcccccagcccgggaacctccaagcacccaccgactcggcgactccgcctacgaagaacagcagcagcgcgaacagacgggcgggggccatggcaccgcggactggagaaggcgcgcaggctgcggcgagtggccccgggcgggcgcgccacccatcttataggcggcctaccggccccgccccggcccgcccccgccccgccgcccgcaccccgcccggaattccccagtggaagcgaggcctgcggggcactgcgcccgcccgcggagttggaaaccccaagggacccgccctgcccgagcccgccggctcctactcaacccctagtcctaccctccgggaggtccaactccctttatttatttgacccactgccaggcaggtccccagagatcactgcggctaaccccattttatagttggggaaactaaggcccagggacgggaaggacttccctagggtgttgagtttagaccagccttcataccgggtgtgctcccctctgaagacacagaacttcccaaatgggatgtgaaccgtgttaagacaggggacagcaaactattctgtaaagggctaaatattttaggttttgcgggccatacgatccctgtggcaactattcaaactcgagcgtcgtagctcaaaagcagccataaatactaaaggaatgagggcagctaggtcctaataaaacattatttatagacaccgacatttgaatttaatataattttcatgtgtcacgaaatattattattcttttgactttattcccaaccatttaaacatgcaaaaatcggctgggctctatggctcacgcctgtaatcccagcactttgggagg

SEQ ID NO: 68757 - DNA, 904 bp, Homo sapiens
cacacggtgaatcagcatccaccacaggcattttgaagaattctaaaaataacacctccaattactctttccacttgctttgctttatttttttgtcgtaacatttcccttacctgccatcacgcacttattcttttacttgtttattttctgttttctctgccacatgtaagtttcatgagggcaagaacattgttgtgttcacaactgcatcccttgcaccttgtccaaggtctggcagaggtttacattcagtaaatacttgtcgcatggataactggatgaatgccatttggacattttcccttagaggctcagatgtagcaattcactcacttggtcatttatccaaaaaacatctgatgaatatcttgtatgtgagaagctttttgataaatcctggtgaacaagacctgtccgtgttcttaagcagctccctgattagcggacaatagctgccagctatacagtagactgaggatctactatatgccaagctgtgggctggcaactttatatgcatcttctctgtcttagctcagttcttgcaattgcgaggaaacatgcctcactcaggactccttaagaaaaggcttaggagttattaggaggaccgggagggctaaaggttaaaactgaaagggaaacatcaaggactgagatgatgccacagactggctgactcatctcttgctctttaagcctgcttattctttctttaagagtgtctcttctttttcctggatgtgtgcctctctctcttttactgacttactggttctctcttctagtctaaattttgggaggggaccacaagactcattggcttggccaatggccttccttattccttaagtaagcgcctgcagcccagaccactttttggattactatttggcctaga

SEQ ID NO: 68758 - DNA, 6785 bp, Homo sapiens
accacccatggatgctgagggatggctgtactcagaggtccttccacccactgtcatgcctggcatcatccaccctgcatagatagagggtttgcagaaaacccctgatcattagacacagaacacagaaaaccagtttcctgactccctctggtgtgaaggaaagaacagggaggttggggtggaaagttagagtggaaagacagacaccccagatgtttcttaacttttgattattccagctgacaagacatgccacacctcaatgtgtactgagtgtgagtcacttccttctctaagcctcaatttccttacctgtaacatgtggacaatgtttatacctacatccctggggctgttgcaacaataagatgaggtcaggtagatgaaagctgtatgtcactgtaatgtccagtgcctttttttttttttgagacagagtctcactctgtcacccaggctggagtgcagtggtacaatctcagctcactgcaacctctgcctcgcaggttcaagcaattctcctgcctcagcctcccaagtagctgggattacaggcatgcaccaccactcctggctaatttttgtattttttgtacagacagggtttctccatgttggccaggctggccgccaactcctgattgcaggtggatccacccacctcagcctcccaaagtgttggaattacaggcatgaaccaccttgcctggccttcagtgcgctttttgttacacactgagaaggaatagtgtgtggagtcaaactggcctgggttggagttcagctctaccactcactggcagcatggctctgggtaaatgtcccttctctgagcctcaggatctgcatgtgttcagtggggctattaatagttctcaactcacaggcttgttttagaaattaaataaggattaaattatataagtgcctgtcatacagtagatgctcagcaaatattcctccccaaacacagacacaaacagcacttaaagcaacctgggtaacaaaggggttttcggtctggaggagaaaccaggcagctaatgagctctctctccagttttccttctaagagaggaactcactggccagagcccaggatggtcaccgatgtagaggacaggcagccaactccaagcctcccacgtggggtttccaaaaacctgtgagcacagagttgcataacgtgtccctgagacacgtgtttctactgaagtgtcttcatcaaatattccctgaaaggaaacatgtgagcagggcagtagggcagcctagcgggggaggaagggagagggggaggaagggagagagggagggatctagagaacacgacagtaggggtgagaggaggaagagaaggtatcacatttaatgtgctcttactatgggccagccaccgggcttgacttgtctgatacattgttagatccttgccataaatctgagatcaggcatttccgttcccacattccagaggaagaaataataacaatcatattaacattgctgaggttaacatagtgcccactgcatatcaggcagtggactaagcacacatttgaccctcaggacagcccataacatgggtactattctgaactccactttatagaagaggaaaccaactgagactcagagacatgaagtaactttcccaaggtcacccagcaggacagcaagacagccagagagccaggattcgaatctaagcagggctctcaagcctatgggcctatgggagaacatttcccaagggatttatgggggtggatccagaaggtgaccttagcgattgtccttacatgcatgcagtggggccccagtgtgaaagtgacgaaagagaccaagtgaccagaggcactcccctcccctccacccaaaggacagtttgtcccagcttgtggcttttcgtcactctgcctctgacctgaagtttaacatttcattcataagtttggaaccacagacttggcagcgtaggaagaaccctcgtagaccagctagctattcaaatccaatcccctcatattacagatggaagaaaaccctgaagccggaatgtgactcgccaaggtcacagagcagttttctgttggatgaaggagccggtttagggtcaactacagatcatcttgtgctgtagttatcaaatgtgggtgcacctctgaatcacttggggagctctctaaatacacagatttccacactctgctttgggagacttgaactggacttaggtttgcaaacaaggactggaaatttgaatatccagtatgttcctcaggtgattcagatggcacagggccatgacagcatctgcaagtcggagtccaatgtccctctttcatttgatagtttgggatactgggacccaccaggggactcgcccaaggtcacatagcaagccagtggggctctagttcagactctgtggtctgaagcagactgcttgtggtcaaatttgaaaatgggccaatgaagctaaacaaaggggttgccatgattttccccagctcttggtttccttcttggatccaaattaagacggaggatgatgtacatttccgaagcttggcaaggcgggaatccaagaactgaactcccaaaggggaaaggaaagggcaggaggttagcttgcacgcccagtggggttttcccagaggtgagctccggactccagggatgacatcagacattccagccagccctaatatcaaaagctacctgtgttttctagttcagcagaatgggtaggcagggcctttcctattgggaggagatggggtggagtgggcccagctgtgacgtgaagggagcagagcccaggaagagccacgcattccagcatctgcaaggaagacagctgccctgggtattgtcaacctctgcagcccttttctaagcctttcctcccatttctccctaatccctcaccccagggctaactgagcagagagattcactgccccttttccacttcctgctactccaccacctattttactatctcccttcctttatttccctctccctccctcccttcctcccttctttcctgttcttttattctaaaatggcatcttggctggacacagcggcttatgcctgtaatcctaacactttgggaggccaaggtgggaggattgcttgagcccagggttcaggaccagcctggacaacatagggataccctgtctctacaaaaaaataaaattaaatgaaaaatcaaaaaagccaagtgcgggccaggcatggtgactcatgcctataatcccagcactttgggaggctgaggcgggcagatcacttgaggtcaggagtccagaccagcctggccacaatggtgaaatcccatctctactaaaaatacaaaaattagctgggcatggtggcacacacctgtaatcccagctactcaggaggctgaggcatgagaatcgctcgaacccgggaggcggaggttgcagtgagccaagatcatgccactgcaccccagcctgagcgacagagcaagactccgtttcaaaaaaagccaggtgtggtggcacatgcctgtggtctcagctattcgggaggccgaggcttgggcctgggagtttgagggtgcagtgagccatgattgcgccactgcaaaccagcatgggtgacagattgagaccctgtttcaaagaaccaaactaaaccaaaccaaaactaaactaaaagtcatcttgatgtttggagtcagttgtcctgaatttgaatctcagctctgctccctgtgagctctctgacctagagagtcacaccacctccccccaagcctagtttcctcccctataaaaaggggacaatagctatattttcagattgtgagaattaaacaagatcatgtaggcacttaagaaacagatgttttctcagaaacactagatcatgtgcataatcagtgaactagaggaatttgaatacatatttgttggactgaattgaggtgcctaaaagaatggttgagctggaaagcacctaagaaatctttgggccttaataactccccaactggagtccaggggaactgttcagggtatttccaaatgataaggacaatcgcacactctcaataaagtctcaagtttctttacttttgtctggaattgtatcagctcaaggtgataacacggctaccacaagctgttcagaaattctgattggcagttacatggctctttgatacgtttttttttttttttttttgagacggagtctcgctctgtcgcccaggctggactgcagtggcgcaatctcggctcactgcaagcttcgcctcccaggttcacgccattctcctgtctcagcctcccgagtagctgggactacatgcgcctgccaccaggcccggctaattttctgtatttttaatagagatggggtttcaccatgttagccaggatggtcttgaactcctgaccttgtgatctgcccgcctcagcctcccaaagtgctgggattacaggcatgagccactgtgcccagcctaagttttttttttaatgagaaaataattactggaaggtagattaaatggtggaaaacgttaatcatgtccaactcctcatttcataaacagggaagctgaggtttaaagaaggaagtggcttgctggtcacactgggtggcatagctggccctaaaacccaaattcttttcctggaacaacttacttcccgtctttccacttcagagagggggaacctaggatcaatgaagttgatgggttttcgtctgctggagtaggaataagtgagttatcgatttgctcttgctttttctgttcttaactcattcagcaaatatttactgactgtccactattcggatttggaagatagataaaacagtcatggcagcagagagggtcaggatttactcctatgtgcgacttcagaacctgtgcctttttccactggacacccacattttaaaacacccactactctgccttctaatatagttcatctgtgtctcagggcaggggctgtcttatatatacatgttctagccttcctgccaccgagtaggtgcgaaatcaatgttgtagtgttgaggaaacacttgaattttatttatttatttatttatttatttatttatttagagacggagttttgctcttgttgcccaggctggagtgcaatggcgtgatctcggctcactgcaacctctgcctcccgggttcaagcaattctcctggctcagcctcccgagtagctaggactacaggcgtgcgccaccacgccccgctaattttgtatttttagcagagacggggtttctccatgttggtcaggctggtctcgaaacaccgacctcaggtaatccgcccacctcagcctcccaaagtgctgggattacaggcgtgagccaccgcgcccgaccaacacttgaattttaatacttactttgctactaactgtgtcgttgaaacagtatgttgctttccttctctggcccttagcttaactatctgtacagcgggaacattggcaaactcctacgtggaggagcttgcaggtccacttcaagttatcagactctaactaggagaaaacattgagaatttaggctgaaaataacgacacagtttatcacctcgttaattcccaaacatcattaccgcgtcctaagccaccccacttgcctctcccctagccgccttcctttaaaaaaagaattcccctctagagggcgcgcaagctctgcggccttcgttcctctcttccgtttgccttcactcttccttctgcgcatgtgctcagttcgctatccggctgcttgtacctggttcaggaggttcaggcagaggttgcacccactacgcctgcgcaacctcagccccgcccctccgctgctttccccggaaacgtttctttcctacgcagccgctcctgccgccgtggtcgctggagctttgcctctctaggccggcagcgcctctcctccatggtcctgtctgtcagcgctgttttgggagcccgccggtgaggccgggccacgctcagacacttcgatcgtcgagtctgtcactggtgagtagaccccagaggagctcgtgtacgggcgggggccgcgcaggcggaatgggctggatttcccctcactctgagaatgggtctgtctgccccgccttccccctgactcttggaatgggctcaccccttggttccagtccctcctcccgggcggggcgacgttgccatggagacaggccgctggctgaggcccggctcgtgtccctgcagggcatggcgggtcagttccgcagctacgtgtgggacccgctgctgatcctgtcgcagatcgtcctcatgcagaccgtgtattacggctcgctgggcctgtggctggcgctggtggacgggctagtgcgaagcagcccctcgctggaccagatgttcgacgccgaggtagggtccccggactggggcgggtggggtctcggcctccccgagtaggctttgtggtccatcactactgtgctgtagacgtggctgggtcaccttctttctttgtagccctgggaaagggatttcacctttctgagcctcagctgcctcatccataaaatggaatgacagcagaggctgattagtacaaagaaaagggcctggatgttaatacaataaacacgtctgtgttccaggcaactctgatacatttcctttctgatactctgggaaagtgacttgatttctctgagctaggttctcaggtgccacatcggagagaggggtggataaaagagc

SEQ ID NO: 68759 - DNA, 989 bp, Homo sapiens
cccctcctgatccggtgccttctgtgatctgtgaccaaggcaggacacatttggaggcccagctgacatccactttttgacaccagccacagtgcaatcagtttttgacaatcaatttttgacaatcaggtcgcaatgcacgcgcatgacctacagggtgctggggctattccgcctgcctcgtgacttctgagcaggctctcatttcgccttttccctttcttgggaaaatggaatggggagcaaccaggagcccttgctcctgccactttctagctgagtgagcctgggcaagttacttgctgcctccgcgccgcggtttcctcttgcgagctcgcggggcgattgtgaggcactttgcacccaggaagcacacgagcgccctgacttcacagagcgcgccactcaggagactagctcgcggaggtgggggaggggtgctgctcgctggcttctttggttctagactgaccttaggggcctcggggtgggggtgggggaagcctgaagtcgcgacacaggctccctctaccgaaggcctctttccttcatccttcccagccccagacaaacaggcagagtaagcagtattcgtcttaggtgccatatggaagatcttatttgtagactcgtgaatttcgccacccattcctccccttcagctgatggcgcgatctccaccctctgctcgcacctctggctctcgtccaggtcacatcaacctgccagcagaaacctcggtgttaggcgctaagactgtccccagggggcgctggtcgtttggggagcgggcgcagggacaagggtgctgtggtgtctggtaggttggaaatgcctttgctaaaaaggaaaagcctccctttaagctagacccggtgggcactcacccccttcctttcgtgggactttcattctcccacgaaagggctgcggtattttcttctttttttgctaaggaactttctgctcagagtaaatctttttttcct

SEQ ID NO: 68760 - DNA, 955 bp, Homo sapiens
cctgccccctcctgcgggtcccaactctctctttcccatcgtgcgtcctctggagaagtgcgcgcgtgtaagtgtggcgagtgtggccaagggtgccggaggcagggttcgggtgcgtagtcgttgcgtgggcgctgcccaaaaggcgcagagcatcaagtgtgcgtgggcagaaccggcgcgggcgcccgccgcgggtctgcgcggggcgggggcgcagcaagtgcatccgagcgagcggagactagcgcaccggcgtcggtggcgagggtggtgcagaggagtccggctgggcggagggaggaaggatgggtgcgggtaactttttgaccgccttggaagtaccagtagccgcgctcgcaggggctgcctccgaccgccgggcgagctgcgagcgagtgagcccgccaccgcccctcccccacttccgcctcccgcctcttcctcgttcccggctcccagggcccgtcggtcccccgggagccctggaggcgcagccccaccccggccggcgcggctcgctcccacgcccccgccgcggcctcgctggagcggacggactgagtcagagggggcgccagcgctgcaggtaggggctccggcggcggtgggcgcaggtgccgcggtggaccgcggaggggaccggagcacgaggggaacggccttgggggagcgccctccccccgtcctccgccgacgcctcgtgtccctttttagggaattttttccctcttgctggctccagtgcgggtggggctgagaccgagagggagttctccatttcgctggctcctgcccggcccctggcagcctcctgcccccaaatctcttcaccccctttccagtacctataggtcgcgtaaacaactccctttctccagctctgggctccgcggccccccgggggacagctccttcagtctcgtgagatcggtggggttagggggaggggaaa

SEQ ID NO: 68761 - DNA, 1504 bp, Homo sapiens
agtgcaccaaaacacaagatggaatgatggatgtatagacaaatatgtggtaaagtacaagtatagtataatgtaaatagtagaatctaggtggtggaaaataggtttattgtaacaggtgctcattctttcaattttgtttgaacattttcgtaataaaagaaccacttatttgggggttttgcagcaaatggagacactagaagctaagaggggcaggaggttcctcttactttgggaaatgcaaattaaaaccacaatggttttcccaaaagtaattgatctttttcagtcaatgtttcctcaactatcaaatgggtaaaatggcagtgaaggagcttcatattattaagcatttcctggtgggtggaatacgccatgaactaggtgcggcctcaagctggttactcgccctgcctactccctctcgtgtcctcccagtacccccttagacccaccagctctgagggaatcttcgcgacctgcgcaggcggtcgctctgataaccgcatcccggtttccgggacgacagcggaagtcacttctcacacgcctttcttattggataccggcttttcatggggccgagcgccgctgggtaggcggaagtagccgcaggcatggcggcggctatgccgcttgctctgctcgtcctgttgctcctggggcccggcggctggtgccttgcagaacccccacgcgacagcctgcgggaggaacttgtcatcaccccgctgccttccggggacgtagccgccacattccagttccgcacgcgctgggattcggagcttcagcgggaaggaggtgagggcgcgagatctgaccagggaaagatttccgtagtgcctgctggctggccggccgtgggatgaaggcaaactttgggggcggggcctaattcctgggtagagttcgggatcctgggtgtggaccccgacgaggtggggatcgtcactcacctgctcccgtttccccagtgtcccattacaggctctttcccaaagccctggggcagctgatctccaagtattctctacgggagctgcacctgtcattcacacaaggcttttggaggacccgatactgggggccacccttcctgcaggccccatcaggtgcagagctgtgggtctggttccaagacactgtcactgagtgagtgcacaccttgggccctgttgcaggccatggagggaatgtggctgggagagtgttgtcatcctgccactgctcttggggacagcacttccagtaggcagcgattccatgggggtagagctggcattggaagtaagaaatgttaccacagatgaataaacttcccaatcctaaaactttcagacctgaggtagcacatgcatatccctggagaggcaaatagcaaacaattaatgcttatttggaggtaaggcagtagaaaactggcaactggataaccttttaaaaggcattcattaatattttttaaatgataataaataccacgaaagccaaccataac

SEQ ID NO: 68762 - DNA, 1209 bp, Homo sapiens
aacgctatgtttatgatgttcatccgttcattacatgtagttgtagatcatatttccttctttaaaagatcacactggctgtagcatgaagaatgagcaatttcaaaattaagcaaaatattaaacagctaagaatggaaataaaattcaagtcaatttcaaaaagaaacacagggacagattttgccagatacctggtacagattttgccagacatatggtacattttgttcgttactatatctccagaattttcctacctctttctccaaatagagaatatttaaaagttttcttaaaaaccctgatatataacatttgcaatgttctctacagtttgcaaagtgttttcctaatgattttctgctttgatcctgcaaaatcttatgaatgccagtaccatttcccttttacagaagaagaaactggctcaagaagatgagacatgatgctttgtagccgaggaattgcctcaggtgtcaccatccccgtccctgcgaattggaatttcaggcgggggcgagctgctggctctgccggcaaactcgccttatcccacgccgccgaagggtccaagctttccagctgcgtaacacgaccaggccccgagcgctctggcccgggggcagatactttcggtttgcagctctcagggcagcgctgccctgggacgcccagtgggttttcacggctcccctgggtctgggatcagggcagctccgcctaagggcgcggcccaatctgagggttcgtcgcccccgcgtggtcagacgtgggaatggcagcttctgaagctctatgtgtggtgcctttctggggctcaccaggtgccatgttgcgtgggaccatgaaactgtggtggtcttgtctctgccacaagataatgtaggcttgggcctcaagataatgtcggcatggtgtcccatctttggcatgagtcctaccctttccaagtgcagtggtggctgattcagtggtggctcccagggatatgataggcaaagggggttcggtctctgctgtctgaaattaatcctgggctcaagagagaggggcgcaggtgaggcctggggctcttcatgcctgatttcccgctacccctctggcttcctccaattcctacatccaagttaactctgagacctgtggttaccaagaagacagtcgatgtgggggaagggcaaaaccaagtacctactatagctacaa

SEQ ID NO: 68763 - DNA, 1801 bp, Homo sapiens
gttgtaagaagaaaacccattgcaacacctacctcttaatggccactccaagctacacaaaaacctgagtgatgtttcaacattaaagccttttctttttttttttttttttttacttttgggccaggtcagattgaggggtaggttgttctcctggtctctctgaaggagaagggaaggagcatgagggtcaattgtctgcttatctaagaaatccccttccctgaagttgtgtgtgtgtgtgtgtatctctgtatgtgtgttgtagggtggtggtggtggtttgttatttcagttacagcaataacaactacccatttagtggacaccgaccatgtaccaggctccatgcttagccttttacacgcattatttcatttaattcccaagaatcctgtgaaggagggtgcattatggtccccagtttacagagggggatatggaggcacggtgatgtcacgtaactgccatattgttttcctggggcaactagaacaaaggactacagactgactggtttaaacaactgcaatttaccctcttaaattctggaggccagaagtgtgagatcagggtgtccacagggctgcgtttgctctgaagaagctggggaaggatctgttccaggcctctctcctggcttctggaagctccttgacttgtggtcacataaatccagtcttcacatagtgttctcccgtctgtcccctttttaaggacaccagttgtattggattagggcccacactgatgacctcatcttaacttgattacctttgtaaagagcccatctccaaataaggtcacatttggagggacctgggggttacgactccaagtagcttttttgggaggacacagttcaacccataacagctgataaatggcagaacccaggcatatgtgacagacccaaaggctttgtcctttgggaggaagattgtgtaaattagagcccagactttccagccaggctataaaagtcctaattctgggtttgtctgaatttgggaatttggggatctaagaagcagcttattaggtaaggtgggcgtgggggtgagaaagggtgaggcatcaagccccccatcactgtttgtgactgagcttaatcccattgggaatgctgggagcagggccagacaattcctcgcagcagctatcaccccctttccctaggagagcaagtgtttatgcaccagtggagatattcaggcaccagtctccatatggactgagggtttccggctgatctgggcctgggccctccttgtgtggcttccaaggaagccctcaggcaaagagatgcagacactagcacttggaaatcagctggtggcaccgaaggagtcaggtccggggtaagggtagggcacatatcttctgccacactctgtatgtggctttgaacaagtgatttaacttgtaggtgtgctctgtacctgtcttctccctgtgtggggttgttgtgtagctaagtgaattaacacatgctgagcccttggaccatgtaatgactgcaacttaaacattaactatgattattattgactaaatgatactgccccctactggaaaatgtgtgacccggacatcacttagaaactagtgctggatggcatttgggagggaatctgatccaacttcctcatttcacagatgaggaattcagacctaagaaagggaagtatgttgcccaatgtcacacagctaacatatataatcattataatagacaacccaggcagcctcattcacttgttcattcattcactctcatgtgtgtgtatatatgtatata

SEQ ID NO: 68764 - DNA, 907 bp, Homo sapiens
acataactctctgcttctttttcttaaggtaaatcggagagatcttgccttgaccaaattaaataaacctttctctatttccaagcacttgtgtgtcagtgttggcatcagctgtacgttcggtacaagagcctgaatttcggattctatgacaagattgggtggttaatgcagatacaattgaattatagagacaatgatcacattttctgaatctcaaggccagatagttctggtgtttcatgagtaggagacagagcttaaagccagtgatttaggtgttgagcaattcaggaatttctaggacattttggtaagacagaatatctgattggtgttagccatgatttaggtgttgagcaattcaggaatttctaggacattttggtaagacagaatatctgattggtgttagccatggagaatgctccctcttgtgaaatgttgagaagggaagagagagtgagggtgggtggtatggagccaggggctaggaatgaggcaatctctcttttgtggaagtcctcagtaggttggtgtgactgctgctctccaacctggaaaaagaagacagcggccatgggagacatttaggattttgtctcaggttcttcccagagatgatccaggaatcctgcttcccggtgttctccacaaaagggagatgtgtttgttgccttgccagcataacttggtgttttaaaatttttctgatacaacctttaactggaaatcagccccatgggggaaatcctgagatccatgacagagtgaagcatagccattataaccagggactttgcaaatatactgacatgagctcaatgaccagctctgccactttccagctgtgtggccctggaaacattactgctctgttttatccttggttcctcatctaccactg

SEQ ID NO: 68765 - DNA, 706 bp, Homo sapiens
gcccctaccacagagtctggaaagacagacgatgcccagtaagttatttccctgcccattctcacactaactcagagggagaaactttttcttgatcttgagctccacagggaatttgaccctgtggctttgtacaagaaacactaatacgacatagtgggtaatgtcccccatatcaatgttaccagaaatgaagcagcatgccacatcatatgaaaacagagggcataatgttaggtcttaatttattaagtgcagttcagtcgggatccaggagcttagacagctgatagcaagctttcactttatcttttagaatgcccttttgcccttttgagtctcttgcctggaaatggtctatgacagacctctgctgccctctggtgggcagagcatgaagcacccagcaaagaattctttccagtcacatggcctcttctttgtttatattgctgaatctgtgggaagctgggcttctccacacaatcccttgaggagaaggcttaacttgtatatgaaaggaaagacacctctcccaactcaagagcaacccactgccaggatacgctctgggcctcctgccttcctcaccccacttacacgccttaccaataacatcatgcccccacgggagcagtggaggctgcaggggcccatggtattgctggggccaagggcacatatggagtctgagatttctacaacc

SEQ ID NO: 68766 - DNA, 1229 bp, Homo sapiens
gggattacaggcgtgagccaccgcccctggccgagcatattaaaatctagttttcaaaaactgaactgcaggcgccgctgtaccaaacgcttccctctgctccccaaccccagcctacagaaaactggtcccttcctcctaccccgcagtcatccccaggccttggcccagcgggaaacatcccttgactgaaccgccactgaacacccacactgcacaatcgaggcgcagccctcccgagaggaagccccaacgacctccacctacaaggcctctaagtgtaactgtcctgggcgaggcgcggcggttcggttcccatggtaaccccgcagctccagcgtcgcgcttccgggcggacgagcagcgcgctccagtgacgtcacggcgccactttccggccggtgacagagtccagcggagttgtgggggccgggggcgccatgggagccactggcgacgccgagcagccgcggggacctagcggggccgagaggggcggcttggagctgggggatgcgggcgcagcggggcagctggttcttacggtgagggcgcccccggtgaggtctgggctcaggccgggcacggcctcggggctcctgggaccctggcccgcgggcgagagaacgcggaggctggagctgcagagggggttggcgttttcgcagcccgacgacctggatttaaattctggtgccgccctcctagctaggtgacgtgggccatctctgtcaaccccctgagtcccaggatcctcttctataaaatggaaatgattagtacctgtctcataaaacttgttgtgggatgggaagataaaggcgggtacaacgccccggacatcacctgacacagagttgaccctcggtaaatactgcttcccttcctcctgccgtgccagaaggcagggtcgggacttttaaggcaggaaacttcctcagttcctcttttgtggaggaggccttacaactatcgtcccaccccaaggcgggagagatggtgacggatctgagaagcagggatgtccaggtttaacttcatacccaccctccacctccaccccaccccagtgtcacaggccgcagtgacatttgttccgttggtccccacagaacccttggaacataatgataaagcaccggcaggtgcagcggaggggccgccgctcacagatgacaacaaggtaaggctggccctgcatggggcttatatcccagccactggcttgc

SEQ ID NO: 68767 - DNA, 1758 bp, Homo sapiens
cccaggaattcgagaccagcctgggcaacatggccaaatcccatctctacaaaaaatacaaaaattagctgggtgtggtggcgaacgcctctattcctagctactggggaggctgaggtgggagggatgacctgagcccagggaggcggaggttgcagtaagcagagatggtgccactgcactccagcctaggtgacagagtgagactccatctcaaaagagaaagaaagaaagaaagagagagagagaaagaaagaaagagagagagagaaagaaagaaagaaacctctggcaagctgtgtggttaagccaagtaactcaccctctctggtcctcagtttccctgtttgcctacttcccatgtgtgaggttcaaatcagattgtgcaagcctgtgaacactgtagaaacaataatcattatgtaagtgatcatttcgtcagcctttgctctatgccaggcacgggacgagcgttcttacaagagctgcaaaattagttttagcagtattgttcctgttttacatatgagaaaacctaggctcagcgaggtcagattccaaccaacccaaatcacgcatcttctcctggcccttcgttttctctcgggagacatggcctccctactattgcataattactttgtgaagttaaagagcgttgggtggaaatgagtgggacagattggagatgacgtgggtggggtgggaggattcaaggagggtacgcgcctggccggactgggatgactctgcggcaggcctgggactccctcaggccgacccaggcttcccaagtccctcctggagccaagggcccgggattctcgggcggctcgggcgagcgggcggggcaggaggcggggcggcggcaggaagctgcccgagcggcgctctgagcggcctgagcccggcggagccctgcagaacccggccgacctccatgggctgcggggggctgcacccggacccctggggcgcggcgcgcccctgaatgcaccgtgggacgcaggaggtagaggcgcacgaggcggcgcaagagacatcgggagggtcctgagcccctccggggaggaacgcggtcctaggctgagtgggttggggggaaagcgatgctggctgggtcccctggttcgcaagacctcggactgccagggggtggggcctcaccgcgcccctccctctccggttcgggccccgcccctcctcctcctgcgccgggctggggtacccctcctccgggatccggtacacagcgtcgcgcgctccccccagggtgccatggcctcccggctcctgcaccggctgcggcacgccttggccggcgacggccccggggaggcggcggccagtccagaggccgagcagtttccggagagctcagagctggaggacgacgacgccgagggcctgtcctcccgactcagcggcaccctcagcttcaccagcgccgaggacgacgaggacgacgaggacgaggacgacgaggaggctggccctgaccagctgcccctcggggatgggacgtcaggagaagacgcaggcgagtgcaggaggacggaggcgggaaccctggggctcgattaggcctccatcccagccgcgttcccagagcatccagggcgctaagttgatccagctgaaactcccacacttcttaaagcgcctgggccacctcttggctgtgtgaccttgagagagtcttaacccccctctgagccaagttttcccttgtgtcaagtgggagaactcactctcatc

SEQ ID NO: 68768 - DNA, 1802 bp, Homo sapiens
gaaaccccgtctctactaaaagaagttaaaaaattagctgggctgtggcgcgcctgtatgtcccagctaatcaggaggctgaggcaggagaaatgcttgaacccgggaggcggaggttgcactgagccgagatcgcaccactgcactccagcctgggcaacagagcaagactccgcctcaaagaaagaaagaaacccttgctgcagtcaagaacttcagcgatgctgggaaagaaaaaaacatgcttaggcctcagaataagtaatgagaaaccagacccaccaaatggtactgggggcgggatattgtgagaagaaaaggatactgaagacacaaggagctgcggcgtcggttttaaggctgatccatcagctgtgtgcccttgggcaaatcactgccctctctgggctagctcccccgtgaaggcttagggcaggctgccgagcagggtctctcaggtcaccactatatttgctcagctgtgcagacctcgcagcgcggagaggaagggaggaagccagagcagagaggacagctctgttgggggcgagttctctcctaatcgtggcagagggtgcatcccacgcagagccatactagtcccggagccaggggccccgggcggcggcagtcaagatcaagtttctgccctaaaggaggggatgctgggcaggagctgccggctacctgaagagatcctcgtccagcggctcgaggttgagcacggtcgtgaccaagacgctacggaggtccccagggggatcgccgcggtcgccacagccctgcccatcttctggggcctgcggggacgacatctagttcaatgctgcaggccctgcacacccgctccgcggaagacgcggagacatacacagaacctgactcttccggcagattgccctagtaaccggaagtctcctgcagaccccgggaaggaggaatctaggttatgattggtcaggactcctgtcagtccgctggtggctgtggccctctttctctagcaattggagaaaatgaatgccaatctgcgaatcctgtgtgtgactggatatgtcgctgaggaggcggaacctcgggactggataatatggactgagtgtcatttcccctgtcagatagcaaatacacccccttcctcttgtaacccggtcaggcctagggttcctccctgagttccagaataggccacccagttggggcggacccttaaggcattctgggcccacgcctgcctataaaccctcatagtgtgacctttgacccctggtgtgatcttgggcccgggctgggaccagcccctagtgtgggttgtgggggcggccatggagctgggcagctgcttcaagacctatgaggacttcaaggagtgcttcagcgcctacaaaagggagaacaggtgctccttcattctcagggactgcgtctccgtccgcttccacaacctcaaccatggcacctccatccgcgaagacatcctgtaagggcgggcggggcggggcgggccaagagggtggggaggaggctggacctccggagggctgcctggaggaggaggggtgcataggcacgcattgggctgcgtggccattcattcaacaggcactcattgagcacctgctgtgtgccttgtgaagagagctaagcctccacggccattggtttttgaccacccactccactttcactccattcacaggcttttctggaatttataactgcagtttctcccattgttttgagcagctgcagcaacccaaatacaaagtatggctttcataaacggataaaaacaccttggc

SEQ ID NO: 68769 - DNA, 864 bp, Homo sapiens
agctctcccagatgcaagtatctttacctccagccagctccttgtaaccctggcaacacggcccgcccgcgaatcgtcacgctacgattggtccgtggtgctaaagcctgaaagcgaattcctcagacattggtccgagtcactgcgatgctgacgctgtggttggtgagtttggatgtcagtcagagtcggaggcagggtcaaatagggagaaatggcgacggagcctggctgtgggtgagtgcttcctgaaggggtgaaagtgtgagacagcggatcaccgcagttagccgtcacacagctcccaaagggatgggagggaggttttcttctcatccggctccagctggactctgggaatgtcagacatccacatctcccacccaggttagaggtgagaggtcaaaggccgtattccctctgttggtttttggaccccaggtactgtggacagcagtcaggatcccgaaccaaagactcaactttcagctacttacagagtaatggtgggcaagtcacttagcttctttgagccttagtttatcatctgtaaaatgaggacagtaactcggtctggggccaaatagaggaaacaatggaatagagtattgctgctaaaagagggatatagtagaggcaggagaagctatgcacatttgttagccatattttatggtggaagggattgaggctcagagagggtcattgacttgcccaagataacacagcaagtttggagcaattgcagttctcttatacataccaggaccaaaggaaagaatggatgccaatcagtcatttataaatataaaatcgtatttttattttattttattttttgagacagagtttcactctgtcacc

SEQ ID NO: 68770 - DNA, 2565 bp, Homo sapiens
tttctaagaaaagggcaaacaattctcaaagaggcccctaatatctaaaattggtttagaatccctgccctaggtgaatacaggaaacactatcaaaactaaaagggaacttgtagggcatcttaatcaatcaaccaagataggtaccaaggcccaaaaccatgtagaggcttgtgcaagatcacaagcagaggtgcaatttgaagctagattctcccactcttaaactagtgccggacagacgaaggcctagcacatgggctacggagccctagtagattccagtccccacactgagccaggaggggtcgctgcccagggatacctacagccatactcgagctggacaaggcgcacgctctttgtggaagcaaacacgtccaccaccgcgtagaggggctgcgcagctggcagtccccgggcgctcgggcccatgtcctcgccgttgatgatgatgtgcatgtcggccgtgccatcggggcgcgggcaaaagaggacacccaggcggctacggcgcgcggtcggaggcagcacgttcagctcatagagctggtccaagagatggctgtagagccctggccggctgcggcccaccaggcggtcccggggaatgcgaaactgctcaatgcgcagatatggttccacgaggagggttggaggtcggctgggggccgctgcctccgcctccgggcggccctcccggggcacgcggttgtggtggcgcgtgatggcgaagacccaggtgtggcccaggttgaccagatcgggcagagaaaactcgggaacgggggccagactggcggggtccagcgcggtcagaccgagacgcagatgtccgcaccagcccagctctttctcctcgatctcgaccaggaagacctggcccggggccagcggctcgcggctgaagcacacgccgtgggcgaagctctccacgcgtgtggcccgcgtcccagaggggtccacgcggatgttggcaccgtgcacccgatggaagcgggtgggagggggctccgggcgctcgagtccccagagtgcacccgaatccacgggctcggaggcagcagccatctctcggccatagggcaggccagctggcgccgggggctattttgggcggcgggcaatgatggtgaccgcaaggcgaccttgtaaggcatttcccccctgactcccttccccgagcctctgcccgggggtcctagcgccgctttctcagccatcccgcctacaacttagccgtccacaacaggatcatctgatcgcgtgcgcccgggctacgatctgcgaggcccgcggaccttgacccggcattgaccgccaccgccccccaggtccgtagggaccaaagaaggggcgggaggaagactgtcacgtggcgccggagttcacgtgactcgtacacatgacttccagtccccgggcgcctcctggagagcaaggacgcgggggagcagaggtgagctggcaccggaggctggaggggatccccgagcccgggatcggtgcgcggcagaggaggctcgcgggtgggagctggcgctggggccggggcttccctcgcggaggcgccgccagcaactccccgggggctgctgcacggaagcgctgaggagcgagtcaacagcccctctgctgcctcccgtagatgatccgagccgcgccgccgccgctgttcctgctgctgctgctgctgctgctgctagtgtcctgggcgtcccgaggcgaggcagcccccgaccaggacgagatccagcgcctccccgggctggccaagcagccgtctttccgccagtactccggctacctcaaaggctccggctccaagcacctccactactggtctgccgccctgccttctgggcgggattgggagaagagatgacggatgagggatggggggtagttctgcagacccctgaggatgcctgggagccgggagggctggaaagggcccctccaactgcgccaaccctgccctgacccccctcccaggtttgtggagtcccagaaggatcccgagaacagccctgtggtgctttggctcaatgggggtcccggctgcagctcactagatgggctcctcacagagcatggccccttcctggtgagtggacagcagggggaaagcacagttcccaaagtaaaaggctggggaaagcgagagaggggctttgtgattttccaaaaagtttccttccttctaagcctcgggattttcctctatgccattggctttgctgcctgtacctctcagaggttttacccacatgtaaagtgcctctcatggtggccctttccctccacccagctggcccttgggacttactcagccatctctttcctcctcaggtccagccagatggtgtcaccctggagtacaacccctattcttggaatctggtatagctggagctgtgggtgtgtctgggcacttggatggggtggcatttagctaatttttccctcccctctagattgccaatgtgttatacctggagtccccagctggggtgggcttctcctactccgatgacaagttttatgcaactaatgacactgagg

SEQ ID NO: 68771 - DNA, 1205 bp, Homo sapiens
ggaacccagctgctgttcttggaggattcacaagcacatctcttaaaaggcattggaaggaggacacctgctaccagggggcgagcccgtcagactggaggagggagggtcaggaaaggtttcagggaagaggtgacatctgagtgggccttgaaagctagaggcagtaacaacagctactgtttacatatattgtgcatactcatgcttctttgccaagtactctaagctcttcacatagatcgacttctttaatctgcataacaacgtgtgttttcttactagattatttccatttacatgttaggaaactggccaactgaaaacttatgcttagggccgtgcagctagtcagtggcagagctaggatttgaacttcaggcattctttttctctttgtagagaaggaggtctcactatgatgcccaagctggtctcaaactcctgggctcaagcgatcctctcgcctgggcctcccaaagtattgggattacaggcatgagccactgcacccgactgattctagctcccgagtctgcactctgaaactgctatactcctctgggagaccaaaggtagtggctacacactggctatgtggccttgggcaagtgacgtcacctctatgagtaagtctccacattcctaaaattaggatgatgttagtacctgactcacagggttgtgagagaatgaaatgagattatttgtatagaaatttatgtccagctccttcgggggagttggggaaaggccgtgcatgagcaaaggccctgaggtgggaagccagggtccaatttgggaaagagcagctgcaaagaaacaggatgagatataaaaggtggggccaggtaagattaacaggggctcaaatgccagacccaggaggctgaacctaattctgtagtaacagggagccatagcattctcagtaatgggagtggcctcatcagagctgtgctttaagaagtaaaatcttgcaacttagcagagaaagaggtcttgttaggaagtcagaggtcatacaccagcccaagcagctcacccggaagtccatgtccaggttgctggtggaagccacaggatccttcatgagggaatagtcaatgccaacaagctcgtccacagaactgcgcactgcaggaaggggctcaagtcactcacggctgtgtgatgtgggataaggtgcttaacctctccaggct

SEQ ID NO: 68772 - DNA, 2526 bp, Homo sapiens
agggattgaaatcagatgaggatcatgaaccctcgttctcaattactactcatatcggtgcctccgtttttcttgagcgtccgcctgcctgcccccacgctggcgtgcagccaggaccatggacatctgagaggctactcagccggggtacctacagcccctggctccacacaagcgccggtctgacagcaggtggcaagcttttcctcttctcaagctagcactggaagggatgcttgctggggagaccggagatgggtggagctaccactcggacgcctgcaggctcctaccaaaaagaatcctgcagggagccggatgaggagcacctcacagctgccagttccctgccaggctacccgctgtagctggtttgagggctcagtgaggctttgaactgcaactaatggccacagatgtcaatgttggaaaggccctacaatgcatttagttgatttcccaactctgccgaaagccatctctattacttgcccccgaaggctagtttaagttgcttctactcaagagcatttacagcttgggttcgatgtatatgtagcccgggcatggggcagggcttcttaacatttggacaccacgcagcacaaaggcccagagagggaaagagactggctggaagaggcagagccgcgcgggtgccaggacccaggtccttgctacgtccggagcctacgtcaccacgatgcctcccctgggccggcggcagaacccgagacccccgcaggttctaagacagcccccacgccccccagtgcgcacgctcagtccaaccccgccgcgcaccgcccaccgcgaacatccggctcctgcgtgtgtgctcgagggggaaactgaggcggggacgtgccagtgaattcattccttcctcagtccacccgcaggcctacaaagctgtctccccttcctcagcgccacaaggaacagcagggacggatgggaagaaggggagggggccgaaagcaagctgggtgcgaggagccagccgaccctgccacactcaagatggcggcgcggccgcggcgaggtccctcagaggcggtaccagcgcatgcgcagcgcggagtcccggcccgggacacaagatggcggcagcggcgctggggagggcgaggcggaggcggcaaaacgggcggtcgagcagaacgtgtagccgcgtcccctccagtccgctccgggcaggtaagagtcccaggaagccatggtcccgcagcgagccgcgccagggtctggggatccgaagctggggggcggcggcccctccggcgctttctgctcgggactgccgcttgccctgtctctgttgccgccgccatcttagacccgcgggtgggcggccgcgccggtggccgaagtgagggaggtgggcccggagagccccagcggagcgggctctagggcccctccgctgctgccgccgccaccgcctttgtgtcgggctccgactctgagtcgcctcagcccgggggcgggagcgcgcggcggggcggggggcggagcccgagagatgggccggcgcgcgcgcgcgcgccaaacagcccaccctcgctggggtagggggaggggaaggtgcgcgcgcgcgcgcgcgctggagctcgcctctcgccttcgtgcgccgtcgcgcctgcgtactttgttcgccctttgactcctccctactgggccggagaattctgattggtacattgcggagatggtcccgccccacgtgcctccaatcccggactcggactctggcttctggtgggtttttctggttgcgcagatagagttgtttatccttgagcagcggtaattctcaaactgcggtatgcgtgggggtcgggaagccacaggataaataaagacgttaacttaagagcagttatgtcttactgggagcgtacaatgctggactctacatataacggtcgagtgattccggtttataagccggaaagcagaagggcccggaatccgggtctgtccaacccaggggctggtacttcggccacagacctgctgcgctcaagtcacataggaaattaaaaatggttttaattgcaaaaaatgggtacattttttcaaatagtgtgaaaaaatgagtcatcctgtctcccagtcactcttacggtgcgttttaaaaatacaaattcttgtgtgcctcacctccgtatttatttctggcttctgagatgcgcagtgaggcacaggagtctgattttttttttttttttacaaactccaagatgattctgatgcacagctggctttggaaatactgcagtgtccccatttagcctcacactaagctgtgccgcttgtgcgtattctgcaaagttcatctacccggtgcatcaatatcacaggatgtttcttggggaaaatatttttcaataaaggcgaacaagatgtgtcacataatgtgtttgcatgtttttgtttttgcaagacattattcagagcgtgtctttgacttgctgtgggaggcttgggattgtgcccccacagatcagtgataggtatgtt

SEQ ID NO: 68773 - DNA, 4334 bp, Homo sapiens
caactgtgaaccagtcgtgtcaccttccatgtttcgtgaaatcatgaacgacattcctatcaggtacagctccacagctggggatgaccctgggccatttggtttctgtgcccagtcatgtatagaaggcctctaactctgcccactctgaaacgcaggttatcccgaatcaagttccgggaggaagccaagcgcctgctctttaaatatgcggaggccgccaggcggctcatcgagtccaggtttgcctgtcttctgccccaggcgagatgggtctgtgattaaagtggcaggtcataggccatcttgcccagtctcatgcagggctgtcattgctctcggtggcagaagtggggccagctcccaaaggcagaacaagggctgtgatggaagctaggggttgatacccagcgagcccatggaattgggatgaggagggtggagccaagccattcctttcttctgccctccccttgactggcaggagtgcatcccctgacagtaggaaggtggtcaaatggaatgtggaagacacctttagctggcttcggaaggaccactcagcctccaaggaggactacatggtgagtgggtccccgggtgagaaggccagttttagggctctgtggccacttcctccaggaagcctactctgcctgtccaggctgggcaaggcctcccccagcggcctattcttgtgcagtatggcagacgttcgacattcgtcagtccccaaactcatgactgtggagatgtttctctgggctcctggctttctcccacagaacatttccattaacaatcttaatggagtcttatgcttggccacacaccacagatagctgcctttcagcctaatgaatgttcagcatctcccttgtagatttttggaaacagattgacagcctgctttttttgggtgtgtgtgttcatatcatggttaagagctaccatcagattcaattccctactcttaatgtgtccaaaacagttctgttttctggccaaaacctatcacttcttaaacctctccaccagcactagcaatgggctttcttttcaggaccatatttcacaagagacaaggtttcgcacttcacgatagtaactgtgtacttgacacgtagagagtgacaaaggtaggtgtactcactagccagagtgactcattctcactcttcagttttacacgtgtgattcagcaaaattacaaatcccgacagtcatctttgcaagtagctaaaagctcaaatctcaagtctgcagcaaccaagcaccctgttttgtaattgtgtctttccccaatagactgcaaacaccataagctgggactgtgctggtttgtctgtttctccggtaattatcatgggatctagcagtgtaaccccaacaaaagctactggcatttattgtacacttactgtatgccaggcatttggcaagcccttaagggaaatgatcacatttaatattcaaactgccctgttaggtatctcgtgtccccttgacacttgaggaataagattgagagaagccaggggatttgtccaagtgacacagctagtcagcagcagagctggtttcaaaacaaggactgctggactccaacagccctgcggttacctgccagcccagctgagcccctctggcctccactagcgccctgatccagaatgtgtcctctaggatcgcctggagcatctgcggaggcagtgtggcccccacgtctcggccgcagccaaggactccgtggaaggcatctgcagtaagatctaccacatctccctggagtacgtcaaacggatccgagagaagcaccttgccatcctcaaggaaaacaacatctcaggtaggggaaaggtgaaggaggagccagctgtgatgccgtcagctctataccctgatggaagggacaagtgagactgagcctcaaggccagggactggtttggggcagaacctgcctgtgtcctttggctgtacttctctgggaaacggagaagtgataaagggagagccagatggtggtggtgaagataagctgggagtcgtagttaggtgtacctgaatttacatccattctctgcaagccttactttccccagactgaagtgtagcacctggtggtaggattgtgtgagtactcataggtaactcaagtaaaccatgtggccccaaaagatccccaaataaaggatcgtcgctattacgatgacggcgatgcagttctcgttcttctgcctggcagcacaacccacgggcctgagccttcttgcctgacagcccaaggcacggcatacggggccctgcttcggtactgagtgtgttgacacaggccaccagtttctgccccggccagttgcctggctggtttctttttatggcttttcattccctttctactgaactgggccagagtatactgatctgtggaatgggacttccctctctcggtacaaagcatgtggcccacagtggctgcagcgtgagaatgaggagtgtggtccctcactgctctccctgcccacagaggaggtggaggcccctgaggtggagccccgcctagtgtactgctacccagtccggctggctgtgtctgcaccgcccatgcccagcgtggagatgcacatggagaacaacgtggtctgcatccggtataagggagagatggtcaaggtcagccgcaactacttcagcaagctggtaagagctgcggggaggaaggccctagctgatggcatgagtcagggcctaggatctttcctgagcagagtccccagcaggaggccagtgatgaggacatgagggagcactgctgaaggctcctcctctctgtcccgctccacagtggctcctttaccgctacagctgcattgatgactctgcctttgagaggttcctgccccgggtctggtgtcttctccgacggtaccaggtacaggcctggggcagcagggagggctccccaggagggaacagggagggtgagccccaggtgctgacggtggccactccgcagatgatgttcggcgtgggcctctacgaggggactggcctgcagggatcgctgcctgtgcatgtctttgaggccctccaccgactctttggcgtcagcttcgagtgcttcgcctcacccctcaactgctacttccgccagtactgttctgccttccccgacacagacggctactttggctcccgcgggtgagggccaagggctgcccctctacccaggccagggaagaggtcctccagagcacagggcccgcctctgctggctgtagtgtcaggcaggcttgggtggagtccctgcctccacctcttaccggctatgtgaccttggacatgttgcttaacttctgggagcctgagcttttctggttctgtgggcaggcacgtgacacccctaagctggcctgtgggtttctcagtgagtcagttcagggtggaataggaacacgtggtcccaggccctgagaggagtgagaagtggggccacagacctcagaggccttacaaactaggggttgaggtgaccacagatgagagaaggtaatgctgtctccagaaggaagaatggtcaggacctccagaggtccagagctcagcagctggggatcctgggtgtagcttctgctgtggtggtggtgggctcagaactggatttgaattccagcttggtgaacatgggcatcccagcctgagcctcactcactgtcctcattcattcagtggagacggtcatgccttgtgccccaatgaattagggtgaatgctggcttctggacaggccatctcttcagtgtggctgcctagggttggggggtggcacctgtttctggttgagggactgggtcctgatgggacttagaatgctcactcctgtccccaggccctgcctagactttgctccactgagtggttcatttgaggccaaccctcccttctgcgaggagctcatggatgccatggtctctcactttgaggtgggtgcactgccagggtgagaggtgggcaacaggcaggattgccagccacctgggaggtagtccctgacatccaccctgtgtccccttccacagagactgcttgagagctcaccggagcccctgtccttcatcgtgttcatccctgagtggcgggaacccccaacaccagcgctcacccgcatggagcagagccgcttcaaacgccaccagttgatcctgcctgcctttgagcatgagtaccgcagtggctcccagcacatctgcaagaagtgggtgccagggagggcaggggaaggaggctgggctggccaggccaggcccagccccaccctgagccattgccttt

SEQ ID NO: 68774 - DNA, 2078 bp, Homo sapiens
gctggtctccaactcctgggctcaagtgatcctcccacctcagccttccaaagtgctgggattacaggcgatgagctaccactcctggcctagacatctgcctctcaaagtgtgaggactgtgggtagtatagtagctaagaccacagcctagatttgaatcctggctctgtctgcactctgtacctcggcatccttttctataagatgtgggaaaaaatggtatgtgtcttagaaggtatgaagctcaaatgagaaaatccattttaggggtttggcttggtgcctggctcacagtaaaccagaaacaccaagtattagctacaaacaagccttgtttcctcttggctgtcaggcactgctgctcgcggtccttgcctccacccacgccgtccagccgggtccatacctgagaacggctgccgcggtccgagctttgccccacgccagagtcatcggcctctgcctgccccggggcggccgcggcgtcgctgctgtcggcggacacggcttctgaggtgcccacacccaggccgctctcagagggctcctcgggccggccaggcccaggggccgcgtcgctgctgctctccacctcgttctcctccatctgatcggcgggctgcctgacagcggggcgtagggtctgggaacttcactctgagaagagaggtgaccgtggctggaacaagtgggccatctccccagccccggcaaccacggccacccatttgcacccctgcgcccattttgcagatgcgaagattgagtctccgacggggcggagcttcctggtgtattgcgaggggagctcgggaaaaacttgacggagaagctgtgcttcccaggctaaggcccttcccgggagggtggtcaatggctggtaatcttgaccctttccctcgcccccacgattctcgtggagcgttccgctctgtgagccccatccgggcccagtggttcagcccttcggcccccgcgtccccccgggttgcagggccggtggtacagcccgctggccccctgggtcagtggttcgctcccccccggttcccctgcggaggcggctgacagcgacggtctcggggcctggcgatttggggctgtccccggcgctgcctgtgctccaggcccgacgccatcttgtggtggcgccgggtttccgctcaggcaagtgcgagagcgactaaagggcctgggaccccggggccctgttcggacagccccgccggcctgggacctcgcctccgggtatccccgcagtgtgacctcactccacggcagggtacggtggggccgcctaactctacccgaagctcacccgaggctttcgtagccacgttcctctctgactccggcatcgacgaggtcgccatcctctttcctccgctgcggaggaacccatcggcctattgtaggccggaactacttcccccgctggccccgggaaagacacattttcagtgttccggaaggtcgctccgaggcctcaaaaccataatcgggtctcaacagactctgggactttatacgtcgcccggtgtttggcactgagcccactatggtttggggactactttatctcggcggagtgttacgtaggaagtggttgtgacgtcattctggtcccttccctaggccgcagggttgggcgcggcgaatgcgcgccccgctctcttggggcgtggctcccagtggggggcgtggctcccggtggcttggccgcgcccctcctacaacagcccggaagagcgtgtggccgcgggcgactttggcttggccaaagaggaattcatgttgtcagtcattttacctgactcattacttattacttagcgcgctgctgcaacccaatcgagctctgcccgttaggtttgatgtgttttgttgggaagggaatgtataattattgtacagatagggaaactgaggtctgggtatgggaagggctggtccaaaatcacatccaataaagggactcaggagctaagtacggatggcaggagtcggggaaatggaaagaagttaatgcttgtcccttaggtttgtatacatatttgttaacattaatagagctga

SEQ ID NO: 68775 - DNA, 1604 bp, Homo sapiens
tgagtgaacacagttcttgcagttccctgggactaacacttttaagtcaacaaagagaacagtttacaagaaagctgttacattatccctgaagagcccagggcattcatagaatctgctttgcctcaggaaaaattctgtgcacagagtgcaagccagaagaaccacaattaatcagctactcctcgggcagcgtttcccaaagtgtggaacgcagaataatttcaggaggaacaaggacgcactgtttatttcaacagacagatatttattttttttataagcattagaaaaataactggctttccagtacccggtttgtgattgaagttgccgccttaaatatatttaaggagaaaaaaagagtcagtttgaattttttaaaaaatgtaacatttggtaaatagcagtacagatggtccacggacataaaggtgcaacgcgagactgaaacgtgtgcaacgccgtcctaagagaagcccctcgcccgctggcggggagcggacagtgccccgcgccgggagcttggaaagccggccggatcggacgctggcgctgagctacgtggtaaacccgggaacagttcctctccccgttctctgggcccgaggtccgcgcctacaaaacgcgtggggtgtcacaccacaaggagacaccccgagaatgcggtcaggggccgcgagacggtggcgggggacagcgctcagtacaccgctcggcgctgcacgcctggagaacgcccggtgccacgggacgccttgggcccggttcgaatcccgactgcgccactgactcgctgaggacccgcgggcgagcgactccaccgtttcgacagggggtgcgggatgtgcggctcaaccagagaagccttgaggactcctagtgaccgaccgttcgtgcacagacaggcggctgcgatgcgacgccgccgacctgcgtccaccacagagaaccgtaggccgcctcggccggccgggcctgggcctgacgggagccggaggcggccgcgccccgcaccgggcatgcgcagcaccgcgcgcacccggagaggagccgagaccgtggccgcgcgtcgagtgggccttcccgcctcagcctccccgtccggccaggccccccacaacggcctgcccgtcagccccacgcctcggctgacggccagcgcttcccggcactcaccgctaccagcgcggcgggctcccggccgctccttcgcctcaggcccgccgctgccgcctccgcgtcggcccacctgcccgccgtaggacaaaggcgccaccaaccgaccggcgcgggcacgaggcaatggcggccgggcggagagtggagatgggggcagagggcgcgcacgtagcggcaggcgcggcactgtcgcaagaccgcgcgtgtttacggcagggctgagttggggcgtcgatctccttggcaatgagggcccgggaagtggctctcgggcgggagttgagaacgcagggagttgcctagcaacagcgtcctaggctgaggatgggccccacggtggtcgcctcagcccccgccccagagtactttttttctgttttcagagcacattccctcctccctaactgtgggaacagaacatt

SEQ ID NO: 68776 - DNA, 1310 bp, Homo sapiens
tccaggtgctgggtgggaggtgggatggaatggaatgaggtgaggacgcatggatgcatggatgaatggatgggaagttgagacgacgcgcccacacgagggaatttcctttgaaagagagcgaaattctgagttgggaaactcttccttgaaacgcctccccataccccagctgtggccttcccgttttctgcgtggtggtgtggggggaacttcctcaggcctctccgcagtggagcctctttcggttctgccaggatacctagaggcagcggagagcggggcagggaggggaaaaccgtgagggtccctgtggcaggccccagcacccatgggatctctctccggtcgcaggaagcaggctagctcctagcccgcctcggcttggcctttgtgggacctgggggcaaagaagaagagctgtctctgggaccatgcctcctcccgtacacagcaagatgcgtccctaaactcccgggggaattagacttgtgggaatgttctggggaaactcctgcgcggtgaattgctgggggctccgcccccccgataggtggaccgcgattggtctttgaagaccccgcccctttcctgggcggggccaaggctggggcaggggagtcagcagaggcctcgctcgggcgcccagtggtcctgccgcctggtctcacctcgctatggttcgtctgcctctgcagtgcgtcctctggggctgcttgctgaccgctgtgagttgtttttgccccgaccagacgggagttgggagtggggaatgagaaggaaagggaaggaagacttcggggaagaggccttcctggctgatttttgtgggggcaggagggtgggtgggagctgggcaaggtgcccccgctcctggctgaatggggtgggctgcctctctcttctcccgggctggggtcccgggagcggcctacaggggccgctcagggaaggcactggctgcccaagcgtgcctagacggcctggacgggtttagggagcctcagaggctggccacacagagactggtagggggttcagagggcgggaagtgaggcggaccaagggaaggggcgggtctggcccgtttcctgtccccttcttattgtggacagatgccagcctctgtaagtagttatcatctccttgccagctggggctgccttcttccagggcatcttgtgggaacaagagatgggtgcagaggcccaggtacttttgtgagaaggcaaggagcttttaacatcgccttccaccccgaaccgtatcttgggtgttccaacctaggaggaatccccagggctttgcct

SEQ ID NO: 68777 - DNA, 418 bp, Homo sapiens
ctttggggtttgctgtcagctgcatggcaaacttccgaaggacaaagacctcacctactccttcttccatccctttccccgttcccacacacatacctggcagagctaagtacagaactggggcctgggagggactcaggagaggcttgctccagacagacttcagaggctggttgggtaatatgaccttccctctcactggggagttgccagctgtgggcatcactgctgctgcttgcacttccggagtctggctggatggccagcatgtcctttcttgatttctcaatgctctggcaacatcactgccaaggctgtatgactgccagcttggtggctccaggctctcccttgtcatctggctttcccctgtcatctggctttccgcctatggacaggggaaggtattcttatccta

SEQ ID NO: 68778 - DNA, 1378 bp, Homo sapiens
atcagactcatatatctaactgcctatttggtagctgcactccaaatatctaaaacttaagatgccctaagaagatttcgtaattatttctcacgctcccaatctatcccaaagtcatttagtaaatgccagcataatacacttggttacttaagccaaaaccaaaaatctatgatgaagtcatctttgaccacttatttctgtcatttctcaaatcctgccctgtcagttccactttcaatacacttcttgacccctctacttctcttcctctccattcccactaccacagtctaagccacaattatctttcacctgctgactgccactggtctaactggtctccctgtttcctctttcgcccctaaggcctggaatctataaagcagccagagagatggcacacgaaacagatcatgccctaaggctaagcccagctcctcagcctggtccacaaggaaggcctctgtaacctcattcttctgccactggtcccagcacccgccacagcggccccctgccacgtgtcaaacacatcaaacctgtgtttttctttacttgctgctcttcctgccttcagctcccttccgcagacctccgcttggctgaatactttctccaatgccccacccctcccaatcctcgtggcactcccacctctgacgtttccttgtttgctcacgtgtttactgcccgccccaatcccaccgcgggaagcagcccctcagagggcagggccgtgtccgattccggcccgggtcccgcacccaggacgtcgcaggtgctcaggaaataccagatgagccggcgtccggcaggtgccttgcaggagggcgcttggagacccctgccccctccacagacggcgaaactgaggcccggggaggggcaggggcgtggcgtgccccatgtcaacccgcgcagatcccgggtggggagcccgcttcccttctccagccccggccccccagcctctgggagtgcgccgggaggccggccgcacacccactcacctcggccctgggagctccaggccggaatctccccaccggaagtgcgaggccggatgccgccgccgaaccgcggcacgggcggtaacttccgccggaagctacccaggggctgggcggagccggggcgaaaaggcggggcggggcagcacgggggcggggcgtctgttgtggtcgggttctgaggtggtctggtctttctgaggtacagcgtagttttgtcctccgcgaagtccctcaggctcagagcacagccgtgtaattgtctgcgtctctcccgcgctcaatcaggggcttgctttggaaccccggtgcctgctagtgttctgcatacagtgagcatccaaaaaatggtaacttgtttactt

SEQ ID NO: 68779 - DNA, 429 bp, Homo sapiens
acccctaactctagttgaaagaaagaggaaaacctccctctgcttttctccctatcgaaaagaaacatcaggagataggagactagaaataattctgttctccagataatattcccaggataaaggatctccttatagggaacccttccagcacgtgtttgcttactcccttcattttcattctagaaaggaagtagaaattaggtcaaaggaattcagtaacattgcaaaattctcagggttataaatagcctcttgctccgccactcagcagtactgtagctcaattgcaaaccaccagcataagggagctgtagttccatatccaggcccagagggccccttccggattaaacaactccccacccttctaccttccactcctctttaagcattacagatataaggatgatttggaaaactcaaaat

SEQ ID NO: 68780 - DNA, 1635 bp, Homo sapiens
tactaaaaatacaaaaattagctgggcgtggtggcaggcgcccgtaatcccagctacttgggaggctgaggcaggagaatagctggaacctgggaggcggaggttgctgtgagccgagatcgcgccattgcactccagcctgggcggcagagcgagactccgtctcggaaaggtttcaaaaaaaaaggaaaggtttctctgggcacggtgcaaggccgacaggagaagggcccctgtgcctgcgcagggcagaccagttaacacactgcaactgcccaggcaggaagcgagaggggcctgaactcaagggtgagcgcaggaggtggaaagtacatgcaccggggtgctactgagccagcaggatccacggggcggactggtggacgcgggcagccgggtccaggttgagcatgaccccgggctttcaactcgtgcgggcccgccccgagcgctctccggcttcttcccagccctctccttgccgcccctccccgatcttcccacccaacgcctccctccttctccctccgaccgctgcccagcccagcccccgtgcctgactgcctggcccgccctcttccgccacgcgacgccccttctgggtccaggacccggtctctcctcccttcctaaggccccggcagggccgccacccctcgggggcctgacgagccggcgcggtccagcccaggcccgccctctcagcccctcagcctccggagcagacgctagccgcaacgctcggcccggcctctcttccctgcgtctttcgggccgggcccctctccaccgcctgccgcgccccgacccccagggcgcccctcactcaccagggcgcagacctaggcccagctcctgctcccgggtctccgctcggcggctcctccagcctccgcccgccccgccttcttgggaccccgccccgcacaggccgggcccggcttctattgctccgactcgccgtcacgctgaagtctctttcttcaattaggttgcttgtctgtcactcaagaaggggcgggcacagctgccggtagaggggaaaaacgccggccgtccccgcccccctagtggaggcctcttaaagaaacaggacgccattcccctgcgggctacagggtctgaaggaaggtaatttcccagctaacccaagaggcagctttctttttcccccaaacttttttttctttttggtatgcagtcctagagtgaaggaaaaggcttttgctcgctgtgtcaaatcataggttgtgagctctaagcgggcctctggtggcactccgccctgtgcccagcgggcacttaccgcacactcaacagtggggatagctgtggtttggggaactgagtgggaggtgacagtcgtgtcagaggctgtgagcagccgcgctgctcaccaccgagttggagctaattataccggcacccagggctgaccgtgggcgctgagcagaggcagaagggtacaactcagctgtgctgttggaagggatccgtgggaggtggcattcgtcactgcacctgcggatcggaacaaggccgggcaccgcgccaaggactcactcctgctgtctctcttcatgctcacagcagccgtgtgatggagggagcaccgtgatcccttcgctgcagatg

SEQ ID NO: 68781 - DNA, 547 bp, Homo sapiens
ccactgcagctggctgagatttgcaaaatttctaatgcacacagtaaatacaaataatagctgccacttagcaatataacattggggtggggatcaggggctgtttaaggattttacattaatttatttactcctaaggactttacatactgcatctaacttaacctttaccctgaccccctgaattaggaattattgttaggacttcgatttttcacacgaggaagctgacagagagattaggtcatttgctgtaccgctattaagtggcagatcagaggcttgaacaagtggactctgaccttccaggtctgtgccctggaaatgaccatgttgcccttctttgggtctggagtgccccctggcaagtctccttgtacagaacctcactcagagcagacacacagcaagggctcagtgcttctgaaaatggtaaccaggctgggacttggtggtgagtttgctgctttttgtattcaagctcagggaggctgtagactcgctgggtggctggccttagaatcccctgcatctgtctgaaccagag

SEQ ID NO: 68782 - DNA, 1376 bp, Homo sapiens
actgtacttaaaatatgagagtcagaatgaagctgagatcatttaatccagtggttctcgacagggggtgattctgtcccccaggggacacgttttagtctcacgactggtggagggtgctcctggcatctagtgagtacaggacagagatgctgctaaacatcctgcagtgtccagaacagccccctacaataaagaattatttgttccaatagggtcaatgtccacagtgctgaacaaagtggagaaaccctggtctaatctaacttttagtacatacaatggaggaagtggttgtcccaagaaggaaagtggcttccctgaggtcacacagtgagtcagaggtagattgtgcaagttaaggccatgctttctcttagttcattgaaagaccattgtgccctgggctttatcatgcagcaggagttgggagcagggctgccatgtgggcgaggctcacgcgtgaccctgagtgagctcctccttcaatcttgctctccaaatgcctcatgtggccaccctagtcctagccttggtccccaactcagccccgctcacacccacccaacccatacataatctccaaggtctggctttcttataggaagccttataatccccccaccaaagaaatcccagcttctcaggcttagccaatacacgaccacagggattaaagcctgcaagcaaaacgcgcaggggtgagagacgggtggagagagagagaaaaaaatgccatgtcaggtggttaatttttgagctggggaatgatttccaggcatacacaaggcaacttttttcctactgccccccaacttgccctctttgtgtaggaaaggaaagaaagagaagtggtctgttctccaggaccctggggcaggaattttcaggacactgcctccaccaccactgtccccttccccctgccccagctccctgctgggctgcagctggcatttttgtcagggcactgggcagtgaccaggctcttggcagatactggtagctctgtgccaggcagagagctggctggcccacactttggggacaggactgagaccagctgcccacagcagtgccctcctgctgcctacgagagtcccacttctcaggagtgtccagggctggggctatgaagtgctgaactttgcactccagcaaggcagaagcaagccttaaacctcatggtatcccgttgcccaggactgagcctgcgaagtgccagaccctctggagctacatagtgtttgaagcatcatggctcaggcactcaggactggtgtcgcttcctcactccgagcgtcagttcactcatggataacatgggaatgacggcctcacagaatcaccatggtgggacattgcctggaagaagg

SEQ ID NO: 68783 - DNA, 911 bp, Homo sapiens
cacaggcaccttcccatggctgtccctcttcgtgtgaatttcaaggacaaacaaaaagagcagagagtctggactctctgcagataatagcaacagcagcaatcctttattaagcacctactgcgtgtcagcacctttgagccttcccagcaggtatcattatgcccactttgcagatgaataaattgaggctcaggggagggaaatcacttgccgggaagtggtgtgacctcatgtggctcttcccaagtccccagtgcatctcagctgaaaaaagcagtttggacacacgtgtctgacttgttccaggcccgggccaggtctgcccctagctagggtgctgacttcgtgtcttcaaggtctggcggtgtcagagaattctgctcatcagtccagagagcactgtcctgttgagttgggtcaggaaacacgatcttgctccctgctgcatcactggaagtcacgccagcctgtttacacacctggcaggagctccgggaaagtggaaagttggctggacctcagaggaattgttctggggtcagcgggtctatgtgcccacttgagggatggggcaatgggtcaaaccgggtagggagagcatggaggggcacagatgagggatctgggtccactaggctgggagaggttagcaaagtctctccagtccccttctgggcctcagtcttcccagctcaaaatagaaagggctggaaaccctgattcctgctcaaacgttacgcaaaccaggaagcagtctggggttttagaccccgtacaggttctgaaatcagaacttgtgttcaaatccaaattcatggaatgaatactttttcactgagcacctactatgtgtcaggcactactctgggtacagggctgccatagagcacactataagcataaacctg

SEQ ID NO: 68784 - DNA, 805 bp, Homo sapiens
gctgtgattttcatttttttattaaagcctatgacttttttagaaagctctctgtttaacttatatctatttaagtttacaatgtaaagcaactcaaagaaaaatgccaagtaacttggagtgcagggagtacgtgacaatggcaaaattccaaaaatttgaggccaaaatctgaaatttgggagactacgagatagcaagagaaagacccaggaaggggtgtggcactcacttcctatccagatcatgctgatgctgttcctataaacaccgagggcaagttatttcccaacggacccattccaagctatgatgaaactgtctcccatgacctttcaggttgggacttgatcctgagccagcccaataaccggcttcatcaaaggctccagacaacagtgtatggagggacaaaggccctccagggagcactttggaccttcaaggtctgggcatgggaggatggggtactccaaactggaaaaggtatttctagagaattggattcattgacatcaaaggaactctggtccatgccccaaagtctgagtggaggcagctgggaccagggcatattttaccggtgggcctgggttggattccctgttccagaaccagctaagagattaagagtacaatatttagcattagagcagaggtttcaatctggtggcccaaatgtagccatcatcataacaatattaatattagcaagcccatataccacaccttactatttgccaggctccgttttcagtactttacctgtcttaactcattccatccttataaaatccatgcatta

SEQ ID NO: 68785 - DNA, 645 bp, Homo sapiens
atcatggaattatgagaaataacaaaataatgttgttgcaacttgtgaggtgatttaatacagaaaccaacatgaaccaaccttgaaaatgaaaggtacacactaaggatggaaaagcagaaagatgggagttgggatccttcatgaattcatggaaccacctctgtactttatttacaaggcagcagaaaacctaatatgttgagccttatgtgtctatgttttcagttatgtgtgactaaagttatgttggggacatgagcaagcggaagacttatttgcacatcatactctgctatgaatgttggaatgcactgcccagtgcccctttaggaacaaaaatctttatctgcttggaatgcttccagtagtcaatccttggctatgagcccatttgataattgcctcagcaaacagtgccactttagccaaggtcatgtttccttcccagagtggctgacatccagttagtgactgaagcgggaatacaagttcccagcctcctcaccccaatttgggacaactttgaggggccatcccccttcagagcactcatgcaattggtcaagtcctctgtgaaggttgcatttctgctcaacatctcccttcaccctatatttgtttccttcccttcccttccatggg

SEQ ID NO: 68786 - DNA, 702 bp, Homo sapiens
aacagggccctgcaggatccggccccgcctctcccatctcatgttctgctcctcccccttgctcactaatgccggccacaccagccttgctgtcggggatgtttcttcttcgccaacttcgcacgccacagcctgcctgggatatactctcttcatctcctgtgtttctggttttccttcacatcttcactcatcactgtctgaaactgtcttatgttccccaggaaagtaagcttcatgttcccctctattagatctccagtgcccggcgcatagtgagtactagtgtattagtccgttctcacactgctgataaagacatacccgagaccgggtaatttataaaggaaaagtttaataactcacagttcagcatggctggggatgcctcagaaaacttataatcatggcagatggggaaacaaacacacccttctccacgtggcagcaggaagtgccgaacaagagggaaaagccccttataaaaccatcagatctcgtgagaactcactcgctatcacgagaacagcacggaggtagccgccccgaggattaaattacctcccactgggtccctcccatgtcacgtggggattacgggaacaattcaagatgagatttggatggggacacagccaaaccctatcaactagggatttgttgacttaatgcacacgagccaaccataccccaacaaagcag

SEQ ID NO: 68787 - DNA, 2248 bp, Homo sapiens
gatctcccagcacttaacaatgtcctggtacccactggtacctaaaaaatactgataaaagaaaggcaagaagcgtaaaagtaaaaagccagggcttctgagtcagaggcataaggagctgagggcctggaccggccacttagtaaccgtgtaaccttgggcaagttacttctctctgagtgtcactttctcatctgaggacaaagtttatggtgctggcgcacaatgatgtttaatgaaaaaataggcaatttaatgaaatccaacatttattgggcactatgtgccaggcacacatttgaacataatacgtgacacacatacctcctctaatggtcacaacatccctatgacatggatactgctactatgtctcccattttacaggtgagaaaaccgaggctgagaggctaaataacttgttgaaaggctacacaagcagcagagttagtatttcaacccagggagcctggctccagtggggcaagtacttgtcattacatgtttcttaaaactaataaatggaaagataatgatcgaaaattgaaacgagtcaaatggggaaaccaaggctcagggaagttaaacatgttcaacattgagcaataatgacagatcccagatttgaaccaggcagaacggcctcaggacaaaagcttgacgctgcatggccacgtggtttcttaagacttaacgaatgaaaaaagggatgaaagaataacatttccgaaaggccggacaccgcagaaggcacagaaggagaaactgagggaaatccagcttcggagcgcaggggagtccctcacccgcccaggccccagagcctcggggccgcccacgccgggatcccggcccaccttaccagcgcggcgacagcggaggagcgcccgggcctcctgcaccgtccgccgtctgccaagccgcgcctccagcgccgggtgccggtagcccttggggaagcggtgcttgatcaccgccgcgcggccctggaagcggccacggaacacgcgcgcctcggcaccctgcttcaccagctccaggccgctcaagaagcggctgctccgctcccgggctgcggccagagcctcagcctccggggcgggctcctcgccatcggccggcgtagtagctctggccgccgccatgactgctcggcgcaacagctccaaccgatcagctgtctctgaaaactgtcgcgatgcttcggctcgcttcggaaatcctgggacttcttcggcaatcctgggacttcttcggctacccgaatgcgtccaccccggacacttccggcctgtaagtggttacgcctcccaacttttcggctctctgaagcctgaggttccctgcaggaagggctcttgtggccccgccttccgcctcttcggctatctccgtacacgttcggcaacgctcagtaagtggctcttcccgactccttggctctccggaaatcttcggtgactctcgcagccggctttgggggcccacctctcagttggtcgtctctttccggaaaacttcggcgcctctcgagaaaaacgtcggacgcgctttgctctcttcagaagtctcttccgggacagctgtaccctctagtagtctctttttggaactcctcttcccctgactcctacattccccccaaaatgtgctcatacaagtcagagtcggaagggtcagacaatgaaccatgtttccgacatcctcttaagtgctaggataactaccatttagtgcattcagaagaaataaggttaaatgatgaaaatccttacagaaaagaaaattgagactcagagctggcagagggggtggtaagatggggtggggagtgggggctggggaatccgggaaagtcttccggagacagaacctaaactgaattgggaataattaaactttttcagtttctacctgtttcattacaaagcttataataacacaggctgtagcaaattcttacaatacggaactttgcacacgcacacataaataaataaactacctatcccccttgtgacactgctggccgttagtttctttccagaattttctttcattcagtgtgcacactcacacatcgttgtggcgttttttccaacataaatgacatcatactgtgggttctttggcaacttgcttttcattttcctaaacaatttatctcagactatattccatatcaatacatacagagctaccacgtccttctacctggtcaggcagtttcttgttgctaaacagttgt

SEQ ID NO: 68788 - DNA, 1614 bp, Homo sapiens
ctgtgttcgaataaaactttatagacaaaacagtcagctgattgtagtctgctgacttccgccctgaatgaacagccttcagcttgccacagtcctcaccactccgcactgccttatgcccggctcacttccctcacttataacacctcagtgggccctgtaggcgtatgaatttgcagcctctaatctaagttctttttaaggttagagtttggggaacaaaaaacaggcagtcttgtaagctggctgcttgggtgaacaagaggaaggtaaaatccttcaacaattatgatttagcaactagtatgtgctaggtgtaattctagatgtttatcctgaaccaaaacactgggatacagaagagaaaaagggagatttaaaaaaattcctgaccaggtgcgatgactcatgcctgtaatcccagcattttgggaggccgaggcaaattccttgagcccaggaatttgagaccagacagggcaatgtggcaaagccccatttctacagaaaatataaaaaaattagcccaatgtggtggcacacgcttatagtcccagctacttgggaggctgaggtgagaggatcacttgggcttggggtggtcaaggctgcagtgagctgtgattgctctactgtactccagcctcggcaacagagcgagatcttgtctccaaaaaaaaaaaaatcccactcatagagcttcattttaagggagaagacagagtaaacaaataaatgagagatataatgtgttaaggataatagatatgttccttatcttaattgtgatgatggtttcacgtgatggtttcacaggtgtaaatgtgtgaaaatttgtcaaactatacactttaagtatgagcagcttatcatatgccaactgtgcttctgttaaattaagtttagcctgaagctgcctccttacctatttctagttcagcctaaaggtttccctgtacgtgatgaaccatgacctaactagatgtgtaaacagactacaacttacccttgcaccagtcaccaagttttggccaatcagtggtggccaactgttcaaactgtgttcaaataagacaaatgccaagctgtaaccaatccaattgtttctgtacctcacttccgttttctctatgtcactttcctttttgtgtccataaatcctctccaaccatgtggtaacacctattctggttcggggggctgcccaattcacaaattatcctctgctccattaaactctgttaaatttaattggtccaaagtttttcttttaatagttcaataaagcttatatatatatatatatatatatatatatacacacacacacacacacatatataaagaaatgaagaaaaaaacaactgcttatctagaaagataccaaaatgtaactaggtttttgagttttgttccaaatatgtattatttttaacatatgatgttctttaatgtgtcatatattgctattttaataaagagctccatttttgtttctgtctttaaaaaaagatatacagtgtatcagatggtgataagtacaacagatagaaatatgcaaagaagagatatagagagagttggaagggggttataaatggtaaatgagaagac

SEQ ID NO: 68789 - DNA, 1443 bp, Homo sapiens
gagtgaagtcacaggacagggagataaagaaatttcgttcttaggctgattcagttcctctgtgggggtcttcaaactggttggtgtctgccggtccactggaattcaggatctgaagaacatcttaagcaattcctaaacaaaaagccttatgatgcaaaggtcagaaatcctatctgtaggaacaatggggatgcaaatggcagtatctagtgccacatgactttcagttacaaggaagtgggccaaagggcagccaaattaatgcttaattataactatgtttctgcccagaacccagcatgtaattctagttaaccctatgaggacaatttcatggcggcacatgcctatagtctttgctactcagaagactgaggcaggaggatcacttgagtcaggagttagaggctgaagggcactatcctcatgcctgtgaatagccactgcactccagcctgggcaacatagtgagactccatcgcaaaaaatacaaaataaaatctcaaagcagaatccacttacaaaacaaactctaaatgtgcaagttatactccctttctcagccctaatccaaccctccatcgtgccctcccctcctcactcctgctaaacttcagggttgccgacagctgagtttaagctccatgccctgctacatgattcacagctgaagcctccttctgggtcttgctgtcttcatcctgcctcttctgatccatcccgacagtcccagggaagtgtagttgttcctggtctgttcctcattagctgtgtcgaaagacaaaatcacaagtttaaagatctcagttggctttatttacaattctaaaattgggcaacacttcgtttcatcaaatagaataaatgttccagtaagctgagaagcagaggttggctttataaagacagagaaggactgaagaaagcagaaacaaagaacaaaaagtatattagttactttagagcaatagaaaaataactggttaacatcaggttacttcaggctaccttttttgtgtaaggatgaaagcagagggaacttcatcatcacactgattgaagatttaagctggctgcttgtctctctcctgatttctggaaaggtcagataacaacttagcttaggttcagtgacctggaactctagcatgggtgactccattttgattttcagtctgttctgttggggactagtgcaggagcttagtccaaaacaatggctggtaaggttgccagatttagcaaaaacagcaacaaatagtatgcccagttaaacgcgaatttcagatagacatcaaataattttgtagtaaaattatgtcccatgtttatctgaaattcacatttaactgggcatcctgtattttatcctgtattttatctaaattctgtgtcactccccaagaaatcaacttgggttctgaggccatctataaaagg

SEQ ID NO: 68790 - DNA, 1766 bp, Homo sapiens
ggtggtgtccaaacccaagcgtggagtgaatgagggatgaatccatgagagagtgagcggctccagtgggtatgcgcgagtgtctcactcggtgtagatgtgtgtgttgtgtgtgttgtgtgtgtgcgcacgctggggaggccagacaagtgtggaccagtgattggggcacctcttccctgcaaagaggccaggggaagacagtgcgtgtggggtcttctaccagggaggatggcttgctggtgtgtcccccccaggggaggactaccaacgaaggggacccgggagatggcgggtgggggcccccgggaggacagtgggcgagggagggggtccttgccaggcctggggcggccgggggcggtcctgggctcccctccgtcccgcctccaggcctcggggcctggctggccgacgtggcgttggcggcgctgcgcgcgggagggcagggcaggagggacagaggcgggggcgggccggaaagtttgtccggcggcagcggcgttggggactccggcgggggatgcgcgcccggcccctcagcgcccccagcacgccgccgagtcccgctcgccatgggtaagtcccgatcgggcgctgcctgctggaagcccgaccccttcccagggtgtagacaccgcccccacgctcccctaagagtgcgcgccccctggctcccccagggccgccccggccggataccgcctctcgggtggccagcccgagactgcaggcctgcggcgggggctgggacggggctcggtcgcgcttccttccatcttcctttctgccccggaaaagtggcccctcacttgctgcagcgcccactcgggcccaggcactctcccgggcgccctgatccgacagccccaggcaagtgcagctgttcctggtctgcagatgaagaaatggaggctccgaaagaagcaaagcagttcatcgattcgctgagcgcggttgtgccccaggcgctgttgtgggcctggggacgctgtcgcgaacgaaactgcgaacaaaacagacgaaccccctcctctggacgtgattctgcagagaggggacagagaaggagattctaacacagcattggggtgggacgcgtggggaatggctttgttgccactcgggactagggctctatttttctctctgcattcagaagcctcgaaggatcagtcgttgattcttgagtgagcacctactacgtgccagacattgatataggggttagagcttcagcaatgaacaaaatagacaataaacctctctctcatggaggtggcattctgattgagcagctgggtaaacacgtttatgaataacttcagagagagataaggtgttgtggaacccataaaatggggtggcgtgaaggccaagggcgtgggttccttgggtaggtggtcagggtgggttttctggagtaggacgttttggagctgagaacttcctcagaagcgggtcttgctgagatctggagaaagagcttccaggtggcagcaacagtgcaaaggccctcaggcaggaatgagtttgtgtggcccaggccaggatggccagagcacagcgggcagggcactgaggtcaaagggatggcagagaggtgtgcagggctttgtaagccgtggtgagaagttcagattttattgcaaatgccacggcaagctggagaagggttttaagctggagcggggccgtgacctgaattatcttttcttttttttttcttttttttgagatgatcactctgtcgccaggctggagtg

SEQ ID NO: 68791 - DNA, 599 bp, Homo sapiens
ggaacataaagtcttcacacagaggaggtctccatacatgatagctgttattattactgttttatttcacgtttgtttgtttgtttgtttgtttctattgtccattggccttattgtccatttcaactgaacctgcactgatgtgttttccagtggaacctgtgggtggaagctgtgagccctttggctgggttccctttcgctgcaagaggaacccaggaaatggcaaacaaatcctgggctttcacctcgattgcttcacatggcctggaaggaccttgctttctgggaaaaagcctcaggaatgagggaggaggggcaaaggggggcgaagacagagcaggatctgagcagcatcttccaggatgtttactagtggtgaggaacaggaaggacaggccagccagggagtggcaagggctcgtttccttggaaggtaggagtggcaggggagagggatgagcagaagtgggggtggagaatgattccttcacccatggaactcctccttctgcacaaaaactgcctaacaaagctaagaagggacccaagcaagagaacagagtgaaatcacatttcaccaaggttttataatggag

SEQ ID NO: 68792 - DNA, 1118 bp, Homo sapiens
tgccaagcctgggcagctcaggttactgcagactctaagagctgccttatctcagatctgcaaagccccagcacttcattctcaggaaaaccttttaactctggggtagacaaactctaaaaactctagagctgccttggggcaatgacagcagctcctcgatggactagatctgggacccctgcagaaataatctcatgaatgttcccttacctgtggccagcaagacctgctccattccttcctttatttacatcctcagtggctaccctgagtcactgctctgatcagccctgagtcaaagcctgggaccgaggcgagttagtcatggtctctggagctcaaaggggcagacagacgggtaaacaaagagtttccaagactctttcatgtctgttattatctcaccacattgtccccagagacttgggagcacttgggccagatataattggatgtcaataggcatctcaatcttaacatgtctaaagcagtaatactaataacaaaaccactagtaataataataatagtgtttactgcacaaggcactgttataagtgctttacatattgtaactcactcagtcctcatcacgaccctctgaagtacagcttttagtttcattttacagataaagaaatcgaggcattaagggactcagtggcttgcctaagttcctgcagatgttaaatggcagtgctgggacatgtacccaagggtctggctccagagtccgtgctcttaacaatgaccctctgatcttcagttccttcccatttcccctatatcttccacatctcacaaagtggcatcgcacaaaaaaataaataaataaaaacatctatgcaccatttttattccactcttacccaattcttttcatacctgacttctcgtcatcactcaaatatcagagatgtctcaaatttcagttttcctgaaagcaatcactgagaaagggattcaagggtacgtagcttatttaagagatgagaggtgacggttcaaggagaagcattgaagaagacagaggagaaaagtcagcagatacagtgtgccttatcaagtcagccaccacaacaggtgaccacagacagcttcatccctccaacaaa

SEQ ID NO: 68793 - DNA, 1409 bp, Homo sapiens
tttaataatgtttcgctccttcttctggttagctgtctttttctatttctcacctcttcttgagtcaattttgaccgtttatgttttgcttaaagatcgcttatattccctacattttccatggtttgctttgaagttccgcaacttttttcttataattatgttactcctttctatatttgtaattatatatcctctctcatactgacgcacatgatttcctttatttttcctcacaagggatttatctaggtcattttccccctgcaaagaaccgactttggttttttactcccagcgtttggctttttgcttcccgtatggcaagttaggaagggaatttggagtcaaatgtcagttctgctgctcaccagccagggacatcggcaaatcatttactgaccttggtgagcctccagttcttatctgtgaataagaacatgcctcactcccagggtagtgatgtagtaaaaaataagaaaaagcctataaagcacccagcacaactcctgacacacattaagacctcagtggtgttagtggtattactcagggctctccagaggaacagaaccaataggagttataaatataggctcatgtgattataaagcctggcaagtccccagatctgcaaattgagttacaagctgcaggcccaagaggagagagccaatggtgtagttccagtccaaaggccggcaggctcatgatccaggaggagccgacacttcagttcaagtccaaaggcaggaaaaagccaatgtccaagttcaaacgcagtcaggcgtgaggaattctctcttatttcagagagagtcagccttttttattctattgagaccctccactgattggatggggcctacccacattagggagggccatctgctttgctcagtctacagatttaaatgtaacttcattcaaaacttcctcacagaaacacccagaataatgtttgatcaaatatctaggcacccctggcccagtcaagttggcacgtaaaatgagccattacaatattcaccacacacgtcacccagcccagactctttgcccccacaggcacatgtgcctctctacctgagcatcgcacatgctttatttattttatttgtattcaatttgtcttatgttattatatttgctagtttgttgttagtcttctcccctataaatgccctagtggaagcacatggcttgggataagaaactgagagatggcccaaaactcctccagctgatgaacaacttcagcaaagttgaaggatacaaaataaatgtacaaaaatcactagcattcttatacaccaacaacagctaaactgagagccaaatcaggagggcaatcccattcacaaaagccacaaaaagaataaaatacttgtgaatacagctaaccagga

SEQ ID NO: 68794 - DNA, 555 bp, Homo sapiens
atttccattcctttgggtatatacccagtaatgggattgtgagtcaaatgttatttctgtctttaggactttgaggaatcgccacactgtctgaggaaccttcatttgttggaaaccacccaacacagagtagatgctcaggaaataaatatgcagtggatgagtaatatgtgcagaatgacctgactgagtcacaaagacctttctggttgcatttgcatctgtcattgtgtacatagagcccttccccttagttcagagtctctccccttggcactgtggagatttgggactggaccattcctttgttgggggtgggggctgatgctgtgcattgtagcattagtttagcagtatccctggcctctaccctctggaattgtgacaatcaaaaaggtttccagacattgccaagtgttctctgtggcaggggtgtggagtgaagggcagaatctcctctgttactgctttagctgatcgcagtgaggccctgtccctttgcagaactttattccattcccgcctcccacggcatcctcctcagcttcctcctgc

SEQ ID NO: 68795 - DNA, 705 bp, Homo sapiens
gccatttgctgtccccgtatgtgtctccctttgtggcaaccagggcccccttccaattcccgcagcaggcctcgccaggtctcgccacactttgcatctctgctactccagccctaaactgcagcctgtaagaactggcagctcaaaaagattgtgcaacccccaagaccatagctcagggccatcccagctgctgctgcaggtgagccctagccggctgcctgacctttaggtcagtggagtatttttgatcgcttaggagcaagagaagagagccaagaggaggcaaataccgaagcctactagagacaacccaggatcccagaagtgtatttctagaaggggtgatagagatcatctaggtcaggggtcagtccaaataggaaaaacttcaggctttgcaggctatacagtctctgttgcaactgctcaactctgccaatgcactgtgaacattgttatagatgacacataaacaaatggcatggctgtgttccaataaaactttatttacaaaaacaggtgaccagcccacagaccatagtttgccaactcctgatatgagttggtctaagtcaatccatcccggggcctgggtgagttgctatggctgcctttagtgctgttcctgacactgaatcatacacaatgacccagagtggcaggactgtatttcttgcccttcttgcaggcaaggtgtcgggg

SEQ ID NO: 68796 - DNA, 640 bp, Homo sapiens
gggtgacagagtaagaccctatttcaaaagaaagaaaaaacaatgctcacgctgaatgagggcttctggggaccacggaccaggctgagcacttggccagtattcactcccttggtcaccacttcagtgtttgcagcaagttgttgccatttgacagatgagaaaactgagactccaagggaggaagcgagaaagctgggaggtggcgtaaccgggatcagggccgggactagcatgaagtaagagaggcactggctccatgtgcaaaatgtaacagagtgccaggaaattcaatcatggataactattttaaggcactatttaaaatagccaaagttcgcgcaaaaactccctgatgaacaaagtatcaaattttgaaataaagacagactcctgctgtttgtttagtgacccagcaatattgtggaacaggaatggtcgtttccaatcagcccagggttctggtgcacacgggcattatggtcctgccgtggcagggctaggagggtaagcagacagatttggcaatacagggactgttataaagtcatgcttcttgataatagtgtttttaacttcttccacttgcttcgtaatattggaggatattttgggaaatgcatataagagcatgtatttt

SEQ ID NO: 68797 - DNA, 721 bp, Homo sapiens
aagtatttttacgtatgattatgctgggataattacagcacccagatcaagatggaaaacgtttccaggcaaaaggctggctccctcgcacccctgcccagtctatatccgcattccatgactgttccggttcctgtcgctaaggtagtttggccagatctagaacttcatataaatggactcagagcgtaatctttggtgcctggcttctttgactcagaatgtttttgaggtgtacccatgttgtggcacggacctgtggttcattctggcaagaggagaattcgcgttaaaaacgatggaccatttttccctaatattttgagccccatgatgcaagctcagcgcccgagaagctgtgctcatctgcaaccaccagggggcagtgcggccccacagctgacccagccgcccgcaggtgccacttgaagtgggacccggaaagagcaataacgcaagccttccgagaaaggattctcaaggcgtctgctttgggctgcgccgggctacagggattgctctgatgatactgcagcaccgtcgacgatatgttaggcccaagaggtcatggtaaggtgaccttctacagtgaccatagtggtggcctcggttgacacaatgtctatgcaggaggcagatggacgctgtggtggcctcgagagtggcccagccacctacagggctgggaaacgctgttcctgcactctgcccagctttagac

SEQ ID NO: 68798 - DNA, 749 bp, Homo sapiens
ggccgaaagaactttaagcgtaagccatctcttagccgccggctaaataaacagacttaattcgtctcaaaagtgtggtgttttctctaactcgctcccgtgcaacaagacgggggtttcaccatgttggccaggctggtctcgaacttctgacctcaggtgatccatccacctcggcctcctaaagtgctaggattacaggcgtgagtcaccgcgcctggcctctaacatgtttactatacaaagaaagcatatctatgtcagtgttaccccagcctgtttccctagcttatatcccctgcctgggtcctgggagcaaaccccagctgaactcactaccctatgtctacgtcttgtctcttttgtccacagttgtgtccccagcacctgaaacacagcccagtgaagagtaagtccctagttaataattaacttgtggcttttatacaaaagtttctccaatgatgacaaagatatagtcatggttaagagcaggcattttttgggcggggcgcggtggctcacgcctgtaatcccagcactttgggaggccgaggcgggtggatcacaaggtcaggagttggagaccagcctggctaacatggtgaaaccccgtctctactaaaaatgcaaaaattagccaggcatggtggctcatgcctataatcccagctacttgggaggctgaggcaggagaatcgcttcaacccggaaggcagaggttgtggtgagccaaagttgcgccactg

SEQ ID NO: 68799 - DNA, 2224 bp, Homo sapiens
gcgggtggattacctgaggtcaggagtttcagaccagcctggccaacatggtgaaaccctgtctctactaaaaatacaaagaacatctgggcatggtagcgcatgcctgtaattccagctactcaggaggctgaggtgggaggattacttgaacccaggaggtggaggttgcagtgagccgagatcgtggcactgcgctctagcctgggcaacagagcaagacttcatctcaaaaaatataaaaatttaaataagtaaataaattccggtgtccattaaaaaagtcttaactgtctacggctgctctattttcttctatctagctagctgtttattgagctagggtctcactctattgtccaggctggagtgcagtggcacaatcacaggtcattgtggcctcaaactcctaggcttaattgatcctcccagctcagcctcctcagtagctgggactacagcagcttgtggctacgttactgcaacaatgactaaatagttgcagagttggaaaaaagacccaaaaagcctaaaatacatactatctagcccctgacagaaaagggggcaatttgtaagagtaaaataattttcaatatcactctctcttcctacactacacattggctaattcatgattagtaaaatgacctaagcacataccagcaaggagattatattttaggaaagggactttaaagtctactcaaatgggggattcaactaacttctcacctaaaaagcactcaaagaatgaggtatatttttccaggaagtctgatgtcatttatctttctccttttgtacctcccaagggaagacagaagctaaattaaacacattatccctgttcttatattcctataaaactgaattttttgaaatgtggtgcaggagaaccaatggtcatatatatgccatgtttcattttactagttatgtattaatttcacatatattaggaaaagccacaacaagcaatttaaacacacgagcctatacattgtgtttagcttaggacaaagctgcattacaattttcatatttaagtatgtaataaaatacggcagaaaaccatggcaatgaaagttcaggcaacactaattcacaaagtcgctgccaaggttaaaattttaaacatttcctgaaaagcatgctctttatgggaattaatgtgccgaaggattgtgtaattaagtaccatgttttgtgaacttggcttaaatggaaccgtgtcatgaaacaaagtaagcttttaaggactctggtcagaaacaagggggtaaaaaggaagacttttctgaaactgtgtcaacacaaattatgtcaattccaaaacaaagctctatgactcaaccatgagtgtctaggaccacacagctatgaatcagaactagagaaagatatagactgcagcctttattttacagaaccaaaagccacaggctctctctacccctcctaccaccatctggggagcagctagaagcagttcttgaaaataacccaaggaaaagaaaaaagaaaaaaaatttcccaagaaacaacacaagcaaagtcagtagaattatttgagttcacaactaaatcctcattattttaactcttggggacattcatggtatcctgaagaactgatgcttgctccttaaagaattcctgtgtgaagggagtgagggagagagggagggagagagagagagaccaaggaaggaagcgagtgtgaaaggctgtccaaggctttaggccagaagcctaaagctggtactccaacctgctttattcattctagaaaatcttccaagacatcttaaactgacatttaataattggagattttacttaaaaacctgacatttaagaattggaggttttacttaaaaactcagactttgggccaggcccagtggctcacacctgtaatcccagcactttgggagcccaaggcgggtggatcacttgaagtcaggagttcgagaccagccaggccaacatggtgaaaccctgtctctactaaaaatacaaaaattagctggacatagtagtgcgcgcacctgtaatcccagctactcgggaggctgaggaacgacaatcacttgaacccaggaggtggaggttgcagtgagctgagatggtgccactgcactccagtctgggtgacagagcgagactatgtctccaaaaaaaaaaaaaaacacaacacaactattaaaggatatgacct

SEQ ID NO: 68800 - DNA, 6239 bp, Homo sapiens
aaaatacaaaaatcagccaggtgtggtggtacgctccagtagtcccaactactagggaggctgaagcgggagaatcacttggcgccaggaggcagaggttgcagtgagccaagattgcaccactgcactccagcctgggcgaaagagagagactccatctttaaaaacaaaacaaaacaaaaagaatgcaaattatcaggccccaccccagatctacagaatcagaaactctggggtagggcccagcaatctgttttaataagtcctcccgaagactgggaggtacactagtttgaggaacgctagggtatgtgtatgtgtttaggagatggggtctgagttctcaactctacacaatcctgttccacactggcgagccagagccaatggcctctacttccagacattatttgaggggttggttcaggactcaggatagaagctaagcaagggagtcaggctggagaatgaggctaaacaggaaacaaccccaggcaagtctccacctctcagggcctcagggcctcacctgcaaaatgggaagagccgggagaaagggactagactagaagttcttgtttaaagaccagacagtgctccagggacccttgaacaggccatcactgtatacaggagtgcaatttctagggacatggagtcatagcttccttcacctttgcaaaggtgtcctcagctccaatgattaaaaacttcagggcccccagaggatgttaaaagtccctcttcaacattacttaatttaatgagaaagtgggaaaaaaaatcactagacagtaatatacttgtaagcgatttagagttggcaagggactatcacccaagcccaccaggaaacaaagggggaaactgaggttctgctcagcaagaggtagggggaggtgggtcctagcccaagcatgcccacacctgagagtattccaaaccttctagtttcagcaaaacataaaaaccccaattctgtttgctgttacaaacaccaattccccctggagttgatgagagttcagtgactgtatccaaggggtcgaaatttgataggttccaaacaacagacacatcagtcaacagcaggagatttcaatgaagggttgtagggagaagaattaggaaatgcctgctggattcggtatccttcggagggatgagacagcaggggggcattattacttaaatgccccccactccagtgggggctgggcctctggtgatgatggactggtgggtgtacacctgactgtagccgtggtacccaggctccataaggaccctttccagaaagctgagtcaattttttcttctttaatgatttaattctgacaaggatgtattgcccagtgcatttcatctataaactttgaacaatgacaaacagccactgtcgactgaaccactggttcaccctggatctgaaagacttttctgctgccttttctgagggagtaggacctgtgaccccgcccggctggctcactcacaaccctctgcctctcacccatcccccaaaaatgagtggttctgaatgagttaacgtgggtgagggaggaatgcagccttatggagaggacagagcagtgactcaggaaaacagcttggcatggagcggaaagcagcagaattttcctctccttgtgacattttgctgaaattgtaacaatatgggaaggtctactgggtattaagaaccaggcatgaggccgggcacggtggctcacgcctgtaatcccagcactttgggaggccaaggtgggcagatcacaaggtcaggagttcgagaccagcctgaccaacatggtgaaaccccgtctctactaaaaatacaaaaattagctgaatgtgatggtgagcacctataatcccagctactcaggaggctgaggcaggaaaattgcttgaacccaggaggcggaggttgcagtaagccgagatcatgccattgtactccagcctgggcaacagaacgagactttgtctcaaaaaaaaaaaaaaaaggaaccaagcatatgaggagatccttcccaagcctgtgatccaccagaaatcatcctggagctcagcacttcctggatgtcttttgatttaaggggcatcttaattcaagataacacaggctcatagctttcctgagccaagagtatgaagagctaagagtttcggccaggtgtggtggctcacacccataatcccagcactttgggaggccgaggcaggcagattgcctgaggtcaggagttcaaaaccagtctggccaacatggtgaaaccccatctctactaaaaatacaaaaaaattagccaggagtggtggtgtgcgcctgtaatcccagctacttgggaggctgaggcaggaaaattgcttgaaccagggaggtggaggttgtggtgagccaagatcgcaccactgcactccagcctgggtgacagagcaagactcgctctcaaaaaaaaaaaaaaagaaagaaagctaagagtttcttttattatatgtgatattctaggcaatgttcaaaatgcatttcctgtagtccccactaagtcacctgcctgagatcacaaagctaccaaggagcagtgctgggatttgaacccaggcagtgaggctccgagggccagagcagtactgggatttcaacccaggcagtgggactccgagggccagcttctaatctctgtaccacatggccttgtaccaggagggcctcatcctcagccctgtagcaagaggactccctaatttagggtctatgatttaagagcacactctcattttgccttttttcccctaaactgcagatggaagtatagggacagagaaggtccaacaaacagtttcaggaactgggaaaaggtggaaagtcgtgtcattcactgatgacaccgttctctcaaaggcagtccccagaaagcacattcacctcccaatttccaaacagtggcatcagtccctgaaataggctgggggctccagggccaactcacctccccttttccagcctccatcaaggctaggcctccccagcaggccacatcaggtacccgccctccaccccactcctgcccccacatccggtgcctgagtcacagcacatgccgttctccaggggctaggaaatgacacaccattacagggaattgtctcctccctcaagggaaagggccgcagctgaaaggccgggagcttcttgtgtttttgtgggtgtttaatttccttaatgatgtcgacagcaagcctgctggggcctgaacgaaaagagaagcttggtccacaggctgagacaggcatgacaggccacaggagtagggcaaccaaccatgtgcttagctgggtcccgggcaaaccaggacacataggtcaaggcatatgctctcatgggccaggttgcaaacgacagagaggcaggatgccacagtggtggggaatcagctttctggcgtcaaaatgcatgcagaacctggctgtgctctcccctgcagtgtgaccgtaaaaaggcaacttaacctctctgtgcctcagagagtttaccactttacaagtggtaccttgtaaagttatcgaagaagtcaatgagttaattcacgtaaagctcttagtataatacctggcaaatagtaagcacctattcaatggtaactaatgggtaactgtattttttttaaccaatcactcttcctccttttcttgcttctcttccacctcctccccgactaccgccccccactccaaaaacacagcttgctttctggaaggagcatgttaaatcaattccacaagttcaaagctatggaaaacaccggcctgtgtagactggagaccagaatcagcccaggacaggatttctgcatttcaatcagactgaaaatgccaggtttcccccagtaactgtgaaggcagggtcagaagcagaggcctgctctacagcccttttcgtaatcaccagtcctccccttggcctacttcaaacatgaccacacactgctgctcccccagaagcagcaaagcagagcatggttaatcacttcaaagcgtttcccaaagacacagagcaggtacccaaacaggcctcccttccccaggaatatttggggccctccccaaccagtaattacatcataaagagacaaaagtccggaatttcctcctggcagagcatagaagtaagaaatcaggagcaaaggttgggggtggggaggaagcaaaattgtcctcgcagcagagaatgcctaagccaggaggaacttgtaaatgaaaaccgctcgcattagcaaatgattatttcctccaacgctgaccgtctcttagacccacagaaactcgaggaccggtctgcaccctggctgacttgggcctgccagagctgccgggctgagccctctcctccagaggactgcactggcctgaactgtgcttataaagaatctctgcaaatcaacaggaacttctcatccagagccgggatagggagggctggaatggaaatgaggctgtggaatgaaaggtcactctcaacttggggaaaatggcatttcaccaggaacatcaagtacctcggaggcagaacatgcgaggggcagggaacgccaagaggaggcacttacctgccattgagaaagtgcggctgctcagagggcctagcctctcttgttcaaaagagaacagaggctcacccacagcagacattcctgcttccggatcctcagcggcctctcccagggggaggaggaagaagcaaagagaacaggctaagagtcaccacttaccaggccagccccggtcttgtacgcattaggtcgcccggcggggcaaggacactgtcacctctttgcaatcaggcagtctgaaacccagcgacttgccttcatgtccccgggctttcgcctataatttatcaccctcaacagcagctcggctgagctgaaagtctccggtgcagtgcaccgaagagccattgatttcgtgggattgtgaataaatacgaggaactgcagttgttctgctggccgaggtgacaatatcagaagggagcctggggggagggaaacagctgtggtttgcattttgaagttgtttttaacatttttagtaattgtttcagattctccagttctgatgcccctctcctagaaatgagaaaacccatcttttatacttgaggtataatcctttcccactagacacagcctcctccacccttctctcaataatgcagaagtggtgattaaagggcacattcatatgtaaaaggcgaacttccaaactcgcctggcaggacagaaattgcttcaatctacagaaaagaggctgatttacaattgaattcagtgtttagccctcaacaactagaggcaatagcaaccgcggccctttctcctccccagctgggatgaggccctctggaaaaacgacaacatcgcaacaggaatttcctggatcaagaatgccaagttctttccaattttactgaggcaggatccgactccctgtgagaacgcactgcccaccacccacccaccccctcagcaggcccaggccccaaaggctccctccaacatgtgtacatgaggcccttcaaactcgaccggaacaccacaaagaatgtggagaaaccggttgcctctggcctttacattgtggctggctgaggagctggttctggtggctgacacccgttggcactatttatccagcccctgcctggcttgggttctggaaatctccggtggtagtggcttccaaactgcaatggggaatcgcggcgtcagagggcaattcagaaacaaaaagacagttctgtgctggcagcatttgaagcacagaagtgggttgggagaagcaaagggaaattagcttcagaaagggggcagatgaaggaagaggcgccactgctaaccaaccaaggtccccatctgccctggatggtatctctaaaagccacctaaagaaggcaaaattctctactgaaacgccaggtacgaagggacaggccctccacagtcaccttgtcacattcctttggggagcgaagagttcagacccaacatgtcacccaaattaccctggccagccaccacgtaaagatgctgcggctgtgcatggtggctcacgcctgtaatcccaacacgttgggaggccaaggcgggcggatcacctgaggtcaggagttcgagaccagcctggccaacatggcgaaatcctgtctctattaaaaatacaaaaattagccg

SEQ ID NO: 68801 - DNA, 1294 bp, Homo sapiens
gctggagtgcagtgagtcgagatcacgccattgcactccagccggggtgacagagcaagatgccatctcaaaaataaataaataaagatgcttaacatcactcagatagtagtggggtgattctaagaacatgtcctattgtctacagggctcatgggtgcacagaaggatagacggggtagccactgcaacagggctttgtagaaaagtcagacaggaaccaacattgatgcccatatgtgaaacatcatgatgcagccataaaatggaataaagatggaatcccgtctgcatagacgggcatggtccaaaatccaagtgaaaggagaccagaaatagaaccagggtaaaagtttgttctctgaggcttctgggtttgcagagacatggaggaacacccaggaaacccagtaaacgctggactcctctgaattatttctgatcatgtttacatatttaacgaaggtatttattaatggctttggggaaactgggtgataatgacaatatttatggaacactcactgcatcctgggcactgcccagccagggatcacgtctgtatcccttgtacccggcatacagcaggagctcagtacacgcccccatcatcaaacaaacacttttacggggctcaggtgtttagaagagtggaaagcagtatcagcacacccaggggacatctggcaatgtctggggacatttttggttgtcacaactgggcaggaaaaggagttgcgacaggcatctactgggtagaggtgagggatgttgctaaacattctacaatgcacaggacagccctaagacaaagaatgatcaggcccaaagtccacagtgccaaggctgagaaatcctggtagaaagaaacttcagtgagctaccaggcaggtctcaccatgtgtaaacacaccacccacagaggtgcatgtattcattaagaaggaaaatgattcctgatgtttcacctggtggccctgacttcagacttcaaagaaaataatgggaccagtcagtcaacaaatagtcactaggcaacaactagatatctgggctatcaggaaaactgtcccaggaaggcctctgccctgatggaaggacagctagaaacacagttgtaacagctaccttttattgagcagttactatctgggaggcattgttagaaatacaaatatcgatttatttaaaactcgccgcccttttttttttttttttttttttgaaacagagtctcactctgtcacctaggctggagtgcagtggcacaatctgggctcattgcaacctcagc

SEQ ID NO: 68802 - DNA, 1308 bp, Homo sapiens
tcttgaactcccgggctccagtaagtctcctgccttggcctcccaaaatgctgggactacaggcatgagctaccatgactaccctagatcattaaatctaaacttgaaaggcccttaaagggtgtaacaggacaggggaagcagagaaggataataaggtaaagagagggatcagagacaagggatgttttgctaggatggccaggtcctagaaagttcaaccccattataggtattgcataagttttttgacatttttataagcatggagagggtggtatagacaaaaacataccaaactgttatcactggttacctggcaggagaagatttttagctttttctttgtatactttggcttgttgtcaaggagatacactgatttttatcatttgaaaggaaaatccaataaaccttaacccctctgccaccccacaaaaagttaattcttttttttttcgagacagagtctgttgtccaagctggagtgcagtggcatgatctcagctcactacaacctctgcctcccaggttcaagcgattctcctgcctcagcctcccgagtagctgggattacaggcgcgtgccaccacacccagctaatttttgtatttttagtagagacagggtttcaccatcttggccaggctggtcttgaactcctgacctcaggtaatgcactggcctcccaaagtgctgggattccaggcatgagccaccgtgcctggccaagttagtttccagttcttggaagagatccttcattcacaaaacatttaatgggcaactaccatgaaatgccagtcccttgttagtctaaagaggtgagagttatttggtctatcagtctagaagagacacacaggtaaatgcataattacggtaaagcatgttgaaggctggagggaggaccgcccagctccctggcatatcctgtggaactttaccccagtcaggcctaggtgccaaggggcctggcaaaaagggaattcagcagggcctgaacaaaacacaccaacttgcaaagatagaaagaggactgtgttctctgcacaacttttcaaagaataggcaagctcaggaggcaatgaccaagcaaaacttaaaactcaataatcatgcatggaacatgttcagtgctgtgtcccctggcgacatagcttcacctacagcattcagcacagcatgcacaacaaatccattaatctactaaggctacggaacagtgtgatccaatcaagcttgctcgaatgatggcaatgttctcgatctgttctctatcagtgctgtctaataacagcagcctct

SEQ ID NO: 68803 - DNA, 1725 bp, Homo sapiens
aaccagggggaaagggccatttcaaagagtactatgtccctagagggaaaaggaagacaggccaccagtcgctttgcagagaacagacacttgagctgggtaataatctccaggcactggattaatgctgaaaacaaagccatcctctctcgccgaaaggctgcttttacttcagtctctaggatagaagttctacccatctgatagagctaaatcatttgttcattcaaaaaaatatttattatacgctcaccagcagcaggcaaggtggtagtaaaacaggatgagcaaaaacaaaaggcagaactcatcctcattttgagccttaaaattgatggggagtaaggagaggaaggcaaggaggggaccttcaaggtatgggcaaaggccctgaggctttgatggatctgcacagtcagtgtggctggagaagagagaagtggaacacggagagaagtggaacacagagagaacggaacacggagagaatggaacacagagagaacagagactagcaagatgggcagaggccagcacaggagggttttgcaattatgaatctaaaagccaaggaggaaacacttaagagtttaaagtaggaagggatagccaggaagatgttcctttcaaaagactgggagggtgcggcagatagagatagtgagaacaactacgaggccactgtagttcaatggtgataggctggttgaagtggagtgacatttaggatacgatattgtaagaaaatgacacaaaagggcaaagaacagaagaatggggaatgagtccatatctctgggggtgaagatgtaaaatctctcatggacatcttgagtttgagacgcccatgaacaggcagggaggtcaggtaggcagctgaccctctgcaccatgactcagaagcaatctaggttggaaacataaatgtctgagtcataaagctccagatgtgggtaagatcacccagagaaggaacgtgctaggcgagacaaggacagggccaagctttcagcaactccagcatttaatggccagagagaggaggagaaggtgccagggaaacagaaggaaaatcagcactgcggtggcaaagaaggcaaaggaagagagagtgtccacaagaataatcagcatctccagtactgcagagacagcgcagcagatgaggatggaaaacctcccctggaaaaggcaacacagagtctccaggaagctcagtggggatgtgaatgtggaaggtcagggtggaagccacattggagcttgcaggacaaagacaggaatacagacgcttctaagaagtttggcttgctggacgcggtggctcacgcctgtaatcccagcactttggaaggctgaggcaggcagatcatgaggtcaggagttcaagaccagcctgaccaacatggtgaaaccccgtctctactaaaaatacaaaaagtgtaaaaaatacactttggaaggctgaggcaggcggatcacgaggtcaggagttcaagaccagcctgaccaacatggtgaaaccccgtctctactaaaaatacaaaaattagccgagcatggtgacgtgcgcctataatcccagctactcaggaggctgagacatgagaatcatttgaacccgggaggcagaggttgtagtgagccaaaattgtgccactgcactccagcctgggcaatatagtgagactcaatctcaaaaaaaaaataagtttggctttgaag

SEQ ID NO: 68804 - DNA, 3298 bp, Homo sapiens
agactctgtcgctacaaaaaattaaagaattagtcaggcatggtggcatgtacaggtagtcccagctactcaagaggctgagatgggaggattgcttgagcccagaagttcatggctgcagtgagcgaggatcatgccactgcactcccgtctggggaacagagcaagcccctatctcaaaaaaataaataaagacaacacaaaaaatttaaatgtgtatattcttcaaaaggttaatagttaccctatgaccccacaatttcactcctaaatctatacccaagagaaatgatgtgtcgtgtctgcacaaaaactcagacatgaacactcaccgcagcattatccctactagccagaaagtggacacaactcaaacgtccatcaacacatacatagataaacaaagtgtagcatatccatccaatgcagcattattcagtcataaaaggaaatgaactacagaccctcctcaactcacgatggagttacagatgataaacccataaaatgtaagtaccagaagtcaaaaatgaggtcacacacagtggctcatgcctgtaatcccaacacttcaggagactaaggccagaggatcacttgagcccaagagttccagaccagcctaggcaacacagtgagacccctgggtctacaaaacatatatatatgagagagagagagataaaaaaacacaaatgcatttaagccagacatagtggtacactcctgtagtcccagctacaccagaggatcccttgaggacaccattgcactccagcctgggcaacatcgtgagaccccatcagaaagtaaggcaggcagcactttgagagactgagggaggcagatcacttgaggtcaggagttcaagaccagcctggccaacaggtgaaaccccgtctctactaaaaatacatggcagggcacagtggctctcatctgtaatcccaacactttgggaggccgaggcaggtggatcacatcaagagattgagaccatcctggccaacatggtgaaacctcgtctctactaaacatacaaaaattagctgggcgtggtggcacatgcctgtagtcccagctcctcgggagactaaggcaggagaatcgcttgaacctgggaggcaaaggttgcagtgacacgagatagtgccactgcactctagcctggtgacagagcgagactccgtctcaaaaaaaaaaaaaaaaaaaaaaaaaaaaaaaacattagctgggcgtgatggtgctcacctctagtcccagctactcaggaggctgaggcaggagaatcgcttgaaccaggaagcagaggggtgcagtgagctgagatagtgccactgcactccagcctgggtgacaaagtgagactccatctcaaaaaaaaaagaaaaaaaaggaaattaagaaagggaaggagggaggaatgaataaatgaataaataaataaataagcatcgaatatacataacctagggaacatcatagcttagcctagcctaccttaaatgtgctcagaacacttagagttaggcaaaatcatctaatgcgaagcctattgtataatagtgttgactctctcatgtaatttatggaataccataatgaaagtgaaaacagaatggtcgtatagattgtttgtttaccctcgtgatcatgtggctgactgggaggtgcctggcaccccaagagagtctcatactgatgctagccagagaaaagatcaaaaatccaaaatgccaagtactgtttgtactgaactgtcacttccgcaccactataagtcaggaactgtctgtactgatgatctatgctacaagaatgtggatgagccttgaaaacattattctaagtgaacgaactcagaccaaaaggtcacatactgtatgattccatttatatgaaatgtctagcataagcaaatccacaggcacagaaagtagactggtacttgccaggcacaggggtaacgggggaatgggaagtgactgctaatgagtatgaagtttcttattgggggtgatgaaaatctacaactgattgtgctgttggctgcacaactctgtgaaaaaaaaaaatatatatatatatatatatattttaggcagtcttgctctgtcacccgggctggagtacagtggcacgatcttggctcactgcaacctccacgtcccacgttcaagcaattctcccgcctcagcctgctgagtagctgggattacaggcacacgccaccacactcagctaattttttgtatttttagtggagacagggtttcaccatgttggccaggctggtcggaactcctgacctcaggtgatccacccgcctcggcctcccaaagtgctgggattacaggcgtcagccaccacacccggtctccgtgaaaatatattaaaaaccatcaaactattcactttaaatggagaactgggcccaggagtggtggctcacaccagcaatcccagcactttgggaggccaagacaggaggatcgcttgagcccaggagttcaagaccagcctgggcaacatagtgaaacctcatctctacaaaaaaatataaacattagccaggggtggtagtgcacacctgtagtcccagctactcgggaggctgcagtgggaggactgcttgagccaggaaatcaaagctgcagtgagccgagatcgtcccactgcactccagcttgggcgacagagagagaccctgtctcaaacaaacaaacaaaaaaaaaggagaattgtatggtatgtgaattatatgtcaataaaggtattttttttttaagtctataaagcgctggatctctaggttcccaggaaagcccaggataggtgaggggagtcacaggaagttgaagggggcttattatcattccactcaccctcacccccccacagccatgacacctggtctttccaaactgatcacctcaagtcatcggtaaaggatccactatcaatagagaacaatgaaggaatgacgactttaataaggcaataaaaagtacccagatctctaaaaggcctcagccctgatatgcttattctacaggcatttagagaggaaaaagaagagatggttctttttaaactaagcttgaaacggtcgattttagatcacagtcttctagaataataatagtcacacaaacatataacgtgggtcatgcttcaaaaatggggcaaacacaaggtttgcatgagtgaaccacaaagctaaattgcacagacactgccgacaggattccatgaacagatgcacagtagagacgatgctggccaagagaaggtagaa

SEQ ID NO: 68805 - DNA, 1525 bp, Homo sapiens
aggcggaggctgcagtaagccgagataggcactccagcctgggtgatggagggagactctgtctcaaaaaaataaataaataaaataaaataaaataaatcaaagggccgggagtggtggctcacgcctgtaaacctagcactttggaaagccgaggtaggtggatcccttgagcccacgagttcaagagcagcctgggcaacacggcaataaccctctatataattaataaataaataaagataaaacctgaccctagttccatccctactttgacacttccttaattcatctgagcctcagtttccttaactgtaaaatgggaatgacacacccacatcatggaattagtatgaaaattaaatgaagtaatttgcatatcatgccatgaagtactcagaaaatattagccacgcaaacacacctggcatcgagatggcacttcccattgatgtaggagcatctttcagcaggatcattaccctcggacacaaatgtcaacctgacatcttgaaagctcgaaagctttgtctcctgagagctaaaacgctctactaaatgccaaggctggcataatggcaatgactggcttgggaattactcagttaataagtgagtatgtgtcaaggggagaggggcgtaaaaattgaaattcagttagagaaactgaaaggtcacatggactagatgtaggaataggactgaggaattctgcaccaattattgtcagagtttctaagtttcccaagaagaggacggctcagcacctgttttctaagtgcaagtagagaaaaacacgttgccaggttcataagatggtagagtggtcaccttatctccttttgaggacccatctctttcccagtggggacagcgttggtgggtccaggtgtccaggatattagcccttccctggccagagacgtgcacatggactttgcgctattgtccctgaggaggctccgggctggctctactcccgagagtggcctggacctccagccttcccaccaatgcagtgggagcagcttcacaccaacagaccacctgcagtccatccctttcctgctcagaaccgaaggaccctgacccgggtcatgtcacaggggaacagagtccctaaacttcccaagaaaagcaggctggaggaaaaaaaaaaacatgttcactgagcctggagatcatcccactgcggacgctgagatcactgggactgaacaagagataaggcttcatcccggtcagcttcacagacatcatattttcaccatgcagacttcagctctgggaacctcagcaaccccaatcttaaccccaggactttgaatattaagccaagtggctccggcagaaaggtgctctggaaacagaagctaccaccaccgccactcactatggggcacgagagctcagtttcacataacgacaaccaccccagagaatccttggggaaagttctccctcaaaacaaggtgatcccttcccctcaatgattccctaccaaagcaagaattcccaagcaccc

SEQ ID NO: 68806 - DNA, 565 bp, Homo sapiens
aagccactgcactccagcctgggcaacagagcaagactctgtctcaaaaagtattttttttaatgtaaaaaaaaaaaaaatacagcagccagcattctagcagagtaacaaataagaaaatacaaagtgaggacaaaggctataaacaaaatcagagggatagaggacgctctggatgctggaaatgtttaattatcttgatctgggtcagggccccatgagtgcgaacgtgtgttaaagttcatcagactgaacactgtagatcaggttaaaatgtaccagaaaatagtaaacaaacggtggacagtagaagccagccttctcactgttggaggaggaggttacagagaaaccagggaataaggctagaatgatccatgtggtaatgcgaaaaggtcaaacgagagaatgaactcatgtttagctgatatagacacagatggatacatgtaaaaatgtttacacagtatgtctatatatccttccttgtctactgagaaaatctagaagcaaggtggctcacacctataatcccagcactttggaaggccgaggtgggcagatc

SEQ ID NO: 68807 - DNA, 886 bp, Homo sapiens
aggtaaaatgaaagtgcttcaaggacagcaggcatctgaaaagccaagctaaagggctgcacctcagtctacggcaaaggtaaaataaaaaggctgtttataagcctgcaaacagccaccaaatacccagccctctgaagcagccagtcctaagacagttaacatcaaggaaagacaatccgagtctgcagaggagaaacacaaggaaaacattcccttatccaatgcacaggatactcacaaattagatttctgaccacccccaacagagcctgagaattaacaatgggttttgcaaaacccgctttcagaggccgaactaacagcctgagtggataacgtcatttactgttacaggtctgagcattggcctcagaactcctctggtgctgggagtgaggagtttcaaggtgactgctttttagctccaggggagaaaggagggcacagtgcccaaggccatgccagggcaaggacgggccactggcccccgccggccggtaggtaaggtaatcgggatgggggggacaggctggcagcacactggctgcagagctggcatggccactgcctgtttgtttgtctgcaaggagagtgggaagtagcggggagggtgaccataaccttagcaacctgaagccaagggtgaacccttgctcagatcttgcattttaagagtaaccaaagggttctgaaacatattccctttttaaatctctgctgtgcagtagcgaaggcccctttgaatgtatctttctttccagagtcaaccagaggcaaagccagattgagggttcccaggctgacaaatgtctgctgcctctgccacaggagagagaaggggaaagagggcaaaagaaacaaagacatcacgcgttgcaagtgg

SEQ ID NO: 68808 - DNA, 6646 bp, Homo sapiens
tctaagaagctaagctggcctgccttgcacagacttttctcaacttagaatgtggtacgtttctgctgattaaatgagcctttttccaattcggtgtcagaaagtgggctactggacactcatttgaaagaaaaaagattactgactccataaagttgacataacacagcaattgaatatatttcctgcatttacggtcatgtcggattggtctccaagctgaaaatttatgtactgaacttctagggaaattctgaaggtactgctaaacaagactctacttttcccacttaacttctagctgcagccttaagtggtcaagggaaatgtaaaaagtgagaaatcttatgtggggccagcatgcatacagatgtgtggaggagacctgaaaaaaggccaaaatgtgttggtcagtgagtcctgaatcaaacccagtctggtggtagatgagattttgcactatacataagtcctaaaacatgagcacactgacaccacccccccaacacacacataccaccaccaccaccagcttctacaccaccaatgtttttagggctctgcacctctaagaacaagcagtttcatgacatttcacaagcacatcacctactcacagtttgaatatccaaacaaaccccattaaaggtctagagtcaagtcacaatgaactgaacatttctcccctgactcagggtaaacaggaagtataatcttcaatcctagctgcaggttatcaggaaaaacagtggattcaaacagtcacctaaaatcaagacactctttaaaaagcccttattttgttcctgctaatgaagcccccaactcctgtagccaagacccactattacaaacagaccccaaatgttcgcaaaactcttcaaacatggtcacagaggaaatggattgctttacttacccaacaaatgttcaagcaaccgtctcatttttccacagttaggaagagagaacaggctggcagatttgggacttgatcaaaaaggaaatttttttaaacagttacatggtattattaaaaacacacacaacaacaacaacacaacccaacaactgaatatggaatgctgtcatgagccacagacatgattttatttcctctacactccatgacacaggagaagagaggaggatacaatgtataaaagggacaggaaaatgaaaacaaggataaaaggtaacattagttccttgaaaatcatgcaagagtagaaagctaagggattcagaatccttgcagatttttttttttttttttttttgcaggatgttgtccaagatctctccccccaccccccagtccccatccctactccaaaaaacttcctccaaagcctagaaaacactttcagaaacatttgctggctgtaggctggcttgcagaacactctgtagcaacctaagtcaggaaaacaggctgaacaatgtagtttcaagtgcagaagctctgtagaataagagaagaccgtgtacagacaccaccacccacctaggccccaggagctagactctccttagcactgctctgctgagggcacaattcttttgcaaacacgctcctctcttgtcaaaacttatccagccttcccagaacctctttggagaggcaaacttgcctgctctgctgtctgccatgagctctccttggagaggagcctgtttgcttaccttccattttcttcccccagcagggcatgtggcaaaagagaagacaatagtgcaggggtgggagggggggaactgctcagagagagagagaggggaagagagagggaagagggaaagaaaaaaaaaaaaagaaggaaaaaaaaaagcttcttttttggcataccaggatctagcttcaaactcttccagaaacaccatgccctggtggaaggaaaggtgtgccaggcccttgccagtttgcaaaatcaagctatggctaatggctactgagccatgtgacccaagaaagcaaaaaaattctctctaaacagttccaagttaacataagtgctctgggggtgagtgtggcacggccagccacagagaaatcacactgctcgcccacaattcggatgtctcagagggagggggaaaaaagatggttaaaaagtcgagcttacctctgtggatgcattgttaacactgtgtaatgtcaatacttataaaacatggaggacaggctcctagttctcacagaaaaagggtttggcacttcggctgatgatctggccgcctaataaaagctcatccccgattggctgccccggcaaatcggagtgtaaagccgccccggattggctgaaacacttcctgagcgattatctttgtgaggctcgggtgagcaagagccatcctgtgcatagaaaaagacaggctaagctaggccttttgcagcaagaaaaacttgggaaaggggcccccacacgcacttctcctgcaccctggctagatttcccggcacgggccagccagggcagccagcctgacctgctccaggaaagcctgaggcccggaggtccctgggaagggagtttcttggagtgggctggaacggctcaccctcacctgcccccagagaaacggcccttgtccagggaggaaggccagcctttttctagaacagtccagcagggtggctctccaaggggaaggggaagctggggagtggggagtcccggggaaacagccaaggggccagaaaaaggggcttgaggcaggcctctgagaagctgggggaagcaggcagcccgggggagccccgaaaaatcagcagagagcagccctggcttctcagaggagcgaggagtagctgctgaggggaggaggggagcagagtggtcaagtttgcatagtcattgtccccatgcctccttgcaaggcaggccagggagccgtgggcctctcgcgccctgcttagccagtcctgcaggcaaaatcaacgtgggttcctgtcgccctgccacgatgccaagggggacccctctcggtccttaccctaagaaaaacccaaagccctcctcgcaggccacatgcctggatctacaaacttcccttccctcccggcccctcccccgcggccgagacctgctaaacctgtcagttaaacacaaatctgacttccgtattagcctgcgatgccttcggcttcctgcctgttaaccctctctcggactcggggcctggctgggaaaaactaggccttgagatcgcagcgaaggcctgtggaaaaataccagctgcagctctcccggcagatgcagaaagagagagagagagccgctgtctctcagcctttgcttcccagggaggcgtgtaccttgtgaatccagggcacaggcagtgcctctcgggctgagaagccatttcaatccagagggagacagaaagatggcacgctcagcccggaaacaagagcccccattatgcgtcaggcctacccccgtaggtcagcccttcctgccacaatcatccctgtatgtgtgtgcctgggggagttgggccctcctcggtgggcagacaaatcccctgggcttcctaaggattcttgcttccatttatttgcacagagaacggcttcttttcgtcccccaaggcagatggagcagcgatttcacacacagccctccatttggcagcccccccacccccccatctctggcaccgctccccagtaaaatattaactggttgttcagagctgcttacaattctacccacttcaattgcgttaggaggtctttgctggtctcctccctaaagctgccttcgcagttggtctgtacccagagatagaaaaggaccgtaaaatgtccccagctttctcgctctctttccttcttcggcattttaaatgacaaggtgcttaattaacaggattttttaaaacagcaacctggaaccacagaagctaaataaacaccattctttagaggctggagaaagcgtccagagttaacgcagccatatgccaggaggcataactccggagcaataaagtctcccctctcctcctaaaattaggacttgtgggctttcttgtcccacacggttcccacaaagaaaacgaagagctgatggcttgctttccctgcccccccccaacccccacatggacaacagatgcccactgcttgtacataaattcttcctggccgggaatctcatatcaaacaggctcaggaacgagctgggaatcgaaactcactgtacggcagggcaggacccaggctttataaaaacggacaggatgttgctgttgttactgttttaggctgctgaggccaagctgcagggagggacagctccatggccacccaacctgacaaagctccagggctcaggacagcaggcctgggcctcaccaaaagggaggggcctgctcttcctggaggtagaaagctgcatggggagactaaatgggaggaggcgagaggtggaggccacagtgaagcagtgcgtgctcaccctcctagctgtgtgggcagcggccctccaccgccatcccatatggaatgctgtttgtttctgcgggtgctgctttgaggggaacaaacaggactgtggggttggtggcagatctcccatgcagctaagtccacgaaccaatgaggaaataaaatatgccgctggtgtgcgtggtggattttaacctgggattaaagcttgttgcataagcagctacagcatcctccccgcctccctccctctctctgatcacttgatcacttgaaatgttttctggggcaaagagcaggaagctgctggcttattctggcagctctgctctgtttgaggaatgctgttggcattcgggtaggtctgaggttatctggaaaacagcaattcggctggggacagacacaaaagtatggtggcagatggaatcctgggaggaacacagattgaaaagaaagcctggggcaggcctacgaagggctggtcctgggcttcatggaatgtggctgataagcaggaaataaaaccaaatgttgcaggtctcaatctagaaatccattcagcagctcctcttaaagccccactgcagtgagtatcccagcagttacttctaaattagtgctttacatagactgattcctgaagtaggtggcattgttagaaacctggaactaagcccagagaggtgaagtgagctgcccaaggtcacacagctgggaagtgccagagatcagatgtccaccccgttagcacttcacatccctaaactctgtaccttctcctggctctaaagaaagaagcaaaagcaaagccgaaccaagcacagcagaaacaatgaggctgaaacctacgaacagcaactgcataatctgtgttttcttttaggaggtagaccagttttttgcttttttgttttttgatacagtgtctcgctctgtcgcccaggcttgagtgcagtggcatcatcacaactcaatgctgcaacctgaagacccacccttttgaggtgggttttcagtattgaatgatggcgctgaaggaaacttttagattagactcattcaaatgcccctcattacagattgaggcccagaggaagcgaccctctccctcccaacctccagcaagatgcaagatgtcaagggggaacactttgccatctctaaaattaggcttttatattccctgaaaccagtggttcaaccatggggggatttgcccttcagggggcatttggcaatgcttggagacgtgtgggttgtcacagttagggaggttgtattaccggtatccagtgggtagaggccaaggatgatgcaaaacatcctataagtacacaagaccagccccgccacaacaaggaagtatctgatccaaaatgtccaaggttgggaaaccctggctttaagccctttaaggaaagggaagaaaacagtccaatcattctgcctctggctagaaaagccagcacaggcctaaacaagcaggttctttggtgatattaataagcaatgagctaataaaaatagattaaaacgtgtctctcttaatattcccagggtacagagaggattggggtacagaatcaggctgtggggagccaggcagagtgtcacagtaacaacactggtctcgagggagaggaaaggctggccccagctcccttcccccagcaccttacgagctgaggcctggcctccctgaaatggctcgcccgttccgctggcctccagccaggcgagcagcagcaggagcggccccacaagctgcatcccgagatagcctgttcggctgcctacaaaaataagcacacttgcagttatcggcctccagctacagcaggcctctctgaccgttacgcgaaatggacaggattgagtcagggaagtgttttaaatatcttgttttgttttgttcctttctggccaattagaaccgaggccaacttcgggcacggtgacagaagggctcaccttcagagcccggagctgactgtgtcatgttacagccacaaagaggcagataggagcctccctcccttggagaagatgcctactaggagaggggtgtggggttttttggttttgttttgtttttttacctctttctaggagggactggcaggattaggcaaacggcgggagggaaaacaaaaagggctagtggaaagggcagggggtggatgg

SEQ ID NO: 68809 - DNA, 976 bp, Homo sapiens
aataaattcaatcaaggactttgggggaagtggggctgagaatttgcatttctatcaaacgccatcagaatttagcaggtgctgctgctgatccagggaacaggctttgagaaccagggctcagttgattactagtataattaacaacctctgatcccatcactggctcccatttcagagcaatggttggtgcctgcaagctttcatctcactgtgtccacacacaatcccatggggtcccagtgttcttatggatgaggttaccacggctgcaacattcacagtgaattgtccagggtcacgcagctgcagccaaagtctggggtggaacacaggtctaattacaagcaggagagaacctgggcaacactttctttgggagcatcaaagcaagctctcccaccacctgcttgagcacttccaaatcctgccgacatacccaaccctgcaacaggcaaagagcctcgcctcctgctgggagagcagcttcttgcggcgcggccttcgcgaaactccgtggagaaatggcgccccctggtggctccagagagagcagcgttccattctccgggctgggagctctggtctcatgcgtcatggacattcttggaccccatcactaacatggaaaatattattcagtccattccatcctaggaaagaactcagggtgctgaaaggaggtggggacttcagagctcaggaatgtaaaggaagggcggcggaccgagccctggggctctcagggggctggaatggttaaagcacagctgagaacaattcggagtttcacctttgaccttcccaaagacttctgctgaggaattttctttctttttttttttttttctttcagacggtgtttcacttttgtcgccaaggctggagtgcaatgtcgtgatctcggctcactgtaacctctgcctcccgggttcaagtgattctcctgcctcagcctcctgagttgctgggatta

SEQ ID NO: 68810 - DNA, 1991 bp, Homo sapiens
ccaacatggtgagaccatgttcctacaaaaaataaaaaaattagccaggcgtggtggcggacacctgtaatcccagctacttgggaggctgaggcaggagaatcccttgaacaagggaggcggaggttgcagtgagccaagatcatgcctctgcactccagcctgggtgacagagcgagactctgtttcaaaaaagaaaaaaaagagttcattctgtatgattccatttatgtggagtctaagaatagagaaaactaagggtgataaaggtcaggatagtggttatcttgttttgggaaggggcaagagggaactttctgggggatggaaatgttctgtgtcctaggggatgtttggcactgtctggagaggtttttgattgtcacaactggtggtgggggtgctactggcatttagtgggtagaggccagagatgctgctaaactgaatcttacaatgcacaggattaccccaaaacaattatctggccggaaatgtcaatcgggctgagagtgagaaattttggtatatgatttaaattgcttaaacacgatcaaggcatttctgcatccttgtgggcatttgccattactacaggcaatatttgagtgacggagacggctagttatccttaggatatagagttgtcattggaaagcagccagggacaatatttcccaatcccctttgcatctgggtacagcctgtgattcattctgcaaatagaatgtgagcaaaagcaatgtgtattagctctgcacaaagcagttgagaaacatgtgcgccttttccattctccttcccctgccaccactggatgcagacatcaacgatgaggccccagggatggaggaaagctgtcagtcaactggcaatgcagcgctagaggagataaacttctattatgcaagcctctgaaatgtgagcgttatttgttacagtggctagcgttactctaatagagtattcaacaaaaaaaatatagtctttgaagggcaggtctcccaaactgatatattaaggggcagttaatctcacttgtaaattctctgagagcagggatcatgtgctacacattttcttaatcttcgataatgctaagtaccatgttgagcaaatgacatgtttctttctctctccttccacccccgcccccaaagtcctatgacttcctgggttggaagagaatgtaagtgttcttttgtaatctttccaggacaccattaatggaaccacagaacaccaactttcacactctaattccatgtgttttggaataagatttactttgccccatgctccagagttgggtcctgattggcttacatcaatcaaagtcttttctttaccctggccttcccactctgtcacccaggttggagtggcacaatctcggctcactgcaacctctgcctcctaggttcaagtgattctcctgcttcagcctcctgagtagctgggattacaggcacatgccaccacgccaggctaattttttgtatttttttagtagagacaggctttcaccatgttggtcaggctggtctcaaactcctgacctcagttgatccgcccgccttggcctcccaaagtgctgggactataggcgtgagccaccacgcccggcctccctggtcttcttgttagggttcgcagatgaacacatcactgagtgagaggcaatgagatccaaggttttatctgggactccggaagggaagcagtttcttccctttcaagagaaagccctgagcatatgcttttctcctgtgtggtggtgtcggtttgggaggcttcagttactacagtaactttgccaccaagagagcaactctttcaagttgtcaaggatccataggtatagatagttctcaggggctcaaatattgtcagaacctaaattctttctctgcctctcttagtgtgttagatattctcactcgtgatgccacgataatgcccacaatttcagacattcaagtcataacaac

SEQ ID NO: 68811 - DNA, 1058 bp, Homo sapiens
aatttgcatgtcatccttgtgcagggaccacactaatcttctctgtattgtttcagttttagtgtatgtgctgccaacatgagcatagtccttatttttattttagccctcttacagtgggtacttttaaagcatttgatagcaaatgattttttcttccaaggcaaatatgtttaatatgtaagtctagaaaggaaaagcaaaacaaaaatgagctgggcttcaaattcttccagctgtggagtcatttgcaggttgtggagcaggacaagtctgttgcagccaggccaggtgccaattccaacaggcgcatgtgtcatctctggcacaaaaatcacaggtcaccaaaccctgatttgagtttaaaggaagaggcatgaataaggcaactctgggttgtaaagctcaggctgctctttatctccaaaaatttgtcttaaatatgattcttctcaggggtgtttttcccctcttttaagcaaaacaagaagtcaagtacttgtttaccctaaattgcattttttgatctctctcttctgctctctctttccccctcagttgtgtgtccttcccagggagaaaagtggttcagagtacagcctgggggtggagcttggggctgtgccagctcattttcagattaggtatttcgtaacagagttttaggcatgtgcagggtttaggcttctacccaaggaatctattttcacttgcagggaaatttcacactgtaattactatcatgaagcaaaatatggtgtggggtgagggaggagaacattgttactaacccttggatattaacccctacgaagcaagtttggaactgccatacattatcattattaacatttgagtgctctgtgcttgacactgtgtttagagctttcactatgctgttctatttaatcctgataataccctatgacataagcattattgttgttgctattattatcattatcagtgttctcactttaggaaatggaggcacagaaagttcaaataaccagccactatcacacagctttgtaagtagcagaaccagcttagcaggt

SEQ ID NO: 68812 - DNA, 2296 bp, Homo sapiens
gaggctgttgcagtggtccaggtgggaaatgatggtgctgaccgtggaggtggtaagtggtcagattattctattttatttacactcaacacatctaatactgactcaatattatctaacatacagtccacattgaaattgccccccaaattctttttacataaaaaaatcatcctgaatccaatcaagtctcacctattgcttttggttttcacctctttcatgctgtcatattttaaaagactccaggctagatgttgtgtagaatgtcccacattctgaattcgtttattttttcaagtaagctttttgtgtgtatgtggcaagaatacgacagaggtagcaatatgctttccccactgcatcatattaggagacacataacaacagtcctgacccattattggtggtgctaagttcgatcacttggtaagggggtgcctgccagatctttccattgtaaagcaagctgttctttattgtaagtcataaatacgctgtgggatgatacttcgggactaaatataccctgaatatactgctgcccaacaacatttcacccagtgactttagcagctaaggaacagcctcgtggcttccgaccttgtgcctcagttcgctcatctgaaaaatgaggatgatcatggtccctaccggatgcttgttttgaggatccgtgcttggcataccagaaacgctccacaaatgttaggtattactggacgaaggcaaatatgaaaaaaattaagggcagggctaggactgcattccggttctccggatcccgagggagctcccagtcgatgctgggcgaaagcggccgcacgagcccacgtcgccacgccctccgccgcggaagccagggtgggggtcgctggaaccctaggccggccgcgcaaggccccctgggaccggtagtgctgggcgtggcctcgggactacatatcccagtggcccccgtgcggcgactttagctgctgctgtctcagccgctccacagcgacggcagcggctgcggcttagtcggtggcggccggcggcggctgcgggctgagcggcgagtttccgatttaaagctgagctgcgaggaaaatggcggcgggaggtgagtggagataaaggaggaggcggtggcgggcgagggggtggagtgcgaggcggagggaagaggggcgagttccccaggctgcgagagccagcggcttcagatctgccaaggcactgaggggcgcgccggccgggggacgcgctgaggtagtttcggggtgtcggggccgcgccgcttcccctcagcccggggggcggcccgcggcggtaggagctgagacgaagctgggtggcagtccgcttggggatccgagggggtccccgcgcggaggggtcacccgaggagtttgcggggggactgcaggggcccactttccccttctgtccctaaagttttttcttcctcttgcctcccccagcccttttgaaagctccccgcgtcgtcctcctgctgccccggctccttagcagcttctgggacgcacgggagggaaaagccgcggggaccccccccaccccagcctcccagccgggtgagatttggttgctgtgtttcctcctcacttgggcatttaaaaaatattttaacacgaattgtccgcggaattttcatgttgggctcgggtagcttcttagttttctcggtaaaaaggcgttttactacctctggtgtgaaggctgggaaatggcaagtgggaagttggttgataaaattaggagtttggctgtctttattactactttttttttttttttgctctccccatctctcattttatgaacatcgacccagttcgtcatggtttaaataaactgcttgtcttgtacctgccttaacaaaactagccatgggtcgttgggagacttagttgcttcctaggcagtttgagggcatctagggtggaaaagttaaccgagagagcgagcatctacctcactggcaggatctgggattcccaaatggaatgacacggaagctatgagattctctcgaagtcgaaacttttttccccctcccgaatgcgaagacttcctttttgcaatatttgagcagggcttcaaaaccaacctgtttttgttattaagcctgtacggtaaagaaacaggaaggagagtaccagctgtcttgctgcagtggttttaaatggagttgaatgagatgcgtgagagtggtagtagtattgagtaagattgctgcatctctttgatttaaatgcctggcctcggatccacctaactgatccctggc

SEQ ID NO: 68813 - DNA, 840 bp, Homo sapiens
atgagcgttccaggaggttgtagggatgtaaggagatcttgctaacagacagctcagcgctgggccttgtgcacgtgagtgcttggccgagaagccaggatgaagagagaaaggccagggaggtgaacccccagaggaaggaggagagtgggtgggatggggctctggtgcccctagaggagaggacaacctatccaccagtgtccttggagaaagcacagagccacctggccctgggggagctgtgatggagctggctccctctgcagcggttttcctggtgacctggcagatggctgacactttccaggagtgggaaaaccccttaggaacccaagcggctggattctgaaacccccaaaatacaaggcaaaggggagcacttcattaaatgacttgcccatcatgcagggccgggaggtgaccgctccagagggaggagctgatgaaacacctcctgtaagggtctgggtacacaggggaggtgaaaataggaagggaggatcccccagcagcctcaggggtaaggtccgggatggaacctccctttgtgtgggaggatggagcaaaaataaacgggaagaacctggcgttctgcagaggaggaggcggggaaccggctgcagtctctgagtctgagtcatatccagttttcacagagtgaaatgtaattaggtggtgggtgcctaattaaacagcgactgggcgtccctggctaggtgtcagggagtaactgatggagtggaggcagcatgagattcccgggcaagctaaaggcctgcacttctctttctctgggacctggaatgttggagatgcctcaatgcatccagctcctca

SEQ ID NO: 68814 - DNA, 1587 bp, Homo sapiens
tgtactctattaacatgttcacgtatgtttagatacacaaatacttcccattgtgttaccaccgcctacaggattcagtatggtcacatgctgtaggggggtttgtagcctaggagtaataggtcacgccacagagcctaggtgtgtagtaggctatgccatccaggcgtgtaatgcactccatgatgttcgcacaatgacagaatcacctaacgacacgtttctcagcatgtatccccattgttacgtgacacacgactgtacattgcttggaactggcacatagcaagtgcctactaagggttatattttcattatccaccaatgggcccgtcccctgttatagccaacttcttgctgttaacatctggtttaatggagtccccctgcccccttggagaggatcactagctccccatatccttcctgcaccctgcttcgtggcccagcaggtcggccacttcccctgcaggcagctctacggtggaggctccacgcggctgcttccccatttgtctgagttaagtgctcctggggaacgattcggagcctgatgggaggaggagacccttctgttttctctcccagccccaaatctaactgaaattgccttgtaataattgcatttgtggtctgtgaaagctgtgtctcgtggcgaccagggactgagattagctggtgaaaaacctggcacaggggcacacacggcatcactggggatactaagcaagccacggacaatgggggagacagagggctcctgcaaccagaaaccactgggaacctcggccacctctccctgctgcagacatgtccccgccatgccgggccggcgtaggaacacgctgttcctcccagcatcagttctcccttttcccagtaacacaggtggtaatgtggcagagtgcccaaagcgtctctgcagtcagactgtctgggtttgaatcctggatctgccacctcctagctgtgggaccacaaaggactttgtcccctgtggttgttggcaatgaaacgacagtgcacccccacccactgctatgcacgtggatgaactgacaggcatgcgaagggtgaaacaggacctgatctgtcctaggggcctcccaagaggcagccagcaggacagaaagcacccgctgctttcggaggactttctctcccccacgacgggccatctggctggaaataccaacagggcttctttaaggacatcagcaactttcggtacatgttcatcccacaccatttccacccacacactacattaaaggtaatcgacaaacagctctctaagagtccaaatgttccagagctgactcgctgaatcatgcaacaccatttcattaaatatttattcactttgatttggcaatttgtcctcatattttggaaccagcacacaaacacatctacgcacctgcataaatatacaacacatacatatacacacatgcatgaatacatatacacaagcacaaatacactacatatacatacatgaatatacaacacacatatacacacgagtgaatacatgacatataaaaatacacatatgcattaatatatggcacacatacgcac

SEQ ID NO: 68815 - DNA, 1529 bp, Homo sapiens
gcaggcagggctgccaacctgaagcacatctgtgtgcagaatacactgaaccaggggtgattttgccctgcaggggacactgggcagtgtgtggagacatttttcactgctatgacctggcggggtgggggaatgtgctacaggcatctatcgggcagaggccagggatgctgctgaccatcttccagtgcatgggatggccctcctccccccgtaaagaatgatccagccccaaagtgtcaccagtgccgaggttgtgaaactctgtgtaaagtgcacagtttaaaaagttgtccaaatgtaccattaacgacagggttgcagtgtggctttaaagagcttggtttgcagagtcagaggactctgactccttgggcaagcgagtgctcctgtctgagcctcagtgaattcttctataaaaatgggggcagcaacaaatgagattgtgcataaagaactctgaaaaagggccaggcgtggtggctcatgcctgtaatccaagcactttgggaggccaaagtaggaggatcacttgagcccaggagtttaggtctgcagtgagccatgattgtgccactgcactccagcctgggcaacggagtgagattctgtctctgaaaaaaaaaaaataataaaaaacaaaaaaacagaaacaaaaaagaactgtgagttcccaaaatacagtctgctttccgttttcagggagggggatgaaaacttggacctctggagaaataaaaatggttgttagaaaccagatgtgacaccgttttggaaaatggcaaggcccctccgagactccagtaatgagcttggggaggagtgttcatgccgcacagtgaagtcggctgagcatgacacacatctatcagcagagatgggctggagcgcggagccgagccaatgacaataaacagtgtttgccaaagcaattcagagaggtcggcgaaagatgaagcagaagcctgtggaaagtccgtccttcccaaaacagacccgcgccatttcgcaggcacggagtctgcgaaaacaaaacggggtctttgcccttcgtggcatcatctcaattccagttgtccgcgtgcctctcacacacgtttggccgtttttatgtatcatttggaccgctgcatacttagtaatttccttcaaatcacttcatttggtgtcaaatcagcacttcacaccggcctcttgattttcgccctgtgatccatacatccgtcaatgccagtgggtcaaggctacgcaccatggaggggacttcagctcctctgtcctccctcacatatgtcccagcagcttcaccctcaggacacatccaggtctgaccacttcccatcatccgcctgtcaccatcttggtccaagccaccactgcctctgcctggaccttgctggaacctcgtccctggtcctcctgcctccaccttcagcccatcttccacagcagccagaaggatcccattaaatcacaaatttgatcaagccccccactctgtgcaaagcccttcagtggctccacatcca

SEQ ID NO: 68816 - DNA, 658 bp, Homo sapiens
cactgtcatcggggatgggactttcagaaataaggaatgactcttgggaaagttttgcactcaagtataatattgcctccattttcttattccgtacattcctgggaatatgcaaaaaccctccagtatttacatataaaatagacgtaggttcaagactcagatgacaataaacataaaataatctacccatatgagtgatgtggtaggaaactcagaagctatgtggaatacaatgcaatgtgggggccacgtggactctgctgtgcagagcaggacatcaaagtccttcttagtctccgcccccaggaagccagcaaagtcaaatccttcaccatcaccggcaatgcagtcacagagtttaacccctagggggcggtgtgctcccttgagaaccaccagcttagaaagaagtttgcaagccggtggcctgcagaccaatccatccctcaggtgtgtttgctgtgggcctgcccggtgttttcagttgctcattcttaaaaagtagagtgaacagtccacagttgaaatctgggcaccccctccccacccagcctgcctctctgctttgggctacctgccagccctctatgcatttggagcccccaggctagaacgggttcacacagggatgacagaggaagccccgctcccggcc

SEQ ID NO: 68817 - DNA, 1705 bp, Homo sapiens
agcagccagcgttctaagatgcacattcacgttccttcagagagacagacgtggagtgctaatattgggagaattccgatggggtgccctacaaatagcaactctctgaaaccagaaaccaatcacaggaaaacctttctgaaagcttgcagcacactccagtctctgctctgagctgtttgcaggtgtcaacccaattaatatgcacacccacccatcaatatttcacccattttatggatgaagaagctgaggcacagagagttaaaatcactttcccccgatcatatgggtaagtggcagagaaggggttcaaacctagtctggcccgatttgggcagctcaaccaggaccccctagaagcagatctttgaacaagttcctaagagtctcccagcctcagtttcctcatttgccaggtggccaggtgccctctgagggcctttttggccctgggcctgtgatgccagggtacaggggggctgggaagggcagtcttcattgggagccctgggctgggtaaagatggagcccggggcacagtcagctggacttcgttcctggctcccatgttggtttcagagcaccccccactcctgggcggctatcacccgctctcctctggatggaagtcaaagctccggcaccagaagccagagaataacaggagctaattatttcatcagatcaagtcatcagtgggtcgatttctgatgaattcccctggctcagacttctcgtggcctcatgccagtttctctccggatgctgaagaaatcaattaaagatgacacaagggattctgccttgttttttttcctttttcttggtaaaatattcaaagtggctgaaccgagagagcacccagtgaactcacgcagcaccagccgcctgccactccatccctgctgtggacaacacctctccttcccaccagttcctttccaggtctctctggctcctcctctccatcctgagtcttctccaggaccttggcaaaggctcgccagcccaggagacatctctggaaacagctaacgtcctgagcatttagaaacatcatttttagttctcaatttctctgccgatctgccaagaggaacgggtctgagtgactgatgccctcaccttcccaatgccacaaaccacagcggtgaacaaacacctgggacctcatccagacctgtttagaaagacccagatgggctgttttcctctgaggatctccaaatccaacaagaggaggagagagaagtttgggaacaatcaggcagctgaggtggtgggagaggaagaaggggccagaggcagaaggaggcactggtcagatggtaaatgtccatgaaaggcgggaagaaagcaaactgtgggtgtgcagatacgtcccacgggctggggccagagccccgcaacagacctagcggcctccccaggtggtccagagaacctgatcatttctctctcttccttctttcactttacaaatacgtatgaaggacctcctatgaggcacagtgttcagtgataggagaatcctgcctggattccaacagcctcctaactggtttccctgcttctacctcgtcccttccatcaagcagccagacagatcctgttaaaacaaaagcaagggcctgccttcctccactgaacggccttcaataacttccatcccacgcagagtaaaacgcaaaaaccctccaaa

SEQ ID NO: 68818 - DNA, 1191 bp, Homo sapiens
taatccactcttccctgtcccctgggaggttcacttggatgtgccacctccaagtgacagacaaaacaagcaagccagcatggctatttgcacacagacattctgaccccagagcctactcttttgacacttatgctgacttggaaagcaacaagtgatacaagggactgaggttaagtgtgttgtataaacagcaagaggaaaggggaaactgctggcctgggagcagtcagggagggcttcctggaggagtacttagcataaactgagcagcctaacaggagcaaagttctgaagaatccaaaggatttggatggccagtgaagaggagggtggaggacaggatgcttcaggcaggagaaacagtttgggcaaagagcaggcagaggaaacagagagaggcccctggagggatgggaaagtgtggtcccaaacctcacaagcccagaagctgtctagacaggggatgacacacgcacatctgttaaactttacactcccctgtgtctccctttcttcctggctacaggctttctccagccttctctcctcctctttggggccgtcaaagaaaggacagaagctcctgtaacctatgggccacagcttctccctgtctcccctacctagcccaggccatcttgtggctctccttgcctgttcttggaattccaaatggaggcagagaaccaagccggctctcaagaacagggcaggagacaatagaagggtcattcagagggaggagggaaagatcaggtttcaagacaaaggctcaggatctggaaaggaaattagggcataaagattgtagggcaaaaatgcagggcttaggaacccagttacctgcctaactattgatgtaacaagacattcctgaaggctcgtgtgtgccaggcacagttcttggcactgtggataaagcagtgaaaagaaagctccctgccctcctggaagtgatactctaagtcaacataggaaaagctggagttgaaagattccagctacatgtgagaatgatcagaaaagaggactggaaataatggcaaaccaccggcaagctgtgagaacagagtggccatggattaaagttagagcacaaaggaaatttagaaacaatgtattcaagtcttaggaagctgagcaccaaaatgttttgtatgtcaagtgggtagatgtttgacaggccat

SEQ ID NO: 68819 - DNA, 644 bp, Homo sapiens
tttaactagtttctgttttctttgtaggtcagtttccccatacttttgactcttcaagatcagaagtgaaattcccttttttcaattaggtcattcctagttgctctctcacttgcaaccaaatgaacccaaattggggggcgggctggaggcagagggctgactcccgtggcttcctggccacctcgtgcctgtgtgaacagaggcctcagggcacggcctaccagcccacgctaggcctccttggcctgtgcccaactctccgccttactgagggccaactcgcccatccttctttgacaactgataagagaaggtagtgtggaaaagcggaaggaacgtgggtgtgggaatcacaaattctggacctgactcggccaccctggctgtgacttgggccttccctggccctctgtccctgaagcaggccctgctcggtcacccccacccccagtcccagcactgctctcttcagagcacttatcataacttgtgattcctctatttactctctggcctgagtttgtgtttgtgtgcgtgtttttttttttttttttgagatggagtctcctctgacatccaggctggagtacagtggcatgaccttggctcactgcaacctccacctcccaggttcaagtgat

SEQ ID NO: 68820 - DNA, 2726 bp, Homo sapiens
aagtgattaaaacaagctgcaggaagactttccagaaaggggggcagggaatgaatcaaagctttcaagggggaggaggaggaggagagggtcgtcacaggcaggtctggcttgctcttcctactgtgtgctgggcctactgcgtgcaggtgggggagttgcggaccgaggccagtgtgcaaactaggattgcaggcttccctttccatcttccaccccgagacggcatctctctaccctgctgccctcccagtgaaccggcagcttctggcgcgcaggagccagatcctgttcagccgcgtttccctggaacagaacgcggtgcccggcacgagggggtgctccagaaatgcttgtagaacgaatgaacgaactactataaggaatgtttggaaaagtgcactcctagaattcaccgctagacttttgaaaccccgaggagccggggaggggagcatccctccgccaggcgatggaaactcgttctgccctggcctgggaggaagtctgccttttcgatcctgtttgtcctttcggtgtctgcgagtttccaaccactctgaagatccggcccactgcttccccgagtcctgcccggacaagccccacgtgggctggcatctaccggtcccttgggtctaaaccctaagggtcaacaaggccatgcccctgcggatggccggcccaggcgcgctcccctacccggggccgcctgtgctcggtgtgccgtgtccgcgggtcaggggcgcggcgggaagtcctcgcccgcccgccagccagcggggtcaaacaggtcatccctctgcggacggccggcgccggagcctccctcccgcccgcccggacccacctccgcaagcagcgctggggctggagccgggcggtccggaccagccccggctcacctgggcggcgctcgcggccgggctcacgccggggaaggctccggccgccgcgagcccccgcccgagccccgcgtcccccagccacccacctgccccccacgccccactcaccagcgcgcacggccccggcaacctcacccggagcggggcgccgccgccgcctctgccgcagcccggccgggccgctgggcgcaggggactccgcgccgccgctgccgctgccgccgccgccgccgccgctgccgctgctgcatcccccggcgagcgctgctgctcctcctcctgcctcctccccgccccccaacgccgccgccaccgcccccggccccctccccgcgcgccgccccagccaaagtccggctccgcaccccgcccggaccgctcttaaatcgccccagcccggccggccacgctgccccagccagccccttggcacggcgctaccgccccccgctcgcctgcccgccggcctccacgcaggggaggcgggcgcgctccggggcggggagcgtcgggccgggagccgcggacggctggggcccggggcgcggggggcccagccgcggtgccctcctcgagccctccgcgcgctagcgcttttacctccggcctgggggacgcgcggcccgcgacccggccctgcctgtccccggcgcacggccccggccccggccccgaagtccagctccggacggggcagtgaacgcagagctggggtcccggcggctctcgacctcccgatgcctccggactcggctggccgcgctcccggcgccgagcgcgcaccctcgccgggacacacagacgcacactcactcgacacactctcgctcctgctcgccctcggcggagagttgaaacagatgtgggattcgcccaggagctggaaacgagggagggaagcgagccagagccttgtgtgcacgtgtgtgtgcgtaacacacaaaccagggggcatcgctaataaatcaaatatcgtgataaattcaggagggccatcgatcaggtccacttggctggaaacgacgtgaatctgcctcttttccgctttcttcttctcctctctcggagctggagggagccaaatgttccgcggggagtgcgacagccccggccgggcgctcccctcgtaatgacacgttaataaatgttttcttttatctgctttcacaggactcgccccggtctgcaaacactcgactgcctttgccgaaagcctcgcgctcgcctccagccacacacatttgccattggagaggccggcgccggccgcgacccgcagctcaatcgcagggcaaaccgagctgcctgtgcgcgcccgagaactccccgagaaattaacttcggctcaagtgaaaatagcagctgttgtccagaaatggcccgggagtagcatagaaaggagaaaccggcttcctccgaaaggggaggaattggactcaagggggtgctgtctaccgtggtttccgctgtccctcgcgccacagaagaggccggagggggaccggcctgacgcgggtgggcaaagagcgggcagagaactcaccagcagctgcagaaaacacagccgagttgctagctaaggggaaacagacgccgctgtgggaaagcacttgtaaacagcagtaacttattaaatcttgtgacaatctcacacagtaagttactatgcccgttttaccatggaaaccaagagaggtttagtaactgtccgaagatcacacagttataagtggtggatcctgtgaagccaagaagccttagctcccggctcatgctcttaaatcctaggatgtttttacttttcaacctagcatctcc

SEQ ID NO: 68821 - DNA, 1214 bp, Homo sapiens
ccaatcattgtgggcagagtcatgtgaaacctcattggccaagcctgagtcacatgatcaccctggcacagaccggagaccagcaaagctgtgttttctagagcaagctcaagagtgtggcttcagaagcatgggggtgaatgctgggtgtgttagtccgtttttgcattgctgtaaataaatacctgaggctgggtaatttttaaggaaaagaagcttaattcactcgtggcgctgcaggccgtacagaaagtgtgttgccagcatctgcctctcacgaggcctcaggaagcttccaatcataggggaaggtgaaagggagccggggcattacatggtgagagaaggagcaaggtgcgggggacgtgccatattcttgtaaacaatccattctcagagcaagaactcgctcattaccaaggggatggcgctcagcccttggcaagatatccacccccatgatccagtcacctcccacctggccccacctccaacattggaggtcacatttcaacatgagatttgaaggggacaaacatccaaaccatatcactccgcaggtacaaggcacctgtccactcacgcccatccgggcatgtcatcatccagagtcaacccgaagtccttgagccctttgactctactgacctttgggtgcctggatcgcagtagtcccgacctctgcccccaccaccacaaatgcaggctgctctcagagcctctgctaccagaacttggcttctgcccacatccctccctttctccacacttcagctccgacacctgtcccacgtgccctctactgacctcaactcattctgctttcctctctcatgtactaactggggttccagctgtgtcaccattcaagcatctgagctccctgacccatgtgttgtctctgacatcagccagccgagggccagctagcacgtgggcgagaactgcctgccaagaacagccctgctcccttgaccacatcaggaaataccgaacatgaacccattgtttgctctgtgaattgtgcctctggactcaggctaaatgcagtaaaactgtatgtcagtcaggtttcgtggaaacagaaggaaagaggtactttgcatgtatatttattgtattacgttatactacagatgctcttcaatttacaatgaggttacatcctgattaacccatcataaagttgaaaatatcattaaattaaaaatgta

SEQ ID NO: 68822 - DNA, 2910 bp, Homo sapiens
ggatttgaacaataaataatccttgtttcttgaagctactgaaattacggcttttcccttttatgttactgcagaataacaccagatttcaaagaggacttgagcctcatgcaaatgttttcattatttttaataagggaaatgtattcatgtgtcatttgtgtcattaaagtggcacttcataaaaaggaacctaaggtgttataatggcagtagaattaatccttagcctctgtccctaatgtcttactccattttatgttgctgtaaaggaatacctaaggctgggcaatttattaacaacaacaacaacaaataaaacatttatgtggctcccaattctgctgtctggaaaagttcaagactgggtatctaatgagggcctcaggcagcttccactcacgggggcaagtgaaggagaactggcatgtgcagagatccacagtgggagaggaagcaaggcggaggggagtgtcagaccccttttagcaaccaactatatggggaactaatagagggagaacctactgtcctccccagggagggaattaatctattaatgagggacccacccccatgacctaagcacctcccattaggccccacgttcaacactgaggatcaaatttcaacataaggtttggaggggacaaatatctaaaccatagcaactaataaattaagacattccacatatctgtgtgttctcaatggttaatgattaatcattaaaacctcactctgtatttaaagaattgtggctgtaaaactttctaaaaggttacaccagtgttcattgctctattcttttaagccttctagtattttttaaggtaagatattcagctatgtcttcttaaagtgtaatttaacttctccactgttgatgttaaagaaaatgatcttttatgatcaaaagcttctatagcagctgctctgtgccaggcatgttgtgaatgctttacatatattaactcttttaaacctgacaatagccctttcagtcaggtattattattgcctatcccaaagttagtgagttaaagagcctgactttggtcctaggcagtctagttcagcgtcctcacctttaatgaccatgttactctgtctatctacaccccagggatcaagaacagtgtttgctccaaaatagttcactaatgattattatttgagttaatgagcaagtgaatgaatgaactgcacttcccaaagtcttttcatttacattatttcatttaaatgttgcagcaacccattgttcattgactgtgtggctagtatccccaggttaccaacgagaaaactgagtcctggcaaggtggaaggtcaagttaccccactgggaggtagcagagctgggcctcaaatacaaagcattttaactgctagttcattgctctttccacttctatataattaaggagactgactgagtgcagaccataagtcattgacattatttttaatcagttgggagattccagataaaccattcagatttctgatttgtctttaaagaagaaggaggagatttggctgcacggggcatcattcccacaggcagccatctgtcccctggagctgccacctcatggcctgcaagggttcatccacccccacagcagtcttcagagaggagaaattatcaggctctctttactaaagagaaaactgaggtctggtcctaatgctagaggcagtggggtcagctccagagccatcccttaaatgtcacctgtgctgaggctgagactggggcctgcagcatggacaggggaaggcacaaaacaggcctcagagtgaggagtgtttcctttcgactgaggttcctgagaatggagagaaatattttcccttttaaaggagatctgtgcccgccctaattctccagcttgccaggaaaaaaagtgcagctgctgttccaggcctcagaacaaatgaaagcaaagaaaagggtttctttcttcccttgcaggggacagatgaccttgctgcttcctctgagatgacacccacgtggaggtctgcattggttctgtatttccctgctctctcttgttgcttgaggaaagttctgagccgtctctgccataataaggcatagaggaggcctcaaatagcctgtcccgggcccctggctgcttcaggaaggacacattccttctagaagagcatcctcttggccagagttgctaagagccggcattcagaccttgacccttacgacacagagagtgcgcagagggcacagctttcctgcctgcttcctgaacaatttctatttgcctctgcacacagcattctgcagtggggtttagcaaggagagcagctgggagcttccttctttctttcattcttccctccctccctctttccttcctttatccacaatgtccaatacacatattcactaagtaattcctatgtactagacacaggggttaaagcagaacctaaatagagcctgccagccctcatgcctggtgccacactccatggggtagacaacataaacaagttaacaaatagcacactgccacctggggctaatggttttgaaagaaaaacagtaacagcgattgtggtagaattatggtgagttctttctgaaaggcattggagaaggtttctctgagctcccttccccctcaccccccgaatacacacacagatggtgagaaggagagagccaggtcaagacctaggggaagaacatttcaggcagaagaaactgcttgtgcaaaggccctggggtaggagtttgctttgcctgtgcaatgaatggcatgaggcccagtgcctagagggaggtgggaggggtggagaggtgccttgctgttgacaccgccaccctcggggcttaagctgcattggaggctccttctcctccgtcctccttcctt

SEQ ID NO: 68823 - DNA, 1075 bp, Homo sapiens
ctgtcttctcaggaagctagcaggctacaggggagatacatgtgcagataaaactttaagcaccatttgaccagagccccgaagagcaaaatgaaagagcccaagggagtcctcggagggagtcctgaactctgccaggaaggtcaggggcgtctgcacagcggtggtgacatttgacctggggtggagtgcggtggtgacagcgtgggtgagaggtgaggtggcttccattcaaaggggacccaggtgagtaaccagtgagtgcatcactctgtgactcagtttccacatctgtaaaatgggagataccaagctcagagcacccatgccctggaattgctgtgaaagttatgagttaggtcacatggtgcccacatcagtacttggcacatagtaagtgctccacaaatatttgttgcatgaggaagcacacaaatggatgagttgaaagcacctttccatgtttgtactacgggtgagaccagaacagaacaaaattggtgttttccctccttaacaatctccaaatatggatcattcctctgatctgctccacttcctttgttttggacagtcagtggaattccagcagctggcatgatgggaggcaagtttgattttgttttagccaaaggcaacacagggcagaattgagcatgcagcttctggggcaggctctgccacctcccaactatgtgacttgggagaaaatactcacgtgcctgcctcatttgtcccaaatgggaatagtcacagggtgaagatttaagtaagtgtaaggaaggtgttgcagattcacagggtgagtgtgctatagtgtggctggtggaataatggccccccaaaggtgtcacgtcctaatttccagaacctatgactctgttaccttatgtgagaaggaggaattaaagttgctaatccactgaccttgggaatggggagatgtccctggattatccgggtgggtccaatgtcatcatggggtccttaaaggtgaatgagggaggcaggggactctgagtcagagatgtaaagatggaagcaaggtgacaatgtcacaacggcggagctcaac

SEQ ID NO: 68824 - DNA, 1666 bp, Homo sapiens
aaatcactttggtaacttttttttttttcatctagaaaaactcagtccttcgtcagctctgaattgtggtggtaaactcctgggttctatctgaagtcaaataccaaggagaaggtgcaagcttcgccttctggaataaattcagtgaactgccaagcttccattctctctccttggtacttgacttcagacaggacccgggagtttaccaccacgatgtttcctgctgcctgctgtagccctctgagccctgggtctgtgctcactatgctgatcctggcgaccatgacctcagtgacatttctcaaaaatcccattttctgctttgacctagggtcagagacacactcaataagcaagcctggtgtccatcaaacgttgctttaaataagaacataaacttaaaggtctttacaagagaaatggcatgtgcagctaatggagaccagagaaagagttattagtccaggaaatcaggaaaactgattagcaagacgaaaggacatggcctgaaatccaactaagcagtgacagatgcagatattattctgcaggtgttagttcatcctgcttaaatagcaaggcctgaaggctggtgggatccttcactcctttacgttgacaacaacaacaaaaaaacaccaaaactcaaatttagataatcatcaattgcagaacaattaaaaattatctttgtaaccagaaaactatttttctctccctgcatgtaattgtctgccctttgtctgaggccttaacagatcagaggtcaagcattcttaagctttgagtggaaccagagcactcaatccagcatcaaagtcctgaatgaggtcggctcctcctggaaaatttttgaaagtacacgtcatcgcattccgatgattctggccttaaattttccttccatttcttagctgaaggcctaattgaaaacagccaaagctagttgggtgctctgtcttaaaggtaaagaaggacaccttcaggagaaaggagggaagagagctgatagcttgatgactcttcttgctgaaccagctgaatctaaggactgagtagtaaccggccacacagtataattttagggaccctctaagtaccactggactgctgtgtgccttcaatactaccattattgctcctttcaggtgaaggcactgaatactccttttaaagtaaaaacatcatataattggaagatttaatcagtcagcactcttggttgcatgcaacagaaaacgagttaaatagctttaaatgaaagaattttattacatcaggtgactaaaatgtgccaggaatgccttgttcgttgcaggcacagctggatctagaggctgcaatgatgtcatcaggtccggacgagtgtctcctggcctcttggctcttctttttccctctcaggaccattcttagagagtatctcctgtcatggctgaggacagattcagcccggcagaaaagagcctctgctgctctcagaagccacaataaaaggcctgttgcatctcattggccccaagtgtgtcacatgcacccaggcactggaacattcatggcagctttgtttgtctgtgatcatgaaaaacacagagccagcccggatgtccaccagctggagctcatggcgtggagtactctacagaggttaaaataaactgga

SEQ ID NO: 68825 - DNA, 592 bp, Homo sapiens
tatttattggccatctcccccaaccagaatgtaatgacatgaacagggtgttttctctgtcttattcatggcactatcccagcacctaccagagggcctgatgcagagcagggctcaatgatcatttatggaacaaatgaagtaatgaaccatccgacagaaaggaatgttctgaggtcggcaggaaggtctcggggagacagaagtgctcccaggccagaggaagacaggcagctttcccagctcccacgtgactgcccggtggtgagaggctcagccggggccccaggtcctagttcttgcgggtgcttctcaggctcagcccagagctcaacccactcaaactcagcaggaaaagggagagcctggaatggggctgtttccgccgaggcaatctgtgttcaatgaaagcaggtggcagctggccagagcctgagcaccctgcttatcgaaaccagctgtcccgcctccaattacagggccagaggggggcagggctatttttagcttcctagtgtttggcagagcaaagacctgcctggtgtgtaggtagcggtgcgtgctggagcattcagaatgccctggctggagg

SEQ ID NO: 68826 - DNA, 1167 bp, Homo sapiens
ctctgtgttcttaatggcgacacactactgctgcctctaagatgctaagcaggtagttgagatgcatgagactttgctcttctgggtcctggtttccccttctggaggatgggaggtgggtttttaaaacactccctcccgttttccacttctgacacccaaggagcctctgcttttgaattcgcccagaagcactgtgagtcagagacctcccctgacccatatcctggatgggtggtgccctgcatgacccaggcaaggacaaacacagtcagcagtcaccaagtcactccaggcattgcctgcacccacatcagactcaggtggggagatccacccaccattgcccaatctcctgggcctctcagagctcagccctctggctctccatccagaggcaggaatgctggccgcctgccagcttctctcaagagacacatgcgccctttccctgcagccagcccagctcacttgtggaagtgaggtggggaatggccttgaaagagctcagggtgcccacaaggaaggccccagggagcccacttggaatccagtatcagaatcagctgctgtccctgcacaggtgagacggccccagaggaggcagagcctgcacccggaagccaaaggttgagtaaactcatctaaaagttgggagcaggtcacagaggcctaaagggacgttctgttttccaaaccccagtgttctgggaaaagtgcctgctccagactgcttggggcagagcggcggggcagggctcagggtggacattggcagcagccctgaaactacccaagaaggactctgaggacagccccagagagaccagaaaggaggcagggaaagagaagaagggggcgttcatgaggggacagcaggacgtgagatagacagacctcaaggagtgggcgagaatgaaggagcaaatgagaaagagccatgctgagccagccactgggagatagcggaagcaggaggtccaggccctcacaggaagggtcaagcccagaacaggggggaaagggcaatggggaagggcctgtggtttcagagcctcctgtgcaccaggtgctgtacctgtgcgaccacaccagagccaagttaacaacaatggtgctggcagctactgtgctgtgcactcactatgtcccaggcacactcacata

SEQ ID NO: 68827 - DNA, 1064 bp, Homo sapiens
agggtatgtcccctgcagtcagccccaggatgtcccctgccacacactccaagctcctgcagggcccagcccaagtctggaagctccaaggggcagggcccgggtctgtcttgttctcagctgtggacagtgagcagcgacacagatgtgtgcatcaccaggaaataactaagaagatcagtgacagtcaggccccccaccggcaccagccagctgtgcaccaggggcattaccccaaacctgaatcattcccctggcaacgtgaatggaaaagtcaacaaagcctgaaatgccaactgcctatcctgggcctcggctgaggagtcgagatagaatgttccagctattcttaggcaacgttcaagttcagcttttgggggctgttcccaaaaaggctttcattctcgcctcttccctcttcctacccaggctcctcaacattgtgtgcccaccccaagtgggagttcagctcaaacaagagggctcagagggccacggggacccctgcaagggcatctgaatctggagaagccagagggggtgggctggggggttgagctcagctgcttcaagttcatgggatcatctttgaaaatccactggaaaatgtgacagaaagaaggaactccggaggtgggggggacagaattcccctgagccccgggtgtttgctgatgcaaatgttcccgctctggggccaaaggccggacacactgaggagttctgtcaggcggggagcaaggcatggccccaacgggagtctaaggccctgcttgttctctcccaaacagcacccccaccccacaatctcctacttgataaacacagctagagaccaaggaaacaaggcgtgccccgacggagcgcaagtgggcagagtaaacagccgtctggccaggagagcaaaccgcagccaccccatcgcttttcctgcgggccatttcctccacgggtcgccgggcggttctgcccctgctctctctgttctcctgggaatccagagcccaggaatcccaccagaccaaactctggcccctggggagatgggaacaggcctcagaaat

SEQ ID NO: 68828 - DNA, 1005 bp, Homo sapiens
catcagctcccaccctccccagtcaactgaaacattactggctgctcaggtgactgctatcaccacccgggaaccccaacacatatttattcccaggaatatgtgagagggtgagagtgtgcgcatgtgcatgaataatgcatacactgtacttatgcaaggagatatgcatgcagaaaacggcaccccagctagctgacttggaactgtgcagattcatgcacacacacacacacacacactaatatcactcccttcggtaaacacagacagacaaagcacacagaaataaatcgttaccttcgcgctgctgctgccagatggcagagcctggcattgctgtgtctgcacgtctgtgcatttgtgtgtaataataacggtggctgacatgactgagctcctaccacgtgctggacgctgtcctaagtgctgcatcaaacccagaggaggtgttattattacccgtttcatagctggggaaaccaaggcacagaggtcaagtcatttgccccaaggtcaccctgctggtgaggggtaaagtcaaggactacagaataagcacccaatatgagcaagtctcgttttatgaccctggggggtgacagggaggaatcccaagatgaccagctgccatgggggtcctcaacaagcccaccgtcccagtgatgggtcaggtttcaacacaattgaaacggacaagagccagaactccccaggaaagaggggtgcccaaggttcagaaatgtttgaaatcaagttcagtgtccagcaaagtcctcaccaccagcaacaagtcaacccgggggcagagtatgcaaactggcaacccacaggtttggcccacagtcatgtttggtttggcccatgaagtgtttgttaaaaatgtgattgagttgccaacttttaaaaatcgagtgatttcataccaaaaactccacatttcctgccattggaaaatgtctttaagaagtcaagagatctggcaataccgggctcgagttcccg

SEQ ID NO: 68829 - DNA, 1014 bp, Homo sapiens
cgggccgggctcagcggcgggccgggctcccggcgcggcgggcgggactgggggccgggcggctgggccgggggcggaggcagcgcgcgggggccgggcgaggggcgggagggggcggccctcggggctcccagacggctggccccccgcccccgcgccagggaccgtctgccaagtgccacgccgcgctcggccgcagaggcgctctgcgcgtgcacggggcccctggggacgcggcgcggcgctcggcgcctccgtcggaagctcgggggtcgggcgggagcctccggaagggccccgcggagccgggagtccgaggccgcgcgcacgccgaaccgagcgtaccaactccgcgcccggacgcgtggcgcccccccaacccgcagtcaccgcgggctacgccactcccacccggcacacgcgacacccgccgcgcgcaggctcctgcttgcaggtccggccgctgctcgggccaagtaaacaccgggctgggaaagctcgctgcggagccgctcgggggcaagccagccccgccacgcgcgcctccgcggccccgggaagtcaggggcgaccgctgcctgggcagtgacggcccctctctgggcagtgacggcccctcccgggaacgccgggccctcgcggtgccctcggtgctaccacgaccttgggaaggaacatgcgtggcgcgcgctcgctctcacttttctctttcccgtttcctttcccatctctctctttccttccttccttttctttctgaacttctttgccccctgaccctgccctttccacctttcccagaagaaattattacctgctcttgagttattgatcaagtggcaggtaccctgcctgctcccccttccatccacccaccccatgggataaggccttgggaaacccagcttcttgtcaggttgctctgggcaatgttgatcatcacccgccttatcggaaggtatggagaggggaggaagttctggggcctagagtcagctgctcaggttcaaatcc

SEQ ID NO: 68830 - DNA, 929 bp, Homo sapiens
ccttgtgctgccggcattattccagcaagggggataggtgaggatgaagacaagttcctcctctcatgcattcaactattatatactgagggcctcctatgctccaggcagggatacagcagtgaacagaacagataaggtccctggcttcctggtgtgtccagtcaagagcagggagagaaggacaataaataaacaaggtcctttcagcttctctaaggcctgcaagggatgggcctggggaagcaccattggttggtggcacctccaggactctgcctcaggtcactaccccagtgtcatgattcagccatcaggattcagccaggggcctcagccttggcgggatcagtggggactccctctcttcaaaacctggctgcctcccagctaatcctggcataggcaactccctaaaccaaacatgactaagcagtcaggctggagtagatctcttcctatccccatttcaactttgacctctattcccttcttccccatcacccgtccggaatatctagtggggagcctatctgtctcatgtgtatgtcagggcagggcctgaaacagccggcagctgggtaacgttctcaaaaagaacagggaggaagaagaaaaaaaaaaaattgcagttcagggggaagaaaaaaaaagtgatgataatgatagggaaattctcttttgcagggacaattttagagtttccgttgccatgtactttgcaaatagtgggaaataccatttcgtttctgttacataagtttcacagttgagggggagaagattctgctgcttggaaacatcagagtttcttattccctgacaagcccctgtcagcttctgcaggctgaggatttgaaggcccccttcccaagctctgtttaaaaggaaaactaattaagttaaagcaaggaaaaacaagtgatttt

SEQ ID NO: 68831 - DNA, 933 bp, Homo sapiens
ggaaacccagggaggagcagctttataggaaccaggagagaaaggagtttccagaagccagggctggtaaacagtgacaaaagctctagcagaggggtaacgatgtggacccagattaggcggttgcaatttggcagcagggaagtcaccggtgacctttgggagaaacgctggggcagaagccagcttcagagggacagggacagggacagggacagggcctgagctggggctggggagtcttccaggagctgccaactgctcttctgagaaacctggccaaattggaccatatcttgaaggagagagaaaatattttgtttttttttaaggataagaagctctgagcaggtttaagaggggaaacttatttcaagagccatgactacaggatctgagaggaggggagctgggactggaatgggagccaagagcccggcattttgatcccaacatttctgctgaatcttttcttccccgccatctccgtgcctctgcacctgccaacctccctgccaggagcacccttcctctgtctgcctggcaaactcctcttcatcttctaaattaggggttgacaaactctggccaccagccaaatccagccccccgccccctgcctgcttttgtacagcttgtgagctaagaatggttttcacattttaaatggctgggatggggggaatcaaaagaagactatttcgtgacacatgaacattatatgaaattcaaattttggcttccataaataaagttttattggcacacagccacactcctttgtttacctattgtctgtggctgctttcttgctacagtggcaaagtggaacagttgtgacagaccatgggtcctgcaaagtctgaaaaattccctatctggccttttacaggaaatgtttgctgatctctggtctaaatcgctacttgaggc

SEQ ID NO: 68832 - DNA, 595 bp, Homo sapiens
gttggatcccagctccaccagctgagtgacatcaagcaagacacttagcctcgatggggatgatcaaaatagtcctggctgccctgcagaccttgggtggtgagaaaactcttcataaactgtcaagcatacacatgaaaagactcattataatatgaacctggatgggtgagccagatggggcaatccacagccttctctccatggggtcccgtgcacacctctcaggacgtcactgcaaggtggaaacccaatcccttgacctttgcagtcaggcagctgctccgaacaacccctggcagtgctaatctccaactctcctctcaccatcgggtccagctgctgggctgagtcacacgcaggccgagggacaggcacatgacttgtgtgtggagctggtgtgagtgtagtggttgggggagggtagtaaagaccacaagaggtgattactccccacttagtaggaaatttcacctccaggggaggagatctaagcctgactctaggtcggaactcaagtggctgcctggcctgtctggcagaattcttcctccgggaagcccactggatgtgtatatgtgtgtgtgtgtctgac

SEQ ID NO: 68833 - DNA, 460 bp, Homo sapiens
aatggttgctgtgatagcatcattgtggaatggagtggaagctgccttggggccagagtatctgtcccccagcactcatttgcaggctgtgtgacactggccatctgggtttcttcccctgactcccaaagcccaggtccagttcactgcactgtgagggttcacaggtttataacaggataaactacagagagaggtcagtgcttcctggtatactatgcacagctgcgacactcaataaacagaagttcactgaactgcaaggtcactgctgctgtgacaggagggtcatatggatgtgtgtatcttgccagtggctgtggtgaaaccctgcttgtggagaatagacataaacacaccttctctctctccctctctgtcttcctttcacctcccctctccctccaccccttccatttcctattctcccagcatgttctttccactcttcctcacctcc

SEQ ID NO: 68834 - DNA, 2996 bp, Homo sapiens
tttttgagacagggtctccttctgtggcccaggctggagtgcagtggtgccatcacagctcactgcggcctcaacctccgaggctcaagcgatcctcccacctcagcctccccagtagctgggaccacaagcagcgccaccaggcccggctgttttactttttattttgtagagaaagggtctccctatgttgcccaggctggtctcgaactcctgggctcaagcgatgctcccgccttggcctccggaagcgctgggattagaggcgtgagccgccgcgccgggcctccccccttcccctccgccgccgccttctcatcgcccttcctccttcctcctgacgccccttactcccgatcacttctcattcattcaccagcttccagtcctcgctccctcacctcttttctttcctactcgccttctcctcctgcccctttatcatctctccttgtcaccgttcttttttgccaatcctctcgttccccttcctttcctcatctcctctcttacccacgtcatctccattctcgtgctccccttcacctcccgttaccttgcgcttctctcctctcatctccatcaccacctctccccgctttcgcctttctttagcccccgcgtcccctatacccttcgcccatgcccactcccctccccaccttctcttcttccaccctccaccctcgccttctgtctctcgcccacctgactccgctccgcccccagccttaggctccgccccgctgggggtcacggggccgacggacgctaggcggccgtagcggcctcgccagtcacgtggtcacgtgacgcgctccaacatggcggcgccgtggggccgaggtgtcgcttcctgacggggcggcgcggacggacgcggccggtgccggccgggacgccgggcccgcagcctagctcgccatctcgctcacgccgcccgcccgcggggccgtcagcccccgccgggccggggccatgcaggagagccagaccaagagcatgttcgtgtcccgggccctggagaagatcctagccgacaaggaggtgaagcggccccagcactcccagctgcgcagggcctgccaggtggcgctcggtgggtgagccgctcccgccctgccccgcgctggcctcagcacgtcggccgttgccctatcctactcggccttggcccggcctcctggcctccgcttccccccgatcccgaattccacccttccggcctcctcctcattatacccccggaggaagtgttgcccgggcagctcgggactggcccaaggtcacctagcaagttggtgacaaccagagcttgttcctcagggttccagctcagggcttttgccacgattccttgtcgccctgtttcctggttcctcccctcaccacctccaagtcctagaaacagtagcccttgccccaagttttttcgttacctgagctctgctgattggggttcccctaggtgaacagagcatgtaggaagagccgtccaactggtttagggaaacccctgattcttgttttggaagtgcccgttggagaatgttttcctttggtttggggatctcccatagctctttccctcaaggaaggattgtagaaggtgttctggatctcccaggcattgtagtgagcaagacatctgcttattcctagcagtccactaaaatacaaggtcttcagcgcgaagatacttgtctgacttattcattgctgtatcccttgcgcttgcaacagtgcctggcgcacagtaggtgctcgataaatatttgctgattgaatggaccctcagattatggaaagagggagaattctaactaatagttaaaggcttgataattgatagcaaaatcactatcctatctttcagttttaatcatttaacaaatatttatcaagtgcccactgcataccaggtactgagaattcagtggggaacaagacggacatggtccttacccctatggagcttatactcgaatagaggagacaaaataattaattaagaaaataggtgaggtattttggaatactgataaatactattttgaaaataaaacagcaagatgtgataaagagggcttgaggactgctttccatggtcaggaaagtaatcttttccaagaggaaaagtaatcaggtggtcaggaaagtaatcttttccaagagggtgacacttgagctgaatactgaaaggcaagaactatccaccatatggagtttcagaagagagttcttggtgggagaatccatgcatttgaccagagctgttttcaagctaattcactgccccaacgtctttggtttggaatctgtaaaggcctgtttttcctaacaaaatgagcaaatggaaagtttgatttttagtcacatagtttgagattgttatcacctttctcctttcatttgctacaaagtatagagtagtgttcttttggcatttagaaataggctggtgaactttgcacttccctggaaagaaggtccctggctttcatcagattttcagagggccctgagactccctcaggggccaactattgatgcagaggtggtagtctagataatctggaaacagttgctagtccgtgaaattcaggatcagtggaaggaatttactgagatgtagatttttaaagcttttctcttccaataaccaaggctgttgggtattttatcagcaatgtgggataagcactgcaaagcagtttgttaggcaagagcctggtatttataactccacgttgaaatctgcctggactctatcttctcgatattgttgtggaggtttcagaatagttatttggcagaagagtttttattttttcttcagaaaacttcttaacataaaattttcaccaaagtgtgcatcatattattggaacctacttataaaattttcatctgggtcatgaagggccattaacgctgagaatttaatagatattttcggatcgtatctttgttcagaagttcaagttttcctaaca

SEQ ID NO: 68835 - DNA, 1829 bp, Homo sapiens
aacaaatgttgagtgcctgccactctgtgctgaagaattctcagtacttgggaattcagcagtgaacagaacaggcaaagtgtctgttgtcatagagtttatgttctgctggggaaggcagatagtaaatgaactgatatataatatgtcaagggtgataaatactaaaaaaagactaaaaaaatgaattagtaaagtgagagaacaaaccaggtaaggagatacagggtgacaagggggtggcagtattaggtgctgaggaagtcccctgaggaggacatcagagcagagatctgaaggaagtgagggggtgagccatggagatatctggggggagggagggcattcccaggagcaggaatagctcatgcaaaggccccggggcagaaatgtgcttggtgtgttcgagcaagtaggccagggccagggtggtagaaggtgagagcagagggatagcaggggccagatcacatagaggtttggaggccaagatcgagagttttaattttacgcggagtgggatggaaagctactggagcattttgagcaaaggagtgttgtgatctgagttacattttgagggcatccctctggctgctgttgagaaaagctgtggggtggaagggaggataattgctgaagcatggagaccagttacaagaccattgtgatggcccaggtgggagataacagttgcttggcctagggtgatagtggtggcctagtgtggtaagaagggatcaggttctagatattatggatagtgtgaagttcctgagaaggcggatagggatgggaggtgacagaggtggaggggttggacacccactcccttatagcaggagagagcagagagtaggcccgaagtgggtcaggttgtaggtttgctaacagcaagctgagggagtctccttgtgcccacttctaatttctgagtgaagtaggaggccactccattggttgtgagtaaagaggacggcagcagaacagcgatgattgggaggggagagttgggccattgagggtggagaaatgtgcagtagccatcgtggagagtgagaggtgaccaaattactgggcagcatttcaggtttcattcgtggtgggtaattggggctctgtaggcctgccaacctgccctgttgtcagaggtctgcttaggcggagacaggtgaaaaggggacgctagtacaatctaagtttgggattttgccagaagttaagactaaaggtcagagagagtccaggctattgattgcgtgtcatctgataatagtcctgctgatgggatctaccctggaaaatgaggaaaaaggaaagccgagaggttggccatctcaaggtttgacaggacaaagacaggttctactgggagcaattgagagggtcagctggaaggagagaagaggaaggagctggaagttccccagttccatatagggacaagagtcagtgtgaccagcctcaccaggctggcttggagtggaggaggatgtggtaggtgactgggagctaaaggaatttaggggcagcgttggtttctgtgggggaagcctgcgacagatagaagtctgaggagtgtggaagggttactgtgggatctgggggcattggccactgatgggattgttgggcagtgctgggtttgaggttggtgatggtgattgttggacttgccttgggagtggaagagagaatgcgagccagtgtcagaggtgctggtgaatggaggtgtgtgacccgagcggtaacatccagaaaggatttcccgcaaagacagcgcggcttttcagctgcagctgccccaccctgctccagtctccctcatt

SEQ ID NO: 68836 - DNA, 462 bp, Homo sapiens
ttagttaacttagtaagttcaacttaagagttgaaattacagtactcacttattaactgacatgtttgatcttctcatttctactgccgccactccacctccctctagtgtattctgcccacagcagctaaagtaatctttttaaaacataaatcaagtcttatcactctcctgcctaaatcattccaggtttcctgttctgcaccatggcctgacccagcccctggcctcccttgctgatctcatctcctgccaattcccctgagtcacacaatgtattttcagtcccttgaacaccttcagctctttttaccatggtgccttgtgcttgaaattctcttggcttttttccatccctcagacttggtaaaacatctcttactcaaagaggccttcagcaactgcactatctaaacaggtcccaagttaagttctgcccttgcccctatttgtatctttcat

SEQ ID NO: 68837 - DNA, 720 bp, Homo sapiens
gggattacaggtgtgaaccaccatgcacaggtaaatttttttttatcatactttttctgtattttccaaaacttttactatcatcatatctttcttttaacaatcaggcaaaaaaacattataataaatatagttttgtcaacaagttgctttattctccatggggagacaaccatgaattcatttttattatatattggaagttacttatgttgtgtagtcagtcctttgttatctgcaggtgacatgtttactttgtgaactttcagctaatttttaactgttttgactttctccttgccttctctaaatggcctttcctgttattggttagtgtgagcctggaagacaaacatgaatgtcattctaagccagataaaatttgaaagtcatgagcctgggaggcagaggttgcaatgagtcgaggtcgctctactgcattccagcctgggcaacagagcaagaccttgtttcaaaaaaaaaaaaaaaattgaaagtcaaacctgtagtcccaaggccactgtactgacttttaaagatagtactatcgaagcagtaggcttatatagctttccttcttgctatttgtgagataataaggttcctccataattgtatgtcttaacaggttgagagacaattgcagctgttccagaaaatcagccattttctctgtcttcaggttttactttataataatttaggtaaacattgcacctt

SEQ ID NO: 68838 - DNA, 2523 bp, Homo sapiens
tcccttaggttatggatggggaggagggcaggggtttaggaggggagaagcggaaggaggaacaaaataaagaagagacaattagttggagagtgataaataccataatgatatcatggaactaggcttaccagatcaaacactgggcacccagttcaatgtgaatttcagataagcaatgcatgatttttaagtataaatatgtcctacacagtatttatactagaaaattataaatttttttctaaaatttacattgacctgggcagcctgcattttatttgctaaacctggcaaccctaatttgtgtgctgggtggtggtgagtgggcaatttcagataggcctcttttgtggaggtgacatttgagctggaacctaaatgtaaagaaggagccaatcattcaggaatctagaacatcccagcacagggaacagcaagtataaatgctctaaagtggaaataagcttggagcttagaggaacaggaagaaggtggggtggcggagctgagtgagggtgaggagaggagggaagcggaaggtgatgagggcaggcaggctggcaggggccagatcccatatggtttgtgggctgtaataagagtaccaaaacttacataccaggccaggcgcggtggctcacgcctggaatcccagcattttgggaggccaaggtgtgcggatcacttgaggccaggagttcgagacctgtctggccgtgtctccctctaaaatagaagctccaagaggggcaggaagttctcttccgtcttagaccctatgtgcacgaccttggatcgatcaacattgaacacctcctacgtgccaagccctgacatcaaaatgggtcagaagccagcagccgctcgctgaatctgtgttcctctttggaaaacgagaaccgtgaagcctgctggcatggtcagagccaaagagcattgtcacttgtgagatcagcgcagaaacagagcggggccccgattggcccttcgaacttgggtggggccagagcattcctggccccgccccctgcagcgggccgctcgctcatgcgctctggcctcaggctcgctgtcgcgccattttgccggggtttgaatgtgaggcggagcggcggcaggagcgggtagtgccagctacggtccgcggctggggttccctcctccgtttctgtatccccacgaggtgaggcgcggggcgtgcacggcctaccagagtggctcttggggcccagctgaggaagggatgaggcgctcccggtactaacgagcgctagggagtgagaaccgcgcctctgggcgagagcggaatgtgggcccggggttcgggtggtgcgctcaggcaaggtcttcggcttccctagggagcgcttgccgcgcctcgcggcatcctaggtctctggcccaggtgcggcgaccccagggcctgtgagggctgagggcaactgaggcgcggcctaacgcgagcctgcggattgcccgccctttcctctccatcacggcgctgattggctgcgccgccgcctctccgctcgggaaggccgctccttattggtcgcgctcgcatgtccattctctgcgacggtggctgctagccgcgcgagctgagtgtgcggcggcgaggcctgcccgggcggggactgcgggcgcgtggagctgcggctgcctcgcgtcgtcccttgccctaactctagtgaagcccccgaactcacccttctctaacctctgtacttgtatccctgactgtaaaacgggcatcgtgatctcactttgctgaattgtttgtgagaattctagtcggtacacccgggacatagaaatcccctgtaacgcgggttgggggagggttccctcgttttgggagaaacgctgtgctgtggtggttcggagcatagactttggaattagatcgcctgggttcattccagacgtagcctctcgttaggggtgtaacttgaggctggtcacctcatctcactgagcctccatttccttagctgcaaaatggggttaataacagaatctacctcggaaagtggctttgaggatgcgctgagttatttaccgtggtttacaaaggttccctgggagctgacggttgtttattcatctctcccacccatctttctccttagccagtgtggctttctgtttcttccatattccagggttattccgatttaaaattatttgcacatgccttttgtttgctggggaagtaccaacatttttgcaaggcaggccgcctctcccaagtttccctcaccttaggcctcccctaaccaacctcttcttttgttttctttttctttttcttttctcttttcttttttttttttttttttttttttttttgagagagagagtctcgctctgcctcccaggctggagtgcagtggcgcgatctcgactcactgcaacctccgcctcccggattcaagcgattctcctgcctcagcctcccgaatagctgagactacaggtctgagactacacgccaccacacccggctaatttttgtat

SEQ ID NO: 68839 - DNA, 1241 bp, Homo sapiens
aaaattagccaggcatggtggtacgcacctgtaatctcagcttatcgggaggctgaagtgggaaaatcgcttgaacctgggaggtggaggttgcagtgagccgagatcacgccactgcactccagcctgggcgacaagagcaaaactccacctcaaaaaaaaaaaaaagaagataaaaagtagcaaattatagaaagtcccttatgcaaaagaaagcttatttcacttttattcttttttatgtttggtgcttgaataaattctcaactaaaaggaaaattactatacagaagtagtcacttgctaaacattacaggttgcaaaggtttactcaatgacaaaccaaaaggaaacttatttgcctaactatatttgactgtcatctaggtaaagggtcatggagctttcatgagcaggttggttcaattgtgcaacaaggaaaataagcttccaagcataatgagacttattattacatataaattgttctttctgacagaggaaaggactgcctagcattctgcataaaatcacaatggcttcagcagacaatggccctatttgaatcagggtggaatctgcaagggtagaaaattcatgcctcagttaattgtaatctatagaaggcatggatttcaaaacagcaaagataggagagaatcagacaagatctagttagatcctaaagctcatctctgaagggagctaatatagtgacaatgtaagcagcattatctgctcacttcatgccaaggggtatttccaacacctattagtgattaatgagacatgctatgtcattacagactacagggtagcctcagttgaggttaaacacaaaatggaacttcagacaccatttcactaaaagctcacatccaaaggcagatttaatttcactgatccagcctttcaagactaaccataagagaagactgcccaggtggaataccaaagaagcttctgattcagatcaccgtttcaaacaaaagtaaaacaaaattgttcaggaagcagttcaattccaaacaggaagctgtactaaatactcccaacagtattagccacaagagggatgttagaaagggctaggaagcaaagaggacaaccagcacctatcctataaagttaattggaagcttagttaactcatttccactaaagcagaatgttagaattcagaagaaatgaatttttttttttagcaacaacctggactacagttctttttttttttttcc

SEQ ID NO: 68840 - DNA, 802 bp, Homo sapiens
attaactgtagtttaactttgacacaaagttatctctattaaagtgggttaaaaggcaggtctctgccaaaacaggactggggaaatctgtatttgttcgcttttcaattatagtcattaatagctcaagaatttttgcttttgtacacaataaagcagcaaggttgtattttgattttgaggagctgaaggcattggatcaagagttaattttcttcttcttttctgctgtacagaaatcatgtataaacagagaagggaagcccaacaaacaaaaatgagaactattattctactaaaagtaaattttgtgaccttaatctggggcaatctggtaaaagtcaaaatcgctaatgttgtgacacaatgtttaagatttgtttcaaaataatctagtttgtgtggggggatacaacatgaaacaaaaccgaccttggctatgagttaataattgtcaaagctaagtgagtgactaacacatggggttctccatactattcgagtttcgcatgttttccagaataaaaggtttttaaaaaatggtatttaaaataccatttccctattgaaatatgccattgtgatatggcagtattagacatgctttatactgcttgtatagttgtttgcttatgtgttttttttgttttgtttttttggagagagtctctctctgtcgcccaggcaacctccacctcccgggttcaagcgattctcctgtctcagcctcgggagtagctgggactgcaggcgcccgccaccacaccaggctcaagagatagtctccatctcctgacctcgt

SEQ ID NO: 68841 - DNA, 1965 bp, Homo sapiens
taacaatgaaagctacaagcagaagagaagtgtgaccttaaaaacttccacacagccgaagaacagtggcagaacagactgaagcacgtatcttcgcggaacagaagaaaacttccacacaagcaatactgcaacacggaggcggggcaagggcttaaaaggaaagtcagccaacagggaggggtgaatataagcaaagcttccgtgaaaaaaaacttatcgaggtgtagagcaagacaagacagacaaatttttccatctccgtacaccccccttcagagcccaacacacagcaagtgctctagataggtttgctcaactcaagggaagcttctgccagcaactttcccagaaatggaatgacaagaagaagctggatgatggcggggcggggagaaatggacaggttgctcatcctgcgggagatggtgaatatcctgcagttgcctaagcggagatggaaagaaacagcatccatcgtttacagactgtcaactacagtgtcccaattaagcgtacgcccctttcagatgttaacaactgaaaacaatgccctggctctggacatgggcacgcggaacactgcagcctctaagaaacccaaacggataggtaggtcaacttctatccactctgcccattaaattataccttcatatcacgctaataaattatgcagacggtttactgggacacgctgtgggtctggcactctgataagcgctttacacgccccatttcactgaaccttaagaggcagggacggtattagcagccccttttccaaccaagacacaaagactttttaagtgtcttgcctaacggggcagagccgggttcggcacccgttttggacacctgggccgtgctcttaaccactaagctacagacctgggccggcgacactgagaggctccagccctcggggacctgaagcagggacccccccccccccccgcctgcgccccagccccgggaataacttcggcatccccgcgcgcgccatgcgggacgaggaaaggcggccgcagcacctgtttgtggcaccggtgagggctggaggggatgggggcgcccggggccaggcctcagggcgccccgaggcgagggaacgcaagaggacccgcctcctccgggaaggccccgcgggctagagagaggcccgggagaaggcggaggggtgcgcgggcccgccgaggcctaggccccacccgccgcccacctccccaccgcggcggcgcccgcgagggccccaccaggcccggcccggcccggccgcctcacctggctgctgctccgagctcgtcccccggccggcggtcctgggcggtggcggcgaggaggggaaggaagaaggaaaaaagggagaggaagaagggacgaagggagggaagaggcggagtggccgtggaggaggcgggcgccgccgggccgggggggggaggcggtcaaaggaagcgggagccgagagagacgcggcagccgccggcgcaaacgctgaagagccgctcaggcgcccgcagcccggcaggaagtgacgggggaggggcaggcgcccgcccccggcccccgcccgcctccaggcccggccccggccccacccccacccacggtccgaaccacaagttccggctggcactgcggcggagcctgcgctcgcaaggcacgccgggggcccagcgggaggagcgccctgtcccgcctggaccgcagcggcccgtcctgagtcccggggcctgccgggagttgtagttctggtgggagtttcgcgctgcctgctggactcgaagcgggtctgggagaacccagcctaccttctttcctcctccacttcctttttccttccttgctgtcgcttcttcctcttgtcctgcctctggccttcctttctctccttcctgcagttgtttcttcctccatctgtaaatgttcattaaatgcttgccatatgcaaggcattgctcc

SEQ ID NO: 68842 - DNA, 1389 bp, Homo sapiens
atctccactgcaccccagcctgggcgacagagccaaaccctgcctcaaaaaaaaaaaaaaaaaaaaaaaagacaaaaaattacttagaattttaccacccagaagcaatcacagctaactgcttattgtattttcttccacagcttttttttgtatctaaatatacacatctagagtttataaatgcaactctttagactctctcacccttccaccctcctcaaatactgccaccgttttgaggccggagacaatggaatttgcttacctaaaaagctccgccccttgatggcgtcacacgaaaccaaccacgccccatattgccgcatgcgcactcttaagaggtcgaacggggagggcggcaggggctctggaacggaagtgacgcatggtacttgcgcaaagacgacgaggaggctgcgaaaagttaagggccggaccgcaggctgtgctcgcttccggaagtggcttctgcgacaacatgcttgcggacctcggcttaatcggaaccataggcgaggatgacgaggtgccggtggagcccgagtctgactccggggacgaggaagaggaggtatgagcacggttctggtctttgggtttccttgactgcttcccttcctcgcgattcctcaggtccctgtccccgaatcctcatcatcccctgccagccccggaagtttcccgaaaaggatctcaccgggaccccaagatcttcctcagtttccccgccactaggttatctctacgtccgcctgcttctttggccatgtcgttccctgtctccttgctgaactcagtatctattcactgaactgatatttaaccacgccctgtgtaagagacggcaggtttcttacaccttgtaagaggtgaagtcagccatggttcctgctcaaggagccatggttagctgtcctttcgtatgttcatcgagccagtgtttattgaatacttaacgcctgctagacttagtgttaagcgttgggggcgtagcaatgaacaaggtgagtgccactctcctgaagcgtatggtggtgtgggggcttgcagacattaagcagtatggcaattaaagaggtattggtgttctgaaaaggatgcttgcccttcaaacattcagcccagatgttgtcccctctgcactctcatctgtccgcctgataggtttatccagatgtcccatggcctctacaaattcaactcctccaaagatgaacttgtgttcactctcatcctgttcccttctcaagccagaaaccttagagttattcttgacagttttttcttcctcaccgccgccagtgctctgcaagctagctcatgaatctctcttaagcttctcccgcctctctccattcacactgtacccaccctagctccggctac

SEQ ID NO: 68843 - DNA, 3570 bp, Homo sapiens
aaggagtacatttttgttaatccaaaaccatgtgctcaccaccttatctggcatttacatatctgccacttatatagtacccaatagcttgcagtaccctacagtttataaataattagtgagcagttatccccttagcctactctttggaatggagccaaatgattaagctctctgctctactgaatcaagagaaagaaattacatgtttcaataaccaggaggtttggcaactacgaggtgctgtttcctcaggaccagctagaaatctgatattctttcttcctcctcattcttctaccttggtgatttttgacactggtcctgtaagaggaagaggaagcccctttaagggagcttctcaacccaactcatacacatggtgtgggctggggctaaggaaagagtgggtgactcagagtcctcagcaaagggatttttgagactgtcttcactgagttctaaaatattcataattggaaactgtgactacatttggcattatatgaggggcagcttttttcctcatctgaaaaaggagtctcttttcttccccctgggaatatctctggtgagtcccctccctcatcttatcaaacccagccctcctggcgcaggctcagtatttagagtttgtttgtttattttcaattctccgaggggaaaattccttcttccccttgttgaaaaatgctaaaatagaaactccagaaaatttaaaagaaacggaagaaaagaaaaaaagatgttaaaaaaaaggcaagggaaggaagggaggagtagacatgaacaggaaatgctgggatcgaaaacagactgaagtgtttttttttggtggggggaatcaaggcctaaagggcacgaagaagaaaatcagtgatgatcaagctggcctggagtcagaatgagaggggctagtcatcaccagagtgggacgcaggaggctgaggtcggaggcagagctgggtttgggggaagtctccagggtcctggggaatccctgacccagggagcccacggtccctaatggaaatgttatggggtcagggagcgccaaggctgtgaggtggcggggttatgggggccttggggagagggtggtagcgagcaccagggggtgcttgctgaggacggaggcggcggggtgggggcagggagcaggctgaagggggtgccgaggtgctctgtagaagagggggattgataaggtgacaggaggtgaggccggaggaatgaggggggtgcgagtggcagaagggagggcacagacaggggtaggggcagaggagatcgaagtgctgagggcagaagcggtgacggtgtcgggggtgctggggagagcgacgggccagctgaggggatggggacactaaagagagtacaggggagccgaaggggcgacggggcgctgagatgggccaggggctgagtgggtgacggggcgctgagtaggcgatggaggtctggggtctgagggggagacggggcgctgagaggcgctctgagtgggtgctgatgccgctgggggccaaagaggtgacaaggctctgagtgggtgatgggggtctggggattgagggggcgacggggcgctgaggggccaggggctctgagcgggtgacgggtgcgttgggggcttgagagggtgacaggtcttacgggcagaggcagtggcgggtcggcgcgggcgccggggttcgcggcgaggcaaggaagaatcaggggcaggggcagttgcggggccactcacccggctccggcgcgtcctttcactgccgccggcgagtgctggggcttcggcccaggcaggtcggtggccccgcccggcgccgcgcactttcggtttccgttccccgcagaccctgggcggagccgggcgggcggcccagaggaggagaaggaggaggcgggggcccagggtggagagcacgagggcctggcccaggcacggccggcgcctccgccctcgaggagggcgtcacctcagctccccccggcggcggagccggcgggctcaggcgggcgcggctgaggggagcggaccgcggggggcgggagatgactgcgcccaaggcctttgcgggcctcagccggccccagaggaaggggaacccgtcgagcggtttggtgcgtgtgaagcgcgacatggcgaggaagcggacaagcccgggtggcccggcgtgtagagggaagggggcggggctagacgcggcctggacaactactagagcgcctcgggctgtgctgctcgagactacatttcccagagcgacgcgcgcggagcgggcgggaaagagagcgtttcgggtccagtgcgcaggtgcgaaagccatctttggttatataagggaggttcaggaagccattcgttctttcgcgtctgcggtgcccggagtgtggtacttctcctagttgcagtcaggcttcatacgctattgtcctgcccgtaagttcccgttttgtgtgtggtgagtggaaactccatgttcttcgttggagacctctggtcctcccttcccttctttgtgccgtcgtctctgcggccagccctaatctccttctcgtggcttctccgtctctgaccccaaataggccttaagggcgtgggagaaatgagtttctggagctggaaaagccactgccttctgcacgggcctgagaagcccttggctggtgtaaatgatgacttcacttttttccccatcagatcgacaatgctgacgtcttatattttgccagttagttctgatacatcggcctcaaaaggcccggccttgttcgtttctgaccgtgggaagatggcggttaacgccctttatttgttggttcacaggttagagcagccagcgggtacagaatggattttggaagagggagtcaccactggacctccaaggaagccacgtgcagacatctacaaccttcgatctcctgacgagtaagtctttgtctcctatgggtctactgtagaaaacacgtgctttgagaagctttagttttctaggaaaacgtgggatttaacaaagcactttctatcgagcatttattaggtatttaaaaaagtgttctgacggccgggcgctgtggctgacgcctgtaaccccagcacttggggaggccaaggcagatgggtcacctgaggtcaagatttggagaccagcctggccaacatggtgaaaccctgactctattaaaaatacagaaattagctgggcgtggtggtacgcgcctgtaatcccagcaactcacaaggctgaggcaggagaattgcccgaacccgggcggcggaggttgtagtgagttgagattgcgccactgccctacagtcggggcaacagagccagactccgtctcaaaaaaaaaaaaaaaagaaaaacatgttctgaatgttttattctcacagttcaaatattggaactaggtttctggtgaagaaacaggtttaagagaaatgcctgaagtgaaagaaccttgttagtgaagaggcgtttaacattttaatgccacttaaacatatttttggattccattcttcctgtgtgttggggcgcttaaatttccaagtggagg

SEQ ID NO: 68844 - DNA, 522 bp, Homo sapiens
ccatgtctggtcacatggctggactttacagcagataagcatactgtggcctgagaccatgattgtatgctttccttctgctgacctttacaatccctcaataaattgagctaacacagggaagcttttttaccaaataactgtgttgcatcatcctccagtttgcctggtgtccttaatcaatggaaggggaataagcaaactgagttttcttacaccttttgagtatagtgtttttgccatcatagatgtggctcctcataattctccaacttttatattaaaaaaccaaaacctcaaaaattgtagttcatgtcagtcagtgatgactcatcttagaagtattttgtttttggatgtgtgaatgtgcatagttcttaaagtccaacattcatgtaataagacatcttgcatataacaatgacccttacgtctaagatgttaaatagatcctaagcctggtataactttattcaagtatccttatttgcccctaaaatgtctttaatacacattacttgg

SEQ ID NO: 68845 - DNA, 691 bp, Homo sapiens
cctcctatctgcagaatgtcaaactcctttgcactcgggagactggagagtagattcctttagaagtttgttcttgtgattcacgttccctctcccaggctatccccttcaatagctaggattgggaataagaatgcacacatgtacagaaaagcacagaaacatctgccctgccttagttccctacagggtctcatcagaggtggtttcattagccccaaccctttgcagcctggcaccttcagacatgccaccagctggctctcctaatatttgctgtggggccatgtgatcatcaggagggataggtcctcaaacaggcgatgagctcaggacatgggcattgccacacctgttcctctccccaaggaggggggaaagctgtgcagtcacagacaacgtggccttttataagcttgaatgtgatgtgcatacttgtgcatgggcaggagagcagacagggaccaagccaaggctgacagggatcagagggaaggacaggggtgtttgcgggtgcctgcaatgtggcagtggctgagctgggcctgtgtgcctgtacaccattgtgtttcagatatttttgactgtcaagttgcaggaagaagtatattttgcagcatgacctgtaacacacacacatgcacacacaattgacatgaaagtttcatgaatctgtacttaccttttatga

SEQ ID NO: 68846 - DNA, 656 bp, Homo sapiens
caattttgccccttcctagctgggtgatcttgggccagtcatctcaatgctctgtacacagattaaagagggcagaggggactggaaggggatcagaatgtggctacttcattaggtgggtccactgtgggtgtgtctgagaaagagtggggagaccgggatgttagagcaggcacccttgggtgagagctgtgggagatgaaatagagaagcatgcaggagccagtggatgtaagtatttgcagaccaagccagggactttggactttatttaacacgtaacagaaagcctttggaaggttttgatggcaaagtgacatgatcagactgacagcttgacaggacccctctggccattatgttgagaagaacctgaaagatcaagggcagaaatagggaagctggtctggacgtggtacaatatgaaggcaataaacaatggtggcctggccccaagctgcagcagtggaggagcaagaaatgcagatcccagatctattttgaaggcagagcccagaggaacggctgacaagccattcatttcagcactgtttgttatagcaaaagttgaaagcaacttgaacgttcaggagtaggagactggcaattaccatgtataatagaacacaacataggcttatgaaagaatgaggagg

SEQ ID NO: 68847 - DNA, 568 bp, Homo sapiens
gtaatttatggtcaaccccatccctaacctctgtactggttgcttttggaagccaggagtagctgtgtagaccccagtgactgcctaaggcagcgtgcgtcctctaaacagctcgtggacccagatggactgtgttgatttggtttctgggataagccccaggaatggggaactgactaccacctgggagtcctcccagccccagctcaggcctggacaggcctctgcttttctgggatctgagcccagttgggcttggcagaactccaggaacccggggagcagaggcaggagccagctccagagactgggaggctgtccccaaattccctgtgaagaggttctggatcctggagcctacctgtctgcaccaaatgggagagggggctttggtcctctgggggaagagattggcaggtggggatccccagggtggaattcaggagtgctggagccaggccctcctcatcctaatcgtcggctctggtggttaatcacagagaggcctacggactgtttatcgtggcctctgcacacttccctgctgttccaggaatgtggatgaggc

SEQ ID NO: 68848 - DNA, 688 bp, Homo sapiens
agagagagagtttaaactgatgtatactagactttgatgcccttctttattttaaaaaatatacatacctgggacctttcttatcctagtatcctggggtctggtttttaacttatgccttcacttgaaccgtctctctgaggtaactgcactcttcttaacaagctctgggttgggcaacctcttcctaacaggccagccaggttcccacaagcctctccaaaggcaggaattctgggagatggtgatgtcaccatctcctgccaacctgaggacaatggtctctggtggaggaggaagagggactcaaaactgatccctgcagagggaagaggggatgaagaggcttgtttctgaaggggagaaatgcgagacagtgtgctccctgcctgggtggttgccaattccctatatttgctgaggacatgagcaggtgggggaggaactgtcagtgttaaccgtgatgaatggcacgggtccattcctgttgtagagagcaatgtattgaatgaaaaatgaggagcacaggaagtgttaggcaaggacagtgtccccaggttctgccggccacaaaccggtttccttgtcctctgagtctggctggaggggactggggagggtagtctctgagagcttgaccaaggtggctggggttgctaatggaagctaattatatgagtctggagag

SEQ ID NO: 68849 - DNA, 1483 bp, Homo sapiens
tctgcctgtccttcaggcataagaatctgggttactcctagagcccaagtgtccagattgattctaactccagcccctgaatgagccacaaactgagtcctaacccgggtcacactgaatcttgaccctggccgcacattccttcataaccctggtcctaggctaagccttgaccctggtcacacactgatccttaaccctagttgcatactgatccctgactctgatcacagactaactcctagtgtgatctatgacccaggtcatgtactgacctcagtctcagactgaaccctgatccttgtcaaggataagccctgaccctcatcacacactgagtcctgaccctgctcactggttgagctctgacgcaggacacagactgagctttgaccctggagagacactgagtcctggcactcctcactgactgatccctgatcctggccatagagtcaaccataatctggtcctagggtgaaccataatctttgtcacatattgatctctaaccctagtcatacactgagttcagccctggcctcagatgcccagccatctccaattgctgctgtctactgcccagggattcagagactcccagaatgccctcttcccacctttccccagagcttaaagtgattccactggcctgtgcagaggtcacccagcctgtcatccccggggcccatctgggggacctacagggctctaaaaaagacagggaaggcatgatttagacagagctaaattctcgagatgctgcttttcatctagaggctcccaaactcttcctatttctctctgtctcgtctcttcccccattcacacacatatttctcctgaaacaaaattcatcagcaaattctgtctttaagaagggaggtcagacagcagccagcccagcagctgggcagaattctattatcaggaggaaatgcagccagcaggaaggactgtgccctccctcccggcaaagtgttactcactctccccagcttggcttccttctgaagggctgtggagttcctgacaggtggaggtggtggacgtctgctgatgttgaccagggagcccgtgctcccaccggtggctggctgccccagacctggcccctgttctgggaatctgccccagtgtctgagcaacacaggggtgaagagtttgaaatggttccccaaggtgctttccaggattgcagggcctgggtagggccttacatattgggagagtccttgtggcctctttggggaaggatgtttcccccttaagacccctgaaaacaggggtgcaggatggatgaggaacacagggctcaccctccacccccatctccaggcagtgcaaacatgtgaaacatgaacacatgggcaggcgttgaggtttccactcagttccccctccctgctctggcagggaaaggacttttgctcctctgggccagggagccctggagggaggggagaggcatggttgctgaggc

SEQ ID NO: 68850 - DNA, 682 bp, Homo sapiens
ataacacgtggcaaaagggctatgaaaaaaataaaggaaggccgagaaatggagcataaaggcagggacgggaggtgtgttacaatttccttgcgaacatgaccaagccaatccttcctgcccgcccttgttccactgagcactcattacttgcaccatcataaatacagtttaaagattattttttagctccctccaccccatgagcaataaacctccctctccagttggcaccaacagtacacttgtggtgaccgcagtgaccaacaaactgttgcacttccccacgttctgctgccagcccatctcccgggctggaaagccgcaagcccttggcactttcttctgccccttgcctgacagtgtttgcctttctttggatgatggagcagtgagatcatccaggtgccccccaggggcttggcagagctgcttacttggatctgctccaggtcagccaacaagatggatttaagggtggatttaaacagagttgacaacaggttccagggtctttggcaggggtggggtaagggggccacactttggtcaccttcctgaggatcctgtcgcccttatcagcacgacctgagtggatgggcatcagacacaataagagagagaggcctatgtatcaggaccccgctggataaatgggggtttggggatcttctgtgatttg

SEQ ID NO: 68851 - DNA, 1259 bp, Homo sapiens
ttagtgccctgcctttactggactccagtggccagagaaagcctctaaccttacaatgagcaggtatcatttgatgagagcagttttttgaaaaggagcttatttatcttgcaggattgtcaggaggattacatgagaggacagtaaaaaagaaaaaaaacaacaacagcaaaacccaacagttattgagagctttctacataccaggtcctagtctaagtgctttgcatacattaatgcatgtaactcaatccaatgaggcaggcacagtgattggcccaaaattgctgttggctgaaggaaccagggcacagagggctgcaatagttgaccccaaatcacatggttagtgagtagagaagccaaactctgaacttgggcaatccagtgctaaggtcaagtgcttcccatcctgatgacattatcaagtacaggaagtacacaaagtgctgggtatggagttggtgcctaacgcatgcttgttctcttctagttagttaagctttggccaacccattcatttgaccatctctttttcttcctagcatttcacattcacacagcaagtcggtgaaagatcaggggccatgcccaggcctttctggccccgccacccgtacccgctgaggctcagggatctttctgttactccaggatgtttgaccaggatcatctcttagcagctggtctctcaggggatttgaaaggctatgatgggctgtgtgatcctcagcaggtcactggagcatcctgggtctctgggtttctttatcctgtggggatgtgggatttctcaggcacagcttcaactctgatcatgtgctatcatccttcatccttcagacaaccctgtggagtaggttttattatcgccctcacttacagattaggaaatggaagtgatgagaggtgaagcaaattggccaaagtccacagctaggacaaggctgggctgcgattcgaagccaggtctgtgtgaccccacaatcaggattcagaattgctggcatattatctgccaggataaaaacaggcatctggtttgaccaagctggggccagcaagagcctaagtcgatgactcatcacactgaaggggccccatagattctgagttggttcccgcatttcttttgatgataatacacagatccttgtggctcaggtcaaggaagctggaacctcattacactagagacgtgtagctggagcagaggaattccgtgaaaacactaacaatcgttgctgccacttactgaa

SEQ ID NO: 68852 - DNA, 495 bp, Homo sapiens
ggaaggttgggacttggaaagttggagaaattagctaaaagctatggaagtggggagtggcacagaaccagatccatccttgctcttcagcatatgagatatggccacttttgtatcttacaatcacctagaaatgatcctccatttggtcctgtcactctgtgagttctaagcaatttccacaggctttgcttgttttgacaagcaaggcatccaagctggggggatgggtggggatgggatgggcaaggtgcagatgactcaaaggaggccagaggcacagggacctgggttgcaggtgggcagtgagaaggggtgacaggtccccaaaccctgagacacagtgactgactgcttgcttgcttgcttgattcattcattcgttcattcattcattcgttcattcattcatttattcattccacatgctcctcagtgccaggcaccatcatgggtgctgggaatcaagcagtgaatcaactcatggtactcaca

SEQ ID NO: 68853 - DNA, 1113 bp, Homo sapiens
gtttaaggcctctgcaggaaaggcattgcatgatgcaacagagagtgaggggagggaaactgtttagaacagcggtcaaggaaggtctgtatgaggaggggacatgtgagcagggacctgctcaaatgaggaagggggagaaggggctggccaagggggaatctggggaagagcattccaggcagcggaaacagcaagtgcaagggtcctgaggtcagataaactctggcctgtttatggaacagcaaggccagtggggctggagccaagtgaaccagaggagatcaaaagagatgagcccagagaggtcatgggggccagattctgcctgggccttgtatgccaggatgaaaagtctgaattttattttgagtgtgatgggaaacttctggaggattttaagcagatgaataatgtgatccaatttacattttgaaaagctcactttggctgctatgtggggaatggattgcaggggcaaaagtggaagccgggagactggggaggaggctgcggcacttgatcattatagaaagaacactcggtttggatttctggctactcctgactgcctgtggtgtgaccttaggcaagttacttaacctctttcagcctcactgtttgcgaaaggtgggataataacagagctgcgttgttacactccatacacagtaggtgtttgatcattggcagccaggatttctattctgagggccagtgagcctgcctccctccccatttcagctctggctacagaaaatcctagatggtccatctgccaggaatgtgagctggcagccccagactgggatcatggagaggtcacaaggctgtccctgctagcggattaacccaagggagaggagaggttctttattcccaaacagcacctcttgcaagccccggtgcttgggtcttgctgccagaccaaaacatggccctgtgcctgcttcttctctgggagggcaaattgtccagttccctgtaccttgttctcatgtcttagggatgggacagggagggagagtcacatttgggcctaaatgggatgtgcagtgggagaacctgtgtcatgcctggaaatagcaaaataagtctgttgatcctaagctg

SEQ ID NO: 68854 - DNA, 1098 bp, Homo sapiens
gaggcggggaaatgagctaaattttctggccttttcaaaaggtgccatcctcctaccgcgcactagtgatttcggggggttcccctgagcaccccctgcatgtagggctcacgccttagccccagaatggggattgcgcgtcccctcaggcctcagcccttgcctgcctcccaccccgctcccctccagcctggagctgcggagcccgagcagaccaacaggccgagctgcggcaggcaaaccccctgtccgtgtccccatgcacccccacggaaggccgtacgccccaacactcacccccagggcggccgcctcctggggccagggaccgcgcatcgtcccggccgcccgggcgcccccgcccgtgggcagcggcggtcccggggccgggctgagccgggcctaccccggccgggcaggcaactcgcccgggctgcaggcgccgcggggccggggcgcgctctccgaggcggggggcgccggcgggcgccgggggcgcgggggcaggaccgcggccgcgcggcacctcctccacctcctcctcctcctgctcccgcggcggcggcggcggcggctgcctgggcgagatcaacaagtcggggctgagcttcggctccgcgctcgctgctattctgtcccgcacttcggagcgcccggagccgggcaccaaggcaggacggcgccacctgcgggtcggaagcgagcgcggcttaactcctgcctgcccggcccagcctgccggggaggccgggggcgggctccgggatcgggccaaggagacgcgcgtggccgtgcatccctctccacccaggccacctgcacagctggcctcgcgatcccgccttccttcgtcccgtcaacaacgtgtgttgaacgcctcctgtgcgcgagccgcggtgcagggcacggtgacaggcgtctgagatacagctgtgaatcaaacacaaacatccggccctcgtggagctggttggaaacagatcataaacaaaaaagcgaaaggatatatgaggcggtgacaagcgctgggggaaataatgaaacaggaggaagggtcagagggtgggagggggcagatcggaactgtaaatagccctt

SEQ ID NO: 68855 - DNA, 743 bp, Homo sapiens
atgcctgtagtcccagctattcaggaggctgaggcaggagaattccttgaacctgggaagtggaggctgcagtgaaccaagattgcgccactgcactccagtctgggtgacagagcaagactctgtctcaaaaaaaaaaaaaaaaaaaaaaaaaaaattccagcccaaatgtcaatagtggcaagattgagaaaccttagattaattaaatggaaagcaaaggtccccaagcccaaggccagtgctagatattccacatcactcagattcttccccactagtggcccgatatttacaaagtgtggctccagattcagataaagaacatctgggtatgcctggagcttgcaagtgcaggcagtgggaatggctctgtcacttttcagctaacagccctgttgtgactacttgtccatttatttactcaaccaggattcagtgcaaaatgactcagatggcagtgtgacctgtggctcagaggaaggattctggagtcagaatggtgctattacttacttgcagtgaccttgggcaagtgccctaacctctctgagcctcaattttctcatctgaaatacagggtggtaataaaaagagcacttgctttatagggttattataaggaatttgtagaaagcactcagtcatcaccagctctcattgtctggtaactgcaggttacctaagggcaggagctggtctgtcttgctcatctcatataacagaatgcttaaataatagag

SEQ ID NO: 68856 - DNA, 1712 bp, Homo sapiens
ataataataagatttgactgtgactgaaattcgcacaagaacaaatcccttctctgtcctgtttgctcgcgcctgtcttcatagcacccaccatggagacttgcacatagtaggtgctcagtaaatattaaatgcacacatgccactatgtagctgtgtggcttcaagcaagttgtttctcctctctggtcctcagtttccttctcccttcacgaagagcttcttgtagggaaagtccattcctctttctgggagggtgtgtccccatcaggggtagagggttcaggggtcaggagccggccacagctgctatctccctgagtcaccaaatttctcaacttgaggccaagtgtctaaatattgtgactgagccagttagagataagatgtggaaacattgatttggcccaagcaactgcagtcacggtgctggagccagacctccctggatcttctcagcagcatgagtgagtgtttagcacctgccaggaacacaggctgctgacctgcaaacagatggggaggcccagatgcctggcttggcagcaagagcctgcctttgccgtctctgtttacacagccagcatccagtcaaatctctgtggctccagtggagaaactaaggcccaaagggagtgaaggatgtgtcgtccagggttacgctgggagactgctatcccatgaagctaaaacccgcaagtcctaactcccagcccagcacctgtgggaacccaccaggcccagggagaaggaaggctggcagcgtgtcacaggcagggagcgtgcctgagcaaatgctcaggggtgaaagaccagatgcaagctcaaacactagagtgaatgggagaaaaggccacgtgtccaggactttggactcaattcagagaataaaagggaaccatcgatggttttaggaagaagagcagcaggatctgagaggctttttccaagtgcttatagaccaccagcatcagaatcgcctacgacaggagctgggggaggttgtcaaaatgtgggttcctggggtccaccctagatgtggctccccattgtagcaggccccctctgaggggattctgaagcacacccactgttttagtgagtaggagatgcagctaacatcccacttataaggtctaatctcagacaaacctggtttcaaatcccagctctgccacttacttgctctgtgattttaggtcacttacgacacctctctgagcctgttttctctcctccgtaatgaaacaatcttagcatttgcctcaaaggtttgttctaaggattcaataagataatgtaggtaaagtgctctacatagatccagagccctcctagtgctcaaaaacactggtttttagagattcccttgggcagcagtggggagaaagcaatggaggagggcaggcaaggaggcagggaagccagtgaggaggcagcagtgggactccggggagaggtctgtggctagggtgtggacatggtgacgggtggggtggctcctttgcaccgtgccaggtggtgccgatcttgtatgctcgattgcgaaagaagctctctggagttggtctagggcaggagagaagaggatgagcaaaaaaaccaaaagaggttgatcataaaacccatattcgcagtcacggactgggtgcttagcgtgggccaggccccgtgttagctgcttcctgatcttcatcctcacaaccacctga

SEQ ID NO: 68857 - DNA, 434 bp, Homo sapiens
tggagatttcacttaaatcctgtgagctcagccatctatccccaagatgcagttcctccaagatacctggcaggcaccctggcaggagggtgtcacggttctctaacctggctgactactgagcctctgggctccatgaggacaggatgtctctctcactcgctgctagcccagtccctggcacagccctggggcttggcaaatatttgttgaatgaataaacaggctgtggcttataagctggttcagattccagctccccactcactccgcatggaagaatcacttcaatcctccaagccccccgttcttcatctgcatgggggatattttgttgttattgttgttttttaaacttgggatttttttttttttgaaaaatagaacagatacagatacaaaaaccacacagcataagcatgtgacttaatgat

SEQ ID NO: 68858 - DNA, 1205 bp, Homo sapiens
cctggctattttttttattttttgtggagacagggtctcgccatgttgccagggctggtctcaaactcctggactcaagcgatcctcccgccttggcctcccaaagtgcttggattacaggcatgagacaccatgcccagacagttgcattttaaatcctcctatcaaagagcataggcattattatccccatttcacggatgaggaaactgatgctcagagattgaatgatttacctaaggtcacacagctacgtagagacagtgccaggattcagcctcagcccattgggctgtgggatctgcagggctggaggggatagaacaatgccagctggagccagcactgctccccatctgctaagctctgccctacgacctctaggtgacactgggtgttggcaggcatgaaggacctacaccgtgggactgtggggaacacgaccaggccctgatcagtaggtctgctgagtcaccaggcctggcccagagctaacctccggcagccaggagccgccccagggtccgtccttggtgccctgcccagcagctgccaagcacagccactgccacatgagctggatgtcctgcagaagccagagtgacaaactacccccaaatctgccctcctccctgtgctgtgtggcctctggcaagtcccctgccctccctggcctgcggtgcacctgctgtctcgtgcaagccccaggccgcagtgcccctccctttgtgctgggtagaatcctggccaattgctgataccgagtttagaccggagggcagaaaggcgggacaggtaagtgcagacagtggggaaggctgtgggccccacaggactagactcttgtgggtgtggcggaggacaaggctgcccatcagagccccaggggcccaggctccacccaggtaacaggacacaagaagagagagcctcctaagcagaactcggtttctataagcaagacagatagatagggcaagccagctagcatttattgagcacttaatatgtgctaggcattctacagctattctcttacttaatcttctcaatagcgggtgatgatcatgatgcatggtgattcctgttttgcagatgaggaaactaagacctaaagaggtaaagtccttgctcaaggtccccaagccaggaagtggcagagccagggtgaaatccaagtccttgtcattccagagcctctgcct

SEQ ID NO: 68859 - DNA, 706 bp, Homo sapiens
ggcttccccttccccttccaccaagagtggaagcagcctgaggccctcaccagaagcagacgctggcatcacacttcttgaatagtttgcagaaccataagccaaataaatcctttttctttgtaaattatccaacctcaagtactcttttatagcaacacaaacagactgagtcatattgttaacaaaaatgaacgaggattcatttggcaagagcttttttagcagtaaagtaaaactcagccaaatccctcttttacaatgcgcttttcccattgaaaataattattgcaaccgaatttacctctcttgggaggagacattctaatcagaccacctctttactaaaaatatacctgagtcatttacactgctgttcctcttggcataagcactccgaagcacctgctcataaacctgagcaccgattgttctcacgttgtcccggatcagaatgccttgggcttgcatcatgaagaggtaggtgttcactgcagaaagcaaaaaggggaaaaagaggtggattcagaagcaatcatttaaaaaaacataccacatagctatggatttttttttctttttggacttttaaagcctcttttagttcttttaaaaccctacatgaccataactctattttccatacctttcaggacaccaacatcttttgggtagctagtagagcttagaggaatttctgtcaata

SEQ ID NO: 68860 - DNA, 3670 bp, Homo sapiens
aaaaaaaaaaaaaaaaaattagccaggtgtggtggcaggtgcctgtagtcccagctactcgggaggctgaggcagagcttgcagtgagccgagactgtgtcactgcactccagcctgggcgacagagcaagactccatctcaaaaaaaaaaaaaaaaaagatgtgggaaaagtttggtttgggatgtatctagattgccaactaaacctaaatcaaagtatactaatattaaaaatcctgtaaatgggccaggaattgttacagagggaataaagaccctagcaatgttcacataagaagttaaagcactgcggggtttttctatgcccgtaaagtattctttagtctttggaatcaagaactgcatttagggtcgggtgtggtggctcatgcctgtaatcccaacactttggaattacaaaatcccaggaattagtaactttttttagtgagtctgcaaatgttactgaataagccagccgcaggactgctcatggaaggggaagggaggcacaggagaccgaggtgggaggatcacttgagcccagtagttacagagaccagaccagcctgggaaacatagcgagaccccatccctattaaaaaaaaaaaagaagaagaagaagaaaaagaattgcatttagtctttacctataacgtcctataatgtcataggtgaactaaaagaaatgataaatatatcctcctgttgtctctcaatggctttccaccactttcaaggtccaaattcctcatgcttagtatgactcagaaaagtccataaaacctggctcctgcctctggaatttcagttcttgccactcccaactctacccacaatggacagttctctggaacctgctaagatctcagacaatgctgctcctactggctaggtgcaaagacacaaaaactaagatttcaaaagcaaaaaatcccgggaaaaataatctatcacaacaaaagcatgagctcaggaagaaaagggagtggaggggataagagcaggggagggggaccaaacccaactttgcctcccttccccttccacgagcagcctggtggctggcttgttccgtgtgttcagtaacatttgcaaggaccaaaaaaatcactaattcctaagattgctgttactctcaaacaaaagtcaattcccaagcccacacaccccacagtcaagctgagagttaaaactcagaaaactcaaaggccttaggatactgaccctatgctggcaaccacatagctcagaaatgcaacaaatattaaattatggtgtcctgtaatggatttacactttacttttaaatattaacaagacggccacagggagtaagtttatcaagggataagaatcctaacagtacctcctagttcactcagaggccaattaacatttcccaccacgcccaacaacaaggctcctgggggtgttcaaagttgcttatgaccctgtggagctatcagcaggtacctctgccccagaacctattatgagcaatgcactaggggctcggtgcacaaggaaacacctgaactacaactacccaagcaaatatcatatctttgtaggttgtcgggtttcttcagctgtctgaagatacaaaacctcatgtgactgtttgatttttagtctcttctcaccttggtcttcctttctcacagttatttttaaaatcagcaactggctaatatttgaaaactgtcagtagccaactgtccgtttcacaattagatcactgttcaaaaggagcagaattttcaactctagactttagttcaacaagctagcaaatcattacaggaatgagtgacttcatctttacagctgggtcgctgcactatgaggctacactaaaatatacctaattgttgaattccaacatgtctgtaggccctccccgcatcttcaaggttagagtttttattattgcatcctcccccaacccaacccccccagacaaagcttggcattttcggaatccctactcataaagtgactcagtccaccgatgggccaactgacaaatccttaagggattaagatattaccaggtaaaaagtgacttttaaaaatgtacataatacatatatatgtagagagagagagtgtgtgtgtgtgtgttacaggaaagctattaactatactatgaataaaacaaaatttcactgaaaataaaagtgatcaggtagcactgactacaaccttctaaattccccctaaatgaatccacagaaagactttcttgaagggtcttttgctaatttgcggttagaacacaacacactcaagaaaatgatgctcacagcaggacactaatactaagtaatttctgagattatgtctgcatttgtgctaaataatttatgctaggagcagaaataaaagcagagatgaagttaagctattgattgaagactgtgctaaccccattaaaaataaagagaggtatgaatgtgtgccttcacaactcagctcaggatatacttgccaactgagctcttccttccgtaagaaggcccattgctcttggctactgcgcaggggctatgaaggccccatggttctaggactagagcagatgcgtacaaactccctaaagtcacaggaaggaaggggaggcacaactggagagaagttggtgaactgcctctctggcccataggggcatgagggcggggggcacagaataaaaccataaagcaataattttcactatttaaaagaacaagtctaaatggcacacatcctctgtgtctaagatgactagcactgctgttttttgatgagtcatcaagggcagtcatgctgaaaagcagggatacttctgtattccacctatgtaatcattccaaaattatgggattggaacattacaatacctatgatgtatgtccttatatttgtatgtgtttgtgtgcttacccttaagtggtgttttttgttttgttttgtttttgctgacttctttgttctagggggtatttctgcagccttctcagaaaaacctcagggtattagagaaggtacaacttgctaatggcatctggtgagcatgggctggaaggggaaccaccgggaaacacagttgtcaataaccacacccgctatggtgcaaacatgacccacatacaaactgaagtacaagtacaacccctcccaaaagtctagccctaagataatagcacagaaactaagcctaacaaggtgcttggaacctcttcctacctgcaccaaccaccctctgcacaccatccccagcaagaccccctgcctccaactcccctaaagcagcatttccaggatagcactattctttaatccactgacaactttggcactggctaaggcttactatttttatcccctttcacaccattctctgagcagaaatgctaggtgcaaacatttgttggtaattatgttaaagtaagtcttcttaagaacaaatggtaaaatgaatacatgaaaactttgcaatctatttttgaagaattgtctgcaaaaagagtggaaattgagtttttcttacgcagctgaaaggataaaacaaaaattacatataatcagaacacaatataaaataaggatcgtactcccccaaaattacatctgtatttggctgtgagaggtgaaatatctttgattgattgattgattgattga

SEQ ID NO: 68861 - DNA, 1020 bp, Homo sapiens
gcataaagtagcctctgcttctggctatgactgagagcctgtggcagaccagagatccctcagagaaacaactccaacagccagagaaaattaaaaaaaaaaaaattttttttttcaaagtctgaagactttggagaactgtggaagctactatgacttgaagagacacaatccggaagggtaaaccctttaggagcaagccaatatgccacaactgctttgcccctcagggaatctgccaatgctaggtgccaggaaggaggctgaggaaacagaaaagcagcctgggaacatgaccagagccactattcacaggcagagaaaccagcagagctcatggtaatgtctcaggcctgaagaaagaaaaatagagacaagggcctaggattcctgtgaaaagaactgagtgttttaccctgaagacattttacaaaatcccaaagatgcacaggtcagaaggctgaaaccaagcagaaagcctctgaatagcacagcaggtttcttcaccaatcccatgtactaagaagacaaagattaaagttcaggacacaccgtgggggacaaagattaaagttcaggacacaccatgggggaagggccccagttcttagccagaactcctgcagggtacttccaaagagtagaggcaaaccaaaaagagatggagcctgaccaaaaccacgcccttgctgtggtcagctcagacaagataaatggaatcagcccccattctatttgcctagcaaatggtgtaagccatctagatattagaaaatcatctagggtcgctacaatttttttatatacaatgcccacttttcaataaaaattaacaggcatgccaaaagataggacaaaatgagtgtcaaggccgggtgcagtggctcacgcctgtaatcccaacactttgggaggccaagccaggcagatcacctaaggtcaggagttcgagaccagcctgaccaacgtggagaaaccccatctctactaaaattacaaaattgccaggcttggtggcgc

SEQ ID NO: 68862 - DNA, 2161 bp, Homo sapiens
ctgaggcaggagaatcacttgaatctgggaggcggaggttgcagtaagccgagattgaaccattgcactccagcctgggcaacaacagtgaaactctaactcaaaaaaaaaaaggggggggtgacaattatattttaattataaaatagtaaatgaaaccatattcctgaagctaaatttaatacttacaaaaagttgcaaaaaagttatatctgttacatctttaaatgcatataagccatttaaatggtatcaatctaacagctaattttcaatgaaatgtttagtctcaaagaaggcataccgattgatatgttcaacacaagtattcttgtttcctaaaattctatttttatgaattcatggagacacaaaatatcctagagaagaatccttaccctgaaattgcaatttatctataatttatattccttgaatacctgggtttcccttctgcatataaccaaatggaatcctttcttggcaagaatggattgctgcctctactgtgaactgtagttacctggctctaactggcagacagataatttaacgtaaattagcagattatgcctgtgctctggtcctagaatattatttaagagatagcagataagagtggtaaatgatcaaccgggtgtttgctgaaacttcctggagggttaagtaatttattattaatttttgagactagctatagatgggaaaaatgagtcattctgattaaaatgacggtgcggggcaatcagccagctttagacactgctcctatatcaagtacatgccaggccaggagcaggggctcacgcctgtaatcccaacactttgggaggcagaggtggaaggactgcttgagcccaggagtttgagaccagcctgggcaacatagtgaggccctgtctctacaaaaaaaattttaaattagccaggcgtgatggtactacgtaactgtagtcccagctactcaggaggttaaggtgggaggatcgcttgatcctgggaggttcaaggctgcagtgagccatgattgccacactgcactccagcctgagtgacagagtctcacaaaacaaacaaaaaaaaacccacacgccaaaacatgttcttctgcagtatatggtagagtccacattttcttacaggactgaaaacctgacagtcactttgcctctagactacagttttaacatttttagttagtatataaatctgtacatataatgtaagctcaattacgtttttgaaaaattacacatactcccctaaaaaaagatccagaagaaaaagcaccaaaatgttaacagtgtgttatctttgggttatgaggttttagattgtctttattttccttatgcttcgctgtatttcccaaattttatacactgaatgtattatttttaaaatccaaaataaagataccggggaaaaaacaaaaccctaggcagtgactgacctgtaatgatcaccaaatgactgattttatcacactgtgattatgaagctacaatgaatgaatgccctttgtcctgatttatccttgctgccacccaaaggtacatataacctgattctcctggcaacaacacaccttggcatcccacttaccccatgtctgtaaagaggcctcagacagtaattcaaccatttaaaaactatgtcccctacaattatgctttctcactatcttcagagtattctcacctactgttttttttttaatgtattcactgtagtgtgccttataaaaacaataggtatgttgagtgtgctgtttctatttatacataagcctttcactcccatccaaaagaaaacatcccagcctgggcaacaaagtgagagcctgtctctacaaaagaaaaaaaaaaaagtagccaggcatggtggcgcgtgcctgtagtcccaactactcaggaggctgaggcaggaggatcacctgagcccaggaagtcaaggctgcagtgagctatgatcgcatcactgcattccagcctgggtgacagagcgagaccctgtctcaaaaaacaaaacaaaacaaaaacaatagaaaatatcttggtatcaccatatcatcatccaatgccaactttatgaaaattcctgatgtaaactggtgaaaatccttggaataacaactagaatgggactcagttgtagtgct

SEQ ID NO: 68863 - DNA, 1446 bp, Homo sapiens
aagtgaaaacacttgtgatgaaagggttatgaataaattactgcaatttccttttatcaaccaagttgatttaatggtttaaaaatattgttcaacagaacaaaggtggtaacatttgttagatcctaattaaacgtgattcattctggaatgtttctgatgacacagcttacataaataatctactgggaagtctactcaaaattcacaatgaagagtcggtttttcacacatataatacaacctgaaactatagcttcaatctatgcagatggttttactattttaattatacaactaattaataccaaaattagatcgatgttgtttaatttgtggctactgaggaatgttactattcacaaatcacaaaatctgtgccaaaataagtcttcaaagggatattgttgcctccttacccttctaagctttgcagtgggctttggtcaaagctgacataaacagctaaagaaattaacaacagagtctcagaagacaaggccaggggagccaaaaggacacaggtgctacacacccaggcagttgttgtctgctcccagagcacctgacttcagcagccacagcacctgctcctcaagcgcagcggcgcctttgagggagcacagcctggaaggtttacccttcgcagagacgcttgctcttggacttctggctgtacattctgagggttcaaatgaaggatgggacaatgggaaagcttaaatcctctggaaacgtcactgtgatcaatggcttcaaccctcctctacctcataccagttcactggagctgctaacactaagtttccttctttatccgcccatctctattccagtggagccccgtgattaagggatggcagaggaaggggacatgtccttttttttttttttttaacagaaaaacactcatttagatacctggtttagtaagacatctgaacaacatgaaacccaactatgtaaaagctttaaaaatccaggttatgaattagcctaaacctgtgcttatgttccattctgtttagaggaagggggatggaatccctttcacctttatatttttcatgacaagtccatggtcacatcaaaaattacttttgtctttaacacagttgaaattattaaatgttatctagacctaaccaaatcctatttccttaatgttatattcaggacagtgaaaaaaatactgttttcttttagcaaagtctgacttttaaggctcagtttttacctgattaaataaactgcccctgcttttgaggttagaaaaattacttttgttcatggggtccattatactgtactattaagtttacttttatatgtttggaaatttccagccgggcgcggtggctcatgcctataatcccagctactcgagaggcagaggcaggcagattacctgaagtcaggagttcaagaccagcctggccaacatgg

SEQ ID NO: 68864 - DNA, 1129 bp, Homo sapiens
taaacaattacccctaaccatgcacaggcacctctcttgaaaccgataactgtttcgacaatttgctaaggtcagtaacctctacacaaccttgccatatgatggtaccataaacttattaagattttaaatcagcacctcatatgtatatttataaatagctcgcttctgttatcttttaaaagacctgatcagactggagtacggaagtactctgagctctcggatttttttttaagttaacaggtcataaataagttcaaaagttttctgcagaaccctgaagggaatagggatatttcaacattgcaaataaaacaagtgattaaataaatgagaatcataaaggccagagggtagagggttgaagagaagggacatcacatttttatgcaacattattaccttgctccttatcaaatccaccactttctctctttcactctctcactttctgtcccaaccttctccttttaaattgctgatataaaacactacttccaaaattaacaatacaaacacaactcccggccaggcacggtggctcacgcctgtaatcctagcactttgggagactgaggtgggtggatcacttgaggtcgggagttcgagacgaacctggccaacatggtaaaaccccatctctactaaaaatacaaaaattagccagtggtggcaagcgcctataatcccagctattctggaggctgaagcaggagaatcctttgaacctggggggcagaggttgcagtgagctgagatcacaccatttcactccagcctgggcaaaagagcgaaactccgtctcaaaaaaaaaaaaaaaattccaacgaagtcgtatttttaaaacattaaatggatcaaatggtattattatagtagctgagggcattttatattttttgcaaacacactattaatagtcttatttagtaattttcctcatatccaattttctatgtgagatggtaccccatttcacggatgactctcaagtccaagaaaagtttcctttgctcttagaatacgggtcacccacattaagtggcattagagctcaaaaatactaagttaatggttaggctgaaattttggctgggttacagtatacatggacaattcataacat

SEQ ID NO: 68865 - DNA, 2812 bp, Homo sapiens
actttcacaaaaggagaaaaaaaggattatggctctaagactgcctctaggtccaaatcccatcttttcacacccatttttattagagtctaatagccaacatgctaatgaactcttttctcagttaattccactaattagttatctcttcttgttctgccagaatcccaacccttttacaatctactcatcaaatccatcaggccacatattatgccttcctagaggaacacttttcgtgatgacactttgtaaacaaggcaatctgatgctgcctgttctatcttcccagatctagttgatagttcaaaacatcaacattaaccacaagtaaaatatgcttaaaaaataatcaggagacgatctcctgctctatctggaaatttctctattcagctagttctgcgttgacaggtcaacagagaatggcactagttattgctacaatcctaaaaggcatttccctacagctaaaccatcaaccctttcctaaaatccatataatccaaaatttttctagcagaatttactctccctgcccctaccccagcagcatcttctgatcatttttcaccataaactgaggtttcctcatagtgatgccaagtcaggcaaacacattccttaagcgttccacctaactcccttcttcctggaagttacatgtaatagctgcctttatttacttatttttaaaactcttcaagcaccaggtacagtggtaagtgcttttaaagaacatgtatctacttccatccttaacactgtatgagattgggactcacattcccattttacagaggagaaatgcaaaggcttagtaacctgcccaaggtcatacagggcagagattggaatccaagtctgacctctgtgtcctccgctcttaaccttcatgctgtctttccttctgatctcttcctgtcctaactggtgccctgtggtcttataaaagactatgcttggggcaggcgggggaggggtgggagggtcagtttctccagagaccgcctttcctttaaaggataagactttgaaaagaaggagtacccattacatctttcctccatgctcccccttctcacctggtaccatttcccaaaggccccaatcatatccccttctctacggacaatttaaacttctcctttgtccgcagagcaggcactatccaatactgaagaaccacaccatctaccctcaaggctaggagagggcagaagtggaagaaagaacacagacagcaccccttccccaggtcttcagttgagaaagaagctgtggctgaaagtctggggggctgggggcaaaggtgacaaggatgtgcccttgtgggtacgcgaggtgggggggggggagatggggaagaggcatgggacgctcaggggattagcaggagattgaatgggggtggacctctgtaaggggaaggggggtgccaccggcaggcagagagatcaggccactgaagaggtgaacgtgagttagggaggaggacctggaggtggatgtaataggggaagtagaggaagaaaggggagggagggggctcacgggagcaggaaacgatggagtcatggggagtgggggaggatggatgggagctagaaggtggggcggcctgggacccgggcacatgggctcggcgaagagcgggcgcgccgcgggggactggggtgcggggaatgccgggaatgggggttcgaggagaccccggggaagggaaggggaagcgggagttctcgagcagaggagcgggaagtgggagttccagcgaggcaagagcgggaagggggttccggagcaaggggcgggcgtgaaggtacagtcgggttcgcgagggtggcgttaggaggggcggggtgggccggaggctggcgcgggagagggatcccgggcgcctgttggggtgcggagggcaggaatgtcctggcgtccccgagagccgggccaggactccggagtcttcggaggaccaggctcagggccgcctcccggccggggccccttagggaggggcggggattccccgggtccctcaaggccagagcggcagccgccgcggtcccaagcccccttcctacctatgccgggcgccacatagacgaagtacagcagcgaggacgagagagaaaagaagaagagcgcggcgagcagcgagcggcgcggcagccgcagcagcccccggcgggcgcgcatgctgcagccaggcggccgctagagagccaggccgggcctgctcccgcagctccccgtccgccgcctcctgggccgccgccgccaccgcctgggcctcggccaccgcctcccgggcctcgcgggccgccactcgccgccgccgccgcctcgccgctcccagccgccggccgtcgcgggccgggccacatgaagcgggcgggggccagagcggccccgagcgggcgcagcggcgggggcggaggcggggcgcacgcgcgggaggcggggccagtgccgccgggcaccgtcgcaaaagacccgcgcgcttgcgctcgccgccgaccctcgctcggcgcccacagcagcccgcatggagtaatcgccaaatggcgacagaccctctcccagtgcggccaccgcccaggctttcggggaatgtctcccaagtgctccgcgctagctcgtcccccatctcgggggccaaggggccatctacaaagtctgactcatctcgttgcccactgcagcagaagagtggggactgcaaggcttgggggttcggcctggtatacaccctcattcattcattcattcattcattcaattcaccatttatttattgaatgccagacac

SEQ ID NO: 68866 - DNA, 1144 bp, Homo sapiens
ttcacccacagagccgcactgccaccccagggatcactttccaggtttgaggccctgggcccctggatctagggtaagacatgcatccctggagccttggaactgggcagagctgaagtttcggtccatcttggaagcactaaactacagacatgccctgtgtcttgtcccatccccctattattaagtcctgagtcttcctccctggctggtgatgtgctgagagtgataagaagataacagcaagacagacagagtgagagcgacaggctgacttacgtaacctggtggaaagtgatacaggcagattcgctgatgggaaacaaacagaaagggagtcaggcagagcttcctggaatccaggtctaggagctgccaaaaacaggcctcctctcttaggaacaattgaatgtcactgcagtaaccgaacactgctggccagagaggcctcctgcccacagcctcacagagcggcctgtgtgagccaggacaggctccagaggaaaaaagggcctggcaaggtgccctgtgaggctatctgaggagacattgcagttcctcaccctggatgggcctccaccagcacagggctgcgagttgaaggccagggaattcccagggcgagtcccaggcacagaggctgtgagctaggagggctctaacctggggttaagccctgaactcagaagccgggctcctaggctcttatcctagcttttttctgctgtgtgaccctgggcatggcataacctctctgagacctctctctctcagtcttctcattggtagaaagggaataaatatgtgatagtagataaaaataggactcgtagaaaggggataaaaatgttataagaatcaaataagccaggggcttgacaaaccttttaggtaaatagccatataatatagattttaggctttgtcggcagtacagtctctgccacaactattcaactctgctgttgtacagcacacaaaaacaacaacaacaaaaaaccaaatgactatgcccacgtgccaataaaactttatttctgggtactgaaacttgaattttacataattttcatgtgtcacaaaatattctttttttttttaaatttgtatttatttacttgtttttatttatttgtttatttga

SEQ ID NO: 68867 - DNA, 1044 bp, Homo sapiens
gaaaaaagaagtatacatacaaataaaagaatcccaagtttctcagtgtttggaggaacatgtttgaaagacaaattgaaaacatgtttgaaagacaaattcccaggtgaccgagacacctgtgctgggacctgaacctccacctttggaacaagctcctccgggacccctaatgtatgtagtcctgcctttatagtctgagactctctgacccagactttgggggaaggacggtctcttaattctgcatgggaaacaaaagacacccagtcctttccatcacaaagccccagctaccttcttggcaaagagtagggaaatgcctttcattctttcccaatggccctggaattgagaaaatgaaagacagttgatttcccaatcaggttattccaccacgttgaactttcggtaactgtccttgccccatcgtgttgcgaaagcattcaggttgaacagtgttcaggaagaatactcaagcaaaaactggtttgcagccaaatacagagactgcaaaccccagtggcttcaggggccaggcagggaaagtaaacatgtgaaacaatagggagtagtcctgcctgtggggaacaggggagttctcatgccccagcctaataaatgaaaaaattatttatacaccacagtggaaccggagatgcacctaaagccattgggatgtggtttctctttttcatctcactgctctgtctctgatgtggcttcattctcagaggattgtgggctcacaagccaacatcctgacagtttagaaaccacaggagaaatgtttctctttctcaatcgtttcaacataaatcctggatgaaactgttattggccttgtttgagttcaaatggtcatccctgaaccatccctgtacctaaaagaggtatggtggtgtcattggtcagacctgagtctgacccatcctagaatggggttcaggcccactttaaccatatagactgagactggggaatgggaaaggtttcatgcctttgtttgggctccctcagaagcagactctgagatgaggattt

SEQ ID NO: 68868 - DNA, 829 bp, Homo sapiens
gctaacacagtgaaaccccgtctctactaaaaatacaaaaaattagccaggcatggtggcgggcgcctgtacttccagctacttgggaggctgaggcaggaaaatggcgtgaaccagggaggcggaggttgcagtgagcagagattgtgccactgcactccagcctgggcgacagagggagactccgtctcaacaacaacaaaagggcggggggagcaacaagcaacttcagaaaacgaagtccctttcaatgagtacccaccttctgtggaaaaacctcaagctcactactcaaatgcagcttggaacaaaggctctggcaaccctgccatccagctggcttctctcagtgagtcacactcagagatttctggcgtcactgccactctccccaccccctctcatgcagaacaatgggtctcactctggctctgaccttcttcacacccagcactttactccattttcctggactgggaaagccctttatgttgtgggcaactttgtttgtgctaagtcaacagaaaatgcttcttggcctctaccctcctgagagcacatggtgcattaataagtttaacccagagtttcccaaccttggcgctactgacattttgggctggctcattctttgcttcgggggctgtcctgtgtgttgtctgatggttagcaacatccctggcctccattcacagatgccaggggcaacaccacacctggttgtaaccaaaactttctccagacattgtcaaatatcctctggggaaaaaaaaatcaccctcggttgagaaccgtcgtcaactcctactaggaaccactgaggttagta

SEQ ID NO: 68869 - DNA, 2645 bp, Homo sapiens
gcaggagaatcacttgaacctgggaggcagaagttacaatgagccgacattggaccactgcactccagcttgggtgacagggcgagactctgtctccaaaataaaaaagtgagaagaaaaataaataaaatttaaaataacaaaaagtaagaaacagaaacatacacacacacaaaagcaaacaaaagaaaacaagaaaaggaaaaaatgaaacaaactagaaaaaacaaaatgagaagaatgtagactgtcatcatgtgccttggccatccctccaggaagatgtcttggagctgggattcgtggataaacaagataaacaagatgtatacattttcctgtgtgcttgcagctacacacacacacacacacacacttgtgcatgcatttggacacacaaacactggggccagagagaggcccagcctccccttagacacattgttgtccaatgtcccccacccccagttggggttctgtaagtaaaaaagaaggaacaggatgagtattcaacaggcaacctttaggttttccatggacctcacctcatttgatagacagaaaagtttctacagcaagttcattggcaggactaggccttgagcccactccctgggacagcggactccacaccacctgttacaactggagattgagtgtctgccggaagctgtttcctggggaactgcagccagctgctggccacacaggagctctttatcccccaccaactcacctccctgggatctacccaggacctgccttcttgagtaacaggatgtgaccctatgtcaccagggcacttgctgcccattgaaagtcctcatgagtcattctccaaggttccaagggaaaaaaaactcctagataggggcccatcccagaaagaaataaaacactggcccagggccgagactttcagagaaaccagctggcctgcttgtgagtgggaggttgcggggggtcaccttgaaccgaggtctctctggacagaactgttttcttattcaatcattcattcatcatctatttatagacatgacatttattcatggattcagctaatatttattaggaggggcaaaataactctcacttctaacctacacatttttgagttgtttacattcattattacacaagtatgtgctgctttcatttttttaagctttgcttttaattaattaattaatttatttatttagcaatcccaggatggagacagatttaattattttaaaataacaggccaggcgtggtggcacacacttgtaatcccagctactcaggaggctgaggcaggagaatcgcttgaacccaggaggtagaggttgcagtgagccgagatcacgccactgcactccagcctcagccacagcctgtctcaaaaattaaaaagagagagagagagagagagagatgctgctttctgatccagaggacatacatgccccactggcaagacagaagatccccaattcggacagctacctggagaagttgacctctaagctgaaaactcaaggatgaacgttgccaggtgacagggaggaaattaccagaaatggtgctctgggcaaagggaacagcatgtacaaaggtcaggagatcatgcttttttccgaaaatgcaagtgtttgagaccatactgtaggaagtgggagaggaagtgatgagctcagagaaaaagacagaaaggcagagagcccacttaaaggaatggctaattaaccacccccattccactcttcccgcccacctccccaccctcatcccactcctaggaccatgactcagtcatgaggttttcacactctctcactttaagctgggcagtttctgtttctcagccaatgtgtcattcatcagcagatcatgtcatcccccccaatccacagcatggttccagaatatcagctgatcctcgtgaattggaccgcaaatcttccagagttttttttttgtttttttttttttcttttttgagatgaggtcttgctcttgtcacccaggctggagtgcagtggcgcgatctcggctcactgcctccgcctcccgagttcaagcgattctgctgcctcagcctcctgagtagctgggattacaggtgcctgccacctacacccagctaatttttgtagttttagtagagatggggttttgccatgttggccaggctagtctcaaactcctgaccttttgatctgccctcctcagcctcccaaagtgctgggactatagacgtgagccgccacactcggccgcttccagggtcttacaaggcgaaaaaaatcttacattgaaaatcaagggagcattaataaatattatagcactgggtgcatcgcccacagataggcaggcaagttttgttcaactggaggcactttatgactaggtctaaagtcgccatttatctgagattgtcctgtctctagcagctgggtctcatttcatgctcagaggaaacttacgaggaaaatgcttttgctatccccacttcacagaagagaactgaagcctagaatgtaagacactcacctcaaatctcatatacctgatcactttttttgaaacagggtctcaagcagccaccccgactggagtgcagaggctggaacacagttcactgcagccttgacctc

SEQ ID NO: 68870 - DNA, 2372 bp, Homo sapiens
aaaggctcagtaagtgcaacggtggaagtattcctggtgagtctgggacaatagtggaaagtcaaagtgtgtgggaggggagatatagagccccatgcccccctcccacacacttcagaggggaaaagggggcaggattgagtcctgtacattccccacgttttttttttctctggagattggaagccattggagggtctaagcagaggagtgatgagttaagctgctgtgtggaagtccgtaaggaacaggggtgagtcagagaccctgaatggagccgttgcaattatccagatgagatagagtgccttggatcaggaagggaggtagcaacagaagcggccaataaagttcaaagtcctcagccccagtcctcccgatgggggtctcacctacccctctcacctcaccttgttcctccctgcatccccaccccaccggtcactgctaggcacatagaagcatctactaagcatgtggtgaatcaatgaaccccttaatgaatggtccacccctagatcatcagcatcctttttaacgctaggcatatagtctgaactcaacacatgtttacagatggaatgctgcacagtcctgccaagtccaggcggttattcctctccacagccgaaggaaactaaggctcgggtggggaagtgtccccctggggtctctccgcttaggctgcaggctgggcatcctttttcaaactcttttagcacagcgaagtcgagggcactgggtggagggtgcttgcttgccctcagggtgagtcacagtgacctcagaggagtttccccaaaacgtccccgccctgtgatggggaaaagccggaatctctcggtcccaggtggtcatgtggcccaggccggacaagcgtcccgaaagccccgggagagactaagaagcaatcctcccacgcgctttctcccaccctcgggccactgagacggagggacagagggccgccctcgcgcggccgaggccccgcctcccgctcgcccgcccgcgcctccagcggaagccggaagcaaaagcgggtcctgctagccccgcggctccgaactcggtggtcctggaagctccgcaggatgggggagaagatggcggaagaggagtgagtgggctttttcccgggcggcggaggcggcggggctgggccccggcgggtgacagcgagcgcctcaggccgccctccggccccggaaggcggagcttcttttgctggttggccaggactgaccaagccggtgcctacgaggagggcgggatgggcgggcctgggcccaggtgggccttgctttcccctggagatcggtccctcgagctgggaatctactgcccagcgcaggcccggagagctgtcttgcggaaaatacaaaccatatttactttcccagttttcggtaatctcatggttactgagccctcttccgcctcctccaggaagtcgtccgggttctccacacccacctcctacgtagccagtcgcctcctgtataacgatcagttttcatgtctttctccttcactaagtttcatttagtcattaactgttagccatctactcaattccaggccctgggcaggtggtaggaaaggaggccgaccaggagccgctctctgggagcttccattctagtgggaaaagaagaccataattagtcaaggtggtttcagatcgtgattaattaacgttatttgtgcctagtgttccattattggaacgctaagcatgtgggagttatttatatcctactgctcaaggtcatcgccaaggtctgatttttctcacgtctgcagttctaaaaattgcaacctctggcatgaatgggttaagtgttctgaaggaagcaaaatagagttaaggttggggagtccactcaggaaaaagtgacattcagcagaaacttgaatgaccagaatgagggataggagaaataacatcaggttcaaaaggcctggctcaagaaagagtttagtgcttttgagtgacaggcagcatggctggtgtgtagagaggaagggggttagctggacaaggggagatggggaaggacgggctgtgtcctccaggtacttttgggcaagtccaaaagtcatctccatacctgcagggcagagtctgttgcagattgtagatgccctatcactgtttgtggaatgagtatgtgaagatgaataaggaaccccttcattgatactggagtccttcacctgataacttttcaaatatatttcttggccatgtgggggtcatttcatgtaatcagttatttattgagcagctgctccatcccagacactaaacagcctcagcagcacaaaataaaagaggcaatatagcccagcgatttcaagtttgggttttc

SEQ ID NO: 68871 - DNA, 1141 bp, Homo sapiens
ccagagagtgttgctgttgtttctttaggtaagtgtgtattggtgattccataataaaagcagtaacaataactaccattttttgagtgcctctttagtgccaggaaccacaagagatgcatcacatccctgatctcatttgatcctcactgcaacctgccctaagggtgctatgatcccattttacagatgaggacactggggctcaagaagggtagtgacctcctaaaggtcatgtagaagcccaaaggccatacagctctgtacagctcaaaggccctttcttagccttttgcttctggtagaactacccttggggaacattgacctctactgctaggctaggctgacatccaactcaactaaggtaagtaatgacacttcatagaatcactcaattttatagacagaagggactctgactttacagtttaggaggaagaaatggctcacttaatgccagagtcaggtctaaagtcttcagagagcattgtgctctaccccacttacatttctgttttgtttcctgtgccaattaactgttgagatctagttgcagtgaatgaacccgtgtaataacaggtgtgaatgcacacacaagttcattgaagtggttagtgaaggaagaagtggggaatttccgtaagtgtaagttcaaggctaaaatgtgggtggagacatgtaaggcacagtaaataaagtcttactaaggtcagccaaagctttttatcagtttattatattgcagtcacttttactagtttctacttgcctactgatggtatttaatttttcctgatcactgctgatgtttagaaattaactttcattgcctggtagatctttagtggagtagtaattctttcacaagatagttattgtttagattagctttggaaatgattgtttagactctgttcactagcctccccctcctcccatcaccccagcagtcctactaccttggttcagactctcctgtattttccctggacttcagtactaagtgccagatcctggcttgtgaggcttcacattgtcatctatctcatttatgccttatgacctccaggtgatgccgtattttaaggaatgggcaccactggatagtgttgacctcgagtacaggtttcaaaaccag

SEQ ID NO: 68872 - DNA, 875 bp, Homo sapiens
ggaggctgaggtgggtggatcgcctcaggccaggagttcaagaccagcctggccaacatggtgaaacccctgtctctactaaaaatagaaaaattagctgggcatggtggcaggtgcttgtaatcccagctactctggaggctgaagcaatagaaccacttgagtccaggaggcggaagttgcattgagctccagtcaacgccagggcactccagcctgggtgacagagcaagactctgtctcaaaacaaacaaacaaaaaaaattggtgggggtaggggcgctcacctcttgactcatgtaactggcaaaactacaggtagtattagcttgagacttagctgaatcaggtctcctggacccagttcttctccatgcctcagcagtgaatcccttttccccggcttcgctgtcaggcaggctctctccctgtggtactctgatccgttctcagacaggctcttggtgtggtaagcccttaaagcagtaactgcagtgggagagagaacctcctcttctttctggcaccaaaagttgcaggatgaactctgaccacctggcgacctcaactgggagtggggtggaatggtgttgggagtcagccagagctctccatctacaaggttcatttcttcactgatgttgcagaaataattgtagcctgaatagctaggtcttgggagaagtgatggaaaggcagtcttgctttcaatgcttacttgctaactcaggtgactggaaacccaagagcacttccagggagagtgctgaggtccagaaagtactttttaaaaattatgttagaggacatttggttagaatttgtaaatgctgacatagctatcaaagtaattctgtatttcataaagctaaaga

SEQ ID NO: 68873 - DNA, 925 bp, Homo sapiens
tctgtcctcccttctccccaccttcctctcatggagacagtatttctttctgtctgtctgtcccttctttggcccagacccagcctgaccaacgataagcatttcttaggctcagctcttgatatggaaatgagtgtcttcactccagccagcatcatggtcttcggtgcttccaggcctggggtctgtcgggggtgaaaagaactggcctgacctacctgaactgactgaccctctggggtgggtctgggacatcctcgaggccctagcatttctccttggataggggaccagagggcgcttgggatgttgcataagaacaggaagtcacccaagggatgtcaatttcttatccctctacatgggttggattttccaaaatcataatttgcagaagaccagcacttatggtggaatgtatattataaggcagccacactggggcagggtccttcccctctccccactcacggctttggccctttcacagattagaacctgagttagaggattgcagaagacgaggtgggagggcagggaagatgcctgtcaggtttttagcacagtttatttcactgggattttgaaacatttctgtttgaacacaaagcctgttctagtcttggcaggacacattctgggggtgggggtggaggaagatgtggtaatgtaaccggttagtcagtgttgtcttaatattgttgacaattctgtaaagttcctttttataaatatttgttaagctgtttcacctttgttttgaaatcctttcctttttttttttggagacagagtctcactctatcacccaggctggagtgcaatggcatggtctcagctcactgcaaccttcccctcccgggtccaagcgattctcccacctcagcctcccaagtagctgggactacaggcacgtgccaccaca

SEQ ID NO: 68874 - DNA, 886 bp, Homo sapiens
ggaaaggaggcactattgcagggatgttttgatctgtgccacaagatggcagagattttcttttttattaacttcgttgaggtataatttacacacaatacatggacccgttctaagtatatagttccatgaatttttgcaaatgtggacagtcataactacccccacagtcgaggtgtggcatattcttatcgcccagtgtggctcccctgtgcccttctgcagtcagtccacctgcctgtcctgagccctggcacccactgatcctgcactgtcattgtagtttaaatgaaatcatgtggtacgtagtcttttgtgtctcctctctttcagttacgtttttgagagacatccgtgtttttgcgtgtggcagtagtttatcgttcttattgcaccacagtttgtctgttcatcatttgaagggcatttggggttttccagatttgggctaagaacagtgtgcatgtgttttcatttatcttgggtaaatacctaggattaaggctgctaggtcatatggtaagtacatttttacttttttagaaactgcctagtgtttttcgaagtgactgtatcattttacattcctcagaatgtatgagagagtgccagttgcttcatattgccaccacacttattttaatttaaaaaagtttagctgtcctgataggtgtgtagcaactgcatttagatgtgctttggtgtggttatttttatattcgccttgggttcattgagttttttgggtttatagtttatatgagtttatagctttcatcaaatttggtaagcttttgcccatttctttatcaatatttttttgttccgccttcctcttccccttgagacttcagtttactccagttatgagaggtagcatgctatt

SEQ ID NO: 68875 - DNA, 505 bp, Homo sapiens
gttggtgtacacctgtggtcccagttactcagaaggctgaacccaggaggtcaaggctaaagtgagctgtgatcgtgccactgcactgtagcctgggtgatagaatgagaccctgtctcaagaaaaaaaaatcacagattcacaagaagttgcaaaaaagatagtacagaaaggtcccatgtacccttccccccgttaccctcagtggtaacatcttgcacaactacagaatagtttcacaaccaagaaactggcattgccacagtccacagatcttgttccaacttcattagttttacaggcactcgtgtgtgtgtgtgtttagttctacgcaattttatatcgtgtagattcgcataaccaccatcacagggaagttgccttttatagaagtattccagctgccaaacaaagaagaaatcattgaattggaatatctctattttgtaacttccagtgaaataatggatctaagtgggaagtaacagccttaatagctgctaat

SEQ ID NO: 68876 - DNA, 3812 bp, Homo sapiens
aagtgaagtgattccgagtagctaagcattagcttggctttacctcagctggcccattcaagcagaaatgttccccaagcagcatttgaaggcgccccctctctgcacaggcagacctattttggtctgtgcactgcccctgtccacaggtttacacatccctggtctagctccatcagcctccaaacaggagacggggaagtcagttcaaccccctccacctccccacccacaccaatgcactcgttccaagcaagaggctccgagaaacatccaaggcaccttccactggctgtgaaacaccagaaggtccccacactcctactagattccaaagaaattcacacagagtccttccaaacctctgaaaataacctcagcggtgctgaaagaagcttccctagtggcagctgcctctctcggagaagctctgaaggaagctgtttccctccctgcaggggacagaagctggcggctgctaagtcccagctcggtcattcctacagcctcggggggccacgtcagttgtgaaaaacagcccagtctcaaattctggccccccctacggcttcgtgaattgaatgaagtaacaggaactatcacttattggacgcctgctgtatgccagaggccctgcatgatctcattccatctccactccagccctagcaaccaggttcaatcacttaaataggcaactgaggctcttaagatgaagtgacttatccaaggtcacacagtgagtacaaacccaggtgtgccgccagagcctgaactgggaacccctgcgcggtaactgcctcgtggcgaaatcggggtgtccttctgtttggccagtcgccgaagaggggtgttcctcttgggcggccctgagccaccctcggcgggtcccaggagcctgcgaggcagctcccgggagaatgggggtcctgaggataggctgggggtcccgggagcgccgaaacagcgggcccacctgtagtcctgcctgccgtgagggtaccccgctcccgggccagccgagccctgccgctgtctggcgccccctccgcctggggaagccccgaaggcagtttccgcccgcggccgcccgtcactcaccctgacactgccgccgaggacggcccggccgagggaagcaagcgagaggcgcggctgccgccggagccgggccccgtcgggctctagcctctccggccggctgcaggggtactgagaccagtacccgggggccagcagcgacccggaaacactcggcccggaaatgatgtcaccatgaggcgggcccgaagagagggtggaccacggctgcgcgctggctccgggaagcggtcgatgcccgcggccgacggagactacaacccagaggcggaggacaaagcggaaggccgaagagcgaggacgaaaccggcggaaccgcactttggagcctaacgagccatcgctgcgtctgagactgggacccggaagtaaacaggccggacgtgacgcaagccgctcggcctagggatggtggctggccgggttgtcatggaaaccgctcaggagcagggagctgggagctatgagtgctgactgcgtgaactcggcctccacttcccggacctgccacttatcatgatccacgagctgtactcatgactccgcacaagcaagcaggggctgacggtcggatccctcgcccccattttacggacagaagtaccgaggctcaaagagagccagtgagatgctgaaatcacgcgtgattggaatccagccttgctagggctgcgggtgttacgggccgtgggcggcggttaagagcgtgggttctatttttagttttgccacttactagctgtgtgaccttggacaagttacctaacctctctgagcctcagctttctaacctgtaatattaaataataaagccaggcgtggtggcacgcgactgtagtcccagctagtcgggaggctgaggcgagaggatggcttgctcccaggtgttcgagaccaacctgggcaacataacgaggccacgtctcttaaaaaaaaaaaaaaaaaaaaaaaaaaaaaaaagccgggcacggcggctcacgcctgtaatcccagcactttcggataaactatatatatatataatctgacatccccaccagaccctgagcttcttattcatctatttccccccgagctctgcacatgtctgatgaggaggcacacaacagatgttcattgattgtaggattctcactctgagtcttggtgaccccagctaaaaccggtggggcttgtgtgatgagtcagtgacacaatactgggaaacgtttggagaaccagcaatctgctgctgtccaaacagtagcattactgtgtttacctgtcgttgcctgagcaccgctcaaagtccctgtgttctttatcagctcatgtttaagctcctctcttaattatctgcaatgtgatgatgttcacaggaattccatctgagacaaactgtcccaccttaagtctgcctcttacagcaactcagcactctggtttggtagctcttacaatattgcattttcacgtggggctgcttaaaaaagtcccctccagctctgtgggtctatgacaggcaaaagagaaacaaagattttgaagaagggctttaccagtaggaaaccctggtcatcatctactatcagaaaagacccaaagtctccaaagacagtcacatttctcagttttttttttttttttttttttttttgagacggagtctcgctctgtcacccaggctggagtgcagtggcacaatctcagctcactgcaagctccgcctcctgggttcacgccattttcctgcctcagcctccggagtagctgggactaccggcacgcgccaacacgcctggctaattttttgtatttttagtagagatggggtttcaccaaggtggtcaggatggtctccatctcttgacctcgtgatccgcccacctcggcctcccaaagtgctgggattacaggcctgagccactgtgtccggccatgtttctcatcttttaaacacagttgaaggcttgtgatttctctacttggtgatgtagaaatgacaggagcgtcctttcccgactttattatataatgattaccagattatgtaagggtcacgtgacaatgattaggcacttctacttccgaagagccaacaacacgaacaatctacctacctctttctattttttagtttttttttccatcaccaaagtaatacatgattccaacaatacagaggagtatagaacaaaaagcaaaacagaaaagctaccccatgacccagcaattggatttctcaaaatctgctagagaaacatacactgtgcccaaagagacctcttgcatcattgtttctaatgcaaaagcaataataggaaatatttaaatctccatcactggggtaatggtatatccatactaacaaatactgtggatcacttaaaaagggtgatgcatggccaggcgcggtggctcacgcctgtaatcccagcactttgggaggccgaggtgggcaaatcacgaggtcaagaggccgagaccatcctggctaacacagtgaaaccctgtctctactaaaaatacaaaaattagccgggtgtggtagcaggcgcagtagcgggtgcctgtagtcccagctactcgggaggctgaggcaggagaatggcatgaacctgggaggcagaggttgcagtgaaccgagatggcaccactgcactccagcctgggctacagagtgagactctgtctcaaaaaaacaaaacaaaaaaagtcaactggggacagga

SEQ ID NO: 68877 - DNA, 572 bp, Homo sapiens
gtggctttcctgtttgagactgaataattcactgttacatttccaacacttaccaggatacttagcacatagagttattggttgaatgaatatttacatgccagtgtctcctctgttaagactccttttaggctgagactctttttttttttttttaatttttgttttcaggcaatgtacagtaagccatgatgggcagaggcaggaaatacttagagaactggaaagaataaaggagccggtgttctcttcgcagggcccggtgagtctgtgagatgctcacacgccccctggtggtgtcagtaggaattcttcctggcgctcagcaatttggcaatcttgaagaaccggctgaaatcaagatgaaattatctgcccacaggtttaaaaatgtagcaatacatgatggggtaaattatgcctaacttagacaagtatagcgataaattttacatgtggcctgaggctgatagaactgtgacgcctgagagttacaggatttgagggctggagttacttccgattcatcttaactgttcttaatgcatcattgtttattttttcttttttta

SEQ ID NO: 68878 - DNA, 4834 bp, Homo sapiens
ttaaataaatagagaaaatattgagaaacaaatgaaaacaaaaacacagcatgccaaaatttactggacacagtgaaagcagtgctcaggggaaattttatagctataagtgcttcaaaatcatagacagaaaattgccagggcctgggggtatggggatgggaggagggaagaggaagttattgtttaatggggacagaatttcagtttcagtttagcaagaagaccagaattttagagatagctgatggtgatgattgcacaatatgaaatgaatgtactttgttgttggggtttttttgttttgttttgttgttgttgttgttgttttttgagagggagtctcgcgctgtcgcccagactggagtgcagtggcaagatcttggctcactgcaagctccgcctcccaggttcaagccattctcctgcctcagcctcccgagtagctgggactacaggcgcccgccaccacgcccggctaattttttgtatttttagtagagacagggtttcaccgtgttagccaggttgtgtttttgtttttttttttttttttcagacggagtttcgttcttgttgcccaggctggagtttagtgactgttggagtgagtgagccatcttggcccacggcaaccttcgcctcccaggtcaaaggcttttcctgcctcagcgtcctgagtagctgaggctacaggcatgggcaaccacgcctggctaattttagtattgttagtagagacggggtttcaccatgttggccaggctgctctagtactcctaggctcaagcgatccgcccacctcggcctcccaaagtgctgagattacagaagtaagccaccttgcccagctcctttgtataaataaatgatattgattttcttcttgcagctcaggaattagatctgttattagaatttgcttaaatttaagaaatggctgggtactgtggctcaccgctgtaatcccagcacttcgggttgccgaggcaggcggattgcttgcgtccaagagttcgaggccagcctcggcaacacagtgagacccgcccgctctctgcaccactccttccccccctcctttccccgtctctacaaaaaatacaaaaataaataaattagtccggcatggtggtgactgcctgtggtccagctacgcaggaggctgaggtgggaggatcgcttgaaccccggtggtcgaggctgcagggagccatgatcgcgcgcgccactgaacaccagcctgggcgacaaagcaagaccttgtcccaaaatagattaaataaataaataaataaatttaaggaaaaagcaacttgattcgaagataaatagtgatagtgcaagtggtgccgaactaacgataaatttggaaaacagcggcccacgcgcagagcccgtcccaattctggcagcctttggatttggcttccacgttttccagatttccctcggcctctagctcgcttgcgtcagaggggccccgaggggcggcccacccgctagccccgcccccaaccgctcaccgccccgcgagccccgccccctcggcctcctcctcatcggccgccgttgcgcggcgcagagcggcagcaagatggcggcgcaacagcgggactgcgggggtgctgcgcagctggcggggccggcggcggaggctgaccccctaggacgcttcacgtgtcccgtgtgcttagaggtgtacgagaagccggtacaggtgccctgcggacacgtgtaagcggcgagcccgggcctggtcggggggcgcttaactgggaagggaatggagccgaggagcgagatgggtctcagggcgggagccagaggacccacccagaggggcctcccgggggtgtcccccggggctcctaagggccgtgaaagctgccggggcgctcttctgtcccgccccgctcactcctaagtatcccgttcctccgcccgtcttagcggggcagctgctgtctgttgagcgcctgcgatgttccaggcggcctgtcagtctccttcccacacgtgatagtggactcgtgccctgcggggactttaggctccgaagtccgcccttggagagccgacgtttcctttctagtccacgtcgctcttaaagcataggacatttggcgtcgtgtctagctgtggcgagttattctactgtgcactaaagtcgggagaaacgctgaactagactaaaacaacaaaagggaagtctttatggggatctggccagtttgcccttagctgtgaaaggggggtgggagttggcagatgggattgttagcattctacttcctgtgtaggaggtttgtttctttcagttttcaattaagccttcatgacctgaatattgtgaatagagtggttataatgattaaagcagatatgtgtataaatgtccagtccaggtcctgggctgtggccggggctttcgaggttggtcaggttggtcgatttgaatctaagccttgttccatcagacgcacaaacacatctgagttgaaagaattgtagacaacgtggccacctgcttcttgcctcagaattggcttttcctctggcccctctcagtgcttatcgtgggatcaccttggcattggtcttggcagcgggcacagtagccattgcactccatgggcattattctatagccaccctgcagcgggggagggttggcagccattttacaggtgaatacactgagggtccgaggctctcttagggaagggtcaccgtggcctagctcttcccagatgtactgcaggtgaccatttcagtagtccagagaacagtgcttggcacctagctggctgctttttgcttcatcatgttgctttaggctattcatctttgcaattcggttagcctggaactcttccccccacccctcccttttcaggcttcaagtcccaggttaagttacctcaccaaataccatccccatctaaattacttcccccacttcctttctgggacttaacttccttctccttgcttgcacagagcaaaacttaacagctcatgacggagtggccatatctttattgcccctgaactgactggaatggcctctgtgtgccagattttggggtagactctgccttcagagtttacagtccagtgaattgattataaataagtaccaatgactggtcaaactattgtaaaaattcattctgcaagtgggagggtatttcagggatcacacctctgtgcgtggggtgagtgatcaggtaatggttgaatgaactaataagtcgtgtaagcaagcttcacgagagttgaagtggtctttagctttttcattgaatccacttatccttggatcagatttacctgattttggattaattcagtggatttcatttactattaacatttgtaaaaaggctagacccagcacagtttgctaaatgaagagcagcaaaatttgagattttcttgagcttggtgaacctttcctaggtcagagggcaaggaacagtactggttttcaaaccttggctcttctctatcctcgctgtcctagccccacgtgatcagcagttcagtgcaaattgaagacagatggaagcacctctgtgagggcagcccaaatccccgctagctccaaccgactgctttctcctgtgcctagttgatttttaccttttgtgcttggaaagttgagcatcactgcaactctggctggggcattggatttttataaaactttatttcaagccctgaatgactgtgttctccaatctggtagaatacagctggagaaaggcagctggctgggtgcccaagagaagggaatttcttcctagcactgtgacggagtggagcatcggaaggctgaactagaaaagggcgcataagtaggaaatagaaactgaaaagccatcccaggatatttgagttgttcaaaagcaggctggtagtttgggcatgtctcaggcacaaagtgactcgtgaacatttgatagatgagctgtacctgtgtgtgtgcttgagaagagacttcgagctgcttttatctgcatgctgggtttggttccattatactcactggaccctctgtgctctcttgggttcctcttgtcatctgcctttgtgaacaggcaacacaagtgatggccacaggccctgcctgtctctactgcctcatcacttgcccttctcaccatggtctaccgcatcatggcccccaaggtctgcctgccttcctttccagtcctcatttgtgtgtggcgtgatcttggtgtggagctctgcacccagatctgtgtggctgtcctcgtaatcaggtcccacccagctcaaatgccaactcctcagaagcagctttctatgatcaccccagctggtctgtttgccatatttccttcatatttttaatcactatctgaaattaacatttgtgtttcccttcactctagaatgtaagcatcatgagaacagggctttgtcaagtttccattgccctcagtggtgaatgaatagactccctcaccttctctgtacctggtctggaattttgcctaacagcattaacatctaacttaatgacaaggaggaaggagattcttagaggcagtagaaaatggtcaagtgttcagaagatggcctttcattatatatctttagttctttctggcagatttggttatactgtcttaatctatcaggttgggtaagtagcccagggtgtcttctccattctttctgtatgccttatctcagcattaccatcttcctaggcttcaggataggaactcggtcatctttgacttcttttcttcaaagtcagtaagttatcaagtcctcctgattctacctttctgtgaat

SEQ ID NO: 68879 - DNA, 521 bp, Homo sapiens
ccagctacttgggaggctgaggcaggagaatcacttgaacctgggcggcagaggttgcagtgagccaagatcacatcattgcactccagtctggacgacagagtgagacttcgtctcaccaaaaaataaaataaaataaaataaaacaacaacaacaacaaactggcagtctcagaaactctaaggggcctccctgaacattttcatttcctggaacactcatctgcccctgggcttttttatcactgtcgcctggaatgccctcttaccccaccccacccccaaccccctcattcacctgctcatgcctgtgacctcaacctggagtcagcctggttctcactcctctgagtcaccttaggtgcctcggagttgcaagaacactgaaccagctgttaccccctttcccccctcgcctgtgagctacgcaggtgcaggaaccttgtctgtgtgcagctggtttatcacagtatcctagcccattcagccaggtacatgccacagcttactcactacacctt

SEQ ID NO: 68880 - DNA, 1351 bp, Homo sapiens
tgctttttagcacttaatatcttgatatgatttcattacatccagagctttttccttcttttcggggcagatgggtaatgtattcattggtccccgcatggcctcggcctgtatgcaggagcctagaatacaactttgggatgctatagggacatccctgaggtgagcctcctacaacgagcctggcacccagcaggtgctcagtaaataggaatgaaaaggctagctgtaatactagtactttgggaggattaggtgggaggtttgcttgagcccaggagtttgagactagcccgggcaacatagtgagacccccatctctaatttttaaaattataaaaaataaataccattttacaaaggcttgtatagcttatcttggagcctccccccatgggtcatgcccaacggacttagaccttgacccagaaacctcccttagaagcaatttgtattctgaaatggtgacttcacagagggcttattggataaggcccacggctgaatcactgtttgtttttaggcaagtgtgaggcataggaagaggttaaatccaggatgaggatggcagtagagcattgactcattcattgaactttctgtagacaatgtctttctcctggtcaagattaactttccaactcctgatcaattcattcactgataatgagctaatcaacaggggccaccagtctaataaagagctcttagaaattaagaagttcattcactggaaggacatgcaggattttaaaaaaggaaagaaatcaagttcatcaatttggtgaccaaaggacatgaagcaatagttcagagcacagagaaacagaaatggctttggtgtatgtaaaaaatgctccacactgccgggcgtggtggctcacggctgagtgcggtggctcatgcctgtaatcccagcactttgggaggccgaggcaggtggatcacctgaggttggcagtttgagaccagcctgaccaatatggagaaacctcagctctactaaaaatacaaaattaggtgggtgtggtggcacatgcctgtaatcccagctacatgggagggtgaggcaggagaatcacttgaacgtgggaggcggaggttgtggtgagccgagatcacaccattgcactccagcctgggcaacaacagtgaaactctgtcgcaaaaaaaaaaaaaaatgctccaccctagtcatgtgaaatgcaaatgacaacaggagatcccattttcccttatcagacaggcaaagataaaaaagttaaaggccagcaaggtggctcatgactgtaatcccagtactttgggaggccgaggcaggtgaatcacttaagccaaggagtttgagacc

SEQ ID NO: 68881 - DNA, 1198 bp, Homo sapiens
gtggctccccagtgcccttgaggcaaagtccaaactcctacgaggccctggggcccagcacatctgacccctccgggcatgcccatcccaccccatccctggaagctgctctctaggagttactctgaagcagttgccacttcttccctcgggccttttcccttgataattcttcacttcctctgggaagtcaccccgaccccctgtcaggtgacccgcctcttaacggtcgccgcgtcccgtctctcccccaccaaagcacacttccctttgcattgtaattatctgtttacttcgtctgtctccctcactggaccagaagctacccttcgggagaggctctgagtgttctgtccggggctgtgccctggccccaggtacagtgccccacacgtgctgggcgctccgtaaacactggataagggaaggaacgggtgctcttggctagctgggccaggctgctttgcaaaaaggccgtggcatttcaagccgccgagagccacgtgcggtgtccctttcctcgcttcctccccagtgatgtgcgtttccctcgtcaatgccacgctctccaggcgccagccgggcggaggaaatttccgccccctcccaagcccgaggcgggggcgggcgtcggaaggtcaggtgtcccggccggcgcgcagcgccagggggcgtcagaagcgctcagaccaccgggcgctgagccggtgggcgcgcggcgtcctgccggggtcccacctcgcagaggcctcgcttcgctcgacgtcccgccccggacagccccagcaccggggacgacccgcgctgcgccagcgaaccccgcctcggaggagtccccgcccgggctctcaccgccacgcggcgcgagcccggccagcagccggcgcacctgctcggggagtggccttcggcggagacgagcctccgattggcgcggaggtgacaaaggggcgtggcagataaggccccgcccctcccaccccccaccacccccccggagtacttaagggagttggcggcgctgctgcattcattgcgccgcggcacggcctagcgagtggttcttctgcgctactgctgcgcgaatcggcgaccccagtgcctcgaccactatgccgcgctctttcctcgtcaggaagccctccgaccccaatcggaagcctaactacagcgagctgcaggactctaatccaggtgc

SEQ ID NO: 68882 - DNA, 1940 bp, Homo sapiens
gcctgagctttaagtgtgctcttcctactccccctcccaattcctttagttcatccattcattcatttatttgcccggaaggtattgcgcacctccttcgggcagggccctgctttaaacagtgaacagagtagacaacctgcctgccctcatggagccatcactccacccaaggagatggcacaatgagcacaccgcacactgggctggaacaggtgtctctggaggagccaggcacaggtgggggagccaggcgcagctgggggagtcaggacatagcgcgggggctttccctgttggagggggttgagtacggtgtctcagaaagtgatgccagggagatctgcaggacgaatcgaaggaagccatgtgggtgtctgcggagagagagttccaggcagagggaacagccagtgtgaaggccctgaggcaggggtgtggtgggcagagtcaaggagcaggcaggaggccagtcgggtgggagcagagtgggcgaggccaggaggtgaggccagcaaggggacggggcgggcaggtggggcaggcaatgaggaggatgtggcttttgccttgagcccctggagggtcctgagcagaggggctgcagagacatggtcaagttccaggtggggttagggcgagaactgaccttccaggcagacaggcagggtccccccaccttgcccctgccctgagatgaagcgccagccttggatcaggaccctgtccagaggtgggccagggctctcaagccagactcgagtctgcactgggtagggacagcttcccacggccagccttccccgtggaggattgcttgcgggggaggggtcccctaagtctcttctctttctccctctctttcgtaaccatcagcctagccagacctttggtcaggcctggtggagagagtgttctctgtcatcatctggccatgggaaaggtgaagtaaaagccaccagtgacggagagaagcagcctgtggccagcccagcaccaccctcaccccacgcacccgtaggctgagtgcctcatcccttggccatggtcccccaacctccaacataatcaggcccgtgggagcctggccagaactgtggccagtgactcagcaggaatcaccccagacaggagccagagccccggtgtccagaccagaaaccacccctgacctgttcggctgggcaggaacagggacagagcaggcggaaaagctctcagcccaggatagccgggggagaggggcgtgggaagacccctgtccagatgcagttcgtggccacccaccctgatggtgtctgctgaggtccagatcgtagttttaggagggggttcgtggctgttctgcccaattctgttgaagccctgagcatcagcctggctttgatgggttatactgggctgttgtggtgtagcttgtctattccattgcattgtttctgttctattgtgtgttctggtctgttctagaacctaccaatcctttctattctattgtgtttattcattcagcagatacttactgaccacccctgtgtgccaggcagtcttccagatgctcgggtcacaactttgtttatttatttatttatttatttattttgtgacggaatctcactcactctgttgcctaggctggagtgcagtggcgcgatctcggctcactgcatggagttacaactttggatgaaatgagacctctgccccagggcgttcatggggagaccagcaactgataaatatcaggtagtggtaagagctgagaacagcagcagcagcatcaaagcagagagccacagaaggagcgaggcgcaggctgcgttcacagtgcggggagcagggtcaggagcagccgcagcctcactggcaagatgacagtctttttttttttttttttttttgagatggagtctcactctgtcacccaggctgcagtgcag

SEQ ID NO: 68883 - DNA, 2292 bp, Homo sapiens
attgctgtactcaggctggtgtccctgcagccccacagtggggaacactgtggccctgtttgcttcctccatcagagaggtaacccattttcaccccatctgagagaacctccttggccaacttcactgccaggcacctgagggtgcagcctcacccaagagttcccatttcatctattcacctccctactcccatcagccagtggggaacttctgagctgaacccacatatctgtcccaattattaaaggagtcgatgagagtgagcgtctccacagaagagacacttctaggatatgcttccctcactcaattcaaaaagaggagacttttctcctttacaggaaacatctccggaacccgaccttttccactccctcatttcaggggcttccctcagttgaatccccactcccaaagagacatcctcggggctcccaattcatctgttctccctcatccaatatcagaggcttccaccaactgccccactcggaccttgtcccctgaaacctaacttgaagcaatccatctgtatcctcgaacaggagactggtaatgatggggtcatttcactatcaccgctattaggtccctctggcatctgaatccttttccctcctctcacttatcatgcggagacccccttcattctccccaaaagcagctgctccaaggctcctcctttctagtcaacatagctatttcctcagctaaccccatctctaaaactaacgccggagccgttccctcaaccgataggggatcctctcaagtcaccccctcaggatcccgtttcttccatccagcctgaagggcttctctgatgtcccctccagacatcccaaggcccctctcagccgcacccctggcacccagtatgggacttccatccgctgtggggcgcctcctctaggggacctctagatcgccccttaagagtcgccagccccggtatcctcaggagtgcctcggagctcgctcctcgcccactccggctcccccagacagcacagagggccctcacgcctcccgggggagcctcagggcctcgccgcgccgcccacaggcccctcagccccccgcccgtgcttccggccaccgcctgctcctcctcccccggtcaggccgcgccggtggctgccgcggagcccagcagacagaggcggcgcggggaccctggctccgctgcaggaggctttgagggtccccggcccccggcccaagcccatgccccctcggccggccgggcccggcgcccccgctcacccgagcccgtggtggctgccatcttgcgtcgctcttgcttgaaggccggccccttcttcaccccccccttacccgtcccccggccctgatgcgcaggcgcgcgcgcacgcacatacgccgccgctgacgcccgccccggagacctgcacgacccgtggcctggaaggctcttttccttcccttttagagaaaggaaatatctgcgtgctcgagggcccagcaacctgcaagtccccacacatcgggtgcgagggaggttgtgatgtgcttagtgagaagggcaggggtgactaggcttgggaaggcgcgattgtgaaagaaaaagaaaatatagcttcaaacaaaagcgccgaattcgcttggggctttttcctgtctagttcctatctagatcctcaccacatctccgcaaggtcagaattaatgtgaaaaatgcagccgagagagatcaagcgatttatctaaactcagctgttaagtggcagagacaggcagaattttaacctccaggttcaaattttttgaatcatcaccctccaggtcagatgatctggctcctaggattgatgctccccggccagagaaggcttggagtgggtgcagctaaatgatttaggggcattaaggtggcagggaaagcatttgctaaccatctacccaattcattcattcattcattcattcattcgttcattcattcattcaaccaaacaaacaaacattaagcacctactatgtaccagacactgtgctaggcgctggggatggatagacatctctgaagaagcaaatccctgctttcagggacttacattctagtcgtagacagcaagtaaataaacaggaaactataattctgatagggtagagataaaccaagacaagagcagcagaggatggtcaggaagggcctcctaaggtggtcatatttcagcagagaccgtaacaatgaggaggtagagggaacagcttgtgcaaaggcccttgggaaatatttttgcaaataaataaacccaagaaggt

SEQ ID NO: 68884 - DNA, 876 bp, Homo sapiens
acatgtctgtcgttcccgctattcaagaggctgaaatgggaggattgcttgagcctgggaggttgagtctgcagtgagcgcagatcatgccactgtgttccagcctgggtgacagagcaagaccccgtctccaggaaaaaaaaaaggcggggtgatggagtttcagttgggggcaggcgcccaaaggtatgtgcccaggccccttctaaagaacagtgagcacacaggggtatgcaagttcactacagctcccccggttgagctggaaatccatgtttgccctgcatgccactaccctgtgccaccaccagacagcagcacatgcctacctgaaaccaagccatcccacagcagctgggagggaggctgcaggcagttggcctatgcactcattttgttttgcccacagtacgttttaaacacggagccagcatttttaaagtttagatttctggctcctgtttaaccagctgctgtgagtagcagctgccctttaggcctgatgtctccaggtcatcccagtccccagcgtcagcggccctttctcaggcatgctgcagttgcctcatagtggacacatttctcacgtgccacctgtctcacctccctctccacaatgggagcgttaaagcacaggggctttgggtcagacgctggctcaaatcctgattctgccacctaccagctgtgtgaccttgggcatattacatgacctctgtgcctcagtttccccatctgcaaatggtgcaaagagtactcacttctcagagctgcagggactgcttgacaggacccatgccagagctctctgcacagtctggtgcaaagttaagtgctcagtaatattaagtagcattttcccctgtctggccctca

SEQ ID NO: 68885 - DNA, 1198 bp, Homo sapiens
accaccatgacaggccaccctctttcatttctttatagcctttatgataacctgtaaccatcttcgttaattctctattttcctgttctgtgtttgttcaccccccaatccccaactggaacgttatccccaaaatgcaaaacaccatgttctttcactgctgatcctcagtgcttagaatacagccaggcgcagagtaggtgctgaataaatattgctcacaatcttacagccttccagctcaccatgaggtagatactaatatcagtcccattttccacatgagcacactgaggcttagagaagagtttcccaattagcaggtggccaaaccaggattggaactcagccctgcctaagtagttaacccatctcctaaatagcctgaattctaatccctccacctgccttccaaggagcacaaattgaggacatgaaaaagaatgtttttttgtggttctcagttctgtttccagaaagacctaaaaaaaaatagtagctgtaatttatcaagtacctactatatgccaaacaccgcatttgccattcccactatggccctaagaaggtgatatatgaaggaggcggctgcagccctattttgtaaggagaaaagcggtccccagggaggtttgtgagttgcctaaaggcacatgtggagaagctgagagttaggcctgagttagacttgacagcacctgatacacttaaccttgaaagcagcccagctggctccagagaaactcccagttcacctcacctctttcgcactggctgctaactgagcatggcacgtgggcctcctttcccttcctccactgcactgggcatgttcctgcctctggcctgctgcttcctgttacctttgctctaatctgtgctcatctatcttcagggccctcccacacttctctcctccctcttcagttgctctgcccccttctctcctccctcttccactgctctgcccgcttctccctcttccattgctctgcctcaactccagtcaggagcctctttgccattccggaaacacaccaagcaagcaaaggccagcctcagggccttcgcacctactgttcctgctgcctagagtgcctcccacagaggtctgcacggctttgtccctcagctcctcggggtctttgttcaagtgtcaccttccctgaccacccgatttaagaggcaaagcccccac

SEQ ID NO: 68886 - DNA, 3439 bp, Homo sapiens
aggagttcgagaccagcatggccaacatggtgaaaccccatctctactaaaaattcaaaaattagccgaccatggtggtgtaggcctgtaatctcaactacttgggaggctgaggcaggagaatcacttgaacctgggaggaagaggtagcagtgagccaagatcgtgccactacactccagcctgggtgacagagtgagactctgcctcaaaaaaaaaaaaaaaaaaaaagaggggaggaaggctgggcgcattggctcacgcctataatcccagcactttgggaggccacggtgggaggattgcttgagtcctggagttcagtaccagcctgggcaacacagcgaaaccctgtctgtatataaaataacaaaattcgccaggtgtggtggcatgtgcctgtggtcctactggaggctgaagtgggaggactgcttgagcctgggaggttgaggctccagtgagtcgtgatcgagtcactgcactccagcctgggtgacagaggaagacttcatctcaaaaaaaaaggcggggtggggggagcagagtaacttttgtttgttgtttttttgagacagactctcccactgtggcccagactggagtgtggcggtgccattcacagctcactacagccttgagctcccatgctcaagcgaccctcccacctcagactcgtgaggagctgggactacagctgtagagacaagggtctcaccatgttgtccaggctgaccagtgaactcctgagctcaagcgacccactcacaaatcctaaagtgcctcccaaagtgctgggatgacaggcgtgagccaccgcacccagccgagggtaacttaactgtggagaactctgacatctgctaccttagtcatgggatcagagtcatcacagtgataagtcatgttgacagtctgtacttttgctatgatgtgatgaaaatggcacttcacctctgaactcttcctcctcataacccgtaaccccagtctaatcatgagaaaaacatcagatagataccaacagaggggcagcctacaacacacctgactagcactcctcaaaaccgtcaaggtcagccaggcgcggtggctcactcctataatcccagcactttagaaggccgaggagggtggatcacaaggtccggagattgagaccatcctggccaacatggtgaaattccatctctactaaaaacgcaaaaattagccgggcgtgctggcgcgcgcttgtagtcccagctactcgggaggctgaggcagaagaatcgcttgaacctgggaggcggaggttgcagtgggccgagattgcgccactgcactccagcctggcaagagtgagactccgtctcaaaaaacaaacaaacaaaaaaaactggacaagaggagcctaaagggacatgacaactaaaggccatgtgataccctggatgggatccaggaacagaagaaggacattagggaagaactaaggcaatctgaataagccatggactccagctcatgataatgtatcaacactggcacacactgtaacaaatgtgccccgctaatgtaagatttaggatgtgaataatggaggaaactgcgtgccccaggcatatggggactctctgtactatctgccccatccttctgtaagttgaaaacttgttctaaaaaataaagtctgtttttcaaaaagtggacaatctcacttcatgtccacagtaacaggccccaccccatcctgaccttccagaggagggtaagaactccccaaggtcacacggtggcaggggcaaggcagggctgctggtgagtagccagagactcgctagagtcattcaggatgatgcaaccttagggttagggttagggagacttcgcacccaggtatggagaatggggacatttacctcccttaactatgagaagttaataaaatgggctgctgggtaaagggcccggtgggtcccacgacacagcaagcatccccccaacgcagctcctgtgagctctctgctgagcctcagtcttgccatctgtccaatggtcaaggcctggcgcctgcacgctgcccagcagggagggatgtctgctttggacagaagtcaggaatcatcttaggagaccaggagccctccccctggctccgtgatcttgcggcctctgccggtggcagtgactccaggctgctgtctgaggctgctttaatgggggcaggggtggcagacaggcacacagaagcctctttgtcccagctttggggtggtggcagctggcagccggctccccctgggggcagcttcggcttggttaccacccttccccgcagaacactgggacaaggagagggatgggagacggctcaccccaggctaccctgactcacgggggaacttgaggtagtcgctgggcccgtgcgggcttccatttccccagaggtcacccagctgggacttcctcacccctccctgcccacctcaaaggcctggcgtggagatggaaggcgtggctgaggagccaagtgaatgcactgagggcaaatccatgggtttcggtcctgggtcccagtcctgtctctaccgccttccagctcagtcagatccagactccacttccagccacaggacgggccacgacccgagcctgggacttctctgacctcatccctgacctctggactcactgtgccctctgcccggaaggcttctcccaaggtccacgaaggactctgctcctttaagggccaactcacaacccaaacacttcctcccccttctccacgtggaacaaaagctcagggctcctacggccttcacttgttcacccactcactcacgacaacgatgtgcgtgtcacagtggctgatgacctccacgtggctaaatccaaaggtccctttactggccaccttgctggtccactcggtggctgttcccagtcgacccccaagactcctggaaacacattctcctcttggcccctgcaagccctccctggttctcccccgacctccctggttctccccccatctccctggcagcgccatcccagcctcccttgctggctcttcctcctccccagcctggaaacacgggagactcagcccctgggggtgctcagccagcctaggagataaggagcttcatcttgacacagatgacccccggatttctttctttttttttttttttttccagaggaagtctcactctgtcgcccaggctagagtgcaatggggcgatcttggctcactgcaacctctgcctcccgtgttcaatcaatttctcctgtctcagcctccccagtagctgggattataggcgcctaccaccatgcccagctgatttttgtatttttagtggagacagggtttcaccgtcccaaagtgctgggattacaggtgtgaaccaccatgcccggccggacccccagattgctatttccagct

SEQ ID NO: 68887 - DNA, 2163 bp, Homo sapiens
tgatggtttggatgtgcaatgcaagaggaagagaggaactgaggatcatgtttaggttttgggcccaagtgacaggctgcagggaggtgctgctgactgcaatagggaggtggggtactcaaggcacatactggactcaagcacacacatccatgcatgtggacacacacacgcgccagttacccggtgggtccctggcccctagggaagttgaggcaggcagcagtgcctcgggcactcaccaacaccgagtatgacgaggggtgtgtcctcccagcgggccagcagcaggagatggaccaggttgtgggcgatgaggctgaagcacaggatcacagagcaccactcctggaggcgcttgcctgcagggagcagaggcgagaggtaaaggctggaaggtcaaggccaggcagagtgtggccccatgggaacttttcttttcttttttttttttctgagacagagtctcactctatcacccaggctggagtgcagtggtgccatctcggctcactgcaacctccacctcccaggttcaatcgattctcctgcctcagcctcccgagtagctgggattataggcacccgccaccatgcccggctaatttttatattttttagtagagatggggtttcaccatattggccaggctggtcttgaactcctgaccttgtgatccgcccaccttggcctcccaaagtgctgggattacaggtgtgagccaccgcacctggccaggagcttttcaactttgtttaatgcatctatattgccaaccacaagctgagcttacagactcccgcaaaggagtctgtacccatttcacagatgacgtcactgaggccctcaccaaggtcaaacagtcagggctggatgcattaaaccaaggatggggcccttcagagagtggcccaattctctgacagaccaattctttgacagacaggaccagaactctggtctcctgggcccctctgggctctctctggagacacctaagggaactttaatgagcttctttttctttttttaaagtagaatctttgtggcttcacttgtccccttttgcaggtaactatttggaggcagaggctacaaacaacctttaatcctggtggctcacaccctgcccagcctccctcaagcaggctccagacaatgagtcaggaattcatggacaaatagggctctggggcagtggggcttctaaaagtatggcgtgtgggccagggaggcagagcttctgattcccaagaggagccagaagtcaggctttgggtgtgcaatctgtttcagtgttgccacatagttttcacagacacacgagcccagacaagctgattcactcgctgcagctttgtttgtggtgtcaaaacttgggaaataacctaagtggccattgcctggggattggccaaatgaattcagtccacatcatctctgcagccaggaaaacacctgggcagttgtctataagtggacgtggagagatgtccaggacatctaggtaagtgcaaaaagcaaagtgccaaatagcagccatttatgttaaaaaaaaatctatatagttaagaccggcttttcccttatttccttttaaagtactagcatattacattgttttcttttaattgtaaattaaaataaaaaaataaaagggggccatgcatggtggctcacacctgtaatcccagcactttgggaggccgaggcaggaggatcatttgagactaggagttcgagaccagcctggccaacatggtgaaaccccatctctactaaaaatacaaaaattagccaggcatgtggcgggtacctgtaatcccagctattcgggaggctgaggcaagagaatcacttgaatctgggaggtggagattgcagggagctgagatggcaccactgcactccagcctgggcggcagagtgagactccatctcaaaaaataaaaactaaaataaaaataaaaataaaataaataaaaggggttaggcccagtggcttactcctgtaatccaagcaccctgggaagctgaggcgagaggattgcttgagcccaggagttcaagaccagcttgggcaacatagcaaaaccctgtctctattaataaacaaaacaaaacaaaaaattttaaacattaaaggaaataaggccgggtgc

SEQ ID NO: 68888 - DNA, 2410 bp, Homo sapiens
gtgcccaagtcaggtgtgaaaaatcacatacagagaatggagtggtctaggacccagtgaggaaatgcaaatggtccgtggccatgccgccttttaaggaagagacggcatggaacccaggccagtgagggcagaaagctaaggtgctagtgaccccaggcccactccaggcaagggctgcatgtggtgcttggtggctgccccacagaaaaaggaaggatgtcaggatatttgacaaacaaagcttcattccatggtgacacccaggtagaggtgcctcccagtcacctgaaccaggagttctcaaaggcacttccttaactcctggggatatagggccctcctgaggccaaacagtaaaattcctagggctcacgtaggagtcacaaaagtgggtgtagggggggtgcttgctggagcatatacagtgagcaaagcaggaagaagctagggagaaaccgtggcctgagggaaagggacagagagggagaggtgaactccaacttatgatctggtctggggaatatgggggttccagtcccaagtcctaaggaaggggccaatacatggatgtgagggaggggcaagagctagagttggggcttatgtacaggggagcttacagtggggtacattcagtcccctcactgcctgggatccaggaatatggggcaaggactgatgctcaccactggagggttggggagaggatatcggtctgtagccactgaagctatcactaggatggggttttgggggaagggtgtggggggtaccgtgcagctggaagcccctgagttagggttccctgggcagaggggctgacattcccaggttagggaggtgaggtcattgtttgcagcccagggcctgggctagggcacagaggaggtactaggatgtagattccagatctggggaacccaggatgaggtgtgacttttaggggcctgagggcagtgcttacagctgaagggcagctttgggcttggaccgggtcctggggggatgagggggtggggttctaagtctaggagcactcttcacaaccgagaatgccccggggctaggattccgtatctgcgggtccgatgggagctccgtttgtcgcccagggagctcatggtaatttcttgatctggggagtgtctctgcagccaggaaaccccggggccaaggttctggcttgggttcggaagggacactggggtggggtccccgaacttgctatttgcaagttagacacccgggctggagttccgcatctgggcccgaggttgggactccagtctggggtcgctgtccgcagccggggctggtgaccgcaggcctggaggggggcccagaggtcttacctggcgagtagagcgcagccagctcgcgggccccggcgtgctgcgcgccccagcggcaacaagacgcctcgtcctcgtccagctccagctgctggcccggccagttctcggcgcccgccatggccactcgcccgatcggcccggtgcgctctgctggcggcggcggcggcagggccgcggaaccgcggcgagatcacgccgcccaatgaccgcccagcgccgggcgcggcggcggcgcgggcggggtcctcgcccggccgcgcgtcacagccaatcggggctcgcgccggagccgcgcaggccaatcggacgtcgctgagccgcagccaaccgccgcgagccggaggctgggacgcagctggacgcagctgggcgcggaagcttggggcggaggcgcgtgcccgccttcccagctcagccccggcagggctcccggctccagcccactgggagctcgcggcgcgtcgccgcccagctaggcttcggttcacgggcccatgcaatgggccgaggcagggcccagaaatgggcatttcttgagccggcagcgttaagcgcccactgtgtgcaaggaacgcgagggcagggcgccgggctggggccgaggccaggaagcatttggcgggtgctctgtacgatgctccctagcgaggccgatggagagtgggctggtttatcaagccctactgtgtgcagaggtttcgggtgccatgtgttcatcagctgtgtgccagctctgtgctgtgcgcccaaagaggagaaacgtcgagcctgccccgcatcctccccagctcatgttctcccggtggcgaggacagtaaactaatgaaaatgacaactagggtcactatgagatttgctgagcgcttaatatctgtcaggtgctggaccaagagctagacgagcaacatttatttgactcttaaacaccaatggtattgcctcctcagagagccccaccaccaccaccctgctcaaaggtgccccctcctccagtcactgtgacatcaccctgttttgtcttcacagcgcttctggtggggattgagcttgca

SEQ ID NO: 68889 - DNA, 1607 bp, Homo sapiens
gaggcaggtggatcacctgaggtcaggagttcaagactagcctgggcaacatggtgaaaccccgtctttactaaaaatacaaaaattggctgggcgcggtggcgcatgcctataatcctggctactcgggaggctgaggcaggagaatcacttgagcacaggaggcagaggttgcagagagctgagactgcgccactgcactccagcttgcgcgacacagcgagactctgtctaaaaaaaaaaagaaaagaaaaagaaatcctcctcatcctcataggctctgtacagttacagcaatggttctcagttgggggtgattttgactcccaggggacatttggcaatgtctggagaaatttttggttgtcacaactggaggtggtgatttactggcatctattgggtagaagccacggatgctgctaaacatcctacagaggacggttcccccgctgcctgacaacaaagaatgacccagtccaggatgtcaatggggccaaggttagaaatcctgacctgtaagtaaactgaagaggcatgcctttttctgttgcaatggagctcccgtggatctacaattcaccccagcaattccatttccccccacctatgtcacaaaatcccacctctgtaggcacagggaggtccagccaagtgtgtttaggatcgctggaaactggaaccaacctgcatgcccgttaggaggagacagatcaagcacgtagtcacgctgcgctgtgttgcttccctccgcttcttttgctcctgggtaaatagggcgggggaggtgagattggaaggatgccaggaatcttgggcccagctgctgctttatgacttagggatataactgcttctgactcatgcgtgcttggctctttgtgattatgtgctgagacacgtcagcgggaggctgccccggaatgtctccccatgcgaatcgagggtggggcctctgctgagtcacctctggctcctagaagcctggctcagggtcagctcatttgaaaagcggctgccttttcttcttttctcttctcttctctttttttttctctctctctttcattcacattatagcttgagtcagaacttcattcctttttaaggctgaaggaccacattttgcttgtttgttcatgtgatcgatgatgatggacacttaggttgtttccactttttagctatcgtaaacactgttgctaatggaatatgggtgtacaaatatttcttcaagatcttgctttcaattcttttgggtatatacccagaagtggaactgctgcatcatatggtaatttctgtgtttaatttgttgaagaactgccatactgttttccaggttggctgttccatttttaaattttatttatttatttattgtttatttgtttatttttttgagacggagttttgctcttgttgtccaggctggagtgcagtggcgtgatcttggcttattgcaacctccgcctcccaggttcaagccattctcctgcctcaggtacccaagtagctgggattacaggtgtgcgccaccatgcccagctaatttttgtattctagtagagacaaggtttcaccatgttggccaggctgatcttgaa

SEQ ID NO: 68890 - DNA, 1485 bp, Homo sapiens
gctgggcacacaggaggccctcagtggaggctggtttctttggcccagtgccacatggagcccgtccactggctgagctgggggcctgattgtggccactcaacgtctctgtaaagctcagggtctgccttgagatcctgcacttaccacggagtggccctgccttggggacccatctcacctcacttctgccctcctttctggttcatgactcagccatccactaacctcccgtggtagcactgtggccactctgtaaacgacagcaccactggtgtctcattgggggccagtctggaagagggagaccaccctaggcatttcagacagaagggatggaatacaggcattgcttacacagaggacggacgagccgagatgcagaaaggccaggtgaagcattggccacagctggaggcgctccaccctaggccagcgggacagaaggaagctgggtccgagaagccagggcttggagccacagtgggggctgcctggtaggagttgaccagggagggagggtctgtcgggcgggggcgggggctctttgccttccgatccaagctccgccctctgcagctctgctctgtgtatcccagagctgaccctgcggcgcctttcccaggctcgcgtccggtgagttcctattggccaacgggaggccccggtcggggagcgccccgggacaggcccctgtgcctcccgctttgcggagtgacgcaggccctgggctacagcaaccttaccagcccctccagcttagaggtggcagtggctctctgcggctgcgatttctttctcggagcgtcctccccatcccgttcggcctctgcctccaccgtcgtctctgtaacccgttccctgtgggagagtctctgttgcggtgttcaggggtttcggttttctggctgaacagtgattaacgcgagggaaggcgctgacggcaaggtggcaggtgaccagcccagcaggccgcccagcccttcccttcctacagacagaagcactgaggcctgcagaggggacaggcaggtgggcgtgggggatcgggggcagccctggagtcagacaggccttgttttgtcccaggaagaacattccaacacagaccacaacacctatggacctggaaaacattgtgctcagtgaaagaagccagacacagaaggacaatgttgtatgaggtacctgggatgggcagattctgagagatggaaaatagaatagagattacctggagagaggggggaattgttgaatgaggacagagtttgtgttggggatgatggaaaagttttggatacagagagttatgacgagtatacagcattgtgaattttttttcttttctttgttttttgtgacaaggtcttattctgttgcccaggctggactgcagtggtgcaatcctagctcactgcagcttcgacctcccgtgctcaagtgattttcccacctcagcctcccgagtagctgggactacag

SEQ ID NO: 68891 - DNA, 10532 bp, Homo sapiens
gctgtattttcctccatagtgctgaccagaatctaatacaatctatactttaatcattgatcttgtttagtgcttgtcttcccccaggagaatttcagctccacgagaacaggaattgcttgtcttgtccatgaatgtgtctttagggccagaattacagcatgtgccaaggaacattcgataaatgtgaaggttgagcactgttttctgttcgttggacactctggttcctctcggcggcctgctgatgccctgtgtgcatctatcacatccatggcaccggcctttcctgatcccagagcaagggcgcccagcggatcttcacgcatgtgaatggctcctgcagtcccagaacctgccacctgggggcagtatatactcaggcaagtttcactaccggtcctgagcacctcccgtctccaaaatcctggatctcagaacctcggagcctggcagcccttggggatctatctctgccagccccacttggcagatggggaaactgaggcctcagagaggaggcatgatggggaaaatctcaaacattggaatcagggaatctggcttttaagtctggctcttgtacccattcacaagggtacaagggggatttggagggggaagtaggaagttctaatcctcttcgggcctcagtttccccatctgcctgctttgtggggtgaaagggacatctgattaactctaatgtgtcggggaaggccagcagtgaggggtaacagcaggcccagaatcccagatagaatattatcacctcattttatataccagggactgaggcccagaggggacaccagacacggccggagagccacagcatggaaggcacagggcagcatgaaaggccatccccctgccatccccctgccccacgcccactagagacacccccccattcatgttctgatggttcacctctccgccatattttcccacctgctggctgatttctaagcccttttgcagaacactctctgtcaaagcagccacgtggatctccccttggcaaatcgcctcagttttctcctcttgaaaatgggatagggaaaagctgcagagatggggaggaggaattgtgaaaagcagtttgggggcagaggaggacgtgtgtcccaggtaggaaagtgcctgttccctccccgcccccgcctggctcctgcccaccaccatgtggccacgtgggcccagcccacagcttcaggttttaaaagaggagctggaaatttgaattttgatgtgaaatctcctgatttttaaatgttggcaataaattcacttaaacacacacacatcaagcaaaacgctatggggtcaaattgaacacatctgtggtctcgatttggccactggctgccagtttgagatcctttccggctctaggttctgagggcaggtgactgggagaggtggcgccagggggatcctggtttcctgtgcccacacagccactcacgtactctgggcctctgggccgtggtggttcaagctcccaccatccccacttcttggggaaaggctgaacagtactggggtgggggtgggggagcagcaggcggggcctgttgagcaagagccttgtaaaaacaagggcttacgtcatcctagcttgcagcttccctgcaggacacctgggtcggcaccggggtgggacctgcgctgagaagggatgggtcatccccagcagggggtggagggtggggaagggtggcaagcatgttccaccccagaggccagagggcctagacccctgctggggctgagtctggtctttgggggctggcctgcaaggtccgagtaacaccttaacgcactgtgtgaccccaggtctacccttctctgtgcctcagttcttctatccagaagatgggactcacattgccaggcctgttatgacaaacccaagagggaaagtcagactggaaagattttattccttctcatcctttcatgtgacctggagcagacacacttagctcttctgggcctcagtttcctcatctataaagtggagataatgataagactgtggcctggcgcagcggctcacacctgtaatctcagcactttgggaggctgaggcaagagggccacttgaggccaggcgttcgagaaaagcctgagcaacagagtgagacatatccatctctacaaaacattgaaaaatatgaaaaaagaagaagaaaaaagacctgcctcctacaaattatcagtaggattaaatgagttaatacatgcaaagagcttggaatgtggttcagagaaggtggaagtttggcctaagaacacacagcaaatcctccaattagcttcagttcccccatatctccctgcatctcttcagaatccagaaagggaacgtgggcgagtgctttggttcagagaggggagccattttgcctaaggtcacacagcccagctaacgaggaacctctccttcttctcagcctcctccatttattcactcaccattcatcgagcaccttctatgtaccaggctctgttctaggcaccagggacacagtagtgaaggccgtggggacagacagcaagactggcaggcaagataattctgattataatgagaatggtgacggaaatgaagcaggggtgtgagaggagtgactgagggcctagacttcccatgggaaggtcagggagggtttcccggaggaggcagcttttgggctgagacctgaggagctgccttgggcagaggtggggtgacagtgttcttggtgcacagggaacagcaaatgcattccttcactggtaaatgttgagcgtgctgtgctcaggagtccctcgtgggccagccctccccaagtggcagcctgcagggagactgaggtagacagctaggataatggtggctggcgatagggaaggaaattcactagcaggtgggacagggagggcctctcagaagccgtggcctctagctcagccctgagtgtcccattttgcagtgaggaagggctggccgggtggccctagggaagctgccgcacccctctgggccttgatccctccccaacccagaggctgctgggaagacccagaaagccagcaggctgggccagtgttttatcccctccctccctgcctcctacccaccaagggtgcccagagatgtcatttctccagctcttgggggcggaggtcaccccagctcagcagataacaccaaaggttgagcaatgcccgcctgcccgctggggccagggctggggtcagtgggctggggatcagccccgggcaggctgggagctcctgcctaggtggcctgggctaggagtggcagagaggtgggcccagggagctgccccaatggcctaggaatgggtccgggagggcaaagggccctctaacctgagcctacccagcagaggcgggcaagtggtcagaaggccttgggcctgtgttcaagtccaggcgggccgttgtcgctttcccgtctgtgaaatggcagcagcaaaagcatcttcctggtggggtgaaaaaagttgaacctcggggtgcaggcccaccgtaagcacagggcagggacttggtaaaaacttatctttctctttccttctctttcctgcataccaccccctcccgtgaggcctcgcttaagtccctccctagcaacttcagaaacagaagtttttggcctctgggactggcaataggtcttagggctcagatgagggcatttcatttgggatgaatgggggacatgcggccatgtgaccttggtatgccacgccatgctctctctgggcctccactggcacaatccgtgggggtcccgttctctctgatgtgcagcccacaacgtaagccttaggtttgggagtctggtgggaacaatgccaccaccactgacagtagcgacacccttcatggattgcagctgggagaagtgaagtgactcacccaaggtcacacagtgtggcagggccgagcaccccccgcccctgccccatcccagggcccaggtcgggtggcgcagcgcggggcaagagaagacccgggcgtgtccaagcctcgagcaggcggcaggtgtggtgggcggggctaggggcggggctccgtggaccagggtccagccccaagcggggcgcgatcctgcccggtcgcgccgacccccggggtcctcatattgtctgtggcttaagaggggagtcgtcacaggcgtcaagtcttctttctaaagccggggacctggggaggaggtgggagtttacgggaggaagggccacggagatgggtcgcttctcctggagctagagctgcgggctggggtctccagggttcggcccggggagccgaccctggtcggccgtcggggctctgctcggccctcctgaaacctccgcctcctccagcagggggcgggccggggccgcgtctcggggggaaggcgatcaggtcgccccctcctccgattcccccgccttccaggacagcctccagcccagaggggcggtccgggggcggggtcgcaccgccccctctcgctcccaatcccggggcggccgggcgggggtgggcagggggcgtgaggccgcccctgcgtcccgggggccccccgaaaacgcgctccgggtgcccggtccctccgctgcgccctgccgccgtcctcccgggggtctcgggcggccgcggccgtgtccttcgcgtcccggcggcgcggcgggaggggccggcgtgacgcagcggttgctacgggccgcccttataaataaccgggctcaggagaaactttagcgagtcagagccgcgcacgggactgggaaggggacccacccgagggtccagccaccagccccctcactaatagcggccaccccggcagcggcggcagcagcagcagcgacgcagcggcgacagctcagagcagggaggccgcgccacctgcgggccggccggagcgggcagccccaggccccctccccgggcacccgcgttcatgcaacgcctggtggcctgggacccagcatgtctccccctgccgccgccgccgcctgcctttaaatccatggaagtggccaacttctactacgaggcggactgcttggctgctgcgtacggcggcaaggcggcccccgcggcgccccccgcggccagacccgggccgcgcccccccgccggcgagctgggcagcatcggcgaccacgagcgcgccatcgacttcagcccgtacctggagccgctgggcgcgccgcaggccccggcgcccgccacggccacggacaccttcgaggcggctccgcccgcgcccgcccccgcgcccgcctcctccgggcagcaccacgacttcctctccgacctcttctccgacgactacgggggcaagaactgcaagaagccggccgagtacggctacgtgagcctggggcgcctgggggccgccaagggcgcgctgcaccccggctgcttcgcgcccctgcacccaccgcccccgccgccgccgccgcccgccgagctcaaggcggagccgggcttcgagcccgcggactgcaagcggaaggaggaggccggggcgccgggcggcggcgcaggcatggcggcgggcttcccgtacgcgctgcgcgcttacctcggctaccaggcggtgccgagcggcagcagcgggagcctctccacgtcctcctcgtccagcccgcccggcacgccgagccccgctgacgccaaggcgcccccgaccgcctgctacgcgggggccgcgccggcgccctcgcaggtcaagagcaaggccaagaagaccgtggacaagcacagcgacgagtacaagatccggcgcgagcgcaacaacatcgccgtgcgcaagagccgcgacaaggccaagatgcgcaacctggagacgcagcacaaggtcctggagctcacggccgagaacgagcggctgcagaagaaggtggagcagctgtcgcgcgagctcagcaccctgcggaacttgttcaagcagctgcccgagcccctgctcgcctcctccggccactgctagcgcggcccccgcgcgcgtccccctgccggccggggctgagactccggggagcgcccgcgcccgcgccctcgcccccgcccccggcggcgccggcaaaactttggcactggggcacttggcagcgcggggagcccgtcggtaattttaatattttattatatatatatatctatatttttgtccaaaccaaccgcacatgcagatggggctcccgcccgtggtgttatttaaagaagaaacgtctatgtgtacagatgaatgataaactctctgcttctccctctgcccctctccaggcgccggcgggcgggccggtttcgaagttgatgcaatcggtttaaacatggctgaacgcgtgtgtacacgggactgacgcaacccacgtgtaactgtcagccgggccctgagtaatcgcttaaagatgttcctacgggcttgttgctgttgatgttttgttttgttttgttttttggtctttttttgtattataaaaaataatctatttctatgagaaaagaggcgtctgtatattttgggaatcttttccgtttcaagcattaagaacacttttaataaacttttttttgagaatggttacaaagccttttgggggcagtaattggcttttgttttttatttttttactttattttggatttgtaggattttgtttttgcgtttctggtgtgtagggggttgtgtgtggggggctgctgttatttttggaggttttggtggttgggtgggggtgttgcagctggtttttctgcctcctctgctactccccctcccacacacacagggtctgcttgagatggggttccagccccgggggaaaggggagaagagtaatgggtcaggcattcaggctgactcagagcccctaggcgccgggacgggtggctgggaaccctgcttgagaagagattccggagcctctggctggtcccgagtgtcaggcttgggtttggaagggctgggaggtctgtgacccctgccctgtgtttggggactaggtaggcaggcctgtgactgtaggaggagggggttcaggtcttggtcctgctgagcccgagtcagggcagatgcttttggtcagtgtagtggggtgggttgtttaaaacacagtttgtgtatacatgtgtattttaaagaggggagcctgggtgtgtgggcgagtctgtgtttgtgtgtccctggccagcaggaggggagaggccaggccaggtggagagaggtgggggaggggttcccacactttgattacctttcctgaggatgggaggctcatcacttgctctctttgcccagacttggacactgagcccacctcacctgcctgctcaaggtggctgagcccaggcacaaacgtggggctgctagccctgattccctgggacaggctcctcttccctgcccactgatccctttgccccttccggcttctcaccgcaccccctactcccatccagccctggatggcattcctgagagttgaggatgtagatggatgtgagtggatacatgtacagcgtcccacagtgcctggcacgcaagaagtgttatataagcgcttgctcttgttattattttttgctgggaagctgctggcatttggcaccccagtctccagtgcagcgccagtgtggccagtacttgccaggggccggcatctggtaaacactggacctgccccatcccatttagacctcacaataacctttgggaaggtggggattgttatgacgcctgtttttagaggtggggagcagctttgggctgtccgatccctatgggcaagacactggttgggggttgccctgccctgaggaattcaggggcagcaggcatcgtagcctggtttgccaaggacctggggcggtctgggatctcaggagcagttgctgataccgtggttcgcgaatgggaaatgctttgcccctccttttccttttgggggcctggttgtgctttccctgtgggagcctgggatgtggggaacagacagcgacactcatcccccaccgccacaaagcggaggattcctataagctccacctccctaatgccagtgtctcctgatggtggctcgagggctatgcagattgctggacacagataacctcacttcaacctgggacctgcagcgtggccctgaccacgtcccctcccagccctgggcaactggacaactggccgggcatgccttcaaagcctcgaagtcagttcagtcccaagccccactggtctcgatggtttctgtcagtagcagcgacagcaatgtgggcttgacctcaaggatttacttgctgaaggcagaggctgaggggctggacctagggaaggagggaggtggagagggtcgaaattgaggaacaaatctcaaatccctgctccctcctttgtcaccaagagttggctggtggccactgctcacccaaatgaggtgagagggaagcagcctggccagacggtgcccctcttccgcccccgtctgccccacagcttcgcttctgtttccccagtgctgtcctggaaccagcgttgagtcagttcttcacacactcacatcttgctctcatccacagtaccccacagaaggtgctagacccatttctaaaagcacacattgaggtccacagaagtgaggtttgtgctcaaggtgggctaggtggagcaggttacaaaaccatccgactcccaagtctatggggaaagtttggggctgggagcctggtttgtaatcccagttcctgtttaaaatcccaggctcttcttggagggctccttgcctgacctcaagttcaggcactccaagccccagaactgcaaacatcagtttcacagtttggaagcaacagaaagtgaatttgaacctgaaccccttgggctgcctctaaggagggctgggagaagcagttcacaggttgagggctttgacggtggcttggtatgggagcactgtggacggagctgtgcccaaaggacttggggagatgtcatagttagggcaacaccaaccccacagttcaccaagctgcaagggtgaagggctcgcagggaggaaccagtccattccgacatccagaaacaggagggggtgggatggggtgaggcgagcccaggaggccagggacgagccttgaggaatcatgataatagcaggtgtgagacaagggcttagatgtgcaaagcaccactccaagcccttggcacagagggaggtgctgggtccttagatatgtgggagaaagccggtcatgttaaccacagacccatttagtgtgtttgaccactgaggctagctgggaggtgggagcctggaaccccaactaatgtttgctcaggacaagagagttcacaaaacaagacacattcacacctcataatcttatgcaattgtcccacggcctggtgattttagcaaggagataagtggatgtcagaaatgaacgctcgagacactgctgggtgccggttccacactgacactgtgctccttggtttaatcaactcattagccttttggaggctgcagcttttgttactagcattttgctgctgtgcaaaccagcttagagaggtgaactgacctgtcttaagtttgcacagctaagaatggcagaagctggagtgggagtgagaaggggaactgctccttctgaacacctgaagaatatttccctgcaggctgggcgaggtggctcacgcctgtaattccaacattttgggaggctgaggacggcagatcatttgaggtcaggagtttgagaccaaccccgggcaaaatggtctctactaaaaaaatacaaaaattagcctagtgtggcggtgggtgcctgtagtcccagctactcaggaggctgagacatgagtatcacttgaatcacagaggcggaggttgcagtgagccaaggtcgcaccactgcactccaacctgggcgacagagcgagcgtgcctctgtctcaaaaaaaaaaaaaaagaatattcccctgccttccaagttttgtccagacctctctgagactgttttctcccagtttctcagtcgtttttttgcccagttatatttttcatttatttgacaaacatttattgagcacccgctgtgtgctaggccccttactgggtgttggggacatgtggtggccaagatggaggtgataattttcagggagacacagatgctaagtatccagtgactggaacaagataatggcagatggagtcaagggctctgcaggaaggaaagtggggcagaggtgagtgggagcggtcctgcgaggcccctcctaggaagtggcatctgagcagagacccctgagcccagggagtcaggagtatggtgggctgcagtttactggatgctcactttgcacctgctggtgtcctgcatgccttattcttaaaatcccaatgatgtaggtgcttttttttttttttttttttttaaaggagtctcactctgtcacccaggctgtagtgcagtggcatgatcccggctcactgcaagatccg

SEQ ID NO: 68892 - DNA, 709 bp, Homo sapiens
cttttaagtaatttaaaataattcctttaatggctctccttattttttttattttttttttaagggaaagagctgaggtccagggaggggaagggacttgcccaaagtcattggccaggtggagggtctgaggtttgaaccctgtgggccctgaggccctctataccacccacgatggctcaggcctggatggcctgtttgcgactcaatcctcatgggttgagaagatgcccatagcctggcctgatagccctctggcctgacatcagctacaaccaccagttggggcagttgcaaaatccctcaccctttgcctgtcgataaagggtgcccattgcaaaactcagcggagaaattattaagggttgtgtcatcctgtggccaggccctgggtgcctctttcctgcccggaagcctgggtagggccgactgctcactctctccctccatggccctgacccgagagagaatggggtgggggtcagcagggagcttgcagggaatgcggacgacagaccccagcactggggccgtcatagtccctgattcttaggaaatggcagctccatccttctgggtgctcaggcccaaacctcgggttgtcccttcatttcctctcttgccctgcattcgataactggccaggaaatcctgtcagcgccacctttaaaacatccagaacctgcgtaggttttcccctccgcttcca

SEQ ID NO: 68893 - DNA, 1364 bp, Homo sapiens
agctggatagtcctttgctgggatgggaggatccccattccctgggaacagccacacccattcccagaacatcaccacgatccctgctgccttcccttggaggacaggagttggtgtgaagcttctctgagcctcagttccctcatctatggaataggagccagagttcctccctccagggtcagaaggcagctagctgataaggggagcaggtaaggaggtgaagggtcggtttgctggctgctgcctccacctcccttccagaaccagtcaccagtgacagtcccttcatcaagaccctttctttcctcccttctccagcacccacggtgaggtctgaccaacagccgcaaccatagtggcgctttgctgagtcttccttgagctccctgtgtgcctaacgcagagcttctcccctccccggggctttggaaaatctgctctgaaatgtcttgtgagtgatcagtttacgcttcaacaggaaaatgagttgaatggtggaacttgaggcagggttttggggaatggacagtgggagttctgggagtctagagccagcctctgggcttggggttagcagggccgaggcatgcccagatcgcatgccatcaagccccaggaccagccgcatctgtggggtacctccagggcgtccccctccttggcctgccctgatgggctgataagacctagcctcggaggaggaggcagctgtaattacaggccttagtggtggcgggcaggcaagtcatgaggtgggggtgactcagacgattgctccacggacagggtggaggcgggggccacccatctgcccctcacccagctggcctgagatgggtctgggcacccagggagcggcccggccagggtcccatccttgggcctgtgacccaggcccctgtgccacttggcatccacgaagctggcattgcactggacttgggactggctgggttttcccctttcttcgtcccaggcaatagcttctgggaagtaggagtcagtgctcagaggcaccaatgggaggatcatcaggactggaccgagagagccgcagactcgggggagagtaccgggagtcccagaccacagaaagacagaacctcagccatgtgcagactctgagaaccagcagatgacggtttctagaaccaaatattttcaggttcaaggattcagggactagtagatctgtagaattatcgatttataagatcacggacctggttgcaattggttccagagaattcatatatccattgagatagagatttaaaaaaaaatcacagcagctgatgagttcaggagtaaattaccttggtgtcttcaacttgctcccacatggatcaggcaagaaaagc

SEQ ID NO: 68894 - DNA, 1030 bp, Homo sapiens
caaggagaaactgttctaaggctttacaaatgttaactcgtttaattcttatgacatttctaagggcattatgaatagtaactcattgaattcttacaactggatgaggtaggtgctgttatgatgcacgttttacagataaggaaactgaggcagtgagaggtggagtaacttgcttaaacggtgctcactgtgttattaagcctctactgtgtaccaggtgctgtgctagacagagcagtgaacaggacagactttgtccacaccctgggggaacttggcagaggagacagataataaacaagcatgattgtttataagttcaaagcggaaaataagcctgctgctttgatggaaggtgggggtatggggtccccaagattgagcgaacaggtgaggctcttctgaaaaggtggccttttgctgagacctgaagtacgaggagaaccctggatttgagagacatgactgtcatttgcctgggctgtgccctctgcctggactgccctcctgcttccggcttctctatgccaaccttgccttcactggtccaggtctggctgggcggcacctcctctggaggtgggaggtgaactgggggcttccccagccccagagggaatctgtcctccccctggtcttttctatcctcctggttcccagagcagaccttaaataagggaagcctccatgtgactcagcggcaccacctgtgccaggctctgtgctgggatctcacccaaccccgagtggggagcatagttttctcctggggaggagatagaggctcagagaggttaagagacttgcccaaggatgcacagctaacaagtgttcaaaggaaaatccacactcaggactacaggctgtcttttggtgactggtttacctgctcacctgcctgcctaccctgggcacctctcgagggcaggtcctgggtgctggagtcagttctgtgtaccagcatcgcccagccctgggtctggcctacatgggatgattttcccttcaccaggctgagagcatgaga

SEQ ID NO: 68895 - DNA, 1063 bp, Homo sapiens
gtggagctgatgttctggtgagaaagacaagtaaacaaataagcagacacttccagacacagatactacaaacacatgccagaggcatatggtggagggtgacagggaaggagtctggggtaggttggggttgggggttctggagggagggtatttattgagacctcactgagatgcagccaccaaaggaaaatatgggggaaggtgtcacaggcagcacagcaaaggcataggcccggagtggggaatgaggttgatagatttaagggacaggaaggaaatagtgttgctggcggggcatgaatgtaggggagagaagcaggagagggtggtggagaccaggctggggccatacatccagggctcggggccaggggtgggctctgaatcacatctccaatgggatgggcagtcactggagggtcaaagcagggaagagacttgggcgggatcccatttcagatccctctggctgtgtgaagcagggacacccagccggagatggccgcagatgtccaggcgagcgaggatggcaacttggacgggggcgatgccagtgaatgtggggagagatggccaggcctggcgggaggcccagggctctgcattcagtttcatttttccttttacacaatcccccccggccccgggcactctgggtcactggactttccctggcactgccggtggggcccacaacctgctggcaatctggcctctccgagtcccagctggttccctgccctgtcctggacccttcctctccaggaacaggcccagctccagttcctctgtcactgtttcccaccacctcctgccccaggtctgcctgggccctgctgatctcctaattctgcctctgctccagcaccccctgctccagccctgctggctgcctgggagccggcagatgcttcctctgagctgccttttccagatcaagtttgcatccaaggaagcgagcctgagactcccagccagctgggggagacaagttcgagggaagtaccccaaggtagcttgccagagggcagcctcgctcttgggcagatttttcctctgg

SEQ ID NO: 68896 - DNA, 1318 bp, Homo sapiens
cttccttctgcctccactgccaccactgctgctcatctctgctggcacagaagtctcttccctggtcttccagaaatcccctctccacactcagccagagggagctattaaaactgtgggccagcccacatcagtccacagcaaagtcctctctaagggatctctgttgcttggagaataaaccctcggattccttccttggctctcggggcctcctctctgacctccctctgtctcctctcccagccttcctcctcactcaccctccagccatgctggcttcctccttgctcctgaaacagcctgaggcccacactgccccgggccctttgcactggctgtttcctctgcctggaacacttctcctaggcatccacagggctccctcccacaactccttcgggtgcccacatgggaagccatccctgaccacccccccgacttccttctgagcaaggtagggtctttctacctagtcatgagggcagggatttttgtctgttgtgttctctgtgtgcccccagtgccatcccagtgcctggcagatggtaagtgctcgacacacattggctgactgcctgaatgaacaactctatgagccgatggcagataaggacactgaggtcctctggggtaggtgaccagcccaaggccacacagctggtctgagattaggccaggagaggagcccgggttggtcacatcctggagttggcgtcttggaaactgcatcaggagaataacaaagatgagacgcaggctctaacaagtggataccagtgactctcgccccgccagccccagccctgcagccttgggcccttccaggagtcatggtctgcctgcctggggcattccaggcttcgacccaggtcctgcactttctattttgagcctcttagtcctgaggactgtgtgttcccagcaggcggcgcgggccagaggctgagcctgggtgtggctgtcaccctatctggggccagagacccagattcccgggcccttaacctgttggctgctgagggctctggcataagccctgttccctgcttgattgtctccccttcaagcccctgccctggtatcgtatcggcccatctcaccttggattatatccctgtttggccccatttgaatcctggctctgcccctttccagcaatgtgaccttgggcaagtcacttcatctctctgggtctcagtttcttcatctgggaaatggggacaataagagtacctgtctctggccatgtgtggtgactcatgcctgtaaccccagcgctttgggaagccgaggcgagagaattgcttgagaccag

SEQ ID NO: 68897 - DNA, 2994 bp, Homo sapiens
tctgttctccacacacgaccagagggacctgtcagaagggacctataccttccagcacagaccctcccagggatcccagctctctgagtgaaagctccctgtggcccgtgaggccgggtgcgaccctggccccccagcaaaccctccacttgtctgatgacctcgctgcctctctccctcgcgtactcccttccagccctgatagcttcctgctgttcctcaagaagccctgggtctttccacctcaaggtctttgcaggtccctggagcccttgtccaccatggatgtccacggctccctcacctccttcaggtctgagctcggatgccactctcgacagccaccttctctgacccttcccctggcttaagtagcctctgcctgctcgacaatctctccctctacgcccctgaccatcccgtgttcttttttcatagggggaggggaaaggcactcccaggagagtggacagtgtgggccagggcctggacgtgtgggcagcaagagggtgggtgaggggagagtggtggagcctgggtggctgagcttcagggggaggcatcctccaggcaggagtgagcaggccagggtcaccctgactccgtcagccactggttgtgtgacttcagggagctctctctggacccaagaacctgcaactgctgttggagacccactaagtggacctgtcatctgacagagggggaaactgagtctccaaagctgctgctgtgacctgctgaaagggtcagcccagggatagggacaaaccaggggcttctagcagtcacttgcacctcagtgtgagtgagctccctggattcttggctgtctggtagcccctagaccccatggggcttgggaggcagagtgatggcagggctgagcctggggtggagtcagggctgtgtcaagtcccggcccagcctctgtcccggcccctggctccctgcagggtgctggattgcacaatcataccacccacagctgtgaccaaggcaggtgacacacgctttctgggagccacccttgggccgtgcagcctcgtcacacacacagggccaccgatggcatggatgcaccccggcacatcctgactgcgaggagtgactgctcctcacactgccacttccgggctgtgtgactctgggcaagtcacttcccctctctgagcctcttttcctcttctgtaagaggaggtaatatagtgcctgctcccctggctgttggagggattgactctgcccccgccatgctggccctctggctggtcctcaaatgcaccgggcatgccccacccagggcctccacctgcgcccttccctttgcttgggccggcccttgcacctccttcaagtctctgctcaaacgtcgcagctcatgaggcctttcctgcccctgacactccctccttactgaattcctccctgcatctctcagtgctacctgactcatcatggttcctgcttgttttgtctacccgctcctgggtggcagctccatctttgtctctcttggtcatcactgtgtccccagatcccaacaaagcacctcgtacaagaaagtgctcagtccatagttgcagaataaatgaatgaatgaatgaatgaatgaatgaatggaaagtgcttagctccacgcccgacccttagtaagcacctgaaacccaatgccgtgtggtggtgttagctttggctcccgatttctagccccatccaatcccaccctcatcagcccggcgcccgtgctttctctgcctggccagcttcctgctgcctgcacagtctcctccctgggtcaggacgacctctgagggaatcgtgggcctgcacggctggctccctctggctctgcctccagctcctcttacatctcccgggggcagaggcttctgggaaacaggctttgaagctcccctgggtcagacccgctggggccttccttaggcattgcctgatgtgaccccattagtgaacaaatggggacagtgagacctagagaggggcagccatgtccgatgtcaggcttcggggctcccaaaacatccagggaagcttccaggactctggcttctttgttgtttttggaacagagctgagctcaggtgcctgttttctagatgacaaaactgaaccccgttacaggctttggagccaggtttgaatctcagtcctcttacttcctggctgtgtgatcgaggtttgtcacttggtccctctgaggctcagcttccttgtctgcaaaatggcaccctaatggtacccaactcacggaggtgtttggggggacaaggtcagccatcctgcaggcaggtggggtctctggcctctcccacggggtcctgggactcctggctccggaacccccaaggcccagcccctccagggcccgcatggttccctccttgctgggataatttacagtcccagggccatagctgctgttgctttatttttttcccttccccgacttctcccttcctcaccctggcctcacttctccagaaccagcttgtttttgttttctgtttttacggctccataaatgagtcacgggtctgatttgatttaatttcgttgtaattgttatcttttcaagcttgtttttttccactcggttactcacgagaccacaaaaacctaaacaggacggggccttccccagcccggcctcctggtcccccgggactccgggccagggtcagcagctcctggagactgaggtggggtctgtggagcttctgtggggagggacttggtgtccccagcaggactgggtatcccgagtcccgggctgcagctctgttgctggacagccttgagagaattgttcgagctttctgatttccccagcatcctccttagcaggctttagaacagggaaccaaaacccaggcacctctgggccagaaggtgaaaggatgagtaaggtggcctggtgctggctccggtgaactggagagaacaggctctcctcaggggacggtggcctct

SEQ ID NO: 68898 - DNA, 3893 bp, Homo sapiens
catggtctagtgtccttcccctcaccccagtcccagtggagccatcataggtgaaatataagaacaagtcacctgcgttcagtggctgcagaatacctggcctcgcacagaaggctgcggggatttctgctcattcattcttcccacctgccgcatgagggaggtgctatgtccattttacagaggacactgagtcccagagaggctaagcggcatgcccgaggttacacagccaagaaggggcacagcaagattcaacccaaaagtctgcactccagccactgccctatcatgacactcacgagctcccaccaagtctggctccagtgtttccagtaccataatcatccccatttaccagatgggtaaactgaggctctgagaggtggagtcacttgcctgaggccatacagcaggaagggtaaaagtaaagatttgaatccctgggtctagtcgactctggagcctgctgttctcccaccatacacctcagctgctcgccctcctgggcatctgtttcctcatctgatgaacaggggtgacggcgatgcctccctggcaaggtccgcagaggatcccgggtggtgtatgtcaatcacccagctcagtgcctggcactcagtggatgctttaaacgtgatgcctgtgtttattcgtataaaggtggctgaatattaaatgggtggatttatggaaggcacttatggtaatgccctgtacataatagatgctcaagaaacactagaagcagttactatgattataggatcgaccacaggggacagcccagtaacccctcaaagttgcttccttcccaagttgccttccatttatttctcccttcatccaacacactggccttagggtccaggttaggatttgggggcttggggggcttaggttacaatttgaggtgatttgtccccccctgcccatcagtcagagtgatgctgagagcactggatgataagaccagaattctaggtccgcgccccggacctgctgtgtgatctctggcaactgccttgccctctctgggccttggtttctcctttcatctgcagagcctgggccaggctgccctgggaggtgccagccccgaatggggccgggggcagttcctgtgtccccttggccaccagcctccatctcctgcctcttgagctgcaggcccgcccggctcagctgtgacgacgaaccagccaatctgtttactgaactggctgaccccttccgggaactcggcccaagcttcccagaactcgggtattaatgacccggagccacatgacggagcatgacacagcacttttgggcacaaggcagggcccagaggggtgcgtgggggccgcagcccagcccccaagccccgccagcgggtgagtcacctgggccccctgcagcttcctgatcccggccactcagctgtcctccccacccccaggatatccccagttgtcagggctgccctgggacccctcgacctttgcactagggacttagcagccgtcttgggtgatcagggctgccttctgggattacagatggggacagtgaggcctgcaggactggagtgaatgaacagtgagctctgagtaaacgtccactgtgcgggaggcactgtgcaaatacgtcacgttagtctcgcagcgatgcaacacagtggcgtagtttaatccccatatgatagatggggaaactgaggctcagagcgggaatgaattctcccaagggcatgcaacaagagcactctgtttgactggaaataatttcctttcgtctcctcagcagccgacaagggaggtgccatgtggactgtttcacagctggagaaactgaggcacagaggggctgagtcacctgcctaacgcactgagcagtctggctccaggacctgtgctctgaaccagcacctggcacatagctggcaccgacatggtctccgtgcactgccatggatgagagcaatgctggctgcggtgtcgggcggagctgggttccaatgctgacttcacctttctcaggctgcacagcctggagcacgtggctgcaccctaccgtgcgtcagtttcctcacctgtgaagggtgatcgtggtggtcctgatcttgcagaactgcagtgagggctgtgagtgtggggtgtctcaactgcacctggacacgcagaaggcactctgtgaacactgactttcattggcccaggcctctgaatccatgacagttcaatctctgaaccccacagcttcctccttcaccctttgccgccccagggcaaggtgagggcggtggtttttatgggcctgggaaccagacaggctcgggctcagagggggcgcctgctgctggcgggagtggggcctcctggttcccactccctgattttgggctgggggccggtggtgggcaggggtggggcagcactttgatgttcttcccttcattccaccaccactgcttgagcacctactgtatgccaggctccaggggacccagcagtgaacaaggtctctgccctcactatggtggaggagaggatggaggagataaacatcggtgagcaaatgcttgaagaggcgagaggatttcaccagagagaagggccgtgatgggaatcagcaggggtgtttgggagctgagtgggtcagagagggcttttctgaggcggtgatgtggagcagatgcctgaaggagaagaaggaccagacctggggaagagatttccagcagagggaaactcaccacagcacgtgcaaaggccctgagggtgggaatgggtttgggaagttccaggaaaggcaaggaggctgaaggggtgtgaggaggggacagcagcaggacatggtgctggagggccagcaggggttggaccatgcagggcttggtgggctgagtgagcagccgcggctgggacttgggcaggagcctatgtgagagatggcaagactgcctgagatcgcattcagaacttctacccatctcacagatgagctcagtgaggcccgagccagcttcccctagaaggtcagtggctggacaggcatgagaatcgagggagttcaactcccccggagaagccagaagccagaacacaggccgtggaggagagggtcccacattcatccctgcagccccgagagctgtgggctgtggggctgcctggatggcttcctggcggaggaggtgacctccaagctgtggctggggcagaagggctgggagagcgttcccagtaggggaagcagcacacagacaggcccagaggtggcggtgaggtgcaggcgttgtctgggaaattcatcactgcttgggagtcaggaaagtgaccgggtgaggaagtgttattgtcagggtctccctttcagaaggccttggggccaaggggaggagctggaattgccttccaccgcgtgcagaccccaggctggatcccaggactgcccagggacaggcacacgtctgccctcatgtggcccacagtccaggggcagggactgtctggagagattagggccatggggggcaggagggcggaggggcagacctcccatcctagttccaatctcagtgctgtgacacactccctgtgtgacttggggcaagtcactttacctctctgagcctctgtgtcctcatccataaataccacctggaaagatattctcagaactcagtgagatcattcgctcattcgtccactcatttattccttggattttttttagcgcttcctatatgccaggtcctgggctgggtgctggggacacagcagtgacaaaaatccctgcccttgtagggctgatggaagaggtagtgtaaagcagtgagtggttaagaacacagacattggagccaggggccttgggttaactcctggcccactgcttatttgctg

SEQ ID NO: 68899 - DNA, 7120 bp, Homo sapiens
gtgccattgcactccagcctgggcaacagagtgagacccaatctcaaaaaaaaaaaaaaaaaaaaaaggaacagcctatgcaaaggttcagagatcagaaaagacatcgtggagaagtgggtagttcgggctggctggaacatacaaattgtaagggagaggtcagaggctttaaggctggccaaggtgctacacttcctttgaaaataatggggagcttctgatagtaaacagcagaaaatagtaggtgtctttcaggctcctgcaggaggctgaatttgagggagaggaagtatcgttgcagggaaagtagcgaggtggcaaggaattgcagccacctgagtgagaggtgatgagattgacctggcatggcagcctcagaggaggggagggtggatggatttgagggaggttgaggacgagactcccaggctttggtgaccaattgggttggaggcatggcggcgggaggctttatggatgatgctcatgtttctggctttggacgctgaacagttgtgcagccttccaaaagaagggagacaggcagagggacagtttgggggaagttgctgaacttgctttgggcatactgatttggaggatgcctgggggccatccaggaggaggcatcggggaagtgtacagacatgtggtcagaggctgagacaacagattggatatggacaaccacccacgactttggagaaaatgagtgaaatattcattcaacaaatagcacaggggagcctgagacacactatctgttcatgtctgaatacctggcagtgggccaagggcctggctgcttgttcaataagccaggaggaagcgctggagcaagacttggagggtgggctgggttctaccaggaagagacaggatgagggcccagtggtcaagtgcgtgaggcctgggtttaagtccagctcctctgtgtgttgattgcaggggcctgggccagatgttttccctccctgagcctgtttcatctgaaaattggttataagggacatggtgaagcttcaaagttgtgcttgtggaagcaggtagcttggagcatggagcggacttttgggggacaacttgggacacagagagtcacccacttcctggtgtggcagagccacgggggatggggagagagaaattaggatccgcctgaaaaacatccacagctgtgtcccatgtgagaaaggagacctcggctcccgcccaggctccctttcaccccccagcctgctggagctggcgggcgggggaatcatctccatggagtggaggaggggaccagatgacagaaaacttctccacgtcccttggagctgctggagctgggtcctggccaccgtcccaacccatagctcctgactcggggtcaggctgagatttgctccttctctgcctgctccattcagctgcagcgaacagaggctgcaaactggaggcctcaggggcccaatctggcgcccaagcctgtggggctttcctcagcccacatagaatttttaaatgaatgaagccaatatttaagaatctgtgggtactacataaaaacctgtgttttgattccctctggaaaatcagggcacggagcatccgatcatattgggccctgttctctagggaccaccatcaaccggagctgagaggtgactgtcttcagacaaggcatgtgccccagtccccaccactccctcttgtctctctgatgctgaggccaaggaatagtagctatttatcatcttaccccagcccactctgctcattttaaattcctgcctggtccctggtgacacagttttcaaccccagagccagtctctttttcctctaaaaccacccagactttggccctggttctaggcctgaattggcttcccaagaaccccagtctctgagctcctcagggtcatggtttacctttccttctgccccacaaggcccagcaccacccccgggggacgatgacgggctgagacttggctggtgttggggggccggctgggcctgtgggaggcagacccacatgtgctctgagatgtgtcagctgggcctggtcacactctctgcggctcatccctgaggcatgtggaaccaggcgctgtgctcgtggcccagccagggtggtaggcggggccaggcccgggacatggtgtatgtcaaggccacgcacaacaggcctgatgttccagccgcaaacacattggttggaaagaggaaaggaggagggagaggcagagccgctttaaagacagtacccaaaatacagaggcagaaagagccgaactcacactgtaagttgctgtgtgaccttgggcacgtcacctcacctctctgagcctctagcttaagatagaactaaggacagaccccagcttgcagcctcgtgggcatatgcagtggtacagtggctgatgtggggcctaatgcctagaagggcagcctggaatggaggcaaaaatcacagactttggggccagatgaggttgccacttgtgagctgggtgaccctgggcaggtcgcttctccatctgcatccccagggaaggtcctcaccaagttattctgccaaaaaaagaatccattcaccgaacaaatatttattgggcaattcctgtgggtcaggcgctggggacatggcaggacataggacggtcaaaggtctctgcccccgtggagttcacacttgtggagagagcaggcaatacacaagataaataagttgcatattgcatttgagaagatccatgctagggagagaaatgaagcaggaaaaggagatgggatttcaatgggcggggcaggaacagcctggtgagcaggtgacagctgacaacgatctgtaggaggtgagggagggagccgcggggaggggagagtgttccaggcagtgggaacggtgcacaggccctgagtgggggctgtggctgttgtgtttggggtgtagcaaagaggccagtgtgtggaacagggtgagcgagggagagagactaggaggacgtgagggccaagaggccgtggggggcggatcctgcagggccacgtgggctgttaaaggactttggctttttctctgcaggacatgggagtcatggagggttctgagcatagaagggacgtggtctgacttcagttttcatggatccctctggctgcagtggagaatgggctggaggggccagggccaggacagaggcaggggggatagtggggaggtgatggcaatagtccaccctctgtttagtgatcctggtccttccccgctctaaagccttcctgacttcccatcgcctctggacaaagctcaaactccttagcgtgacattcaaggcccgcttacctgactctagctgctccctgccccggctcctcactctccacagcatcccaaccagatatccttccttccctgctccacatgcggtccacctttgcccgtgctgtttcctctgccaggaatgcccttcctgtccccctttgtgacccagttcatgtaaggctgagtcccacaagctaggagatagaaaaggaaggaatagaggaaaggctgttcctggggagggtcagggagggccaggtttcggctcccctcttcttcctggaattcatcctccatggcctccgcagctgagggcaggctcaggagctgggagtggggctgtagcccacacgaccatgctgtgtgaccttgggcaagtcacccaccctctctgggccttggcttttctgctctgtaaaatggggaggatcctggagctcctcatggtggttctgtgcacccaagggctgtggcaactgtgggaataatggcatcctggggaagacataactgcacttccttgcccagccacgacaggccagctcagggtggccctgagctgatgctaggggtagcttgcaggaggggtgccctctgaagccctgagcatctccagttcagtcacccctgagtgacctgagcacctacagtgtgtccagccccagcactgtgcttgagcacggacagaggccagacagcctggtttcaaatcccagctctgtcacttcctagctgtgtgatctgggcaagtaatgtaacccagctgggccttggtttctcacctgtgacatggggacagtaagagtgctctcctcctgggaagctcaaagaagccagtgtgctcctataaataccatgctcagtgcgtggaggaagcagcttatcaaggccaactagcattttttttattattattattattattattattatcaccactgtcatttcctggctttgtggcctcaggcatcacttgcttcactgtgcctcagttttctcctctgtgagatggggtaatagtcccaccttcgaagagttgccatgaggactgagcctgacgcatgtaaatgagcctggagcagagtaggtactctgtgatttttgtttgtttgtttgtttgagatagggtctcgctctgttgcccaggctggagtgtggtggcaagatcttggctcactgcaacctctgcctcccaggttcaagcgattctcccacctcagcctcccaggtagctgggactacaggcgtgcgccaccatgggcggctaatttttgtatttgtagtggagacggggtttcaccatgttggccaggctggtcttaaaactcctgacctcaagtgatctgcccgcctcggcctcccaaagtgctgggattacaggcgtgagccaccgcgcctggcctcagtctgtaatttcttaagaaaaacatttcaaatgcagaatttattttattcactaccataagtcatcactgatatatgaatagtccctatgaaatcctttgttattcctctagtcagacaaatgctcgtttggtttaatctgacttaacaaattaacgagatgaggaagaaaattccaggccttgggacattcactgaagcccaaccaggcaccaagagacacatgtccttctagtccttctaatgaagagtggaggaagatcaacacgatccttatttacacttcaagtcattatgactctgcagctgggtgaccttgggcaagtcccttcccttctcagaccctgagtctcttctttcctaaaataagtgtgatagcttcctacctgccctgtctagctcacaggattatggtctggctccaagacatcacggctatcatttattaagtccctcctgtatgcaaagtccctcttcctgaccaccctgcctccttccaggagggaactggatgctgcttgttttcaggacaggacagtgaggctggggaggtggcggaggatgctgcccagggagaggaggaagtagggggctggggctggctgggctgacgcagctgtgatgtcagacacccgccacaggcagccggcccagtgctaactgtgcgctctctgctggtctggcctggcgcctgccccctcctccccccgccaccccccttaaccccttcccggcctcctcttcccagacggccatcccccaggcccagccttgcccacaagattcccagatttcacaactggggctggcgctgaatcatgtacagtaagtccggggagagaaactcccggctgcctggcgtccccgggacaggacagctgccaagcctgccctccctcccaggggcccaccggcagccagggatcatcccctctgggcccctgaccagctagggggtgatgggcgagacacacaacctcccttggctgtgccagggatcaagggaccgtgtggtttccagggaaccttcaggctctggagggataggggcaggccagggtggtgggagaggggtcgaagtggccttgtattcaaccacggcctgccaccaaatcactggtgacctggagcagtccctaactgtaactctaagttacggtttccttatctggaaagtggggataatcacagccctgacctcacaggtggctggaaggactctgagaagatctgtgtacagtgcttaccgcaggaagcgcccaataaatattattattattgttgtgacgtcgagctggtcatgacacgctttaagaccctggagaaatcatccagttctttggaggacgtctcccctgaaacacccacccctcccgctgtgatacaaattacatcttatcttttcaaaacttcttcagtacatcagcaaacatttattgagcaccactgtgttccgtgcctgctaccaggtcctggagatacagcagtggacaaaacagaaagacatttaaaagccctctgttctcgtggagcctgtattctagctgaggagaatcagacatttgaggtcatttcagtaagtgagcagggctccaaaggaaataaagcagaaggtgcgatggagagagcctgggaggtcccctctgatggggtgacatttgaacagaagccccaacaaagaggagaagcccacgtgcaaaggcagggggtgggaaacggtgctccaggcagagggaaccgcaggtgctaaggccaggctgtgggatcctcttgttgaaggctcagcaagggcagtgtggctggagcagagggagtgagtgaggggcagaggggtgggaggtgagcttagtggggcccccaccctggagcagctctcctaatgccaggctcttcctgaaagtggccacctggtgcctgacttctacctgtaggggcagccacctgacaagggcccagcttcttcccatccggggtcccaaggccccggagctgcctgctcacagtagaaagcctcattcccaggaaccccacggagggccaggctccccgcccctgccctttgctcaggctgccgctgggactcccctgcccctcccggaggatgtgaccctccctgcctctcagccgctcagagtgtgggcatctgcatctcggagtctcagtgtgcccacctgtgagatgggcaccatgttgcctcagggagggagtaaaaggaggaagggagctctggccttagtatctgtcccctgaaccctggaagaaggaaaacatcggggctcactggggaccaggctgtgcgttcatagctggacggagagctcaggcgtgtgtatgtgcgtgtgtgcatgtgtgtgcatctgcgtgtgtgtgcatgtgtgtgtgtgcacgtatgggg

SEQ ID NO: 68900 - DNA, 1587 bp, Homo sapiens
cttccaatctccccatggccggctcattctcatctttcttggctcaaatgttacctccccaacctagacagcaccgctgccacctcttcaccccgtcttactcttcttcaagcacttctggaggtatcttgctatttatcttgtttatatctttttcagctccatgagggcaggggattttgtctgtttcattcacaatgtgttcccagagctcagcacagtgtcaggcacacactaggtgagtaagaaacaattgcttcctctacctcttcccctgctagccccaagttcagctaactggctgtgtgaccctggggattgcttttcacctctctggtcccttattctcccttgtggacaaaggatggcctgggcatgagtttcttcaaggactcgggtagcagtgaaatccctgggaccctagcctcagtacctccccaggcaatggggtagagagcaagaaggcaggtgagcaaggaccagcctccgccacgcagacaccctctttccggcttctctgtcctcctactttgccctgggtttgtggacttactctgggcagatctccacgaccaaccaccccctcccttggcatgtctgtcagcacccttgggggaaagaatttggaaaggggagggagaaaaagaaagcagggtgcgaggggctggttcccacacctgtgtaaataatttgtcatcttaaaatgctcaagtatgctcacctttaatgcctggttcttgggcttattttccttggcaaggcccccacgggagtggaatttcggccaaagggagcccagttgtcatcttctaaacatgttcccaggccgggggccggggagggctctggctgatgctccacttccgtccccagaagtgctggaacgttcctgggatctagggagctgactccagtcctggaagctgtcccagaattctggaatgttggaattcaaacggcctcctgcccattttccggaggaggaacataagacccagagaggggaaggggttggcctgaggtcatacaatgtgcagagacgagctagagtttgctgggagaaggtgcgggtgtgtggacaagtcagcatctatctcccattttcaggtaacagcacctcgacttcctactgaagaaccccctcttcccttttctcagtccatgaggctgggggtgcccagaggcctctgtctccaggggtggacatgtgaccgggtcttgctctagtgattggtccagggatgggcacatgactgagcctgcccaatgaaacttgatcttgggacttcagggttggccatgatttgtgaaggagatgccattttccattggatggacagtgagcaagtgaacgcttagagaagaagaggacaaaacaagggaaaagcctgcctgacaggaagcagcacagagctggacaggctttgaactcctggatcccactgtacctgaaattaggcaccttcaactttctagttatgtgagccactgtctttcccatttttggctgaaaacagttgggactggctttctgtcccttgcatacagaaggtgctgactgacccctgccccatggaagaagatact

SEQ ID NO: 68901 - DNA, 924 bp, Homo sapiens
aggaactcccagaattccacctcttctctcacctccacggtccccaccctggtccagaccctgcatggcttacctggactattgtggtctcctcctccctggtttcctggcttctgtcctgaatcctccacctccaatccattccccacatgcagccagagagatcccgtgagaatctaagtcagatctcgtcccttctctgcctggaaacttcccacagctctcaccttgcttagaggaaaagccaaagtccttcccgtggctcatccactgtgggacatgccccaggtcctctctgctctctgttcctcctccccaaggcctcatccctacgacagtctccttgttgttgctccgacactccaggctccacctcagaacctcgcatctgccgttctggtttcctggagcacccattaccccacacggcccgctgctcacttcctcacctcctccaggcctctgctcaaatagcacctgctagggaagcttccccctgcttcccaggttttgctggactccaaagctcttttcttcccagaggcaaagcccttggctggggtcctgggcccagcccggtgactcaggcggagaagatgctcccaggcctcccgctggatttggggcccagggtcagccatgggggtaggcggtacctaggctgtacctggcgcagaggcctctgcctgcccctgccgtgggaggcagccctgccctgcacacacgggcttccaggctgcgggtgggaaagccccacatcctcctctgcttacctgactccagctgactcagacccccagccctggccagaggggagccgcagctgctccgccccttgatgggaagcagagctgtggctgtgagggcctggctgggccagacactgactcacctctctctatcccgcccctgcgctgggagcca

SEQ ID NO: 68902 - DNA, 475 bp, Homo sapiens
gatgggggatgaggtgggggggcccttttctctggagtgggaccctcccttggaagccaaactgaatggtcaaccattactctgctgggctgtcactaaccactcaaaaccagtggccacttgccaatcttctgtctttgtccagggcagaattgaatcttgttcaaataaactcaaaggccaggtagttcactgaagcaatgactggagaatttggcactctccagcctgccagccctacccaaacatcctcaaggtatctgcataaccagctcattgccctgcctactccaaccagagaatgtgggaagaagcccaggacctctgtgcggtggtggaggcccgcttggctgctcctgacctgtgtctctggcctcttcagcctttcctccaaattccactctgtgcacaagctgctggtcacctccctgcacatgctgtgtggcttctggcctcgggacctctgcacatgcag

SEQ ID NO: 68903 - DNA, 1325 bp, Homo sapiens
aattaggtaaataaaccatggtgcattcatgccatggaatactatgtagcagatcaaaatgataaggcaaatctctacacacatagttaggcggaacaaaaaaagcgggctgcaaaaccacatttgcaatctgtttcgaatcaggtggcacaaaagaaatccagggcccaggccgctagcgcttgccatcattcatcaccccttctccccacttttgaatggggcggcaatgtgcccaagtgaaataagacctccccagcctcccctgaaaccacgcgggtgcaatgtagtagccatgagacccagagcgcacacactttgtcccttccctgccctcttgccttgctgagaagcaaccctcttgagccaggagtttgaaagtcacataccaacatgggagaccaggaagctggtcattggtgatgtccctgaacaagcctacaagcccagacttgctcacctctagacttctttttacacaagagaagtgaactcccattgggtgaaaccctggtgtttgttattttttacttgcagccaagtgcaatttcagaggcagcaaactcactggggaggaggacggttgagtcttctgcaacagaactgtattcaagtgtcatttacatagttaagacttttctaaaataaatcaatacatcaaataaagcctgtctggctagagtctgtgggactcttgctgtttctttcaaaaagtgtttgttgattggctcaggtccctctcaacccaggcaaaaatgccaaggggaagatggagggacatcgaggggtttccctgtgacctgctgaaggagaggttggaatgctgttttcttaggaaaagctccattttcctggtaagaggactagcgcctgagtctctcactccagggaggctcaggggtcagtccaaccagcccaacccgggctgcccctatcataattggtgaccctctagcctagacatgctagcctccaggcagtgacctggctgtctctcccacctgtttgtcctcttcccagaaggaggatgctccctttatctcaggccaaagtacccccctcaccctcccagggaaggggaggaatgccacctgtcatcacgggatgggtgagtcacctcttactggctggaggccatagccagcccaacctctctcttttgccccctagctctcccctgtgggtggggaacgatgggaatatcaccctaaaaatcgtgacagcaacagctgccatctctgtggcatggaacctgtcactggaagcttgagtgcacagccctgggttccaagcccagctctcatgttctaacctggtgatctggg

SEQ ID NO: 68904 - DNA, 971 bp, Homo sapiens
cgtttttacactcgtaccccagcccgaccctgagccaggcacgtagtaggcgctcggtctgcttctacatcctcccagctccctgggtcctgagggggcgaggaaagatgagtgcaaaccccccaaggtacagactgacttatccccagatccccacaggccgccagccaggcccccagcggccccggaatgacagcgtcgtctcttcctcctcctgcttttatgagctgtgaaggaggcttgtctcgcgttgcacaattgccccttaattgctatttcctctcagttatgaattatgtcatggatatggccgctcacgttattaaacttccacacaggccttatcgtctggagtccggccagcaacccagcctgacctactttcccaccggatttcaaaaccgcctcccttgtcctctcgttggacttttcctaaggagagtctactgtgcccaaaaacttgacgctaaaaataaaaactagaacggagaaggggggccacagctggccccaccgaaggcctgaggctcggagaagtccctggtgactggggccaaacccctcccttcctagaagcttcctcagaaaacctgtccttgcgatgcagggttcccagcaggacaggcagggacaccagccatagtcccaggtcccctgcgtgatcagatcccactctcgcctttctcggtcatggccgggatgactgactttggaggcaggcaaacctgggttcaaaccttagctctgacactgactagcccattcattcattcattcattcactccaggtattgactgtctcctgagtgctggccctgtgctgggcagtggggaaatatctgagaacgaggcagacacagtcgctgccctcatagaacttttaatctagtaggcagagatgggcacaaaacacaaattctgaaattagggcaatgaagaaaataagacagtgcggtaggtttgagaacagc

SEQ ID NO: 68905 - DNA, 1947 bp, Homo sapiens
ttgcaaggcagcaatggattgatgctgagttgcatctcggggactctccacttcaccacagtctccaccattccctactgcatcccacctgactgccttcaatcatctgtgtgtcttgcttgggtgttcgtagcctctgaactcactacacaacagaaggactcagggaacctttgaagttggatttctgctgttagccacctttgtactgttctcattttgcatagtggaaatgtgtatttagaggagggatgtggcttcaggcatgattaagagcatgattaagttggtccacctgggccgggcgcggtggctcaggcctgcaattccaatgctttggaaggctaaggtgggaggaatgcctgaggccaggagttcaagaccagcctgggtgacagagcgagaccctgcctctaaaaaagaaaaaagaaagaaagaaaaagagcatggagctagaagctagagaggcttgagcaacctgtgaagagcgacttccccgctcagtgcctcagtttcctcctctgccacatggggataataagagctgtcacacatcatgttagttgcagagatttgtgccattctgcaaaattcttagcccggggcccagtgcagtgtcggtgccagggaaacagtggtgatgacaaaaccctccctttacatctacggcttttagttctcaggcttctaagggaggaaagaaaaaggaagaaacgaagggaggaggggtgcagagcggagcatttgcttttacctttgatctccttttgccaaaaaggaggggagaaagtaaataaacaggcctggcctcctttgattccagcgcctgcccggcacagagctccagagctgataagaaccagccaagttctaactgggcaactccaccctcctgaccaggccttcccttggcatttggaatccaggacgccaaagccctcccctgcaccctactgtcagcatgcaccgttaatgcccttctcgccttcccaaccatgggagaaaagatggagagaacttccccactgtggaaccccacacaaaacaattgggcgggtttggagacaagaaaagggtcttagaaagcggcttccgaatacattagaaacccagtcccccatcccaggaagaagcccccacactggggacttgcaggaaaacaaaatgctcagggatttgtcttggcaatgaattaagcagaaggctggtgaagttctcggcgcagagcagaaccacccctcccaccccccagtggttggtggagagaagccgtgtggcacggtgggtaatggtatagctttgaacccattcgtttatggttgtgtgactttgggcaagtgactcggccctgtcgaacttcagtttctcatcagccctggcactgggctcatgggattgttaaaggttaactgaggttgtgcccatcgggtgcctggcgcatacatagcaggtgcttgtgcttggacactgtgattataaaatggcttagggagtcccaggatggcctcaggaggagagacaaaaaaaaaaaaatgctcaggcctcatgtccggaaagatgaaagaggatcagtttgaaatctctaaaggcaccaagggccatgcagtggccaaggtcaggcaccgggtctgcttgaagttgacaggaggtaaattcaggacaaagtttagcatacacagaagacattccttccacattccccccaggtaggccctagctgatggctctaagagcttccccaggacctctgctaaatagctcagagctaaggcagagggcctgggagaagaggcagaggtgaggggtccctcccacccctgcctcctcctggctgtgtgacctgtgtgcctggcctcagtttctccacctgtaaaatgaggccataataacaccaaccctgtaggttttgaggatagaacacatggcattctgctggtgctcaatgaa

SEQ ID NO: 68906 - DNA, 1597 bp, Homo sapiens
agctccttcctcatcttcaccaatacgatttgtcagtcactctcaatgcccaagttcctctttttcaagcacgttaacaatacgaattgctgagagtttttgagcacttgctatgtgcctgatactttcattcatttattcattcagcaagtagcctgaacacatcttgtgtgcattggagatcttcagaaataacagacaaaggtccttgcactccctgctgggcttaacatcttgcgggtggggagtggagacgatcataaagaaaccggcaaagtctacaaactattctttgtacacataaactccctgaatcacaataataaccttatgaaaggttttcccctatttttcaggtgagaaaaaccaaggctcagagagaaggacttgcctaaagtcacacagctatgaaatgtccgaactgggattcaaacccacacctgtcagactccagagcctgtgctccttctctccccggcagcctgtctactaagatgttggcccagctccacatacagtcatctgcctcgccagcagcacatttcagaagctccacaatgtctgaggtcgggggtgtcggtgcccaggggcacagctcactcccacaaggccccgggcagggtgagctctgccctcccttccagcagcctctgaccaggaaggccaagtacacggtcagtctctggccagagcctgcgggaacaggacgtcctggtcctcctgccctggtggggcccagcaagctatttttgggcacgtttattgatgggacacgggtgcccagctggactcctgattcaagaggaaggccccaggctggcccagggtggttctgcttctccaggcccttggctgccttgggacagcaaccatctgctacaccccatgtcaagggtgtagcctgagctggctggctccaggaagagcaagggtccccacgagtgtggatagattttgggggggggtcacacagactacaactatttcccaaaattctggagcctgattaattcataggcaggcagaacacagaatgagtatgacaacaggttttgaggttagacttgagttcaaacccccgctgtgtcctctgctagcaaatttaccgtgggcaagccaggccaactcctggaagctccgtttccctgcctgtgaaataataacaatccttactcacggggagggaatgaagcttgaattagatagcccccacagctcaaagcctggcatacagtaagtactcaataatgaataataactttgcaaataatgattgacagctgacatttattgggagtttagcaggtgtgaggcagtgggctaaattattgacattttaaaaaatctcacttcaccccccccaacgattcctgggggaaggtgaatgatgcacttacaggtgccattatcgttcccttttacagataagaaaacagttcacaaagaggaatgatttgcccgatatcacccagcagatgtgtggcagaaaaacccgctggatgcgtggcagaaaaacccgcctttgaactccggccctaagagaggacagggccaggctgcagagctgtgcctcacgccctcctttccctcccacaag

SEQ ID NO: 68907 - DNA, 3913 bp, Homo sapiens
attgggaagaacttgttgtactatttccaccgtgggatatggcatatgatatgatacaacacaacagacgtcaatcacttcaacaacacagagaacagtgaaatggtgagaaagtggtgatctgtgagcagttgttacctttgtttttgttgtaacttatttaactggaagttcgtgcaatttaattcttagcgatggctgtgtgtgacaactagcttgcagaattcgtgagccagtaggaggtggtgccagcaaccccactggttgaaagcgacacgagggcaaggatgtttccacattgttcccggccgtttcctggggcctggaacagtagaaggagctcagggtaggtgttcaggccgcatttgttgactattttatagtgcacctgtttgcatcagagagcacaaactgtttgcctcaacttgacttcatgggctgagtccagcccacaagcaggtgtcatttggctctcagaatgttttggacatttttacaaaatttattgccaacgtttaaaagtcaagggttttgttttttttttttatgaaatctcacataaacctagatgtgtagcttctcctggaaaatcagaagctctggacccgactcccttatgacaacagaggctggagcggaggggcgcgcagccagccccttcagactgggcatgggctcgccagtttccgcaggccccacccctacccgcagtctcacaccacgcccacttcattcgttcacgtaacctgctgggcctgcggatatttaagttgcaactgccatcttcgcctccatcttagcacttgtcacagtgtgggcccgtcacagtgtccctgccagacagtgagcaccttggggacaggctctgtgagggagccccccggggtccccactcctggtacatagtaggtccacaggttctggaactagatgaaatgtttgttgtccagtgaatgccagcccccacccagctatccgaattggggcacgcactaaactcaagccccgaccggaatgtgacaaagaggttggccgaggccagggtttaaaaataccccagggctggtcagctgcgaggtgcttggaggtgttgaaacaaccaggccaacgctggctggaggccagtgcacccactttgctctgtgtgatgtgggctaatgggaggggtcactagcaggtcctggcgtgcgggggtggggagtgggaggagtaggtgcagccccctcccccacagccctgcttgggaaaggtcagagatgtttataaacagcatggggtgacatgacataatttcacataaagggttaccaggcagggcatggacacagggcggcctcctctgatgtttccacgccgcggtctcctggcatcaagaaagccgggatgctgctagcactgtggtctccccacggccttcagaaccatggcccagcccgctggagccaggcttaaaaataacgctcccagcacagtctcctgggggacagccagcatgggggctggacagggaaggaacaagctctgctggagcgcccactggatgccaggcacgtcagaggcatgagctcatggagctgcacacaggccttgggagggagggactgtcatccagatggggaaactgaggctcaggagtggtgccactggctcagtgtttcccagcaagtggcaatgctgccatgccaatccatgagacaagagtgacaagaaggcaggctctgtgtcacgccgctgttcccgagtccctggcacagcgtttggccttagcaagcctcaggaggcagctcccatggaacttgtccaggatcgaaacccgctctcccaccacagcttgtctccgtcaagggcagcccatccttccagatgctcagggcggataccagggcatcatcctcaactcctctttttctctcacccccacacctggtgcttgctgctccatccaaacacagccgcccctccctgccctggcccagccccacctctctcacctgacccctgcaggagcctccttcctggtctcctgcttccaccctcaccctaacagtcttgcctccatcagtgtccaaggtaacacactagactcgtatcatccatcacctgaatgtattaggatgcaacagtgaatagaacacacatgtccccgtcagcgtggagctgacattacggaatgggggaggaagggggcatcagccttcacaggtaaattaaatagatcatgtttccaatggcagtgagtactaaggagaaaaataagccggggaaggaggaggggaacatcagagaggaataaatctaaatagggagtgggggtgcagggcaggaaaggtctcactgagcaaatatttgagtacggcttgaaagagatgagggattgggcaatggggatttccagaggaagggcattcttggtagaggaaacagcaagtgcaaaggcccgaggccggaccgtgcctggcatgagcgaggatggcagagaagaggccagtgtggctgcagcagaatgagtgaggggcagcgtgggaggaagtgagttcagaggggtgaagggcagcgcccatagaaccttgcacgtcgaaggaaagacttagctttcctctggggtaggtgagagccatggagggttctgaacagaagagggcacagtctgacttcgtttctgaaagaatctctccagctgggtgtagaggatgggctgtcaggagccagggggaaggggacagtcagggtgactgcagtggttcatgcagaagagaatggtgaatgggcccaaggggtggctgtggaggtgaagaggcggggagaacggatcttggactcctgatctgttctaaggtggagctgctggggcatatgctgctggactagatgcgatcaatagaaatcaagaagccaaggatgtttgggtttctgctaacacaggaacagaaaaccaaacactgcatgttctcacttataagtgggagctgaacgatgagaacacatggacacagggaggggaacaacactggggcctgttgtgggggtggggagggagagcatcatgataaatagcgaatgcttgccgagcttaatagctaggggatgggttgatgggtgcagcaaaccgcgatggcacatgttcacctatgtgacaaacctgcacggcctgcatatgtaccccggaacttaaaatctaaaaataaaagccaaggatggctccaaggttccagatagagcagccggaaggatggagcttctgccttacagagatgaccaagcaccaagctgggctctgggaaggatgggagtgaggcggcggcccttccccggggggcaccggatcctgtgtgaaggtcatcctcaatacagtgggctttgctttatgaaattccctgctgattcacatcaggattcttctccagctcctccttcccatccctgtccctgagtcccttgtaaattttgcaggagccaccaggtccctcctcccctcgattcctgaagagcaacaaacgcttctatagcactcatgtgcctggcaggatcctagccctttacttaaactttgtgaactcatctgatcatcacagcagttccaggagctggggactcttattacacttatttcataaatggagaaaaaaggcccagagaggttaagtcacttgtccaggatcacacagctccaagtggtagaggcaggatatgatcccaggcagtcaggcctaggcctcatgctgttaaccactacacttactatctcacccttggctatgaggagtcaaactgggcttgagagattgggtgaggggagagggcttcagccaccccttccacataaaagaaacagttgccgttttctgagtacctctcctgtgcctagttctatacccaggcttcctctattctgcatatcaacagaaggggtatc

SEQ ID NO: 68908 - DNA, 1311 bp, Homo sapiens
aagactcagtctcaaaaaagaaaaaaaaaaagtaaataaataaataaataaatgaaaaagaaaaaagaaagaggttaagtaacttgtgcaaagtcacaagtaatttgcaaagccaggattcaaactcaggcagtctggctccagagtccatggtcttaaatcacaacaccctgcaggagagggttggcaatgtcatcccaggcacagagtctggcacacggggagcacttattggattgtgaaaacctagcaaaccacgaacagacaagcagggctttcctattctgaaccacactgaggtctcccttaagaattcacttatttccatttcttcctgtgagtcccacttgacagagaagaagctgcccacagaccattttcccccttcttccccctccctctaggaaaattctgggcagcatccaccaggtcacagctgccagccagaggactggctagagcagagtttggccaggttatcgggtttcgtggtcagccaccttcgcccctgaccagagctgtctttccaaaacagaacattcagtcactgcctgtccctgcgcccagctgtccttgtgccccgaccttgctctctgcccaccggcccagggtttttcctcgtattcttgtctcttactgatatcttgcaaagatgaccggagcagaggaaagaaagtcagggagcagcctgagagaaacgatgaggagacagagacagagaaagaagagacagagaaagaggtgacagatggacagaggagaaagaggagacaagaaagacagagaaagaggagacagaggcgacagacggacagagaaagacagagaaagaagagacagaaagacagagaaagaggagacagagatggagagacagagctggagagaaagacagagacaggagggccctgcaggtgccatctgccctccaaagctgtctcgagggcagggtttgtaaccttgcatctccacccaatgcatcttgacctcccaaggctgcagcatcttctcccaacagcccccatcctgccaccagcccagcaggtcctaagagacctcgttttccttcccccctcacctccatgcacaatccctcacctaactaactcctccttatctcccttcctccaggaagccctccttgcccccacagcccctctatgtaccctgattacacctccctcatactttgtggttcattgataggttcgcctcctccactggaatggcagctcctcgagggcagggtctggatcggtctggctcgccctgcatccctgcactcagcccagtgcctgactcatagtaggt

SEQ ID NO: 68909 - DNA, 698 bp, Homo sapiens
tctgggtttcttagttgcgagggacagaatgcacccctctggctagtttacacagaaaaggagtttatcaaaggttattaggtggttcataggaccctcaggggagttcctgagtcaggactgggggcaacacagctaggaatgaggctggaatttgatggagagctgccccagtgagccccacttctactcaaggacgcccccactgcatcctccagacccaggttctctttcccacctcttttgtcctgttgttctcttttaattggaagcctctcacaggggagcccacttcacactcccgcacccgggaggctcagggaggctaggaaagcaagttttctggcaattcctttgagagatgtgatctactaaggtaggaaattccctgaagggtgaccgcagggtgtgggccagaaagtagggcaaaggtcagctccttcggcaaagacggctgggcttgtgggaagaatccaaaaaggtttctagcaacaccttctccatttctcctccactgagggcaagagaacagcagagagaagtaaatgacaaaagtgtcattcccatttgtgtcacccttggggttcacccaactctgcagaggctaagttagagtggggaccttgagatctgtcctcgcttcaccaacctgaggccagcaagccaacgcggatgtctctatctgatggatgtgtgtc

SEQ ID NO: 68910 - DNA, 2756 bp, Homo sapiens
ttcaaataatagtaataagcaaaggtattttaaaatgaaactttgagtcaagttttattttcgtgaaaaatgaaaaaacagacaacagtaggatctcaatttaaatacgcgagctgagctgaattcccgtgcacatcttagagtggttctctctgggtcacctttttagttttcttctttgtacttttctgtgtctcctatatttaaaataagaagaataaaaaaagacgagaaaaaaagactaccgaatatagaccatttaccacgggcaagatcccattctgggtgctttacaaacatgcttttgcttcatccccatgaccttctcattccttactttcatttgacagatgaggaaactgaggctcagagcacaaagtcaccggccagggtcacccggccggatttgacccgcgttgatcagatcctaaagtctgtctctaaactagaaagctcaagtacccttggtatgtccttcaaggaaacgactttgctttgaaaatcagggggaaaaaataaacaaaccaaacaagaaatatgacatttttttaaaccacttatttaagctctgatgggacctgagaccagccgagcttggggagggtttctcggcagggcactgtttgtgttgtgggtggggctgtcctgcctggcagtcccccatggcacatccctgcctgctcgtcagccatgttcccctgtcactgtgacactcagatcccccatctctgccagcctcccctccttgaagactgctggcctagacactgcagtgacactgaattcctgctggggcctcgctcctgttgtcctgtgagccactgtgggttgacaccccctgcagacctgagaagcaggtgcctcaatggctttgttttacaaggagactcagagagggctgggtgacttgtcacacagccaagacttggccccatgcaatactgcctaccctctgggaccaagtcttttgtggttgtggggtcgaagcaggggaagggaaaggcgagtggcctgcagccccaggctcagagggaaggcagccacaaagcgcggtccactctccagccagctgagctaggccgggagaagtgaagctttgctgccaggctgggtaggccaggccgggcggcgggcaggcggccactacagtggggaccgggaagtcgagcactccctctcgcctgcccggcagtgtcccatggccgcccgccaggccccgcctgacgtcagggtctgaccagggacataatgtgctggcgtggggacaagggctgactgcagagagacagagccgcaaggcggggcggccaggggaggcgggcaggcagaggaggagagagagaaagggagagagagaaacaggcagagtgagagagagagagcgagagacaggggatgggaaagagaaacacaaacagatggagagagaaggaaacagagggagggagagagaccgagaaagtgaaaaagagaaacagacagaaaagagacacagagaaggagaaaaacacaactaggaagatgttcagggaaagctggagagacagcaagagccagagagacagcaagagccagagagaggaaagtggaggtgctgggggggaaatgacagagagaggaggcctagcaggggctgtgcggttaagggcaggtgcttgggagaccccagacctgggctggggctttgactctgcccctgtgagctgttgactcacctctgagagcctccactccttacctggtgcaatgggagtctgagtaacagggcttcgctcatctggggaggggacagagcccctttccatgatgcgagagggagaacaggagtcagatctgtgtaaagtactttggcagagccctgcatgtagtaagtgctcaataaattggaggtgaaaattgagaaagagttgggaagtgggaaatggaatgccagagtgtgagtggatgggggtcgcccccatggacagaaactctcgctccacagcactcccttccctgtagccttggaacaacccccttcctgtccctgcatggcttcagcttgaggccaccagcacagaccttggcctggccttgcctgtcttggggcccaaccccctgcttatgggttcaagaaggccatgatcccaaggccatcgcgtcaccaaagccaagcaaggccagaccctggtcacttctggctttccagcctcgtcacccctcagccgcttaattgttaaatggcctggcagggctgagggactgagccagccgcctgtctgggtgggggcagccgttcccgcatgtcctccattagtgcaggggcacacacgccagaggcctcaggtagcacttgctgaggtgaggatgcaaagatccctttctctagctcccactattcccagaagccttcatcagcctcagcctcggcctcaaattctcactgtgtgccaggcatgcttctgagcgcttcacaggattaatctacttaatcctcctgacagccccaagagatgaagtgctaacattatctcattttacagatgaagacgctgaggctcagagagctggagtcactggtccaagcccacctgctaaggagtggcagggccaggcagccacttaaccacagagcagctacgattccctgcacaacttgagcagcagcctgtgccgggtggcaacacaagcgcccggatcatctgaccagggagcagtccttggctgggagtgattttgcccccacaggagatattaggctatatgtggggacattt

SEQ ID NO: 68911 - DNA, 3432 bp, Homo sapiens
aattttaaaaattaaaagacccagtgtgtattctagctgacattttatatcagattgtactgcctggggacatacaaatgtagtcataataaaatgtagtaaaccaaatttggaaaaaattaagaaataaaagaggagtttcttttcctctcatgtgaatgaagtccagatgtaggcagtttgggatggatttggtaactctatgaagctctcagtatctcagcttcttcctggacaccagtctgccatctctaggtgtgggccccactttctcatgatccaagatgaaggccactgcaccggccttcacgtctgccttccagaatgacaggatggagaaggaaggatgatgagtaaaaggcaggcatcaactaaatctctaggaaacagtccagaaacctgtcacactactaatttcaaccccttggccagagctcaggcacatggctgcacctagctgcaagggaagctaggaaggtctgtgtttattctgcacagccatgaactcagctaaaagccaatcaaatatttgtaaataaacaaaacaattttagatagtgatgtatcctgggaaagaacaaaacagggtaatctcttggacaatgagggtgggaaaatgcctccctcaggaggcagcacagctgagatataaatgataataaggcctgagggacaagcattccaaacacgaggaacagaaaagcaagctgccttgaggcagaaacaagcctggtattgtaaagaaacagaaaggccagcatggctggaactgggacagggatgcagtgggaggcgggcacagctggtaggaaaggaggtcagagagttcagcaggttagatcctgggagaaacgggaaggccaagggaaaaatctggattttttttttctcctctaagtacagtgaggcaatattagagggttgggctgatatgctatcactaatggagagaatgccgagctcccctggctcctggaggatttgccataacccttctgagcacttcattcactcaccaattcattcctctcataaatattcattgctgacctgctctgtgccaggtactgacttacggcagcagaaatgactcctccagtccccaccctcaggaaaagaagagacagactgagcaaacacaaaagcctataaatacagctcccagatggctgccagtggtttggagggaaggtaaatggggccacaagaggacctgagttcacctggggatgggagggggtttcccactggtggtgatgtttgagctgaaattggaatgataaggacactttgtcttgtggtctggagacggagagaacattccaggtagagggaacagtttgtgcaaagggctggaggcaggaagagagctgcatatatccagaaactcaccaggctctggcctggcaagagttgagaagggtgagagagaaggtgtctcaagatggccctggagaggtgagcagaagtcagatcacagaaagcctggaaggggccaggcgtggggtctcacgcctataatcccagcactttgggaggccgaggtgggcgaatcacttgagatcaggagttcaaggccagactggctaacatggtgaaacctcgtgtccactaaaaatacaaaaattagctaagtgtggtggcacatgcctataatcccagacacttgggaggctgaggcaggagaattgtttgaacccaggatggggaggctgcagtgagccgagatcacgccactgcactccagcctgggcgacacagacagactccatctctaaataaataaataaataaataaataaataaataaatgaaagtctggaaggagggtggggctctcgtgttctgggaggatgatttatgaagaactttgaccccaaatccctgggaggggcctgtggccaatcccagacaagcagggcctggctctccttggacagtgtttacaagctcgctgatgactcggccttctgccttcctgcggtttgctaatcactgggtgctatgtgccgggatgttctcctgctcctcagccctgagagcacactctgactcatgcctcctaccccagccaccccctcccatcaccaccaaggctgccatctccccccgtgacccccaaggccccacagaatcacacgaccctggcaccaggaagtgcacctgtgtctccaatcagaactgcccatttcacagaggaagaaactaaggtcccatgagaaaagcctttccccaagtctcaccccaagacaggaatagcaccagggcccggtcccaggtctcctaacacctggtcctaatttttcccactgtttaatgacagaagagagaaaatgagaagaaaggaagcaggaagaggtggaggagaaagcaaggagggagtgaggagagggagggaaggggagctggaaaagcagtgttcaaatccccaactcctaagtgagccctgggaggggaggggagaggattcgtgtttgttgggcacccactacacgccaggtgcctcgactgtgtcagctccttcagcagaatcctcacaggagaatggatacaattacttactctaaatgctttggaaaacagagaagctgtgcaacccatctaccatcacacagcagttacctggcagagaggagaatggaacccaggtctggctgcaattcctaaccctaagcacactccaggccccaggctgcctccagcccagcctctgctccgctcctctttttgaggcagttgcagcctccacttccagagccgatcagcagaggctttcccccggctgcccacaagccagcagacggatttcctttggcccacagggcattttaattaaatttgagctaatgttcataaatcaagagatttcacataaaaattcagatttctacctcccttaaaacactgtaagatttcactgggctaaatccacattcccacctggcaaccgtcagctggggacaggggtatttgaagtggacacaccagttcccccacactccccaactctccctgctgcctccctggtcctgaggctgaatgtcgggtgccattcatcaaaatgcatacactgttgttttctgagagcagggacgtatttctctgtaactgtatctctttcaaaaagaagaaaacaagtgctaatccaaaaggggtcaagtttcatgaaaaatgggggaatgtctaattctttgcggaaccaagagatactccttcatgcttattatgcagacgaagtgtgcctgagccctcacaccactgcttagcttcctaaaatatttttttttgtgtgtatctgaaattctaatttaactgggcatcctgtattttatctggtaaccctctctagactagtcaccttgctgggtgagtgatcttgattgagcaagtcatttaagttttctgggtttcaggttgttcctcatagacagg

SEQ ID NO: 68912 - DNA, 3808 bp, Homo sapiens
ggcaatcagcagccctcggggctgctctgtctatggagtagccattcttttattcctttattttcttaataaacttgctcttacttcacacacaaaaaaataataaataaaacttacttttggccgggtgtagtgctcacacctgtaaccccggcactttgggaggccacgacaggtggatcacttgaggtcgggagttcaaaaccagcctggccaacatggtctctactaaaaatacaaaaattagccgtgcttggtggtgcgcacctgtaatgacagctactagcaggggctgaggcaagagaattgcttgaacctgggaggtggaggttgcagtgagctgagatggcgccactgcactccatcctgggcaacagagcgagactccatctaaaaaaaaataaaataaagtatatgttttaaaaattcagaaggtttggctacatggctcccacatttttacaggaccatgatggctgcagtgagttccaggtgcctccatagataaagcgtgtgtgcccgagcctgtcggtcccctgagactgcctccctctgtagcatcagccagccagtccccgcaggcacctgagcaatgactcaggcatgaaggggattctttggaagttcctggtgagaaagagaaccgggtgaaagtgtggcctgcaggagtggccaatgaggagcaaagaggagggtgacacccgcctgtgtcagctcctgctcatcatctccccagtgggagcctcctgtgcactttccacaggaccgagtgagccactcttgattcacccttcctctgcccaggcctgcagtgggcgggtgcccaccgtggtacacagcccatgaagcagccaccctctgccactgaggcttggcagtctgaatggatgccagcctatgagattagaaggaaaatgggcaggatgtgaaaaatcagaagctgcctgactactcctgggaaattgttcctgagaccatgcccttcctgcgtctacttgtagcatcgctctttcactgacaagcatgtatcgagtactaggcaagtccaaaggaggtcttgaagtagatacagcaggacaggcaagaggctggttccatggccagctgctgtttgtacctgaccaatgttcctcccccatgttccggtaacagcacccttccaccactatcactccatgtgcctccccaaccagaggaggtggatgaatgaggcctgggaagtcagcatattccatccccccggccccagggattggtctgagatgggtatgtgacccaagtctggccaatcacagtcaacccctagacatgtgctgaggctacacagaaagtcagcttctgctcacttggcttgtcgatctggcagaatggaagctgggggatactggggactatttttgccaccacataaggtgaccctaactgacacggaggaaaacagaaccaagaagtggaaacagcatgattcctaaacaacagatgcacacctggatccagccattcctgaagctgaaggtcttttcatttaaatgaaccaaaacattcacagaaacacacactattttttttcttaagtcactttgagttgggtttgtttctgtcactttcaaccaaaagaccctgactatacaagtggatgtatagctgtttccaggctggaaaacaaacagctatggcaaaagcagaccatgagacatccatgtaaaatctgggagttgagggctgggtgcagtggctcacacctgtaatcccagcactttgggagtctgaggcaggtggatcggttgaggtcaggagttcaaggccagcctgggcaacatggcaaaaccctgtctctactaaaaacacagaaatttgctgggcgtggtggcatgcacctgtaatcccagctactggggaggctgaggcacaagaatggagaattgcctccctctgaactttttatttggtgctataaataaaccctttcaggtctgagcggcagtcaggtggatttccagttacttgcagctgaatgcatttctacctgtcactcctcctcaggaccataggttgctctggattcccaccacacacgtggagatactgaggtctggaatgcagagaaaacttccccagtgtcacgtggtggagtcatgagtttactgactcactacccagtgctctttccgctcaagacaacctcgtggtccgttcctttcattcgggctgctgtatgcatggccaacagctgctttgtaaattaaacacttcccatggaggcagtgatgatgatgaccttgcccctgaatctttccagcctcttacgtaaatcgcccctgggtcactgtctccatgcctttggacccaggacagcttccccacatcctttaaaacgatgagataaccacatgtaaacccagtgctcctggaaaggtgtgagtcatgcatcacggaacagaaggttcacagccaggagtccgcctatcatgcttgtcatccagccttccaggcttgcgtggagcttgttcactgcaaagctgattcatctgcagcttgtggtcagctctgacactcagatcattttctgctcatcttgtgcctggctagtgacctttaattaggtgctgtcaacttcctgtcttcctgtctctgtccatgttgtctttccccctattttaaaaggactgtatgaatactaaagacatgatgatgatgatagcagttagcacttactatattctaaatgctctatataaatttaaaagttgtttctcaaaagccattgtctgagataactagtattactattgcagttttatggattggaaaacaagggcttagaaaagtgaagtcactttccttgggtaacagagccaggagtatttggtggagctggaatatgaacatgagtgtgttggaccctggagtgcagctcgaaaacacaaagccagttgagtctgttaagctagcttcagaggctccactacagcagtttagactctaattacatttactgtttgtttaaaagacttctggacagactggagacctcatggtgtatttgtcatcttaaggttgtcataaaggacccacagtctttgcactttccctctcctccgtcaacagcaagtcagcaacttgtcctcagtctggtcttcacatcacagatggctgccacagctcacgcatcacctcttcacacaacaatgtccaaagcaggcagagaaggaaaggggcaaataggtttctctttatgtgcctctttcttgtcatagagtaaactctttcccagaagcccccagattagtttccctttggacaaaactgggtcacgtgaccacctctgagccaatcgcaggtccaggagaacagggtggctatgactgggtaaagcaaatgcagtttttcccctaggactaggcacatggccagctgcagaaagtcagggttttctcagcaggaaaggagaggggaatggcagttgacaaggcaacccgcagtgtctgataccccagcatttaaaaatgtttagcacagacacccacgttgatttgcaatatgattgtaggtggtacatgaagttgtggttgcgtgtttttaaataattttagtatttattaagtatttaaatgcatttgaaaaaaacatataggccaggtgtggtggctcacacctgtaattctagcactttgggagaccaagactggcggatcacttgaggtcaggagttcgagaccagcccggccaacatgatgaaaacccatctctactaaaaatacaaaaattagccaggcgtggtggtggtgtctgtagttccagctactca

SEQ ID NO: 68913 - DNA, 857 bp, Homo sapiens
cccccagctttattgagatataattcacataccataaaactcacccttttaaagtacacaatccagtgggttttggtgtattcacagagttgtgcaatcatcaccactacctaattttagaacacttgcattgcccccgaaaggaacctcacacccattagcagtcactcccccttcccaccatgttgtgaggaaacccaaaccagcccaagtgaagagaccacacgaagaagtcacacacaggtgtctttctgatggcccagctgcggtagcagctgccagacacgcaagtgaagactctccgaccgaggccagcaccccagccaccaagtcgccctcagccttcaggctgtcccagccgaggccccagacactgtggagcagagacaagctgtcctgctgtgccctgtctgcattcctgaccacaggatctgagagatatcattccaggcgagtagaatggctgctttacaccgctgtgttctggggtgggtttgttatgcaggaggagtaaccgagccacagctggtaaggggcaatgctcgggtttgaacccgagtccttctggctttgaggctgccccttaaaccacatataggctggatgatcccctggatgtggaggagtcggcactccctttcttgtgcaatcgactcagtgcatcggggtgacgtgccctttctctagctgaccttctggaagcacataaacggagacagaaatgctttctttttgttttgccagtttattgctgctgctgctgctgcagttcttatttagtatatatgaattcttgttcttattttttgctagttagagtaaggctgggcgtggtgaccctcagctgtaatcccagc

SEQ ID NO: 68914 - DNA, 2095 bp, Homo sapiens
ttttttcaagacagggtctctctctgccacccaaggtggagtgcagtggcgccaaaacagctcactgcagcttccacctcctgggctcaggtgatcttcctgcctcagcctccccagcagctgggccccaccacaccggctaattttttaacttttagtagtgacgaggtctgattctgttacccaggctggtctggaactcctggcctcaagacatccgcctgcctctgcctcccaaagtgctgggattacagatgtaagccaccgcgcctgggctcctatgatttttatttaacataatgcaccatggaatttgtgctctgcttagttcagtctgagcaggagttccttgatacttcgggaaacactgaaaatcattccatccccatccattcattcctgcagcacccaagtggaaattctgcgtttcagacagggacactacccttagagagcagtgggcttccccagcagcgtagtgaaacatgatactcctgagtttcatgaaaaaagggcagacatctggccagagctgggaggcaggaaatagagcacggtgccctcctcccatactccagcttggattactgaggctggggcccaggccctgcaggaaaggaggtgcatgactactttaaggccactcactctgtgactcaacgggccgggtcggggctggaactcaatgccctcccgggcctggagagcccacgcgccgtgggcggggctcccggggtcgcctaggcaacaggcgcgcgccgcgcccgagcccagagccccaaagcggaggagggaacgcgcgctattagatatctcgcggtgctggggccacttcccctagcaccgcccccggctcctccccgcggaagtgcttgtcgaaattctcgatcgctgattggtccttctgcttcaggggcggagcccctggcaggcgtgatgcgtagttccggctgccggttgacatgaagaagcagcagcggctagggcggcggtagctgcaggggtcggggattgcagcgggcctcggggctaagagcgcgacgcggcctagagcggcagacggcgcagtgggccgagaaggaggcgcagcagccgccctggcccgtcatggagatggaaaaggagttcgagcagatcgacaagtccgggagctgggcggccatttaccaggtgcgggagcgccccggagcgtggcgggcccttcgcttaggccgcttgaacatcccctcagacctccaggccccagactccctctgggtcttgccctctgcctcgctcctactgcttgaggattcgatgggacagcgacgcactgcgtccccccaccctttgtccccggggcgggcgtgtttctcgccgcagcgtcggagcccccttcgatcccccacctcccttctgttctccagctcgggtgatctctcaagccgggggaccgccggtctgtgctctcaacgcgaatccctcgcaccccgaccccgccccctgcctgtccactctttgtcccctggggtgatttagcacccccactatttccttttctggagtggaccacctcagactctcttcctttgtctccctgggggaaaaggttactccccccgtccctccttcacatttcctttcccctagtctcagtgtgcgtcgagtcccagagatgacagtcccctttcccctttctgttcattcatttattggataggagttggcaagcttattctgtgctaggcaccgcttaggcattggaggtggtgtttgctaatcaggacaggcaagatcctagccttagtggggcctagagtcgaatagggcaatcaaacacaaaagcaaataatttcagatagtgacaggtgctgtgaagagaacgacttcctaacggggtacagggtgactgcatagaaggccggctgtcttagagaaggggatcagggaaggcctgtcaaaggaggagacatttgctttgtgagctgaaccaagaggagcagaaagccgtgagaatatggggctaaagaaccttctagccaggaggcctgcggtacccactccattggggccatgatattattctttcaggcagggactcaggaaggttaacgtt

SEQ ID NO: 68915 - DNA, 1196 bp, Homo sapiens
tcccaatctcactcctcttatcttcctcccgtactcctatcctcctcccgtactcctatcctcctcccctactcctatcctccagtagaaacagtcatttgctgtgaaggttatgggggagaatgagtcaaggtagaaggtcacctgctgcccagctcacagtgctgctggtgatgacagcagtccacagttacaggcacttgctgaacgaggggctctgtatacacctcagctcattgactcttcccacaaccctcttgtcacctaccatttagcaaatgaaaaaaccaaggctctgaggtgagttgtttgcccagagtcacccagtgctgtttgaacccactcacataaccaaccaataccattatgtaatttttgaggtcttttatctctgtgatccacttaaaaattatccaagtatctttatttgtactaagcctccataatgagaaacagtgttccagatggtggctagttttcaaagacatctctctttggaattcttctttagaacaaaaagccccagaccacttatccccattcatatcccctttggacctagggagaaggtactatttataggtgatcacctgagtttattgtcccttgtgctgtgccagaaataaaggtccccacctgctcttattagctctactaacaggataaggaaagtggccctcagagagctactgcttttgtgacaaacaaatgatacaagaaaaaaaaagtggctttttaattttagtgacctggggcaggacttccaaatgaaagtttatttctaaaaactaaaaggtaaatttaatatactttcagtgtttgggcttaaattctctttcaagtgtctttgtgatatgctctgaattttaaaaatttagaatcattgaagttcattatacttgaactttaaaaaaaaaaaacaaaaacctcgtataaaggtcaaggtatgacttcatgctgctgtgtacttaggtcatttaatcttcaaaccactggatagaggttaggttgaagttcgatcttaaatcctacctactgtagctcattgtaccagcaacagctgtagggactaggtggaattcatggtgggttttgttcccttttaaagattgaagccaccatattttctgccctctaaaagtttatgtcagccaggcatgggtggctcacacttgtaatcccagcactttggggag

SEQ ID NO: 68916 - DNA, 561 bp, Homo sapiens
gatactgtatttaatatttaatgaacattaaatattatttactagtgtatttaatggctgaggcagggttaaatatgtattattttcatcccagcagagttgggggaggtcctagtaactatgccatgagctctgtgagggtgaggtggtgtctttgcccccgcctccctggcacagtgactggcacatgattggcatagtgtggacattcgtcaagtgaaggaaggcatcatgagcagatctctggcctgaatccttctgccatcagctgctcgccaggtggccctggcactgggccacagggaaactctccaggctggtatggttcctgtctgtggctgtcttcccgggcccatgttaggagactttcacttccagagccctttccctctcagggccttgcttaccaagtgactggttcccatttactaggagctcttaggtcattgaagatgttgcgtactccccccagtgagggctgccttttgatcacagccgccagaagcctcaaggaaggagcagagctggaaacagacgccaggccattgcttctgttcctct

SEQ ID NO: 68917 - DNA, 585 bp, Homo sapiens
gtttaacaggacaggctcagtggccactctgagagcccgcccacccggggaaggtgatgcacatgcagcctccagatggccaaatcaggcagcatgtctggcccaggtgtcacagaagccggggcaggaagagcctctggggccggatgtttcaccaggtctgggaggactcagtaaatattaaacagcccctggcatgccagacaagcttccagacgggcacgtgcaacctgccggccccagccctcacgtgaggttgctacagcagtccttctgcctggtgtggttggcagaggccttggtactcggctgttgcaagtgcaggctctggaggcagacagggccgggctcaagtcctgcacctgcccccagcctccaggcgggacaattataggactgactgcacaggcttcaggtgaagactccatgcaacaaggacgtgagccaaccatttacccaggtgcctggcggtgctggccactgggtgatgatgacaggcatgcactcggcacttgccaagctcaaattctgctctcagtgcttttgttttttttttttttaattgagacaaggtcttgctctgtc

SEQ ID NO: 68918 - DNA, 916 bp, Homo sapiens
tctaaggatggagcccaggcagggacggccaaaagctcgctacccctgcccaggaaggcaggagcaccgttgtgtcccgttcctatccctcaaaaataaatcacagccagctcatgtcataggacagagcctgttcgcaatccatcctgtgtctgcggattctcccaggtctgtaaggcagcagggagatgcggcctctcccactccacccaacacgtagccagggcgaggtggggccgggggagaggctgacattcaaaggcatctgagtggtaagaggtgagcgagtgaggtgaatggggactacgttagaaggaccctacgttagaagggtgaggcgctagggccatagcctaagggcactgggaaccctgtgggcatgcgcagttcaagcccatccccgctccctccagctgctgtccatccctgccacacctgaccatttgcctaacctagatccttcctgtcttgcatttcctcaagcatccggagcccaggactgctgagtcaaccctctggaatgcccacaactccccacaggccagccggccttgggactcccgcacagccacgtgagccggtggagccgggtctgtttgctagtggaggctgttaacagcacgggaagtggtcaagggttcaacaagagatgagccatctggtcctccagaggtaaacaatttacaagagacacatcaagccggcctgctgttctggtttttcttttgacagtgaaatatgcagtttctttttcatcctggtgcctattggagagggagactgttccaggcactctgaccccagctaaagcgcctccctggggcaggatctatgcagggaggcagaaaagtcagattttttttcacatcttctttgttccattcccaggactgagcaacttcatgtatttatgtat

SEQ ID NO: 68919 - DNA, 723 bp, Homo sapiens
attaaatagtggttttacaaggggaaacaaagtgacaaacccccagaagttgtggggagctgagacggggtgggaatagggttccccagggacaaactccttcttgtccccctgcccagcgccccagggcacactgcccagtgggtgaaagcagccagacacacgggctcactgcagttaccaagcaatcctaagtgtatcaagatgggcgcgctgacgacagctgcaccgagtgaatctggaatgaattggggggttgttaagatcgccgacttaagcctcttctcacaggaaaaatatttatttcactgagctctgctttttggaaagctgcgcctgtaacagtctgcatcgatctagcagagttttggctactgctgggttttgtctccctcctgtctcggttagcgtgggctgtgtgtgtgtgtgtgtgtgtgtgtgtgtgtgtgtccacagcacaccctcccattattaagcaatcagccaaaagactcagccaggacactctgctcttctttaaccagaaaaaagatgaacacgaactgagttcgtggcatgaggcacgagaccttcatgttttatcttcaaagatgcctgcttgaaactagcaattgtttctttccctttttatctagtaaattgctccctctacctcctcccagtttgggaaaaaaatacaagtatgaagaagaaagtaaaaatcactcctatggttaggttagg

SEQ ID NO: 68920 - DNA, 499 bp, Homo sapiens
ccttctttaaaagatgatgaaactaaggctcagagagatgaaacacgttcctagagtcacatagcttataaatggtgaagacaggtttagatgccaggtcttactctccaaggctacgttatcctgcaaattctggtggacctgggaggtaaaggggaaatacaatcaagctctaggtggcagatggagttagcaagtacccagtgccaaacggaactgttggccctgagagctcagagttcagttctaaatttattctctctgaccttattgtggattctaaatttggccaaacaagttcttccagaccgattagtgacgtggatacattgttttgaagataaaacccttttcctggtatgaaagaaaaaaaataataatgcagcatttgcttgcagaagccaccctgccgctggttaacagccatctgaaaatgattctgggttttccacctgatggtggacacatgtgcttgttggccgatttcttggggacagtg

SEQ ID NO: 68921 - DNA, 988 bp, Homo sapiens
tctactaaaaatataaaaattagccagattgtcatagcgcatgcctgtagtcccagttactcgggagactgaagccaggagaatcacttgaaccggggaggtggaggttgcagtgggccaagatctcaccactgtactccagcccgggtgacagagagagactgtctcaaaaaaaaaaaaaaaaaaaaaagttttcaaactgctgactgcacctgtttgtaggccctgagctcaactgagtgagtcacacaggtattcactgacgtgattctgcctccaaggccacattttctccagtgcacctctgtccttcagcaagtgacctgaggctgggactgccacatgctgcctcccatcagcaccttacccagacctactgctggctacaacgtgcttaatgattgtcaggtggctcacataccctgttctgttcggcttcacagtgtctgccagcccgtggagtatggcacagtggctactagccagggtcaggcagtgcgactccacctctccaagcgccccagtgcagcgtctgatcatagggaataactctacctgcttcacaggactattctgtgaatactaattaggataacatatgtgaaggtcttggcgttgtgagcacatgagcccaaggtcagctccctaaaatgatgaagttcatatcacaagaggcccctagaggtcaggacagcctttcggtacctttctatggcaaacaagcggctggttctctgccacctattttctccccttcattgggcaagactgagctggcagaataatggccacatcagtatttactctctactttctggcttccctagattggtgccagccatttgtccccccatccaagacaaccctgatccccatccccagaaggaaaacacctcacctctctcacaatttgagaatggctgtcaactcgagcacattattagatttaattgtatctaatacttgaatacctaatatattactttct

SEQ ID NO: 68922 - DNA, 469 bp, Homo sapiens
agagaaaagctgggaggagcagaaggaaatttgagaccaagcattacctaaaggcctaaagtactggatcagattaaattaaatctagttctttttccttgttgccctatgagtaggctttgtgagaaatatcagatccattgcaggaaataaagaaaagacatgttctctgcagacccacatggcaggtgagtaaatgtacagcatggatatccgtcaccagcggtgcattcccctaggcaggcaccacaccgtcctgtggagcattgtgttagtaggcgctcagtaaacacccatgaagtgagtcaatgtatgattaaattccaaccctgcgtggcagcagacaggtggctggtctctgggactggggaagaacaaggctctgtatgtagttggcttcctctggaaggacaggttttaagtcagatccgactgggttcaaaccttggcttggccaaggcagcttcta

SEQ ID NO: 68923 - DNA, 631 bp, Homo sapiens
agtggctctcggcccccgggctgtggaacaccagcacaccagtgcctggagggcagcagctgtccagcaaatgtctgctcattcatttgttcacgcattcagggcaagtcgaacggcagacggggcaggagatccagggccagcatcgatggtgcagggagccctctggccccttaaatatcctcagacaatcccagaaatcattcctgggtctaccttatgtgggttttctagaatagctactgctgaactgtagggtagtgagggagagacacaaatacaggcaaaaccacacaacagcgaagattccataagggcaggagtgtttttccaccaggaaacaagaaccagttcatctgagttccttcgccttttgtcccaagacacaaaaatgtcaaaaatgtgcaagggctctggccacagatggatactgtgtctcaccccgacgggctgcttcctgcatggggctgaaggtcagggtgaaggttgctgccctgagagtcaggggaagttggtctgcctcctgctgtgtcacgtacttgccatggtgtgtgggatgaggcccatcatctcccagaattaagctgtagctgactataaaaccacaggtgagggctgggtgtgggggctc

SEQ ID NO: 68924 - DNA, 1077 bp, Homo sapiens
gtgggaggatcacccgagctcaggaggttgaggctgcagtgagccaagatcacaccactgcgctccagcctggcaaccagagtaagatcctgtctcaaaacaaacagacaaacaaacagtagacctggaatttggtgcaagcagcagggccagatccatgcttggtcctctcctcccagcatctctgttttgtcctgggtccctctgccaggagctccctggaacccgggaaggaagagaagcatgcagacaagcgtcagcacccccaccctccgctggccttggggagcaggtgtcattagacgaggctcaactgaagcctgcatctgaaacagattctcataactcaggcgctgtggtagccaacttctctctacagtcaattacggccagcggggcccactgattatttttatagcctttcctggagtcatgacaaggaaaactaaatgatccacaggacccctttcatcactaacagccgggtttcacggttgggggtggaggaaggaaagaaaaatcacttttttccccactttgagttaatcaacagaactcaagtctgggcagccaatatgttggtgttgagaaaagctgttctcaagcagaactaattggcaacagaaatggaattttcttccccacctccctaaaaaacataaacatgctttatcccagagaattacccttcagaataggtattgcagacgtgtcgtgtgcagccgcctgtgcgaggctggtaatctcacgccgacctggccaaaggctgcctgtgctggttacagctcaaccagagcagcctcttacgcaatacaatggtcatgaaggtcagtggcccaaaccagcccagccagaccagagtggacacttgctttcctgatgcccagcacctatctcctgctcctacgaacagcctttggcttttgttgggtcggggggtgggagggcaccctgatttgcaggtacaagtgtgagtggcattgataccccctcaactccagagatgagctctgacaggcgtaagccaaagaacatattccggggaaatttcaagaaggggcatatgacctaacaaga

SEQ ID NO: 68925 - DNA, 721 bp, Homo sapiens
aaatacaaaaaaattagccgggcgtgttggcgggcgcatgtagccccagctactctggaggctggggcaggagaatggcgtgaacccgggaggcggagcttgcagtgagcggagatcgcgccattgcactccagcctgcgcgacagagcgagactccaccaaaaaaaaaaaaaaaaaatggtgatgaagggtgaggcatttggaacaagcccggctttgggcttgagcagctggtggaggcggtgccattcacaggaatgttggcagcatcgtgttgggagcagtttgcactaacttctgtaacagaggtgcaatcacatacagggttgataagataagagctgcggctgggagaaattacttctgacttttggcatccgggaaggcatttggaagaggtggcatttaagcagaactttgcaggtcagcatagggcatacaaaaattcgaagggcagcctaggaagaatgagttgcaccagcataggtatgggggctaggaaatgcccaggtctgctgggattgtttggccaggtaagatgagaaacaacaattatgataacaaaactaaccaaaaagcatatccttccatttttcacaacctctctgtgaggcagtagcatcttttaataggagccaagattcaaaggagtccaggtgacatacctaaggttacacaactatgaaggggctggccagttttgtttatttgtccattttaa

SEQ ID NO: 68926 - DNA, 2504 bp, Homo sapiens
taaatgtctatcagtttaaaaaacaaagatctgatgcctccaaatatgaagttatttcatgcaacttaaaatcaaataagtaaatagcagcttagccagtttctggcacctggtaggtctcataaatgttaactatcaactatcttcatcaacacctcctgggaagtggaatagtttggctgatgactgcagcctgtctgttgaccctgatggaaagattattattttcattccagttcatccctggtaatgttgaaataatgatcaatctccattatccctggagtaccatagaatgttatgagctggaaggggttgtggagatgatctcatcaggtcctgcatttacagatggagaaattgagtccgagagaggggtcagaaagcaaacccgtggcagaccaagccaagggcaaggcttaggcaccgtgcctggcacatactgcctcctgcaaagctgagtttttacctaaaagggctctcacgtcctaaaggctacagaaaacaattcattcgtctctctgtctgtgagcaccaccaccccagctccgcgcaaaaagcagtacagtattataagctattaaccagaaaacagatcatgtgacttaattccacctctgctaaagggcttaaaatgcttcagtgagtagtctgatattcgtaaatatacacttcaactatttctcaaagaatgattaaccagctccatcagaattggaacttgtgcaatcaaggagaaaaagagctggcaagagaaatttattgaaaaaatttttaccagcattacagatgacttcttgccaccttttttttttttcctaagagttagaggaagaaggaaaggaagaagaatcattacacaataatgaattaagaaaactaattgtggaaaattacaaactcctttcacctcacaaggtagctttcaaacaaacacaacagggtatttgtagaacctaaagacacagacagtattgaaaaggagcagaaagcaggagtgtaaccttcactaacttctttcagagagtggagaggcctgacagtgtatgggcgtgattatctctggtagcccattctggactaacgattctgtgaacctataatttagagagtccataatgtcatatgttcaccttacttatctccctaacccactgagtattaattctcccaggcaggggactagctttttaggccacttgtaagtcttgatcagctttagcttgaggatttgggggtggggagggatgatggacagaaataaggttagggttagccttcaaatggaagaaacgggaatataaaatcctcgtctgtgctgatcatgcttctcaagaaaggctgaaattcaggcccagtgaacacacttgtggccttaacatctctcagaatgaaaggattttcttccttcacaatacctttatcaaattccaactattttctacttttcttccttatacaacccaggcgcacgggttgaaataattttccttaagaaatccaggaagctctggcctggccctccctctagaaaggaaagtccaagtaaagagggatgccacacctggggaagggagagaggatgtgacgacacctccaggaatgcagggcccacgcaggtgcactggcacccacgaacttcctgataaatcagtaccgataacaggagtaaaactcaaccacccaacactcactcacacagagctggggtgctgctcccagggtgtggccttgccaatcagggagaggaggaggagacctaagaacggagctctctaaaggtggtgacatggtatctagtccagccatgatcagagtgtggtctctgggagtccctgagacccctttacgggggtctctgcaaggccaaaactgctttcacaaaactaagatgtcatttgttctcatcattcccattgtctcacgagtatacaatggagttttccagaagggacaagacatgtgatgacatcatcactctgatgactgttggaatgcatgcttgtgtactcccatgttttggacacatccgttttaattctaagataaatattgaaagacattacacataaacaaagtactttggggtcctccatgatttttaatagtgtaaaggggtcttgaaaacaaaaaggttgggaactgctgtgctagtccaaacaggggagttacaggccctgacatgcactttatttccggctgaacttgagtcacctcctatgtgctttcaaacagggggtggaggcagcttgcttatttattatacagcttggattggtgtcctttccacctgtgctgccacaggtggccagaaaaaccttaaatcctcccacaaaacgtctggttacctgaatcctccagagggaaaaaaatgagcttctcgcctttgaacccaagtggggcaaagagcctgcagaagggacaccctcagtggcagcacccagcaaagacccatctgagtacccgctgggagtcgggttctgtgccactcaatgccagcaaag

SEQ ID NO: 68927 - DNA, 2000 bp, Homo sapiens
ggcaaccaggcgcgcgctcgcgcgtgcgcaaaaggcccacccagccgagcccttcttcaggtgcgctcgcgcttccggccggcctccccgcgtgccttcccggggcggaaactccagcacccgcgcatgcgccttctggctctccggcctgaagcggggcggagggccatggcttcaggtgatcccgcccctccctcgtagcgcaggaccaatcgtgcggtggtaggcggggttttgaggaggcagcccgcccacgcaccgcgcgaggcgtgtatcgattggttggcgccgcgggcgcaggtgcgcgctttctattgggtgtgggcggaacgcgagggattgcggcatcttcgggggctgcaggtgagcgcgcgcacgcgccgcggctgtggtccgctcgggtgcgcgcgcgcgggctcgcgggggaggcggcagagggagaggttgcggcgcttgtggcctccgctccgccccctcctctcctccagcgctgtcgccgtcgccgccggggcccggagggagggagctgcttccccgcctgccgcgccaccagtccgaccctcggtcccgccgtgtgagcagctggtggagtggagctcagcgcggacgccggagctgcggccgccccctctgcaggtgcctgtgaggaggcgcccgggccgcaaccgctttccgagatccccagtcgcgcactcgctccccgcgctcctgaggggccgcccggccggaggaggccgtcgcggggctcggcgttcagcatgaaccgcagccaccggcacggggcgggcagcggctgcctgggcactatggaggtgaagagcaaggtgcgcggggcccgggctgggcggagcggcgggcctggggggccggggcctgggagaggccgggccaggctcggagcgccgggggaggcgacgggctgagctgccccggggtctggacggtgcggtcgggagactgtgggtaataaacttgccgaggagggggtggcgggggtcagggggcgctagtgtccgcccctggcccgggcaggaagaagacctagtccagcatttaatctcattccgtaaatctcattcccgtgttcacggacgggagtaggggccaaggtatatccaaggatggcgcacactgagtgaaatgcgaggctgctcaaaaggtgtaggagaatcctgcctgctgggctgtgagtaaagggccctggaccaccccgttgttcccactttctgtggttaaggggcgcatcgagtggcgaaggagagagcccagtgaactaaacagccctttaaaagttcgctttgcttcctgctggcgctctttctagcactaactttggtatgcatttaatctgtaaaattagtactatcaccttacgttggagtagcactttacagtttgactctagatgctcttttcattccatcctgctacctactcacatcaagtgcttttccccttgaccaacggtatgccaatctgctgataattacttcggtattcactgaatttctaaatctcaaggctcagtgagcagggtagtctgtagggagggattagttagggaatgccttccaaagggggttttgagctggaatttgaaggtgatcggcagccaagggaacactttcagcaagcgtttcttgagttgaagagttaaaaggagcttagataatctagcccaattctctgagaagactgaggcttagaaaggttatgacttcctcaagctgtttttttgcaaagccttcatgcctttttaataacttctagacattgcagaatacaaaacaggacactggctgggccctgagaacatttaaaatagaattgagaaggccaaaacacagaaaaggagaaaattgaaagtatatcaatttcaaaaaaaaaaagtaatggagcatcatagatggtaagactactaaggagtatgtaaaatcaaggagtgatttgagtgaggtacagtggagtaaggaaagcttcctagagcctctaggtagaat

SEQ ID NO: 68928 - DNA, 1564 bp, Homo sapiens
gcaggagaatggcatgaacccaggaggcggagcttgcagtgagcctagatcgcgccactgcactccagcctgggcgacagagcgagactccgtctcaaaaaaaaaaaaaaaaagaaattgtggagtaacatctcagtatgtgacaccagttactcacaacagaaacgtgggtgtcacctttgacacatacctattttttagtcagtcaccaagcctattaaaactgtgttctagttatttttcagatttgtctccccatttccatgtcctctgctccaggccaggtgccatccaaatttactgaagtagcttcttttttttttttttttttttttttctgagaagcagtctcgctcttgttgcccaggctggagtgcaatggcgtgatctcgtctcacggcaacctccgcctcctgggttcaagtgagtctcctgcctcatcctcccgagtaggtgggattacaggcatgcgccaccatgcctggctaattgtgtatttttagtagagatggggtttctccatgttggtcaggctgcttgcgaactcccgacctctggtaatccgcccacctcggcctgccaaagtgctgggattacaagtgtgacccactgcactgcgctggctgcagtagcttcttgtcctccccctccacgtccttctccagcctgcagccggagtgagctttgtagaaaaaccaaatgagttcactatcactgtcttcccttaaaatccttgattttcttccctttgcccttaggctaaagtctgtaaactttggtacttcccaggaggccctgtttgtctgtttggcccctggctgcctctgactcagctcctgactccctccctccctccctccctcctgcttttcaccctctgttctagctgtattggatttctttgtctggccctccctcttctggatattgtcgagtcctgtgcctggaacattcttcttgccttctactattagcccctggctggttttcctcacagaatcacttccctggagaagccttgccttactcctacaagccaggccaggtcccctttacatacttccccagcatggtgtgcttatagctctcagcacctttgttataatttacttagagtatttgaaattatttgttagttgccatctcctcttttagattgtaagcaccacgaaagtagacaccatacctattttattcaccaaatctgtaccacagagcacaattcctggcacatagtcagtgttcgttaaatatttggtgattaatttttctgtattaggaatgaaggggtctgcaaaatttgaatatctaatttgctttaagtgatatttaatctttttaaagttgccagatctggctgggcgcagtggctcacgcctgtaatcccagcactttgggaggccaaggtgggcggatcgcccaacgtcaggagttcgccaccagcctgaccaacatggtgaaaccctgtctctaatacaaaaattagccgggcatggtggtgcatgcttgtaatcccagctactcgggaggctgaggaaggagaatcgcttgaacccaggaggtg

SEQ ID NO: 68929 - DNA, 877 bp, Homo sapiens
actaggcttttcagaattaatgtttaaagagtaagaggttcagagggaagccctgcaggataagtgaagaacagccactatttgtgtgtaagaaagtaagacatccagtttgactatttggaggccttctaggtggatccttgtctgttcagttagccgagatcattggctgaagaaaaggcttgggataaatgcggtgctgctgtatcagcccatatcatgtactgttgcataagtgaatttatacaagtggacagttgctatgatcaagttttcaaactttccatctcattctgagtttaatgctctgatagtgttcaggtagaaagtcaactccaattccttgtggacattcacctttacactttaacaccctgaaccctggctttctgccaaaatattttctttcccagtggctggaaactgattagctagatgggagaacaaaggtggctttgtactggggcatattgcttttgagaatttagcagagagcattcaaatggagtctggatgtgatgccaaattatgcagatttggagtttattttggttaggtttcccatgagtaggtatgtaggcaacgtaatactgttctcagtttatatggtctggaatttcccttataaatgttatataggctttccttattgattgttttaaaacacaaatatgtatgattttgagaaaacacattaccagaagactattcttgataggtttttttgccaaaaagattgttgtaccaatggatttatatccaaagccatattataaatacatttctgtctctgtaagagcccaatgcaaatacttataaatgattacaagtgtccccaaggggaaaaaaatgccaaaaaaataagatacccgtaacc

SEQ ID NO: 68930 - DNA, 3511 bp, Homo sapiens
gaactcctgacctgaggtgatccacctgcctcagcctaccaaagtgctgggattacaggcgtgagccaccacgcccggccctgcttatccagattttcataagaaatgtccttttttttttttttttttttttttgagacggagtctcgttcttctgccctggctggagtgcagtggcaagatcttgggctcactgcaacctctgcctcctgggttcaagcacttctcctgcctcagcctcccgagtagctgggactacaggcacgtgccaccacgcccagctaatttttgtatttttagtagagacgggctttcaccatgttggccaggatggtctcaatctcttgatctcgtgatccgtccacctcggcctcccaaagtgctgggattacaggcatgagccaccgctcctggccgagaatcccccttcctaaattggtaaaatctgattcatcagaattgcaattttgatcaaagccagtaactcctcacacaaatccttctatgtgtgcagaaagtgagcgtctgaaaactccaggcggagtttttgcgctaggttatctaccagaagaaaggacaagaaaggctagaatttgactaatggttccaccccccagattgtatcagcacagcattcctctttcactcagtctcttagcaatgcttgcaactacaaggaaacagcattcataccattgtttctaagacctgaagcaggttacattcaaacccagcactgttcttatagaacataagagttttgttcccaggctgcttctctgccagcatgtgatacccttcaataaatggtaggtaagttgcatatcaggttttctcctgcattcccagagggcttcagctgctgtctcaggtatgaacccaaaatgactcaggcaaaaatgtgtatgcttagtgactcagaaactaaatcattaacttggtaagtacatgcacgggtaaggaggaattcaaggagagacttagaacataggccttccagtaatgccactgatgatgactgcctgagtacagcaacgctgaacggtgtcacttctcaggtggaccagtgacgaaccctagaatcaccaagaatctcaaatcagtcattctcaggagcaacaatccacatagggtaatttacaaagaatgctgatttcaattgtttgaatccttacctggtgaaacaagaaaatgtggaaaaagctccttgactttaaaaatacacacccacacacttttttttttttaaagggacaagggcttgccgtctcccacacaggctcgtgggcggtggtgcgatcatggctcactgcaacctcgaactcaaggattctggcaatcctcccacctcagcttcccaagtagctgggactacaggcatgagccatcacacccggctaattttctttttttcttttcttcccctcaccccaatttttttttttttttttttgagataaggtcctgctctgtcgcccaggctggagtgcagtggtgtgattatggctcactgcagcctcaaactcctgagtccaagtgacctcacaccttagcctcctgagtagctgggactacaggtatgtgtcaccacgcctggctaatttttgtattttttgtaaaggtgaggtttcactatgttgcccagtctggtctcaaactcctgggctcaagcaatctgcctggctcagcctcccaaaagtgctgggattacaggcgtgagtcactgtgcctggcctccacatgactttctactagttgattttaaactgggcatatgcatttacacacacacacacacacacacacacacacctgatctgcctagatgtgaaattaaacttctagagcacacgcatatacacaacgccagacaatatgggaacagtgattacaaacaaatcccactagaaaatgacaaactgtaataatttttcagtccccttttgaaggcaagaggtttataaacctctgcaattcaattgcaacacatcagggttcttctggtgagctggcctcagtgtccttcctccacccccagggtgccttggctcatgttcacagggcccatgcccagtagggctggcatgtgtttccaacagccgagcagacagggccagcagagagggagaaaataaacggtaaagggagacgcgccaggagagcaggcagaatggccgggaagctggccaaacgggagaggctgaatgggcgacatcagcccttgaccaggcctcagctatcccagctgtccttcaccactcactgtgtggataccaggaggatacaagccccctttgcctgggcgtcaccaagaatccataaaccacgcagtttatttttatttttatttaattttatttttttagatagtctcactctgtcgcccaggctggagtgcactggcgtgaccttggctcattgcagcgtccacctcctgggctcaagtgattctcgcgcctcagtctcccaagtagctgggattacaggcacctgccaccacacccggctaatttttgtatttttagtagagatggggtttcaccatgttggccaggctggtctcaaactcctgtgctcaagcaatccactcacctcagcctcccaaagtgctggaattagaggcgtgagccactgtgcctggcctatttttattttttgaaatagtcttgctttgtcacccaggctgggtgcagcacaaataacacggctcattgcagcctcgacctcctgcgctcaagcgatctttcctcctcagcctactgagtagccgtgtgccacaggcatgtgccaccctgcctggctaatttttttttttttttttggagatggagtcttactctgttgcccaggctggaatgcagtggcactatctcagatcactgcaacctccgcctcttaggttcaagcaattctctgtctcagcctcccgagtaactgggattacaggcgcatgccaccacgcctgactaatttttgtatttttagtagagacggggtttcgtcttgttggtcaggctggttttgaactcctgacctcaggtgatccaccagccttggcctcccaaagtgctgggattacaggtatgagtcaccgtgcccggccgcctggttaatttttaaattttttgtagagaccaggtctcaccatgttgcctatgctggtcttgaactcctgcgctcaagcttcccaaaaggctaggattacaggcttaagccacggtgcctgcccatgtggtttttagaccagcaggttctgtagagcaaaatgttcatgattttgaaggatgacaaacctgacagaggaggcaacgccaccttgacattcctcagtcgtagtgccacagtggtctcgtatttcaaacctggttagagtttgtcctcttcaggagagtttgtgtggctgttttgcagtggaggagagatgacaaagctgataatgcttatggtgtgggtattttctttttctttccttatttgctttgtgaagacaaataatggttaaggatagata

SEQ ID NO: 68931 - DNA, 1224 bp, Homo sapiens
cggaaccacctaggagcaccttttaaaactctcaaagccaaggccacaccccacaccataaattaagtcacagcctctgggggtggggtctgagcatcagtattttctggaagtttcccaggagttttcaatatgcagccacgtttgggaactgtctggtctagaactttgtgtgcctgaggcctgcgctgggagaactgactttaaaaagacacagacaggcagtcattttgtagctagaggtgaagcagatggcgtgggggcagaagggtgtgggacctgggacccagcagggggctacggctcccacgggccttcgagcctggcaaccactggcacccccactccccccaggctgggatggagccactgtctgcacccgaggaggcctccagagcaggaggcgggagcagcagctctgagcccggcttgggcaccagagggagctcgtggggacgcgccacggctccatccctgcagctggttcaaactggtttgggcagggtgcggcctgggcgggctgcattccaggcctcaggctcgcggctgtccggggcctccccaagggctgcggacctagggcagggagcagcaggggcagggcccccgggcaggagcccagcaccctgagaggctggggagatgtttaaaaactcagtcctctttgtgtaaaatcatttacttggcctcccatgggggtccctgactaaggctggcagcgcggcggagcccctggatagggttattcccagacatcagtgtgcattagaatcgaagcagagcttgttaaatgcggaggcccagtgccccctctcaccaaagatcctgattcagaacgtctggggtgggcttctgggcatccatatttttagcaaaatatttctaaggtacaatcacatattcagaaaaaaaggctagaaacaaaatgattgtcaaccagccaacctggcccagggtatgaatcgctgggacacttgtgaaggacacagagaccccttccccagacctcctctttccccagggaagaggatttgggtaatcagcacttttagctaatatcccaggctttttttttttttttcatatgggcaatttcctttttctttttttattttatttttttgagacagggcctggctctgtcaccgaggctacagtgcagtggaatgatctcggcttactgcagccttgacctctaggctcaagtggtcctctcacctcagc

SEQ ID NO: 68932 - DNA, 1161 bp, Homo sapiens
aggaagacgaggaccgtcacactcggccttccctaaattccaggaccctccgcccgatgcaaactagatgctttagtaggatgggaacgggtggggggcgggcggctttgggcttcctctaagctagcgcctctctaacccggacgcccgttagaatcacccggggagttttagaaactaccgatgcccaagccccactccgaaggattccaacttaatcggcctggtgcgaggcctggcttccgggcttttaaaagcttcccggggattctattttacggccgggtccggggccgggagcctgtactctaccgggattccgatggggaggggtggcttgccccaatagttctcaaatttagctttgggtcaacaatctggttggaaccacctaacaaacatcaaaagatcctgatgcccaggtcttaacccagagacggtgtggtccaggcttgggaaattctaaaagagctccaggtgactgccatctgcaagcgagtttgcaaagcactgatgcccaggtgctgcgggggcgggcgcagcgcgcgccgctcgccactgggtggcgctgcccgctcggcccggcgctcctggagctgcgagccgcgaccgccgggagcgcacctgccccgcctccgccaggcggtccgcggggcatgcagcggaccgggggcggggctccgaggcccgggcgcaaccacgggctcccaggcagcctccgccagccggaccccgtcgccctcctgatgctgctcgtggacgctgatcagccggagcccatgcgcagcggggcgcgcgagctcgcgctcttcctgacccccgagcctggggccgaggtaggggacggggctgtggagttggaggagagggttctcgcggttaggggtccgggctccggaccctcggcttccccggagcatcctctcgctcccggagtggggggcccggggattccccccttcctgaagggtggctgcggggcgccacgcagagatgtgcagcgggtcgtccctgctcgctcctccgggcgacaccgggccccggaggcccaggctcgctttccctccccacccgggtcccccagcatccgccgggtcctcaggcgccgccctttgccaggccggccctgggagaggcggaccccgggacctctgctgcccc

SEQ ID NO: 68933 - DNA, 1052 bp, Homo sapiens
caggctgggaaaggcctgcgggagggaagagcctggcccatgtgtggcattcgcagcacagcccacgacaggctgctgggtcgcaggcattcctgagtgaggttgggcccggcaggggatggcaggtgtgatcggtgtcagaacgcaggttctggaatcaagcagtgtgcagaggtgagtcgtttgtcagtgcagactcctgcctgctgcctgcagctgtggattgggtctggaaaaggtgcaatccctttgatgcccacggagcctgggaagtacttggctctgttcctggtcaactttctgctgggaaaataaaccgtgtctcattaggcagtgagttcatcccgatgcctgttctggctgataacatcacaccttgtcatgctgccaggcccaaagtcaaggtcaaagttcctgttacttagggaatcctaataattaacctgggaacctcagccggagagggagatgctggtttttaaatggagtgagaagctggagcagggaggtggctgtttcggggctgggcatctccaagcaccaatttcaaggtgccaccctgatcaggattggtgatcacagtcttccagcctccttgtcccttttgtgtctggtagctctttgctggcctagacctggctccagaggccttgggcagtgcccctggaagtgtgtgcattggtacggggcaggaggggctcagatgacagtggtcagtgcttggagagacatgggggcgctgcttgcagggctgcctgccagcatctttgtgcctgacatgtggcctcctataagctctcactctctggccagcagtcatttattgagcacctactgtgtgccaggccctctgattgattgattgatgagtcacatcacttagtggctgagagatgttctggcacttgtaattttcaagcctccttgtaagttaaacattgaagcagtatcagaactggctcccgtaactgtgatttagtttaaatgttcatattttgaaactgaatgcatttaattacttaaaatgcaacattataacattgtacgtttgt

SEQ ID NO: 68934 - DNA, 3194 bp, Homo sapiens
atccgaaccaaggatgtgccaaggtgattcgtcaagaacaaatatggactgggggccaacagttttgaaaaagtaaaaggagaaaacttctaaaatgcagggtgggctctttaaaagaagtaaaatcactgctcttgactcacttaatccttcgccatgttgctgtcagctcaccaactaagagtgcgagtgtgtcttgctgggcccattttcccatggtctgtagaaggcgctgtgaagcacatcctgttctagctcgggggcccttcccccctctgcagccttacccagtgcagagaatgcgccccctactgactccaacactcatcgcctttagccgacttggctgcggtgcattttgggtgggggctggtattttctccatggccataaaccagaagcaacaatgcagatttctaaagaaactgtatcaagctatccaagagatttttttttttttcattctgaaggttcaagatacaggcacaagaagcatcagggatgggaactgggtgtgtggggatggacatcattaacatgacaaacacagaaacagtttggttctttttccctcctaagcctttgtctgtgaaatggggttatggcaagaagtgtccagagtaactggtaaattcaagaagattaagaagacttcgtgtgtggggggtgtgtgtgtgtggctaaaaaggatatcagacctagagtcttggtcttgggcagaagaggaagagaagcaatcgcgccttttccagcagacagggatcaaggttgggggggaggggaaggcaggcaggcctcccagaggaaagaagaggtgaatacgagtgtgttcacaaaactactccccattcattacattaaaaaaaaatctttttgcagctctctggatttccattttctaccaccttactgcaaagttggggctcagaatgttcgaaagaggtgctgaccaggcagctgagattggggaaaagggatggtggtgaactgtggtcaggataagaggaaagctggcaggttggggaagaaggattgcacaggggaggcaaagactcactccatgccatgcatgctccccgccccccccaaccccgtcccccctcccccaggtaagggtgggcagacctggcagaaggctggttcaaggcatgggggtgtgcgtgggggggctccttttgggggtggggggcggacgggattagttccaggatgggagaagctcggttctggctgggggagatgcccttagctgcaaaagctccgggcggccaggcagagtgctggcctcggtgggctcacagggcggagaagggggtcgggctgcaggaggaggcgcctggacctccggagcagagtcgggtagcggtccgtgccgggacgggggacccgtcggcgccggggtgtgcaaaggagcgtgtgtgcggctggagggcggcgatgcgaacaacaatgcgcccgcgcccggggccaggctgcactggcggccgcgcgggccggggtcgggaagccaggcagggcagggccgcgggtccgcgcgcggcggcgccgggcttaccttgactcggcctcgaggcgcgcgcggggccggcgtgctcgggggccggacagcggcggcggcggcgggcggatggcggcggcacggcggtggcggcagcggggagggcgcgcccggggcctcgtcgcgctccggctcggcggactccggctcgcgccgcggccgcgggtgctgccggggggcgcggcgggcgcagcagagcggcgggcggcggcggcgtcgtcgagcggtgcagacaaaggaggggcggagggaggagacggagggtgtgggagaggcggcttcaccggcgcgggcggcggcggccgcgctcctctcgctcctcagcagcggggaccgagagagggagctgtgtctgagaagacgccaaaatcccccttagcgctgcctgcgggagggggagggggcacaagatggcggcggccgggggggggggggcgggagttcagctcatggatcccggcgggcggcggaggggagaccgggccggcggaggcggcggcggcaacgggcgggggagggggctgatcccgcgtctcccctcagcagacaatacaagcgcctcggaccgagtccccgaacctgccctagccaaaatggcggccgagaaagagcggaagtgacgtaagtgcctcattagcataagaggactcattgtccagctaaataggggggggcagtggggacagcacccctaacccccttttccccagggggggttcctcttactcccacccctgcttgcacctaacttttcctgagggagggtgctctcagcacccccacccccgcttgagggaaattatataatccccactgaggggggagctctcgcgagaaccaggcggatttgccattgacccactaggaggcgccgcggataatggccgcagtgcgctcccggggcccgtgtgctcggcgggcgccttcctctggccgcagcgccggcggcggaggcagaagcagcgggccgcagcacgcccagcactcagtcaggtggccgtgctggggatccctgcgcgggcccagctgggcctggactacatctggcgggaggggtgtgcggggcggcctggggcggctccacgtgctcagatgcccgcgcttccacggctgagaagcggcgggaaggcgccgggacacctggccggtcgcccctgacgcctcctgccttaaatgaggtgtgagggcctcgtgcttcacacagcgacttgagatgagacacaaccccatggatgccttagcccttcctggtggggtattcggtgcagaggggccgagattttattaaggtccgccgttaccctgtgacttgacattcttcccagtcacagtgatggactcttctctgacctgaataaaaaaaaaaatgggaatcctagtgccttgaggccacccaactggtgaaacttaaggatgagaagtgatgttgccaataggggcattggctctctgcaagatccttaaacaacacactttgtagtcctagggacatagcttttggtgctcccacaatctgggtagcataagacagcacatggttgctttgtaaatttaggtcaatcccaaccaatacattatctcctcaacatttttgaaccaaccttttaaagtaggttgttcaaagtaacattatgat

SEQ ID NO: 68935 - DNA, 2638 bp, Homo sapiens
ggctggttgatagggaaacaggcactctgaagaatggagagtccaaacttgtacaaccttttttttctttagagcaatttggcagtaactgtccattttaagcacatttctgtcgacccagcaatcctacctcgaagaatttatccctagtacacaagtaaaagtatgaacgcgtctgctgccaacactgatgcaataaaggagcaccgctatgtgtcaagcacttttctaaatttagctggaaaatatggtgtgaacaaagtccttgttctcatcgacaaagcaaaagccaaaaaacagaaacaaccaaaaggcgctggaaataatccagttcattgccatgacctgattaaataaataacacagccatatggaatgttacctaacttccaaagtaatttgctatgtttgtacatgttaatatgagaaaaagtcttcaaagatttcacagcatgatcccatttgtgcaatcgtaaaacaagttacttcgtactgactccaggattttttgcagtttttaaaaacactgcattaacacttccaaattcgaactccacccaccccccatcccggttctaacaatcacaccaaacatccaccagtgatcagcgaagatgctcttctgctttctcctttccagaaaggttatcgtgcccagcaatagctccctaacccacacacaccaaacctcatgcttatgtaagcactcggcaccggagcggagagtgagagctctcgcttggactcccggctcttgccgcagatcctgaccgcctagagggaggagtgggatcacgctttcagcctcgcttccaagtaaaagagtggccaacctttctacggaaaggcgggggacgggagtactacataataaagataaatgagagtctcacaaaacccaagggcaggaatgagaacccaggacacgaagaaaacccaacaagcatccgcctctgcttccctcgcagggtggccctctccccgggccttcctgtgtgaggcaaagaaggctggacagggccgcttcgcgcagccagctgccgacacccgggccggggaagccagctcatctcattcttcggggagggagacctggtgcgctacctctcggagaagcttttcaccagcagccacacgatgagcggcaggttctcgcgctcgttgtaggtaggtaaaagcaccgaatatttgttctgtcgtggactgcgcacttccagctcccgccgagacctgcgaggactacgactgacttccaaggaggccatggcggaactgagccagatgccggaagcggaattacgtaatgtggcgcggaaaaggacgggtcggaccgtaccaaattcggaagcgggggatgacctgtgtgattgatcgctagttcttctagggccattgcgtggttcaattagaaatattctggatttatacatctttgaagtttaatctgaaggtttcttcaggaagtaaatatctattcatcaccttttcccaagctccataaagttttttagtttatcccagtcgctaggagacagaagacggaagcggaaatgcctttcacgacaacttccggaagaggtcgccatggcttcccgggaggaggtactcgccttacaagctgaagttgcccaacgtgaggaggaattgaattcgctgaagcagaagctggcgtcggctcttttggctgagcaggaaccgcagccagaacggctggttccggtgtcgccgctgccgccgaaggccgctctgtcccgagatgagattctgcgctatagccggcagctagtgctgcccgagctgggcgtgcacggacagctgcgcctggggaccgcgtgcgtgctaatcgtgggctgcggtgggctcggctgtccactagcgcagtacttggcagcggccggcgtgggccgccttggccttgtggactatgacgtggtagagatgagcaacctggcccgccaagtgctgcatggcgaggcactggctggccaggccaaggccttttcggccgccgcctcgctgcgccgcctcaattcggcagtggaatgcgtgccgtacactcaggcccttacgccagccactgccctagacctggtccgccgatatgatgtggtggctgactgctcggacaacgtgcccactcgctacctggttaatgacgcatgtgtgctggcgggtcggcccctcgtgtctgccagtgccttgcgcttcgagggccaaatcacagtctaccattatgacggtggcccttgctatcgctgcatattcccccaaccacccccagcggagacagtgaccaactgcgcggacggcggggtgctcggtgtcgttaccggggtcctgggctgcctgcaggccttggaagtgctgaaaatcgctgcgggtctgggcccctcttacagtggcagcttgttgctctttgatgccctgagagggcatttccgctctattcggctgcggagccgcaggctcgactgtgcagcttgcggggaacggcccactgtgactgatctgctggactatgaagccttctgtggctcctcagccactgataaatgccgctccctgcaactactgagcccagaggagcgtgtttctgtcaccgactataagcgactgctggattctggggcattccacc

SEQ ID NO: 68936 - DNA, 3445 bp, Homo sapiens
tgctgcaatggctcatgcctgtgactcccgcttgaggccaggagtttgagatcagcctgtgcaacatagcgagaccccatctctacacacacacacacacacacacacacacacacacacacacacacacatgattacctaggcatggtggtgcatgcctgtggcctcagctgctcagggggctgatgccagaggattgcttgagcctgggagttggaggctgcagtaatctctgagaatgtcactgcactctgcctgaaaacagagcaagaccttgtctctagaaaaaagtcaaacagaaaaccaccctacgctggctctcatctcactcagggtaaaagtcacattgcccagaggactccgatctgccctcttcctctccagcctcaccaccctgcttgccctgcccccaccaccttatgtctgtgcctccaacacatcaggcatggtcctccgggcctttgcatgggctgttccttccactttgcccaaatgtcgctttctcagggaggccttccttcattacttaacttaaatcatgtattcatttattttattttttattattattaaatttgagatggggctcactgtgttggccaagttggtcttgaactcctggcctcaagcagtcctctggcctcggcctcccaaagtgctaggattacaggcacgagccactgtgccaggtcaacttaaataatttaaaattaagacatgccaattacaatcgcatctcctcttgggcttccccgctttgtttctctccatggctccgtcaccatctgacgtagtacatgctttccttgtttatttgtggaatgattgattgaatcactctggcaaccatcttatagtctgaataaggtttggaatattcgatgactctttaaaaaaaacccctgtgtgatgtgtctgagtttttgagtatgcctagaagcacatctagaataggcccctcctttgtctccagctctcggaggcagtaaaaattcatttgccaatttagtggctaaaggaatgagtaacccgttcctcttccctgtgagtgaaacgttccacttatattgtgtctacacattctttgcaaatgtcagttggaatgaatgaatcatgggctgagggattgcaccatatgcagctgacccgatgactgaatctcgcctgtatgatgtcaccagagtcagtgatgtgggagggttcgtaggccagtggtgaccccctcaaatgggaaaagttacttcattgggaggtgacctaccctactcagaggccatgctgaacttgggctgtgtggcacaggtcaagggtgtaaccttcggagacacttctgtctgtccttaagtcacttcacttctctgagttcccttgtgtgcaaagtgaggctagtgttcatctcttcaacacacatttgtggaacaatgtgggctggagatgtggagtgagccgggcaggtgtgacacctgtttccttggagctcacagctggtgggagaaatagacgagacttcgggaaagacagacaacaattgcactgttgggaccggcttgaaggaaatgagaaaggacagtggcacagggaggtggggactggcaccaacaggaccctcgagggagacgggacctggcgcagacatgcgggtgggagtgagccctctggggtctgggtggaggcagcccaggcaggtggaggcaccggcaaaggcaaatgctccgaagtgggacagagctctgtgcgtttgaggaagaggcagggccagtgtggctggagtccggaaaggagagagaggggacaggctaaagtcagggttagaggacgcagggccaggccactgtgagaagtgtgggctgtgttctgcggacttcctgaggactgggcggcgcggtgtgtgaagcccaggggtccagccaaggacactccttccttccgttgggactgggccagcagggctcaacaggacacccctgccagagcaggagggcctcctcggtgggccctgtggcttcctcaatcctgcagacgttcctgggagaaaaccagcttgtggcagggctgtgcagggctgggaaaccggagagggatttcagggtgggcacagtgcggggctggccaagtttgggtcgccttccagctttgagcacttccttaactattgaacagtggcagcgaggtgggtgggctcaccggtgagctccttcagcacggcagggatgcatttctcaggtcgggccatgtggagcatcccatcttcccatgggaccaactcttctcctaagtcagtccccggagggaagtgagtgacagcgctgacctcagcagtttcagaatggggggattggcaggacagctactgtccattaccaggagggggcgccagatcactttaaaacatttgtcattctgtacacttgtgctttaaaaaggcacattctttaaaaccatttttttgttgttaaacaactttagtctgttttgttttatagcataatggctatgaagtcttagattttctgtactggtttagtttttcccttaatggacattaaaataaatacatcccaaccaccgcaaccatagcaattgttgtgaactgcgagccagttctaacagctgcataaatattaactcatttaattcacaagatcagcttatgaggtgagtactattattatccctgctttacagatgaagaaactgaggcagaggttactgggcttggcctcggtccctgctgtggcaggtgtcagaggtgggattggaacccaggctctagaatcagggttcagctctgttgcctctctaaggattgaggagcagaggggcttgtggttcccaggtgtgtgcagccagccttttctaagctcagctgtatgcacctggcatctcttagatgctgtcatgtctagagcctggagctggggctgggattggggcaaggggccagggattcttagataagtaagacctggtagccctctctctgccgaggggcaccgggtctgggggaagaaggtggatctctatccagcagtgtacagacagcagggaggtgggaattggaaccagtccttgctcagggctctgaatgtgccagcaactttcagacagagacccccccacccatccccaccccagtgttgccccagccagtgaccaggatgagcaagagccccaccctgactgtaaccatggagccccacccagccccggaggcgtcagctgcatcattgccgctgccctgacaactgtaaatactgtctttagtcacatgggcactctgccttcagacagaaagaacaaccttcttgtcaaatactgaggcaaatttatcttggacccgggccacagtgttgtgaggtggaatgaaagctgtcactttgttcccagctcaaattgtgctcagagctaaacacccctcctctctggcctcagttttcccatctgt

SEQ ID NO: 68937 - DNA, 759 bp, Homo sapiens
cacacttggagggttgcacagcccggcagaggcgctcctcacttcccagacagtgtggcggccgacgcctggctaatttttgtatttttagtagagatggggtttcactatgttggccaggctggtcttgaactcctgacctcaggtgatccactctcggcctcttagagtgctgggattacaggtgtgagccaccgtgcccggcaaatactccccgccatgttttttttaaagagacagcctgttgcccaggctggagtgcagtggtctgatcatagctcactgcagcctcaaactcctgggcttaagtgatcttcctatgccaggctccagtagctgggattataggtgtgcacatcaggctaacctttttaaaaaagtagacaggatcacattttttcttattagaggtccagctatttagacagtgcaacacaaaagttcaaggccgacaggaagaaggcgtgtgttgtggaatccacagtgggtgtccacaggacagcgcagagactggcagtgctctgtctacctgggagggaattctgagcagggaggactctgaacttgacctagtataactttttttagaaagcaattatgtagtcacttgattcgtcatgtatttcttttttcttcaacaaatgtaatgagagtctactaaatgttgtggcttcaaggattacacttcagatttatttaaactttccaagttgaactttattttttctgtttctattttttagttttttaagatatacc

SEQ ID NO: 68938 - DNA, 1230 bp, Homo sapiens
aaaaggggtggccctcttagatgcagccaagccgtctgcattctgagtcacaaggccatcctcagaaccttctccctaataggaacagaacaggaaactagcatgctgagagctgctgcccccttctccacacgggccagggggtgggcaggagcagggagttccagttcctgggctgaggcatgaatttctcagaaccctggcagcctggaaaacacagagctggtttctgttttccacccccagaaacagcctgtaaccacagcaggagggaggccccgctggcctggtcgggagcaccctggccaggccaggatgcaaacactgctgctgtttagagagggaaaccctggccggctcacatgcccgattcctgggcgtccccggccacctcatactctctgccagctgggtccacggggatgctatcttcgggaggagcagggagttggaacgcagccctcagaacaggggtgcatgccagctgggctagacgtttggcatgcaaagggggtgcaatctcatgggtctccctgcaaaaggagtacttctgtgtccaaaacaagctggtgccaagcacaacagaacaacaaggagcacaggagaaggagaaggagaagcacaggatgaggccgccgaccccacccccgccccaccgaccccggcccccccatcccccgctcccgccgcccccccccctccccgccaaacacatggagccgagtacagtgtcctgctctccaggcagccagctcccgggtttcacaatcctttccatggcactcgggtttgctgtcacaacaactgcaggatgacccggtgctgggcagcactgctggctggaggtgagaaatcgattttctcaccggcccagtggccagcacatttttgaggtcatgccccggcctggcctgtggagtcccccaagcatctgcctctgtcaatccactgtgccctctgaggctggactgcatggcactaagagggccctgggttccaaagccatcctgctgagaagagataacagcctgattctaggaccaggacacagtctgtctcctcagggtttattcactggcaaatcttgttagcagatgctagaggtttttatttgcactcctgaactcccaaagaaacatatggcatcttttttcaaaaaaacctaaagaggcggggtgtggcagctcatactgtaatcctagcactttgggaggctgagctgggaggact

SEQ ID NO: 68939 - DNA, 1002 bp, Homo sapiens
tagccagtcatgaccacctcgggccacttggacacgggtgccccaatatccaaggcactcaccatttgcctttaacaagggatggacagggtaggagaggccagtgtgtttctcgctctggagaccagaccagccctaggtgcagagtcagctggggaaaattatccagccctgcacagacactcatttatttataaagcacctcttctccaatacaatcgatcccccagggcctcacgtggagagggatctggttacgaccatgcttcattgatcctccacgttctgccttagttaattctctacacgattgcccccttgaaaataagcaccaaaaccttatcttcaccattgtgaatgtaaattgttcaaggatggattgtatgcaggtgtccgtttcaaaacagagcaccatgactttaactcaacctgtgcttgattattcaggatcaaacggatcaattattaacagagcaatacctagaggtcagccttgtaaggcacgtggggcaggatgaccctacaagaagtggccccagaggtctttgcttggtgaattcaggggacgtttttgatcgactgtctccctagggattgggtatggagaataccagaagtcacagagcccccagataacctggcttgtcaagacgttttgtagagtaaaggtcaacagcctctgactatgcagcagaggatatttctggcactgcggtatatgaaatttagtacccagtcttgatggtaactattgtggctgtttcaaagctttcgctttacttcctaccccttggctgggctcctgagagttaattttctgaaataattgaggtttcagggtatatcagacgctactgcctataaaatacaggactggaactgggaatgacagccagcaatttaggtttttccttcttctattaagaaaaaactccagtcgcttaactgtacatttttaaataatgtaaacagtgtcatgggctttgcaactcgatggataaa

SEQ ID NO: 68940 - DNA, 3202 bp, Homo sapiens
ctccagcaagagctccctgactcctctatccagagttaccagatttaaccaataaaaatacaggatgttcagttaaacttggactgcagaaaacaacgaatacctttttactgcaagtatgtcccaaactccttgccattgtatagaacatacttttactaaagaaattcactgtttgggattcaaatttgactgcgcatcctatattttcccccctaactccacacgcttttctctcttgggcctgtgacctggcttccctggcttcatagcattttccccatctgaaagtgtcctgcttataaacaagtttcagactgtccactcccaagggcagggacctcacctgccatgtgtcccctgtgcctggcatggcactgcacatagtaggtgctcaataaacacccgggaaatgaacatggaagcaccgggggctgagtgagtggagcaagcctgagagggcacgcttggatgctcagtcaaggtcaatcttacacagaggtcggatttcagctcctcccctgtcccaccctagacgtgactcttctcggccctaagctgtcatctgtggatgatccccacacatttcagacagccagctactctgggaaccaggaagttggggtttcaggcccagccctccactgatgaactctgtcacctcaaagaagtctagtgaccacactgtgtgactcgacttccccatccgtaaaatgggaaggggaggaagcagaccatgagttaccctccctccagctgccaggctatgactccaggagtctgatgggtctagggtaaggacaggagaggaattcacctcgccaagaaggactcttctcccagacaagaaaccaacatggctctgccctctgaaccctgtgtgaagtcaaccaggctcccagagtgcaggtagaagggcagctgatgttttctgagcacctactatgtgcctgatactttcagttccttgatctccttctattgctaatacaccaccaaccccatctcagagatgggaaaactgagtcccaaggtacatagtgtgaggccaatccaggcttcaggccgagtctgctgggtgattcaaaatccagcctttgaagtgggaattacacaaaggcctttggtaccaggaacaatttctgatggtggaagtgcttagacacaatgagtgttctaactaaaaactcatttctctgtggcctccttcaaatggatgcaaacggaatgaactgcaggattcttggacttaaaagcctgttcttcaatgcaggggaccaagtttaggcaaatatttagatccctgaaaacgagaccattttctctatctccacggcagcttcggagttgcaatctggatcgcatctttggagagcagcttcgtgtcccagcaaagctgtgggtaagtgatgggctccagcccggggggccactgacaccagggacatgagtcacagagggcaaaggtccggagagccttagtcatgccccagccctgtctggagtctgacatttcccagagggaagccccatctagagactcccataccaggtctattgtttcagagaacatcacgccgggtacaaccaaacccagggagagaaacaggtgggaagagcaggtgtctgctctaagatggttccgattgttccagggcacaaattcacggaaaaatacttaatttagaaaaaaaaaaattattttaagcatatgcatttatatttattaaacaaagctcaaaatacaacctttggggacctccaagtaataaaatgactcatgtcaggatatgatgactcagtgggaaagagggaattccaccacccacgcgtcctttctaaaaaatcaatttgtcctctggacaggtgatgggagcctctgccatcagaccgttccaagaaaatcgtccagcaaaacaaaacaaaaaattctcttcaaacaatttaagtttcaaagctgagtaatctgatgcaggccagtttccaacctacgcccccgcaggacacacagagccagggagctagttggccaagcctgggggcctgaattaagaaggatttaccagccgaaaaattccaaaactctgtgtcatgtgaaggaaccttccaaaacattggatcccacccaggcgcagcgagtcgctcaaagccatggcaacccctttcccgctgccacatcacttttatttttgtgtccttagattttttcctgttttgcaatgttttgctgggacccccgactccgcctgaggccctgtggccaagggccagggttcccactgaagtcaggaacagcctggacttcccagcgtgaactttgcctgaagggttacacattttttaaatttcagagaacatccaaatggcttttcagcaattactgagaatgataaataggaaagaccctgattgttctgtttggtttctctgtcctctctgacatgactagaaaaaattactcgagttgacgacaaatgctgccttgggattccacctctgtcaccagttgtgggctgacctggggtgcatgacttgacatctgtgagcctcagttacctcatctgtaaaatggggataatgctgcccgcttctcagggctggagtgacaactaaaagagatgcattcattcaacaacacaaatgagcacctgctatgtgccggggaccactctggatgctgaggatacagcagcaaacgctgagactctgctgtcaaggaactaagagtccagcatgagagaccaggtgataaatgaacagacagacaaggtaggtgatttcaacagcgctaagtgcccccaagaaaacagagccgggcagtggcacagaaggtgacaaggtgtctgggaagcgggacaacttcagaatgacggtcaaggaggaccccgtggaggaagtgacctttgagctgagactgggaggaataggaggccgcaggcttgaaaagaaatggtggaggaggccggacgcagtggctcgcgcctgtaatcccaacactttgggaggccaaggcaggcagattacgaggtcaggagattgagaccatcctggctaacatggtgaaaccccgtctctactaaacaaactacaaaaaattagccaggcgtcgtggcaggtgcctatagtcccagctactcaggaggctggggcaggagaatggcgtgaacctgggaggcggagcttgcagtgagccgagatcgcg

SEQ ID NO: 68941 - DNA, 971 bp, Homo sapiens
actagccagccacctattccagaagccaggctgcagaaaagaatgaaaacctgctccagccaccttcccagggcaggcaagaaacagatcccagccacagccagggccccacctcctcaggcctctctccttccagcgtgggccaagaggccaggcccgccccctggggtgagtcagtctgagctcttggcattcctccccaagcccagagaactgggcagagggccagccccttccatggcaggagcctacggacctccccatccgcgagcctgggcagcaaccgcgtgaggcccacggcccaattctaacccttccctcctgccttgcctgggcctccaggccactggcatccccctgcatctgctggggccactcaatggagcaacgatgcacttggcaacatttcaggagtcgccgtgcaccagccagaggcttccagacactccaccttgagagtgccacccagcagtgactcaaaccaatcccctgatggcttttcccaaccccagctcagcccaggcaccctctgttcccagagacccgcctgccagcgctgccccaggggctgccggctacaaggatagattacaaagacctctccgcagaagctgctaatctctcccacatgggctgggttattaatcctttctttcaatatcaaagttttgtgatgacttcctaattgagctgccacaaatgagatttattagcagcaagagcagcagctgcaggttcaggctttgaagatctgcctttgatgaaactggggagcagctgggggcttttggccccggggatgggtggtgcagtggcgagagcatcccacccattttacaggtggaaagcctgagtcatcgctactgggcaagccagcccaaggcttgcagccaggaggcctggggactggaaggggctgcaagctctcagtgctgggcgggaggctggcgcggacagttgggctgtgaatc

SEQ ID NO: 68942 - DNA, 2101 bp, Homo sapiens
cttttctgtaaatctgaaactgttccaaaaactgaagttttttttttgtttttttttttttgagaaaacagattccagggctttcattgtggtcatttagatacccatctggtggccaccaagcagcacttgccaagaaaaaccataaaaagtacctcccttcagatttggcttggaaactatttccccggaaatccccccaccccacccgacaaggaaaataaaagctgattaccaatctgggaggggtgtgagtattcgttccctgaaaaacatgactttaatcttaatgaacagaaagaccacggatattagtgcggatcgtttgcagattcttaattgtatcttttcaaagcaaaagatgtcctccagattgcaactctagaagactggtctcttctgttggctaattgtttccatctccagccaagacacaaaattattactaatgaccatctctgggtatccaagggaagaggatacccaaagctaaagcaaacccctcacctaacgtggccagagaggacaccgatggaagcgaaaacttcattatctgcctaacacagtgtttgtgggaaacatcaggccaccaagcctccttgacaggcttcctccacgagccagtcagcacaagcccttcctacacactagatggaggcaagcccagagtgcgtctggaagctactaacaggcctgccactgagccttcaacaagcattggctgggctgggctgggctgtcaaaatcaggaagcctggttgggttttttgttttttccaagacaacctgctaaccagaaatacacagtgaggttgggcgtgtggccgcttccccctcctcctcctcctccctctaacgaatgctcctgttaaacacgtgaagtgacagataagcattgggcccagcccggggaagtccccagcccccagcaactgagggcagttggaggcacagagtgacaaagttcaggcagaaagagcctgtgtccttctgaatccatgctgcagctgcccctcaccctaccccatcccaccacatccattaggactaagcgtagaagatcacttaatatagctcagaccaatcctcttgtgagtggtaagtgatgggttcagcagcagaacccagggaggaaatgggccggccttataataccaaaggttttaaccctctccagcatcagacagacaacctcttcctcagtttcaacacaaagtccccgtcaaccactgctcacaggaggtgatgggagctgcgtggcctcacttcagtgcctggagggaaggagcggcctcctacccttgataactgggttcagctgcaccccccttccttctttttttggcaactcctccctgctaactccattcttcgcttcctcacctcctccctccaaaggcacagaaatcatgtcccttgccctttgacagcccagtcccaggcaagaggccagcagacagcacccgccccccagccttgggacctgcctgccaccttttgttttgctgagagtgaccctcagggagcagtcatgagcaaccagaaactggtgcccctaaggggcaagagggagccgaccgccccctaagggtggcaggggccactgacgcctcccctccctggcacctgggtaggggcaccctccctccaggccccttaggaagggggacggctggagccaagaggactcctgtgcccagtccccaggcctgagcccctggcgggctcaggggccaggccaggggtagcctccaccgaccttcgttcggattcaaatactcatagtcgaagaggatggagaagtcaagctcgtcttgggggctgcccccaggctcgtggcctggggcgtccccgccgtcgggttggggctgccgctcgggggcgttcatggcgcgcagggcgggaaggctgcggggccgggggcgagggcgggcgcggctggctctgggacccctcgcagtggggctggcggaggcggctcgagcggcggggtccctttcctcgtagggacgcacgccgggtccggggacggcgcgcctggcgcagcgggtcctggacgcgcccggggaagctgagcggcggcggcgacggcggcgcgagc

SEQ ID NO: 68943 - DNA, 1093 bp, Homo sapiens
tcctggacgtttgcccaggggcccttcccagtccctcacggcctctggctgcccagatttttgtgtgttcaaggatggtggggaggaggaagaggagaaggaggaggaaggaaaagaaataaataacggtgccttgtgtcaactctccaacttcgagaattttttttcaaagagtttatttttagattcatttagaaaatccaaggtttccagtgatgctcagaggctccagaaataatgaaatggccaaagagaagctgaaaccaggcaacccatgtgtttacacatgctctgaataaacaggaaaataaagagaaaggatatcatgaactttgcacagtgtccagaagaaagtccttgcgatgccacgcatggttcacagcaataggccacgagacccccagaaggtccgtggggagggggagagggagaggtgcagcggtcaagatgccttttctggacttggactaggtctgcctcttcacctgcctgcagggtgggaaattctgagcccaaagataaagctggctttgaaaatggacttcagatactgttgtgagctctgataaaattgtggatagcaaccaaggctggtgactcatcacatacacaccccccctccccccgcacgctcttacagagagacttgaacttaaagaggcatcgagaggcagctggctccatccgtgggaccactctgttttccagtactggcccacaatagcctcactgggcagctcgcagacataaccactcctgctggagatagatgctggcccacagagaccagctggaactgcgcctgagaaagccccacccccagccccgcccaggggactctcttcaagcctgcctcaaccagggtggcctccagcaggacagtctaagtaatgctgctcccccagagagcagccattatctgtccacctactgtgtgccaaggaattcaaggtagggaagtctcactgactctcgagtaactcaaaaatcgtggcgccaccaaatttcttgcaaccaccctgcaaggaggggatcctctctcccactttccaaaagggaaactgaggcacatagaaggcaggtggcttgcctg

SEQ ID NO: 68944 - DNA, 750 bp, Homo sapiens
cagggcttcatgtcaccctgaaaagtttcataacaaaaacactaaaagtacttggggtgttggtacatttcgtctcaaaaccttattagactgaacagtgaattggcaaagcttcctacttgccaattattcaaaaatgcaaatatccaagagcaaataaatattcatctctcaccctccctgccttttttttttccttttttttttttttaactaagtccagcaaaatattctggtcaacaacatgaaaagaaatgtctgtttttcacggagcctctggccatgaaataaattctgaagctatgaaagcacagtcttgaaactcagggcagttgggcacgtggggtccggctggttgtggaaaacaggaaacagcaatgtctttcagtcctcaagttccccctagcggctccggcggaggagtgtccgcacatggacggaagttcactgcaggcaaatgcagaggcttaaggtcgtgcagggatagcacacgtttaagggaaagcatggtcggtccctacctttgaaaccacataccttccttttgctgctgtcatgagataacacaactaagttacaattatctttctaatctatatactgaggatggccctttccattgagaaccaaaaagagggaaccagcagctcacactgcagacagccactaattacaccatttggtatagtatttggtatagtaggcggaggcataacttgcttcctgagacacacgagcttatacctccgg

SEQ ID NO: 68945 - DNA, 2602 bp, Homo sapiens
gagaaccctttttttaaaaaattctataatttaggttctagccacgaacacgtgtcttcatttctgtccgcattcctcagcacctggaccaaatcgttatttaacattaggcgcaataacaagacctttgacaaagtaattactgtggttggcaagtttcagtatccacggatttaaatgaaaagctgtactgagggcatccttcatgaacttctggattttgtaaagcaatctgctttcatatctacaaaagtcaaatgcttccactaatatttcaaacatgggataacacagagccatgggattttgtattccaggtgaaacaattcccaagcaaggcaaaaagagaaccacagacggtcagatgttgacaaaggcctcactcaggagaccatctgacaacgaatgaattagaagactactatgatagcctgaccaacatcacaggccacaggttcaatgcctccacccacatatctttctctcttaaattaatactttcccacctttcctactaaaatgttccaggaaggagaggaaatactcattggtgctgaaactgcttcttttaattgttaaataaagtctcatttgcacaccaaatggtcatgcgcatacatccttaaggcactgaaactgaccaggggctgtgtttggatgatgcctgtcttaggcctggccttcaaacatcctcacattccccatatggaagagtttcacattgtacagtgtttatctctaacctcctccccataggccctttaacctacacacatttcttcttacttaaaaaataccaggggaaaacaaaaacagatgtggcatccacagaggcaggttatgactctttttgccctggggaaaaaccactggtccccttatggagggagggagggcagaacagctccacacgaggtcagaagtgacttcagaaccaagcacaggtcactattgggagaggaattaagatctccaaatacaaagggccctgacttgggcccctgggcgggtgtctcgaatcctataaagcccctgagtcatttatagcatcccagccaataaatgagacaccaaggcagggaaaataggcttccctttcccattagtaatccacagctagggccatttcctgacaagaactccagcctgttattacagaaaagattaatacaaaaattaaacgttgagtcaccaggaatgccagttttctttccaaatgcagttaaaacttcaccacatatgggcattcatactattaatggatattaggaatgggttgcaattgactgaaatacacttttttttttttttgagacagggtctcactctgttgcccaggctggagtgaagaggcatgatcacagctcactgcagcctcaaccttctgggctcaagtaatcctcccacctcagccttctgaataccgggaccacaggcgtgcaccaccatgcccagctttttttttttttttttttttttggtagagacaaggtctccctcttattgcccaggctgttttctaactcccaggctcaagtcaacctcccgcctcggcctcccaaagtgctgggattataggtgtgagccactgcacccagccagaaatacactattaaagataaagaatttctgttatgataaccctaactaacctgccacatcaaaaaagctcagagctgatgactcactcacctcaaagggccaccatcaaagagacaggctcagagctactacctccaaatgaatcagctgagccacaggctgattaagtgactaagtaaatccaatgtttactgttttagagcagacatcatctgcaacacaaagtcaataaatttaaatgtacccatatatcatcatcattctcaacttggatgattttgaccctcatttggtcatgtctggagacataattggttgtcacaactgtgaggggacaggggtactatagaaatctgtagcatgctgcttaacctcctacaaggcacaggacagcctcccatgacaaagaataatccagccccaataatgagaagcctgacagccactgaaactataaatccagggcttaggaccagggtgagttagcgcaactgaactgtgctagcacaaggttggatcttgccttcatttaaaatttcaatatactgttcttcacgaatgttttgcgcttgagtttttaaaatattgcactgcgccaggtgtggtggctcacgcctgtaatcccagcactttgggggaagacgagtggatcgcctgaggtcgggagctcgagaccagcctggccaacagagtgaaacccagtctctactaaagatacaaaaattagctgggcgtggtggcaggtgcctgtaatcccagctactcggcaggctgaggcaggagaattgcttgaacctgggaggcagaggttgcagtgagctgagatcacgccactgcactccagcctggttaacagagcaagactctgtctcaaaaaaaaaaaaaaaattttttttcaccaaagtatgatttgctttatttattttttttttggcacccggttaaatttgctatgtgagttcctcacttgtcttactctagtctggactgtgttatgaaa

SEQ ID NO: 68946 - DNA, 1128 bp, Homo sapiens
agccttggtgacagagtaagactccatctcaaaaaaaaaaaagttatttttccagatgaaaaaggaaaatatgaaataactttctcacccattgataacagccattcaactaggttaaagtgtaagtttataaataacttcgtttacactgcttcctgcttagaccatttatttattattttatttattttttgtttgtttgtttttgagacagggtctcactctgtcacccaggctggaatgcagtggcccaatctcggttcactgtaacctccgcctcccaggctcaagtgatcctcccatgtcagcctcctgagtagctgggactacaggcctgcaccaccacagccggctaatttttgtatttttagtagagatggggtttcaccatgttggccaggctagtttcaaacgcctgacctcaggtgatacacctgcctcagtcttccaaagtggattacaagcatgagccaccgcgcccagcctagaccatttatataaaggaaaaccaaaattgattttcttaggatttgactttaagacaaataaaggttttaacagcagatagtctgctaaccagatgtgcaatggtttcatacaatctggctgaaatgcaaaagcaaatattagaggagcagagccaagggaacaatgtttctgaaaaaggtaactaatgtaacaaggagttggcctccacagaaaccatcatctctgctgggagttcccctataatcagttagcactgcgcaaatatttgctgaattgtctgcatgacacaccaaccttccaggaagttacagggtccaggaaagaacagtctcagcattgacgctgggcagatccaagaagaacatgaagaaaaattaaaagtagccagatatggtggctcatgcctgtaatcccagtactttgggaggccgaggcgggagaatcacttgaggtcaggagttcgagaccagcctggccaacatgacgaaaccttgtctctactaaaaatataaaaattagctgggcatgggccgggtgcagtggctgactcctgtaatcccagcactttgggaggccaaggcgggtggatcaagaggtcaggagatcaagaccattctggccaacatggtgaaaccctgc

SEQ ID NO: 68947 - DNA, 5216 bp, Homo sapiens
gaagaagaagaaaagaagaaagaaggaggtggagaaggaaagaaagaagagaggagggaggaggagaaaaaacaatgaatgaaaataaacacagggtccagtgggatggggcacaccgccagtccagttcctacacaagcctagaccatctgattctgcaagacaaagacattctgtaagcaaatattcagttataaaatgttggcaactgattcaatttttaaatattatacaaaactaaaaccacaccaagatatcttttttttacgaccaaagtcaaaaatcttaataatggcaaggatggacaaataggcgctgtcactgccagcaaggatccaagatggcatcacctcagggaggacattttgacgatgctatcaaaattacaaatgtaccttcacttcagccattccccttccagatattccgtgcagtctaacatgggcacaaagacttgtgtgacatttctagtaatagtaaaccattagaaaaaataaatataactgaccaagctcagtggctcacgcctataatcccagcactttggaggcccaggttcacttgaggccaagagatcaagaccagcctgggtgacagcgcctctaaagattagatagatagatagatagatagatagatagatagatagatagacagacagacagacagacagacaaataaaatggaaaaataatctaaatgaccatcagtggtagactggctaaacaaactacagtactattcaatttaatactacaaaggcattaaaataatgatcaaaggccaggtgcaatggtgtgtgcctgtagtcccagctatttgggacgctgaggcaggagaatcacttgaacccaggagtttgagacagcctaggcaacacagcccccacatctcaaataagtaaataaataaataatttcaaaaagggaatgaagaaggttgttatatactgacacggaacgagctcagaattttttttttttgagacggagtctcactccgtcacccaggctggagtgcagtggtgcgatctcggctcactgcaacctccgcctcccggattcaagcaattcttctgcctcctcagccttccgagtagctgggattacaggtgcccaccaccatgcccagctaagtttgctatttgtagtagagacagtttcaccatgttgaccaggctggtctcaaactcctgaccccaggtgatccacccaccttggtctcccaaagtgctgggattataggcgtgagccactgccggccagaatgtactgttaagtgaacaatacatgtactgtgtagggtatattaataatagaataaaaacaaaaaatctatgtctatttatctatataaagatgcatggtttttttgataaatgcttaaaaatttctagaacaatacagaagaacatggtaagactggctgcctggggaagggtacagggtagctgactagagagagtgggagggaaactgactttgcaatggctacacctctgtagcttttaagtattaaaccatgtgactctgactcagtacacttttttctaatctaaaaataaaataggccgggtgcagtggctcatcctgtaatcccagcactttgggagataggcagatggcctgagctcaggagtttgagaccagcctgggcaacatggtgaaaccctgtctctacttaaaaaaagaaaaaaagtccaataaaattagctgggtatagtggtgggcacctgtaatcccagctacttgggaggctgaggcgggagaattgcttcaacccgggaggcggaggttgcggtgagccgagatcgcaccacttgcactccagcctgggtgacaaagcaagactccgtctccaaaataaataaaaataataataaaataataaagctcaccccgctgcccaaacagcacacagctctgtctgcagcctctgatcttgccatgagcttgtaggtcagagagcagacaccattcacctcccccaggcctggcacacaaacgtgctccgtcactaagcgtgggctgatgactcattctcctgggccctttcacatgccccagtgcccagcactcctccctcacctcatgcatttgtgtttacccaagacactcggtcataggttctaacacagacctaggccacagagcctggctggcaaccccacacagcacgagcccaaaaaattccagaaaacaggacagaatccagtggaaggcaatttcctagacaccaaaacaataagcaaaaacatgagtaagtgctgagtgtgtgccaagcgctgtggcaaagccctcaacgcgaatgacttgccttgctcctcccgactgtcctacatcaagggcttctatcctcgccctcttgtagatgaggacactgcacctcagagggtcttgcagcccataagggacagagccaggatgtgagtccagcaggctgaccccggagccagccctcttagctggagtctggcaatctcatctcgttgtagaatctgagagccacctctcaattgtctagatggcaacctagggaggaatccaaatggcaggaacccagcagagacacaccaagggtccccactggcactgccaagcccacctgcctcctccctccaagcctgctatggcagctggcactgctatgggagcgtccatgagcaacacacattggggtctaagagctctacgtccaacaagaggcaggaggctggacgtggctccttccttgcagccatgggtcacgcggataaagaagggaaggaagaagggaggggcatcaggaaggaagaattccctttttctctgcagatgaggattccattgtttatcctccttctggctccagtgctcaacatgtaccctcactgaagcccattgtgggccctgccaccacttatacccccaatgaattaggaatgcaaaactcttgagattttttaacgtttctgggttttttttgttttttttttttttttttgagacagcgtcacactccatcccatgctggagtgcagtgacgcgatcatggctcactgcagcctcaaacccctggactcaagggatcctcccacttcagcctcccaagtaactgagaccacaaacatgcaataccatgcccagctaattttttatttttcttggtagagatggagtctccctatgttgcccaggctggtctcgaactcctgggcttaagaaatcctcccacctccgcctctcaaaatgctgggatacaggcatgagccaccatgccctgttgctcctattcctttttgtttgttttttgtttttgttttgttttgttttgagacagagtctcgctctccccaggctggagtgcaatggcgcaatctcggctcactgcaagctccgcctcccgggttcacgccattctcctgcctcagcctcctgagtagctgggactgcaggcgcccaccaccacgcccggctaatttttttgtatttttagtagagacggggtttcaccgtgttagccaggatggtctcgatctcctgacctcgtgatccgcccgcctcggcctcccaaagtgctgggattataggcgtgagccaccgcgcccggccgctcctcttctttattcactcgctcatttaatcaagcagccagtatttactgagcacctactaggtgccagcctttgtgctaagcactgggattctcacaagacaaacgagggcactgctctcacagagcctacattttgtaggtgggcaaggtaggaacaacaacaaaaaaaaaaaaacaagaaaaaaaaaatatatgctactcagcggtaggtggctcctacagagtgaatggtctggaaagatgtcccaaagacacagctgagctgagacctgggagacaagagacagcagcttacgagctgtgggaccctggactagttaattaaccctgctaagcctccgtttcctggaaaataaaacaatgacagtacctagtattggacgatgccattaagacaatccacttaaaatacctaagacagtgatgctggcacccaagacaccaacggagtttaacaaaattcttacaagaaaaactactgtgtgtcactagaacggaagccccacactgtcagggatttctctcgcacgtgttgaccactatatccctaatattaaaactgccagagacagagtaagtgctcaggaaatatttatggagtgaataaacggatgaatcaacagtagctatttttagtcttcatgctataaacctctgttaacttttctgtgagtgtgtagagatctggatgccctttcaaacagccggcaattctctgaaatatccaaaaacaaggccaagattcttaagcactggttttctgtggtatcacacacaaaactgcatttttgagtgcttctttgttggtcaggcttatccgatcccagttaggtgacttctcaggccccgggcaggagtcagtgcctctctctactttctctttgtttgctttaggaagggccaggattcagaatgaaaacattacctgtggccgggtacagtgtctcatgcctataatcccagcagtttgggaggccaaggtgggtggatcacctgaggctgggagttcgaggccagcctggccaacatggtcaaaccctgtctctactaaaaatacaaaaatagctgggggtggttatgcacgcctgtaatcccagctacttgggaggctgaggcaggacaatcacttgaacctgggaggcagaagttgcagtgagccaggatggcgccattgcactccagcgtgggcaacaagagccagactctgtctcaaaaaaaaaaagaaagaaagaaagaaaagaaaaagaaaacattacttgtaaagtgaaaataaaatacaaatcaacttgtgagactataaggcactggttaagtaaattagagatgtctattcaaagaaatatgctgtcattcaaaatgtcatttgcatatggcaaaaccctgtctctattaaaaacacaaaaattagctgggcgtggtggtgtgcacctgtagtcctagctacttgggaggcagaggcggaggcaggagaatcacttgaactcggaaggcggaggttgcagtgagccgaaatcatgccattgcaatccagcctgggcaacagagtgagactccgtctcaaaaaacaacaacaacaacaacaacaacaacaacaacaaacccacgttctacatggttcctag

SEQ ID NO: 68948 - DNA, 417 bp, Homo sapiens
ccgtctcaaaataaaaaacaagaatgtaagtcctgagagtaatgagagtcctacctaacaccacctccatcacatcaaagagaaagggcatttttgtttccttatcagtaaagcaagaataaaaaaaattaccaacatcaaagggccattgtgcagcatgaaagaggaaacatgagttcagagccaaaacactgcaggtcctaaataaatattcatctttttcctccaccgtcagataatgagtcacataaacatgctgacataagctctatgctctcaggcaaaatgtaggacctctgaaatgcctctgatgcctccacccaggtggcgggcttcctgtctagattccagtcccctttgtgggatggaaagaggagcacgacaatccgttcccagggtctgcagcacacatcggtg

SEQ ID NO: 68949 - DNA, 1757 bp, Homo sapiens
cgtctcaataataataataatactaataataataaacgcaaaacagagaagggaggagtgagggaactatctttgggtcagacaatccggagttcaatctccattttgcagtcttccctatagcccttaacctccgtaacctccagtttcctcctctgggtaatatcagtgaggcctcttcttcggaggattcaggaagccagggacaaagaccccacaaaatggccgccagcaccattctttttttttttttttttaattccactgacacctggtgaagccacccttatggttcactccacccgccgcgtctcctgttccgagcaactgacgctgcaataagcggccgccaccgggaaatgcccagagaggaccagacgcccgaggaagggcggagcagagcggccgcaggccccgcccaacaccgcgctcagcctcccgcgggctccagcctcacctgcgcggcctgtggagctgcacatctccaggccccgccccccagaactctgattggcgggtctaggcgggggccgggaaatctgcatttgcaccagcgcccacccccgtccttcccacccccgcccctcacgcccaggtaagtctatggcaggcgatacgagagccccgcaaacctcaacgcgtcacgctgccatcctccgaacaggaagacggcgaggcgcaaaataccaacccgtcccctcttcccaaatgcagaaaaacccttgcctgttccgcgcctaagctgccctcggggtctcctactgcgggaagggcacagcaggtggcagcccctgtcccagccgtgggattccttccccgaaattgtggggggagaacacaaggggtagtgtcaccaagcggccagtaggagaccctcccaccctcctgcgactgctggttcgggtccaccccgggcggagggggaaggggccaccggagcgcaggtggtctcggcgcagcctcctggggctgggacccaggggcgctgatggggtaccccgaggcgtaggccgcgcccccctaaaagctgagcatatctgggctcccgagtaatgctccaagcgcagagctcggtgtgacactgaccaaattgttacctcagatattaattacggacagatattaattacggaacaataaaacggtgagaaagcacggctgatccgaattccgcgagtgtgtaaacagcactggggcgggcccggcttctcggggtttctaaaggaaggtgggcaaggaggcccaggcaaccgggcgctcgaaccccaaagggccggcatcaggctaggtgccgcccggggctgaagcgcagggaccccctccccacctccccgcctccccagccctgccccaggctcatggcgccgggcgcggcgcgcggccaacctgtcaggcccggccaggctggcccgagcgccgggctccgggaggcgcggacaaaggaaaacacgggcccaggcccactcacccggcgcggggcctgctgtccatccgcttcttctggcgcaccggctgcagcgggatgttgtccgtcatgtcggcggcgccgcccgccttggccgccgcgccccccgcgccgcctgggccgccgcccggtccggcctccgcgccgccgcccgccggcgccgcgccgccccgggggaggaggcggcggcagcgggcgggccgggcccgcagcgagggggcgagctcgcgagcgccgggccacgcgcggagcgcccgcgcggcccgaccgacggacacgggcgcaccatggg

SEQ ID NO: 68950 - DNA, 2123 bp, Homo sapiens
caaacgcagccattaaaaacgcactgcttgggaaaacaaccttctctcccaaggaggcaattggaggctctgcaaacacattctagccgccaggagttattaccaagaattccacacttggcaaagaacagcgggcacagacgacgatcaagcaggcgaccggcacgaatcccctagggtacccatccttggcccagcccagcactctccattcacccccacaacccgtcccacccaccaggtgtgagccagtacctgcgaagggaccccgcctcccagcaaagggctaggcttcaagctgggcctccagggggcgcccgcgcgcaagccgggtgggctgtccgcgacaaccctggtgatcaatagccaactcccctccctcccaaatcgcagtggcagcgcacggccaggcccgaggttttagctcagctcaggttgactctgattccaaactccaaccatcgttaatttcagaagccctctcgtaacaagcttccctcccgaaaggtgccaaacaccaccaaaagccccacgtgtgtgcgcccacccaaaatgaagggggaaggggaggtcagcgtaggaccaggggaggggtcagaaccaggagctcgcccctcctctccggaggaagcaggcgggctgagggttaacccttttgttccaggtgggccaggccacgaagccttcacgctcccctcaacccccaccccaccccgcccccaaccaaggcacaaagagagtccctccaggcgcctgggacctcgggtgcgcgctgcgctgaccacccggcgccccgaaaacgcccagccatcccctccgtcaagccgatccttttaatttgccctggaaaaatgttaaacggggaattctattgacgtattataaacttgggaaatgtattacattcagtctccgacaaaaaggcggggatacggaagccaaaaagtggcgaccgtcttctcgggaaaccccgggtatcagagatggtctctgagagtcctccggggttgccgcgcacacccgtctgctgcagggaaattagaaagcaggcggggagcggagcgacgaacaaggccggagaggaggctacaaatcccccctccccccacgcgcacgctaaaaacttatcaggcgacaatttggcgggccgggatggagacgagatagtggaaaaccgcctcgctcctaaaacctccgcggtgaagtgatgaagtgggaacagagttggccccgccgttcctggcgcggctggggtcccgaactcccctcgatctgggaaacgctggccgcggaagcgtgggccaggtcagccgcgggagttcgctctggccccccacctctcccctttcacacccaagcgcaaatgtggaaagccgagcgctccagaaaagccacgcaaaacgggaggccggtgcaccccagtggggctgccgcgcgcccgccaccccggccactgggggctcgcaccctcgggcttgccgcggttatttttaggaagtcggaaatcaaagatggctggaggtcaggccccgaaaggttagggcgaagatcggcaggcggcgcagcccgggcagaaaaggcgaaatccagaaaagaaaaaaattttaaagggaaacattgagccctcctcccccacctctctgggccctccaatcccctgcgcagcgcgggtggcccgcaccccagctcctgagggtggggagaggtcgcgccccctccccccacttggcccgggaggggcgcgtgcaacagatcgtcctcctccggggggtcttccaggggtgcgcccctcctccagcctccaagaaaagccccaaggggctggtggagagggtggggatcccccggggttctttcttttgagagcgacgcgagggagggggacctaagttacaaggggggggggtaacaccagtgaggggagtggaaccaattaagtgaggggcagaggacaaggagaagggaacctttcgggagcgagaacagaggagcgagtgggggtcaattttacaattaggggagaaagctgggggtgaaacttacacaagaggggagaagaggaaaaaagtgtgaaatgtgcaaaaggcggggtggtggggagaggaggagacctctcctcccgg

SEQ ID NO: 68951 - DNA, 1170 bp, Homo sapiens
ctattttcctgtattggggcttttttttttttttttttttttttttgagacggagtctcactctgtggcccaggttggagtgcagtggcatgatctcggctcactgcaacctctgccttcaggttcaagcgattctcctgcctcagcctcccaagtagctgggactacaggtgcgtgccactatgcccagctaatttttgtattttttagtagagacaggtttcaccatattggacagtctggtcttgaactcctgaactcgtgatctgcccgcctcggcctcccaaagtgctgggattacaggtgtaggccaccgcgcccggccgcgttggggcttttagaattgaatttactgtctgtgagagttctcttctatttcaattttagggctaaagaatgtggttttttttccctccaggcaaatgagattaaataaatatttaaattttgtgtgaagtttatttaacattttccactctttgctattgcttaagtgcaaagttttgtctttttttaaacattataattgctacttagaattctaagctgtaattttgctgttatgtaaattacacaacttcagtagtaaaaccaagcaaatagtatttattccttcctctgccttggaaactgattccttctgaaaataattgcagaaactaatgaaagcaagatccagttcctgcctagatttggctggtctgattttaagccactccccacaggaaataacagataaaatgatgcaatactagctagcattcctggctgtttctgacaatccaggagctatgtgactaatatatcaagtgaaaaaaatatttccttgattaaagtcataataacatattatgtgtaataacacagggagtatagatgactcagattccaggaataatagaaattggtggctcagcaacttaaagcagctagaaaggattgttatgccacatgggggttggagaagggcttgccaattgcacactgaagttaaacaaaagcctaacttaatttttattcctggttaaaaaaaagtctattatgtacatccagccaaaaaaccagtgccttaaacaagataaatgcgtattttctctcaattaaacactacataggtagtctaaggcttcaatgactctccttggtcccaagctgcttcttttttaattt

SEQ ID NO: 68952 - DNA, 784 bp, Homo sapiens
caaagtcaaagtctagtacccattcctcagtaagtactcaataaatgctgcctattcttcactggagagtgattggaattagcaatgagaatttgtgtagtttatattcaaagccactaaaatgagaagtccagggcaggggcccctcttgcccaagcctaaaggcagactgtgggctagatgagacatctgcagtgaggtacacagttgatatctgaagagagcacctagcagagcctatacatttagaggcatatgtatttgggggaggagaaggaagtggaaccttcaaagggggtcagagaaagaagagtaaggaaggagaaaagccaagggagggataagggaaggttctgtttgaaaataaaaagtagaggccttattttcagaacagtgctgagagtgcaagtgagttagaatggcattttataagcttcaggacatctatgagtcaccttggagaggggagaggtagatatttaaaatgaagattcccagaaagtatgactcagtagttctgggctgaggcccaggaatctacaggaattctaactgggtgtccatgtgtctcacccccactacccatgtacaaaaaaatacaaagtctacaaaagaaaatgggtagctttcaacaggttgctaagggagtaaaggaagggatggtggctggaggtgtttatttttcctgtatgtatataatggtcaaaggcactcaaatatctgtgactttgggtctggatggatgaattaaattggttggttttccaggattaaaccaaccttg

SEQ ID NO: 68953 - DNA, 2127 bp, Homo sapiens
ctggtagatgggttctcaaacttcatgtgcttcagagttgcccaggcagctacgaaggacagcggatccccagccccacccccgagattgaatgggtggggcccagaaagctgttttaaaatacacgctctcgctcccaggtggctggttgcactcagtctctggaccacactttgggaaacaatgcaccgggagaaaccagggacttgaaaaacgctgatgtcctcctcggttaaataaaaactgaaccccaaacccaaataaagcgaccacggccccgttttccattcagatctccacccttaatgaggaaaaggctttgcaatgagccggcaggacctcgtgagacctggtgattcccccaatctccaggctctaattttgagccactgaggcagaagttttcccatcagtgttgccccgtttaccctagattcctccctttctcctgcccgccccaaactccgcctgatggggcgggaatgcccttagggggtggcgattgtctgaacggcgtgccctcccccactgttcccttccaaggggtctcgcaaggctggagagcgcccccggtcttgcgccaggtcgggtgcgcccccaccccaagcccactccggcgccccctgcacagcgcgcccgccgcggtccccgagacgcggctccgagccgtcaccccgatttcggggccccgggcctgctggctgcgtcgcagacgtgcttgggcccgggccccggagcgcgcactgggccccggagcgcgcactgctcccggaaaagcacttactttgcaccgagcccgcgaagctctcgccctcgctgctcgcgttcatggccgcagactgggaggtccccggccggccgggatgccaaagtgggggacgctgatctacatggtgcaaggacttttccttttatttttccacaccccccaccctgccttctcccaactctgcgaggcggggaggacggatgtaaagcaagctgcacttccgctgcctagagggcgctggccgggcccggcgccccaacctggctttgcagcagcggctccccggggaagcggcgggcgaatcccgaggcccaggcccgcggagccccccaacgcccccggggagctggatggccacgcgcgtcccggcgtgctgggcgaccgcgggtggcgagggatgcgcccctgcccgcactctgcgttctccgcggacgcgattggcctccccggctcggggcgccttttgcacctgcaaccccaggcgttgggcccccagcgcggccgtgcagcagcgctgctcccgggacgcctgggtggtttgcggggagacccacgtgcggctgccgttgcggggtgggtgcgcggggcgcggcgagctccggagaaacccaggttgggcgtgagcgctgggcaaatcagcaaagcgctgggcgggtcccttgccccgctagggagactgagaggaccgcgaagaggtggggtcgtagcgcggagggacccctgctccaggagctgccaactttatcgtgcatcgcagtcgcctgaaaggcttgttagaacacacgctgttgggcccaccctagcgtttctgcttcagtaggtctggggcgaggcgtgagaacgagcatttctaagttcccaggtgatgcccctagtgttggtcggcgtccacactctgaggacagtgacctctctgctctgtccctcatgtcttactactactgtctcccccgggctcctgcgtcagccctattgtctctctgccgaccctcccaagcctcagacctctcccagcctcgagggatttgcccatagagtctgtcctgcttctgaaggtcagcattcaaattcacactcagggaggccatgcttggcctaatctaatcattctaatattgcagccccctcctcctcccccaaccactccctgtctccttcctgtttttttctttttctttttcttttcttttcttttcttttcttttcttttcttttcttttcttttcttttcttttcttttctttctttctctctctctgcctctctctctttctccctttctttttttagagagggggtctttctctgtctctcaggctggaagagtggtcggatcctagctcattgcagcctccaac

SEQ ID NO: 68954 - DNA, 1024 bp, Homo sapiens
gggactttttattctgggatttgataactaagattcggggaagatagtgagttttggtgtaatttgtgtcatcaaaacaacccctgtattagagcaggagatacagtatcaatagataatgagaaaagacaatggaaattatacaaatgtatgtttcttaaaagcttttgctacctattattttctagcctataggcaaaatttagagacatataatggatatgcttatattgatagtaacatatcatgtaatttaaaaggctaagtccaccttacaggtttgcctcatgccatgatgaatcattttgaaatgtgattggtcttctaagggattgttcaaagattgtcagtcaatcattgacaaaataactctgtgaggtgacttactacagtttggttttgatgtttacaacataaccaaatgtgaactttggagcttgtaaagttgttctttcagcattataaatttggcagcttcctcttcctgcctcccttctcctcctccttctctttttcttcttctccttatcttcccttcctgcttcaacaaattcacagaaataggaggcctgctgtattaattttattgtttgcttactttcaaatcttttctttcaggcatatttcaatatataattgatatgaagtgtgacaatttttaatttgtcttgactttttaaattttatgatagaaaatggaaaccaacatatataaataatctactaatatttcttaacctttatatatatgctcaagagaagacttttttcttccccctggaatgaatttttttttttttaaagaaagtcaagtattatgtatacacagcttttgaattcttggatatatttttgaaactttaaaacattattatttatattaatctttgaagtatttcctcttgaggaactacctatacttcttgcatagtgacctagtttcaatagtaacattttatagaagctgatggtaaaatttatgtcttcggaccataattaattatgttttgaacttaaacaggaa

SEQ ID NO: 68955 - DNA, 1079 bp, Homo sapiens
aaacaacaaacagacaaataaacaaaaccaggagactgtgtaatttataaataataggaatttatttcttatcattctagaggctgggaagtccaaaatcaaggcaatggcagattcaatgtctgatgaaatatctctgcaaccaagatggtgcctccttgctgcatcctcacatggcagaaggcaataaaaggcaaaagggcccagctacttccttctcacactttgataagggcattaatcccattcacgagggcagagtcctcattatttaatcacttcttaaaatgccccaccccttaatgccatcaccttggtgattaagtttcaataagaattctggaggggtacaaacattcaaaccatagcaggccatttctcacagtttctcagactttctttgtttttgatgatcttgagagttttgagaaatactagtcaaatattttgctgcctattctgcaattgggatttttaaaaatgtttttctcatcatgacactggggttgtatgtttgggggtggaatatcacagagatgaagtgccaatttcatcagaacatatcaggggtacatgcttttatctagagtcaatagtttgtgactcatcaccattgatatcaaccttgtgcacttggtcaaggttgtgtttgtcaggtttctcaactataaagttactcttccctgtcatccctttttcatgctgtatgcgttggaaagaagtcactctgtgtagcccatgccaaagcaggaggctcctcctccttgatggttgaatatctatataaattatctagaagtattctgcatggaatattagtcaattattctgcgcatgcgtgtgtgtgtgtgtgtgtgtgttgtgtgtgtgtgttacacatccaattatttgtttttatcagtatggacttatttatatatttattttatcctttgtgttgtaatccaataccactttatttattttgtgttcaaatggttctaattgtggccattgggcttgggggaagtacagtgggagaacttcccctcttctagctggaatagagcttggcaaagccctttttcctggagagtaag

SEQ ID NO: 68956 - DNA, 743 bp, Homo sapiens
ctacatgcatcagggtgagaagccagggcactggtcattaacgggggtgattttgctccttcacccccagggaatatttggcagtgtctgaagacatttgtggttgtcataactgtgtggaggttgctgctggaatccagagcctggaggccaggcatgctgttaactatcttgcaatgctcaggatggccccatcacaaagaatgatttagcccaaaatgtaacattgctgagggtgagaaacactggtttagggcattcagaaatctcccaactcactcgaagagaccaacagagcctattttgcaggaatgtttctgaagggagtccacagtaggcattttctgctggtgtagatttggcttcttctaatcttcggtattaacagtctccaaaaaggcaggaaccatgggacagacacattagaaaaaggctgggggcggagagtgctttgtaaatattaacccagctgtggaggccacatgtatctttgagttatgacctgataaggcttttgagagcttttgccaacttcatgttcaagaaaaacacagaaaaaatttagctgatgatatccttgatgcaattttcctttaagcacagcctcataaataccaactatagagtccaactgaacttattggaaatttcccaaaaaccttggaaaatagacaagtgcaggtggtaagatatttactgaaatgaactgtctgtgaatgaaaaatatatgagcaaaatagata

SEQ ID NO: 68957 - DNA, 1423 bp, Homo sapiens
tgtggctagtgcaactaaggaattgaatttttaattttagtgaattttgacgtatttaaatggccacgtgtaactagtggctaacatcttggactgcacaggtctagactacattccttcccatccccatgagtttgctctaccaatgccccagaacttagacacataactgtgaattgactgaagaagcatgaattgacgagaattgtttcttccagccaacagcataaaaacttgctataaaaattaatttctattggaaaataacatttctttcacacttggtttgggaatcctctctagtgccttaaaatagagacctattttattctcagaatgatcaagagcccgaatgaattaaactgctggctttattcctctgcatccggcttctattggtaactttcacactagccaggaaatctgtttgtaaggctgagcgactggttgttaaagaggggtcacgcctcacggtaacatgtggccccactagcccctaagcactggcatgtagccacttgctcacacctaccaccagacgcccaaagaagctccagctctttgatttaattgttatcctcctctttctgcattttaatttttcttacattgactcactcccttagacagatctgaggcaaagagtatttgtccaccatgagtcactcttacaggaaagggagaaggataaagtagcaaagagagagaaggagatgcacatgtgtttatgtttctgagttctccatggtttgattaaaatggttcatggaacagaaagaaaacgttgctttactagctgtcatcgctaagtgcatctttccatctctctgtctctccgtctctctgtaacagggcacattaaagcaggagggctaaagcctcctccctcccaggcctggaattccctatgacctgggacttggcaagcccttccctctttaatcagtcacagtgttcctgaggcccctcctcttccaggaagacctccccaggcaaagaggaaaagcaacagcagccaattgccctttgcaatccaccagccaccctggccctccctcccatcccgttagtgtttgtggtagataatagcaattaattctcttatctaccaaataaattagatcttcgtatttgtctccatcttgaaaactcctagagagaagtatattcgtaaactctgtctgtgtagcactccattagataagtggattgcatcctcatttttcttatcccaacactgctgatggattatgtacatttgcgatgacacactctgattttgatgctcattcccccaacacccacagaaaaagataatttgcagctgagtaaagaaggtaatttttaacacggtatttataaaagtgcattataacaagtaagggtatagctcgggtaaggaagactctgggttctagatcat

SEQ ID NO: 68958 - DNA, 590 bp, Homo sapiens
tacccttttcagtcattgtaagtaaaataaatattgttagtattttcagtgattccagagaaaatcagccaaaactttagcgtttcacacatctttataaatttccattttccctggatgctcatttctcaatacctgtaattacctttctacgccaccccattctcaatccttcacacatagtcctgctttccatgcaaggtgggggaaaggcatgtggctggctgattaagcaattagccaggcaagcaattctttcttgagcaagtgagtcattgcagattcagaaactaggcattcacactggaaaccacccaggcaactttgttcttgagtacccttgcctaatgcggtttaatgaaaacctttgcatcacttttaattccctcttaagtaatgcataccatttaatcagggttcccaccctttctattgtgagagctgggggctggtttataaaagaagaagacgagaaatagcagttgactcaagacctactggagggttctgcttgccctgctgaggcgcctttgtttgtggaactgcattgttttgtttctgtggttatatttagagcagtgcacagagaa

SEQ ID NO: 68959 - DNA, 614 bp, Homo sapiens
ttgcttcagtcattcaaatttccaggtgctaggttcatagagggaatgacaagtcatttgagccaatgaggtacagatgccggatacaaagggggtggacccagaaagacttttgaagaggtaaccccagcaatgatcttccctctgaccagaacatagatatttcaaatttatgaatatgacttcctgcctcaaaaaggtcagagatcaccgtgaagctctggtttgtttcatcaagcccagagagatatgttgaaggggtggtgctgacctcaagggtctttgctgcctggagatgaaaggcctgtgaaggtcaaagacctcggttaagtcaatatcctacacagtgatagctctctgatactctgatcttcaatgactcagctccctggggatcccatgctcctcagactgaagtgatgttggttcttgggtgtttaatgtcgtctgtcttgatctcctagttctcttttacctggctcatgctagtctatctgggattgcagccgactgatcttttgagtacatcgggtgttcatttctgagactcagagctgtactgcctggatttgtgcagctgttgggattccctgttcttggatggagactgtctc

SEQ ID NO: 68960 - DNA, 5711 bp, Homo sapiens
cttaccagttatgtattattaaggaccatttagcctttttgaacctcaggttcctcattggtaaaatgagaatgataataacaacctctcagttcctcattttataagtctccctatatcccaatcatcctcactagggagagaaatctgaacagtcaaatccacccatggttccaaatccaggctaagttatccaagggcaccgagtgttcaacactgcccatttctcagttctgattagtgatatcaaaagagaatgggccacaccatgattttattactgacactgacttaaatcaaggtcagtgaggaaaacaactgttctgttatgggaagctttcttgagcacacaggctccaagtttttgtcagtaaagttattttctttgtgagattattcctttttctcttgcacaaaaccttgccaaacactggtgtacctttgtccactgaggaaataactagcccacgtgtgactctctctcttcttattgttttcttcatttgtatatgtctttttttcttcttagtattattgtaatgtcattaacacagggaaagagccctgtgtcaatggccatggaaacagagcaacggagcacagctttaattgaactacagcctcctttccatcacaccttttgcttggcccaaaccattttgtaatcactggagtataaatattgtagtttttgtcccttgttttgtctttctctccataaggtctgagtgacctcacacattccacttttccagataagacctaataccttccccttctccaaaacaatagattttctcctctgatacctctcattcaacatctacatttgcaaactgttgcaaggatttaatgaggtgatacatgcaaagttcttagaaccaatcataatgcacagtaaatgctaaattaaaagttggctcctccacaaacaacatagagttggttctgagtttagcttccaatccctccccactaagaaatgggtcaagccattatccaaatgtatctaatggaattatctatgttctttggcttaaattcttcattattcattcttccatgccagagcagtcttcactgaaacatcaaaaggctgcttactaatatcagggaattccctgactgcaattgcccaaaggacacgccctaaactaaagtctagaacagctgtggagctaaagaagtaggcatcccatgccatgctctgcaaattgccttccagtaattctttattgtacaggaatggcttctgtctctttatgttagccattccatcatggtttcctctccctgaacattttctctctctgctcaattgcatcttctaaggcggccaaatggagttttgaagccagctccttttagtgtatggaaatttccagattgagattgtttcccattgggcaataccacaagcatgactcatctgatgatgtactcaatgtgttccctgtctctgtagaactctggagtcttataatttaacattatatgcattataggataaatggtacattataatatgatgaaaattgatattaaaaggcagaaatcattgctgtcaatttttagcttcttcaccataatttctcaactaatgttagagactcattttttacctccccactaggagtctctagtttaaccagattcatgtgggtattttttctcttttgttgtcattcatttattcattcatttttctacacactggtgtttgtttgtttgtttgtttgtttaccactgggtcttgctctcttgcccaggctggagtgcagtggtataatcatggatcactgcagactcaacctcctgggctaaagctattctcccatctcagcctcctgaggtagttgggactagaggcatatgccacaacacccagctaatttatttatttttttttggtagagacggggtcttcctatgtttcccaggctagtctcaaactcctgggctcaagaaatcctcctgcctcagccttccaaagtgctaagattacaggagtgaactaccacacctggcatagttgcacatttttaattaatgcttatcttttgctagtcactgtgctatttttacaaagataaaataatggggaagataaacaagatcttttctttattaagcctcaaatttgttctcaacgtactagactttttctgcttctctgtaccagtgattctatccagaacagctgctcccttgttctttgcctatgcaaagagtatttaaagtctttattctccatggaagcttcccaaattattgcagcccagagtgaagagagaacctttcttatcgcacacacattttctaaatcaattaaaaatttgaggagttataggttatgtacaacaaaaaatgattctgaatgtcttaaattatacatacatatattatatatgtacatatattcattcattgttcttatatataagaatttaattatatatctcatataaaattatgtatatatctatacacacacgcacacatatatgtacagttggcccttgaacaatgcagaggttaggggcatcaactaccccaacagagtcgaaaatccacatataatttttgactcccccccaaacttaactactaatagcctactgttgactggaagccttactgatagcataaaccgttgattgagacatatttcttatgttatatgtattatatactgtattcttacaataaagtaaattagagaaaagaaaacattatgaataaaaacataaggaagagaaaatatatttactattcattaagcggaagtagatcatcataaagttctttatcctcatagtcttcagatggactaggctgaggaggagaaggaagagggaaggttggtcttgctgtctcaggagtgggaaagatggaaaaacatctgtgtataaatggaccccctaattcaaacttgtgttgttcaacagtcagttgcatatatttgaagtatatgagggattccccaaattaatgagcaattggagaaccaggttagaaccatggcaattcaagagtagacaggagacaaggatcacaacattctccttttagcaggaacaatcaatcacccagttattttgggtgcaaaataataccacagtcctgtatgctgctgatgccactgctcctggacactggggaaactactgtgagtgagttcaaatgttctcacagctatagattcaaaagtccagagcaggcacatccaactagccaagttttgatttcgtggctgccagagggatggtaaagtccagtctttcaactttttacagtggaaggtaaaggcacaatctctcacttactctacatgcaatgagagtttctctaacactggaaagagaaatacaaatgacaaagaaatgacaaggtctttgtcagagaaacagagccaacagggtagatagatgacagatgatagatagatagatagatagatagatagatagatagatagatagatagagatttattatgagaaattggctcgcgtgactatggaggctaggaaataaagcaaccttctgtctgcaagctagaggcccaggaaagctgatggtttcattcccgttcaagcctgaggcctaaaaaccaggagagccaatgatgtaagtcctagtccaaaggcttgagaaccaggaacaccaatgtccaagggtagaagatggatgtccctgcccaagcagagagagcaaattcacccttcttcttcctttattctgctcaggctcttgacagattggctgatgcccacctgcactggtaagagtgatctttactcagtctaatgattctaatgttaatctcctccagagatatcctcacaggtatatatggaaataatgttttaccagctatctggacatccctcagcccagtcaagttgacatgtaaaattaaccatcatcgttccctctaccaatcatgactatattgtgatccttttagaaaattattatcattgccttttttaacctttgcactgtttattctctaaacagacacagagtttgttgccagctatctccccaaccaagtctcttcaggccaagaacaggtattataaaatactttgtgcatgacttcatggtgactcactcacagtaggtacttatgaagtaatttatagcctaataaatgctgggaattaatcctgttggccccttttccagcatttagtgcgacctataatgaagaatttgagtctttggaacaaatttcaagtcatttcataattattcaaaattatgtctatttaacaacatatcctgtgtttacttttaagcagtggaagagtgcttataatagaaacaatagaacaattcagtattaaatatatctttacatgtgctgtttagccacttgaggggaaacaattttctaacaagtggcaatggtcaagaaagctatgaaatttaggccagttgtcacagaaaataacttattagttgctaagctaccagtcctaaaaggaactcaattagaggagacaaacagccttaactagacctactttattggagagtagaacgttgtagctgtcaggtgattctggtggatgtgtggcaggcaaagtgattgacaaactggtcttcgcttggcatgaaatttggctttgaattagtgagtgactgacaggcgggtgtcatctgaaaatgtggattgtgtcttggaggggctattttgcaacaaagtgattgacacattacagagattgtcccatagatggagaaaaccaaatagagatttgttttgacaagcatttcctttttacctgttcattttgtatacagagaagagagagaagggaagccctcataagtgctaattgatttctccagtgaatatcggaatgatggtggccatggaatgcacagaaagagacctggacagagaggagtcaaaagacaggtgttaaagttgaatcttatatatattaaaattttaacaaataaccccgttttttacagaggctgtcacattaatagaatataagtctagaggtgttggcagccatctttgccacctcatgtgaatagggttgccagatcaaatacaggatggcccattaagatgaatttcaaataaagaatgaataattttattatgtgtcccaaatattgcatgggatatactgaaacttaaaaaaaatcattgtttatctaaattcaaatgtatctgggcatcttgtatttttattagctaaatctggcaactgtatgtgcaataaacctgcttaggcatgaagcccatacatggaaaactggagacaagaggtggcaagagacagattcctggtgttgtcctttgcacacctggatccagctatgcccaaagcttactctaatcatgctcctctcagattcaagcagcacacacacacacgcacgcacacgtgcacacacacacacaacactgttttactaaactcgcttgagttactgagtttagttgctccctggcaaccagagaactccttctacttcacactttttctcttcattttagttaccgggttatattctaattggaggcagcattattttatccaatacaaggtaagctattttctggaaatgtgtctgactgccatcaaaatggtcatttgtcttcttgaattacaaacagtttttctggtgattccaaactttcttcatccttctccaactttattgacctccactgctatt

SEQ ID NO: 68961 - DNA, 1706 bp, Homo sapiens
gtgaggggaagacagcatcaattgagaatgagacacataagctaaaatgttatctccatatctaatgaaaaccctattggagcagtgactcatacagtaatcccagcaccttgggaagctgaggcgggaggattgcttgagccaaggagtttgagactagcctgggtaacacagagagaccctgtctgcaaaaataaaattaatagagtgtggtggctcgaacctgatatccatgctacttgggatgctgaggagggaggattgattgagcccagaagcttgaggctgcagtgagctatgatcgagtcacggcactccagcctgggagcaaacaagatcttgtctctaaacacaaaagaaaagaaaagaaaaccctattgcgccaaaggtatttttaaaagaccttccttgcatgtatcctcagcttcatgttcaatccttccacagatttttaataagcaccaatacggtgctcaacctgaggatataaatgtgaatttgggaagacagacaggaaaaacacaaaaatacatgaagaaaatacagagaaagagtgggacagatagggtaggcaacaaaggtacatttgagtttagagtgaagaggaaagatagatctggaggaggaactttgtagaaggaaagaataagagtaaaggtcctgaaacctatacaggaggcactatggtgactgagacattctctctgtgctcaggtatcacaaggctaccccaaagcccagtaattagagcactgccctgcacaaggtaggtgcttggcaaatatttgtttaattgcatcagtggtaaaacaggtgaactaacaacaaattcgatatgttgtgtgctttgagggggaggattgataggcttctacagtgtgattagaagacttgagtgaatccaagaacaaatgccttttctgttccttgcatgcaagaaactctgcaaactctattcacttgttataaaattcaacttttgtacagaaaagtttcctatgcctagtgccttaccagaatcacctgggacctttaagattttgagatttttctgacaccaccctggaatctaatttagtaagtctaggatgtggcctggggttctttatcttgaaaaacaaaaaatccccaggtgattctgatgttcagccagcatgtgaacaactgttctggaaggtagggttgagtcattccaatcagttcatgcccttacacatcccaaagttcgagtgctggatcctaggaagcgaagttccctggagacttaaacatagcctcatcccaagacaccagctcttataagaagtttccccaagtgccagagtctatggtttagcacagtattttccaattctagcaatgcccacaccatctctttcacattttgccatttccacatcccacctgaatcactttttactctctattgttcctttaatatacttatttttaaaattccacttaatgggtttaaatattagattgctcttacgcaaggagagcaggatctttaaaaacagaaggtaactctaaatcgaaagcattaaaaacaaaacatttttttaattcttttttttcttttactttaagttccgggatacatgtgcagaatgtgcaggtttgttacaaaggtatacacgtaccatggtggtttgctgcacctatcaacccgtcatctaggtttttaagcccctcatgcattaggt

SEQ ID NO: 68962 - DNA, 4825 bp, Homo sapiens
atagaaaactgtctataacctgtgtgacactcactgatcagctcactggggaataacaaaatggagaaatggggcagggagtgtgtgtgtgtgtgtgtgtgtgtattttaggtgaggtagacctttgggaaaaggggacatttaagcaaagattggatagctggggggcacttgtctgcactcccccattagaatataaataccaacatggccaccaccttccctttctctgtggcctctgtgtctccagaataggcacatagtagatgctcaataaacattcttcaaaggaaacaaaaagaggagtatatgattagaccttaaagtagacagaagggagatttttgtttttgtgaccacccattgattagcgagaaagtgggagggacaggggcactaaattgaaggggtcgtggggagcacattttggtgggggcaggttaagacttacaggatggagatcctcactggataaggtcccctcccccttcccagccccgagcaaacctaagttctccctctcctaagattgtgcatggtccctgctggtcagccaacctggcccccctgaatctccctccacagcctcccagcttcagagttcagccatcatcacactgcctccttttctcccgcaccccttccctcctcacctcctttcctcccgcccccgccccttccgcctcccggaggggtgtccccgcgcccggtgggcacgccctcgccccggcggagagggcgcacagaggggcctgggccggcgcgccggggcccccgcccccagcccctctcccctgcgggacgctgtccctttaataggctcccgctgcctggcgctctgcggctggggagtaaatttctccctgtcatcaggtcgcggggagaggaggaggaggaggagtttgttaatgttcagtttgttcagcgggatcgatgtttgctggcatcgcctcgccctgtcttgtgtgtgtgtgcgagggtgtgtgtgtgtgtttgtgtgtgtgtgcatatgtggggggtgtgagtgtgtgtgtgcgaggaagcgggggtgcgtgcgcgtgtgagtgcgtgtgtgagtgtctgtgtgtgtgtctgtgtgtgtgtgtgagtgagtgaattccagattttctgtctttccaaaacccgctcctgtcctctcgcatatcactcacagacggggatctgacagcagccacaaacctacagtgagtgatcgctctccccccggcacgaatccgccatagagatcggcgaggaggaggaggaggaggaggaagaaaagaaggaggaggtggaggaggaggtggaggaggaggaggaggagggaaagaggagaaggaagaagaagaaaaagaagaaacccactaccttcccaggattgccttttttttttccttatctttacgcgcgagtgtgcctgtggcgcgtgtgcgcccctcgtcccttccatccgaacccgggcttggatgtttaataaagaaatcaagtgtctcaacagtcaccaaaaaaaaaaaaaaccgcaaaaacaaaaccaaaaaaattccaaaagcaaaaacaaaaaagagagaggaaaaaaaattcaaaataaacaaacaaacaaacaaggcagaaccaacctctacttcaaagcagccggcacaagccacccgtgtctgccacccagagaggggggtctctggcccgtggtggaggagttgcaggggggatcgtcagggggacagaggccgagtgacgtcctaggagccaccgggcaagaggcggaggagacccagagaggccagagagacagcgggccccagcgcgcggctcggggctggggcgccagaagtgggactggagcgaagtagaggatgccgaggagaaaacagcaggcacccaagcgggcggcaggtaagagaaacggctccgcttcggggctgccctgtgcgccgagctcctcgcccgccctccttgcccctgggtgcccgggggcaccacccacttaagctttcgggggagtttgcgccgggtgcccttctaataaccccgtcctctctcgccttctctggtctcccaaatcctccccttccaagctccggttgggttggggtgagctatcccaccaagcctttcctccttaaactttctttcctccaccctctaccccacccctaactttcttccagtctgtttcttgcctctcgggccaaagtcggattgaggatttggggtgcggagtagggagacagcccctccacccctgcatccctctgcgtggtcagtgccagtggcttttggcctccagggatagcgtctcctctcactggggcttggggcgctgaagtgtgaggcatacctaacactcgggctgcaggcaggctttggggccagcaataggagtttagcgttgatcaccaaggtggacaaaatgcccccaggaaatggatgactctttgcatatattttctaaaaggatccatatttggaaatgtaattaacaatttccctattctttaaaaaaaccaaaaagggttgtaggggggaaattccccatagaaatttaaacagctctggattttctttgcctagagagttgcaaactttgtgaaatgattcgtactgtaaaaactatcccatctgaatccttactgccccctaaaaaagataagaacaggttaatggatcagtacaatagaccttctaaagtttttttttcttttgggttgcttaattgcttttttaatagtatgctggggttttgtttctcggaaatgtaatatgaaagttcatttttcttctgccagacccacccactgaaaaatcagctttccacttgattgctagttttgatttgacatttgattgatcacctgtcatctcgctgcctttgatctattcattcttgatatatatcaataaatcactcaccatggtaactcagagtgccagtgacgcaaaccttgccctctatattcagagccagacatgcacaattattatcttgtttggcttttaatgtgggcgtttttatttctttgtgtcctttagttgaatcagggctttcgcaaaaagcttaagtttagttgttttttcctctctctctgtctttaccctcttgatttaggcaacattaggtaagactggtcttctgcagacccacctccacatttcattctgttccaactctagcaaaacatagggagaagtttggtggaacactttcataaactttgcaaagtcacccttagaacaaatccaaagttagttaggaatctgaggagagtgggcatcccttgtctgaatgtgttgaaccaccaagctcatcctccttcctcgcctgagtgtttcaaaatatccacaattatcattccttctgagcacagaattgcttccctatttgtaagttggttcaagtggcatgcagaaatattgataaagcgtggattcatatattttctgatcgtttccctaaaagcaaaataattaaaatatttttagtgaggtacgtatttggaacttgcctcatcagtgaggttttcttttttcaactctagttacttctttggaaaacaatgtctctttcctaccgttgtctctttctgcatttaactcactgatttcctaaaacttaggctgctttgcaatctgacagcgtgtggatgtgttcaatggcctttgagacccaggaacagtgagcctgctgcatctagttctggcaacataagtttaagtgtagctacattattagagataacgtccttattgttgtcccgaaagagaaccctgggctacggtccagcaagaagtgatactgccctgaaaattactctttttttttttctggttgttccggtaaagactatcaacaactaggcagtaatttaaattaccagaatgactggacatgtctcctttagtaagctcattacaaaaagtgcattgctcagaattgctcgactttgattataattatcctacgatcgataaggatccaggtgtacgtaacataacactgtatcacattatttaaatcaggtccttttcattaagctgtgtctgttggtgctggctagtttattggtgtgtgtgggtgtgtgggggtgtgtgtgtgtgtgtgttagaaacttgtaactatagtttcagttttctggcctattatattcctactgtctttgtatgtttgttttgtatgattcttattattttcaccagaagcggaaaccctttttaagctgaaaaaggatgattcatttcgtacacagtgagggccctcttaccttatttatttgctcacatattaatagaggagacagtttttcatgcagtgtttcttctgttcatctaaggtcatcaatgccctactctatttcagctgaagtggttattcacaagtaaagttagccactttggggttctgtagtcagttaacatccagggaaggggagaaggtgggttctaagattatggccatactaacttttatcactgcttaaaattaaacacaatgcacaactgtaagtaattacacccaaggactgatgttgaaagcttgatttctagcttgattaatgaataatgggagatagaaaaagcctgtgagtggatccgagctgaggctctcccggagcgctctttttcccaagaactgttccaggcaatttgattcctttgtattattagttataagttccatgtttcaaggaatcaattacagaactttctactaaagcaggtatctaaacagaataaacaagatgatattgtaagtgatgaggaattttagtctttatttgttatgttcctcccccttcagggggaagggatgtgaggggacaattctctttaa

SEQ ID NO: 68963 - DNA, 1339 bp, Homo sapiens
ttctgatgcatgattttgtgtggattatgtatgttgtgggtattagtgtgtgttgtggggaaagagtgtgaaaagcttttctggtgcatgattttgcgtttgtggtggacctggcatgttcatgtgttcttgccaactatgctgctaatggaatcactgcaaagcccttcaggattttccctgtgaacatgaagccgacgtcacagtgtattttcctgggggttcccctgtggcactgtaccctgacctcctggtcatggcttggttagaggaaaacaaaaccactgttacacaggatgtcccctgctcaggaaaatttgctctcaatgggaaatgtataagagacagatagtactggaagctccacaccctattgtaatgtctatttcctggcctctcttcctctccatgccacatgttctatcgtgtcagggattcatcttaggaattgtgggaacaattcatttgcagtacctggaacacagtcagtgggttgaatgcatgaatgtatgaatgaatgaatgaacaaggggttctccaaggttccaggcctttggaatatttagataccccagttatttatactcacagagctgactgtagtaggatcttagtaaatgtcatatagataaaccgatgcatgcacatggcactcgtgaacatttgcttatctcagaagcaggctagcaatcgtaagaaaacagttcttcagtggggcttttattcttcctctgtggatcccataggagccccttgtctcctgtccctttggtttaattattgttccttaagatcagcagggcagcccttctgtttactgtcaaactgcagccacaaatggagagaaagaatgaaggggaaaaaaatcttcataatccaggtacaggaatttcctcaaagatttttttttctttaaaagaggtgaaaggaaggtggaaaagttggggaaatgagtttccaaacttgccaaacacataaaccaacagaattgtgttgctgcctccataaatgtttaataagttttatcatcttgtgactaaggttaaacaaatgtgagtcctttgaggaattatttactggaagcaaagttatagcatcaacatctgtgtttccaatcacttagatgaggaatagatcaaataaatcatgagtaagttccacaaaataacttctgtattatcatctcaggagaagaataatgtaagcagctcttttaggtgccctctcgattggaatttacaggtttttttcttaggcttctctttttttattcatttcattatctccaaataataagtcttcactgctttgtggaaagttaccataaaaacatccacaa

SEQ ID NO: 68964 - DNA, 6959 bp, Homo sapiens
ggaagaatcatggtattcctaagagaactcgggcttagagagagtggagaggtaaattctgatggaaaagcaaaagaggggaaaggaaaagtgtgaccaagtggaagtagtctctcaggtgctgaagacacaagtctatgagcttagcagagatgagaggtaaagataatgctctggaggccaggcacgatggcccatgcctgtaatcccagcactttgggaggctaaggcgggtgggtcacttgaggtcaggagttcgataccagcctgggcaacatggtgaaaccctgtatctactaaaatacaaaaaaaaaatagcatggtggcgtgtgcgtgtaatcccagctacttgggaggctgaggcaggagaaccatttgaaccctggaggcaaaggttgcagtgagccaagattgtgccactgcactgcagccaggatgacagagtaagactctacctcaaaaaaaaaaaaaaaaagataatactctggggatcatctgtacagttggagctgtgagagtgaattagttttgtttgagaagggagagttagcaaggggagaaaagattgacaagaccagagtcttgggacctgtccacatattaggagcaattctggatgatccagagatagaaaggcaaacagaagggaggacgacccaggaggtttaggcacatcatacacagcagccaagcctgagtcacacagacagggtagtggaggtatcaaatactgcacaaaggtcaaagaaaaacaaagcctgacaaaaggccagtcagtgtggcaattaatagatcattcgttatcgctgaaaaggaggttggtgactaatgtttggattacatcaccttggacaaaattaataacaaatttcctgatagtcacttgcaaagatgcaatggaaattggctgctcactctccctgtctgttctgaaatttcttaactttgtgaacactctaatctcctctgagtactgcagcagaaaattgaaatgtgccctgtgtacaatgtgggtgagtttctgttacccaaatccttaccttttagatgtttagaatgtcaacttctccaatttactgaatgcgtaggcagagtttgcatgactgtttctgagagtgaatctatcggaaaggagggagaatgacatgcgaagagcttctatcaatcacgaatccagctttagactgcaaaatctgtgtgttcacgctaagaaagggagatttcctgaagtcaaagatctaaacccaaaatctaaaaacatatgagtaaagagttttgcacttagggggattactcagaatagagaaaataatgtgggtttaaccatttcatgacagctttttttctattcctttgaatgaacacctagacattttttaaattaaaattttgagtaatacttgttcattgtagaagatttgccaagtccaagaactacagtatgcctgacacctaataaatactcgttaaatatttcttgaaaaaagacatgaaatggtacaagataaaactggattagagggactctggcatatttgggatcatgttaacacttttcgatgtggtctttgagcatggaggaattattataggtttttagtcacaggattacatcataaattatctttgaaaaataccctggctgcattttgctggatgtattggagtagaatgaggatggattcaaggacagcagtgaggtagttactgtgataatcaggtgacaaaaagatggtggcttagactaggctggcagcaatagagatgtagagaagtgggtggattgagatagatttggtggtaaaaatcaatagagcttggctatatggtaaatttagaggtacgctgggaataatggagtgggggaaaattttggtaaaggtaaaaatcgtaattccatttgggaactgttaagtttgatgttcaagagttagggagaagaccattgggtacttatctggatttcaacataatacccaattacatcaatgtcaaagtcctagcaaatagaacataatgaacccctggcagtggacgagcatgtttagggtgagattattgaggaagaaagactaagccctgagaaaggccaatatccaacattgaaaaggaaaaaagtctgcaaaacatgagcttttggagagcgtggaagactatcaacatagggtgattgtcaaaataggaagtaatagagaagagagtgtctcaagagggaaaaagtggttagctctactaactacttttagtagaagtcagtaaggtgcaagttgaaaaaatgcacactggacttaacttggctgagctcctgggtgaacttagtaaaagcattcacagtagaccaatgggaggagaagccagactgggtgggttgaaaaataaatgagagatgagaaatagagacaacagtgtgcatatctcatgcgggttgccagacagtggttaacgtagacagtgacatgttcacactggaagaggttaatctgcagagcaagtgcaaaaccctctcaaatcgctgctatgtttaaggcatcttagcgctacagagacagaataatcctgtgtattgggaatacagaaaggaaaaaatcaggaatgcagagacttcaagtctttagaggccaaattccaaggctttggtctgagccaggcactatttcaaacagctggattatgtgccaatatgcctaacgaagtgaatatcagctggccccacactggtaataaaacgataataactctataaataaatgtattgagtgctgactgtgccctctatcacactagccactctataccctttatctcatttaattttcacaaaagcaccagcagatagctactatagctactagtaacctttttctttttctgttttttttttctttttttttgcagaagagatcctgaggtccacaaaagttgaattatatgtcctaatacacatagcttatgagtgaagccgtgattctgattggtctgactccaaagttcaacttaggttattcagtctcttcaagttgttgttgcccaatgaaaacttgttgcctagctaactggaaatctgactgaatttccagactagctcagcttacctaatttaataaaaaacatcaagacccgaaaagcaattatgtagaatgattcgaatcttaaacgagttaatatatccagagctcttatggtaccagacgcatagagagccttatgtatgtgtttcccattaattcttactaaaaggctctagagagaaattggtctgcccttccctggtgctaatcaaacattgtgaatagtaacaccattttttcctcccaagggccactaaatttctgcttcttacagagtagttttcaacttggtcttaaggaagaggatggtatttcctggctttgtgcttaatctctttacaggaaatgatattgttgtaggcaaggacaaaggtacaagtgtacacatttaacaaatgcattgaatcctctattaacattgcaagtcagttctttagagcaacagtccccaacctttttggcaccagggatcagcttcatggaagacaattttccacggacaaaggtaggggagatggatggtttcaggatgaaagtctttcacctcggatgatcaggcattagttagagtctcctaaggaatgtgcaacctagatccctcgcatacacagttcacaacagggttcgtactcctatgaaaatcgaatgcccctgctgacagaaggcagagtttaggtggtaatgttcgctcgcccaccgctcacctcctgctattcagcctggttcctaacaggccacggacctgtaccggcccgcggcccaggggctggggacacctgctttagagtcgtatcatttttgttgatccagaataacaaagagatgaacagcctaagtccaccagctatgagtttgggattgaatttgacaccagtttaattgaggcagccacggagatcaaggcaaaaataacacttcttaaggtcccactgtgtagtgacaaacattagcttctttaatcttcataatgctgtcggttctgctataatactgcttttaaaacatgttttttagagacaggatctttctctgtcacccaagttagagtgcagtggcatgatcatagctcactgtagcctcaaactgctgggctcaagcagtcctcctgcctcagcctcccaagtatctgggactacaggcatgtgccaccacacccacctgttttttttattatcttattattttttattttgtaaagatgaggtctcgctatgttacccaggctggtcttaaactcctggcatcaagtgatcctgcctcaaactcccaaagtcctgaaattacaagcctgaaccactgtgcccagccaatgcttccttaaaacataattttgctccaaaatggtggatacactttcagcttgacactgagtttgcatttgtgtacgtgtgacttcgtccttgagaaacactgaacacagaaaactgcacccagctgaaccaggccatgtagaaatacacaaaagcaaacacacacatacctcaaacatctactcacttccttcagctggtgtgccacaagccccacccacccatgcacaattgctgttacaacgctgtaggattccaggtaacactcctcccaccacttccaacacccacttccacggctctttattaaggtaaaatacttatttatcacggtgtttataaattttttcaccatttaacctgcataaaacggtgctactgtttgtattaggttcctgcttttttattatatgttactgacaggagctttgttctcccaaacccattttccccgtaagctctgtgggttttattgtgaaatttagaagactgtggtcctttttagaaacacacaaacaccttatattagactgactgtacgtaagtatgaaacaaatatgtttattcttttttttttttttctgagacagagtcttactctgtcgcccaggctggagtgcagtcagatatttttgttcttattcccattccacaaatatgaaaatagcccagaggagatgaataacttacccaaggtcacccgtcactgactttgtatttgtgtaatttcgtcactcccttctcttaacagacacttctaaatagcttcaaagcacattgaactggacagttgttgcaaaccagcttcaacattacaaaaataaacattttccagaaaggccttcactcaagatgacccacacaactctttgaatggtctatgtatttttaaatcatgtggtaatcccctttgtacatactaaataagtcccattctgctcacatgttaataaatttttctcatttgtgagagttgctgaatagagcaagcgaattgttttactcagtaggtggtcgagccataataaagaagcctcgtgattaagtagagttggagcctcttatctttctcactgagtgggaggcaccattagtagtaaaagtaattacctgtgtagaacacgctgattgcatcaagtacctactacacgctactaagatagtcatctccattttagagcttcttaagagatcttcatttgatgttaattttacattttaagccaaagtacattatttttggaaaacattgtcttagctggatgaactcatttttaaagcctttcaaaggacttctgtgccctggtgattccctcaccgatgccctttctccaaaatggcagctgcaaagctgtctaaacaaagttggaaatgataagccacctaaatgtgaaagaatctatctggcaagagttggttttatgtgggggtgaaaaacctgtgctttcatctatgaaatcacaaagtccgttatgggaaggtgttggctatttaaagcagtaattcctgagaaactgtccatgccaaatcttgttaaatgttgtactggatagtttcagcaaatttcaaattcttctctgatgggaatattagaaacagggtgctcctggttagatggaggcaaggccagagccttgacacttagtggtggtaactcagaaagagtcctcagcagaggggttttggaggccagaggactcccccagctctgtctttggctgacaaaatgaccactacttgcaacctaaccttctgtgtataaaatgaacagattgaataggtgtcccatctaagtccaaattttgatgtaggtatacagctaatcatttattagatttattagaattctttatgtgtgtgcatttacagttaggcatctgtgcaatcgtccaaccaatgaatcacaccatgcctttgagttttccaattctcccttaaatgtagctatcaatgttatttttacttataggaccccaaaatgtgaccttccttagggaggtaaataagacattgcttgtaggcctgacttgaggcttgtaaatagctttccaaattaataggtctgcaaaaatatattctgaagcctcacatttctatcggttttaaccgtatagccagggtcggtgatccttttttcgccatatctacttctttcatattgctgatcacatcggaaagccaaaaaaggactatcagatatgatcaggttacctgataaaaagaacaaacagttttcgaagtcagacagactggttcaaatcctgtttctgtttattcaggctcaaaccttagtctgtcattgttaccagctgtgagacattctgcaaattatttaactaattgaagtatcagtttcctcatctataaattgggcatgacagtaatatttgcttcaccgttataaagactaaaagcaaatgagatagtatggaattctgtttctgtttttactggaaggaattataaaaatttccagtttgcattgataacttgaagagggaatgtctattttttttataagttttcttccctttctatgtgaatttttttaactgtaagcatttattgcattttttttact

SEQ ID NO: 68965 - DNA, 1005 bp, Homo sapiens
gcctaagaattcaggtaagggagaaggaaaataaaaaatgaatatattagctagctggcatgttagacgtgaaatgctaaggagaaaacaaagccaagaagatggtagaggaagagtcaggggatggggtggagggtttcatgctagataggatggccaagcatggctctgcggagaaaggaacctatgagtagactcataggaagtgagaaaacaagccatgtgatgatctgaaggaggagaattcataataccagattctcacatggctagaccttttgccctttcttgagcaacagcctgtcatgaatggagagaagaattgaggtcaaccaaaaaagggaaatttttttgcccaggatcagatgcttttccaagtaaacaagtagttactccaagggatatttccaggagattcttcaactccaaaggccaaatcttcacgtttccgttactgtagagctttctaaacacagataattgtttgcacagttggtcagctcacacaaatcccttggcagtttctacagacatttatgcattacacattttcgatccttggcccaaagttctgatgttttagctctgacagtcggctcatgagaactcagacttcttgatgcaagcccccagtcttcacttttgaaagaccatggaccaaagttttaattgcctcgtgggtgtctcttcctcttcactgggtgcacagcgttactcataatcatgcttctgatttgtgtctgttaaaagaaggatcagaaacagactggcaaggtcttacagttcttggtaaaactcttggaaaagactttcttttttgatttgcttgtgtattttagtggtgtcttcaggctatttagagaaaagtagtatgtctattgattcggccattggcagggacttaaatgatggtacgtgttggctgtgtagtacctctgcttcttctagttggattaaatccaaggacaggtaaattcttttggcatttggcttgaccagagactt

SEQ ID NO: 68966 - DNA, 2954 bp, Homo sapiens
acacttataaacccatcagatgttgtgagaactcaactcactatcatgagaacagcatgaaggaatccgcccgcatgataccatcacctcccaccaggtacctgcctcaacacgtggagattataattccaggtgatatttgggtggggccacagaaccaaaccatatcatagggttttaagtaaatgagtgatattatttgagttagagtagagaaatatcacacttctataaacaattactatatctcaggcactgtatatccaccttaggtccttttcctttaatcttcaccaatgaatgggtacaattattatcacttctcagattagtaaagtgaggcttagggaggaaaagcaacttgtttggagtcacatagtgactatatggcaaatctgaacctcaacccttgtcatctgcctccagttcctggctcaaaatactcattaaaggctcatttttattgccattgtttatgatgtttatttttctaacccttccaagagtgttttgtggattgcattattcttttcttctcaattttataaataaaagagactcgcctcaaaatcacaactgaaggaaaaaaataacaaacttgtagtttcctctaaagaacttcacggacacccagctcagaagaatttggcccggccagggatggggcggggagggaaggactggctgccgcaatgttttgggttcggccatcccatttgtgagaattaggaatgttctttggacaaaagatcaaacacaagcttactcctttctatgctgagacgttgcccactcgcttcctcttttgtatctttcctggtaactcgacttcagtttctctgatggtaaagagatgagatcagccactaggggatcggtcgatgggatcaggtttcagtcatcaaaaaattacgtcaagtgctaagcatgagttaccttccactgccagtgtcagcccaggacgtgactgcagggccatcaatcctgccttccttgtccttgtagatgttaaaatacagggtactctgggaattcattagtgggggtgttgcatgggaaaggaggggctatgctccaggaaaagtgggtatagaggcagagatgtagctttctaatgctgttaccttgcacattctaactattaactgcagagacatctgctgattgttttctttacaaagcgggggagggggagaaaataagaaagttaatttcagagttggaagcaggtttaaaatgaccttcgtcagttataaatataacatctacttacttttaaccagtttatttccaattcaataacttttattgagtgtttccatcataataattgtttttaaaaagtttactattagaaagtactgaaaagaatgtaggaaaacaatttcctccatagtcctactatacagaggaagatccattctgtttcctgtctatcggcctctctgctcctcttttaaatactgaacccaacttttttattgtttcaaatgatgtgactatattgtacctatgatttgtgtgataggcgtcacacccaggaggtgtgatggtccccacctgctgagatccctgtccttgtgtgattttatcctcttgaaagtggatggacttaccctcctctagtaaacagaatatggcaaacatattgggatgtcacttccaagattaggttataaaaagatggtggcttccatcttaagtgcacgcacgctctctgtctcttttttttttttttttttttttttttgaggtttcagggcatctttggtgccacagtagctcaagaagagccttttattttattttattttattttatttttttttattatactctaagttttagggtacatgtgcacattgtgcaggttagttacatatgtatacatgtgccatgctggtgcgctgcacccactaatgtgtcatctagcattaggtatatctcccaatgctgtctcttgaatcactcacgctgggggacagccagtagctgtggtgtgggctatcctgtggtttggtgagatactgaaggcgtcactaggcagtccacaagcctgccagaaatcacttgccaaaaactacatgagttaacttaggagtggactcttcattcccagtggcttgactgcaacctggtgagagattctgaatcagattcactgagctaagccccttctagtttcctaaaccacagaaactgtgagataataaatgtttgttgttgttagttgctggatttttgaataatatgttacacagcaattgataactaatataattttttattctggttttctccattaattatgtcataagcatcttatcaagtggttatattatattgtaataaccatgtttatgtaacatcatcaagtaggagtatttatacttatttattgcttatttaatctctcctttattacaggacatttactttgttctgttttttgtactataaacaccactgtggtgaacatctttttatgtagagcttctattttttttttagctattatcctaaaatagattggaattagttttaggattaggaatcagcttggattactggatcaaagggtaagaatatttgtatttctctggatttttattacacaacttctccccagtaggagagattaatcaatacactactaccagaaatgcaggtcaatgtctacttcatctcacctttgccttttattttgattattgacaatttgataggcaaaatatttcatagtttacaactattaaaagaaagagatcattttcctggtcacctttcttaaaaaaaaaaaaggaatatacataggggttgaaatactgagataaggaactaaatattaattaactagaagaagtgctgtccaatagaactttctgtgatgatggaaataccctctatctgtatgtctacactagtagcactaggcatctgtggctgctgggccc

SEQ ID NO: 68967 - DNA, 1142 bp, Homo sapiens
ggacaacaaagggttctcaagcataggtgcgacccaaccaacccttcaccagccaggaacattttctggtgttaatgccatcttagaaaatgctgtgaaaagctccttgcactgagctagtttctcatcccctgatgtttacacctctcaaaggtgcatggagccccacaatgtgtcactctctgatttgtcacctggagaacacagcgcagacatgtttggctgctttaatatttctctataaatcaatcctctttccccttaatcatgtgggttgttcttctctgaacttgctccaatttgtctacatcttgctgggactgagttgtctaaaagtgaacacacccttcaaatgcgggaactctccctgcagcccctggcagctcctggcgactcacttcaccgcccggagaattccgtgcagggctccagcggtgagcagagttggaaacggcccatccccagtttccaaagaggccgtgtctttctgttcctgagcgggcccgtttgttatttttagtgtctgattgtcaggctgcggcattagaaagtctgtggtcgcattacatattccagaaagtcacattgctggtgatgtgcggctgtatcgatggatgagtaattgctcgctgtcaggcccacccggtgaagctgtgtcctcccaagttgtgaaagggggatagtgcgagagccgcacctgccgcggccccacctgtctgcgcttggccgatgccagcacctgcagcctttcgtaccagcgccctctgctggtcggacgccccacttctgggcgctcagggagcagaaggggcctggcctcacccgacagccccctggctctaggcaagtgagatattattattcccattttaaagaccagataactgagccccaaagaagcgaatatgtggctcacaagcagaaagggataacagatggaagaacaacaataatcagaacagcaacgccagtgaaccgttgcacatcacttaatttgccaggggctgcaaacccacagacaaataatggcagaaagtgcagagagccaggcgcaatataaggagtggatggggaccatggcagatccctggtgctcagtctagaggaggcaaaagcggtaaagctctgccacgcaaccacac

SEQ ID NO: 68968 - DNA, 748 bp, Homo sapiens
gcaggaacaagtgactgtctcaaagaaaacaataattactcaagtgtttacatgtgcttatcagttttattatttttatgtgtactattaaaactgaaaataagttgtctataaattaagaaaactggcttaaggttgctacagttacaactctccttgcaaaaactcaagtcactaactcaccaaatatctgctaaatatctgccatgtgcagttactgttctggatgttggagatgtgataatgaactagacccatccagtcctgctcttcaggaatgtggtttaggtcaaaaggcaattgattagagcctgccttttcccacttgcttgccatgtgcttttaacagttgcctgggccttaatctccttttcctggccttatttatatagcaatgacaaacacacatgttcacttaccagccccacctcttgcattcaaagcaaacatcactaatcaatctgtctcaaaaaaaaaaaaaaaaaaactgttcttcaattgcctttacctatctgattctctcaaagctccactcatgaaatcccacctgtcccccagaactcaccaaaaaaaaaaaaaaaaaaaaaaaaaaagatccaaagtcccctccacatgcagcctccactggctctgttcctctttgccacttcccactcacctccttcttgccttcccatgtctctgctctttcttggatttaaacaacaaagcctagaagctgcgctagtcaagccaagttctcttcagc

SEQ ID NO: 68969 - DNA, 2044 bp, Homo sapiens
aacatttttggaaagcatgaaaaaattcttttatataacatcgggttagaacaaaacggctagacacacaccaaatgctgttggaggttgtttgaagttttagagtgttataacatgattttgttttgtttttttctgggtacagcagagtacactattaaacattcagttcttcgtttgccttaatcacaagaaagatcatttcatagactgaattgcccgggcagcttccggttctcagtgtctctgagcaggcaggatctggcaaactgaaggtggacatacatactggcgggaaaaattatcttcttcagaataatttagaaaaatgagccaattacaaaccgtcaacttcccaaccaccaggggaaaaataagccgtttaaggttaggattaaacaactgaccactagagggcagcaagcacaacttaatcttcaacagaaaagaaagtctggcattgggcaagcacctaggaaagtctgtcaaaatttagcaaagttttggaaagcaggctgtattgtccacaaacactcatgtgggcgaaagagatctgacaaatgaaaacctgtccccaaatgacagtgtttggctttagtttctgcaggacaataggacaatgtgtctcacgtgcatcaggagaagttagagtccactggaaggaggacagaacttcaaacacacaccagccctccaaaagacaatcagaggtgctgccgttaaaataccacccccaaaacacatgaatgtttaagttttaaataaatgtcccctcactgtagatcatatcactatccacctgtaagacagacacccttgatgatctatatagtgtctaaagaaagaaaaaaaaatttacttgatcttcttaagtcttaaaaaagccaggatgatagtacaatatgataaatctagactactaagataatataagtttaggaaaatcaattccccaaatacagaatggccagcttttttttcttacaatcatacccaaactagctgggtttataactgggcgttgttgcaatttccgactcccaactatgtgtcaggatttatggtatgttgcgtcatatccaaaaagctatgaaatgccttttctttagaacaaaggacatgacatttccacatctacctggttcctgctctttcaagcatcacctctgactttacagttatattttttaaaggactgtgatctttttacaaataggctgttgaaattgtccttgggaggtggaagacaggggtcaatgaaccattttgcaaacagggaaatagtagcaaagaaaggttaagcaactcataattggtcacaaaacaacgcagtggtagaaccagaactcaacgccaagctggggtgctcccacccacagccaggcattctgtcctgcctgatgatctagcccatgttttccacaccacctaccggtaactggccttttcatttctttcagggaactggggcatctcacagggcccctgcaacagtaccggcactagcagaaaccacttagctaactggagtctgtgtttaaagcctctttttatgatgccattaagacattagatttgtagtatgctaagtgctgggtttcctgtgtcccaggaaactcaaaaacattctaaagatttgatatacagactacagttctcacgtcaatcacatgatcagaaaaggaactggcactggctgaagagcaggtgaaggaagagtccaatcaatcgtgtgggcaaattcatcgtgggtctcatacacccagttttccgaagaattcaagcacacaatcaagtgacactgagaggaggaggcacttgttttaaccgaggaccactttgacagatgcttccctaagaccgattcatgttcccatcattcgcttgtcaattacggcctgcccatcagggtcttttcaactgttttaagcagcaagatcctctattcaaacaaaatactaaactctgataggagaagctctggctacagtgaggatgggcgcaactccaaacacaggtggaatcctttgccctagataacgcc

SEQ ID NO: 68970 - DNA, 1046 bp, Homo sapiens
tgaatcttcttccgcacatgttacacccgtaagtgaaagaatctttgtgtgttctcatgtggatctcaacatcaaaagcgactctaaatgtctgcccacatacctcacagctaaattcattttccttgcaattcttttccttgggaggttctgttcgcacttgacttttatcaagcggactgagatactctgcttcaacccgaagaactgctggttcacagagggtaggccggtgttgcattaagacatgtttattaaggtcttctgaatgtgtgaaggtctggctgcagaacatgcaatccaagggcatatacccctcgatttggatgacatttttttcttgtgtagctcggaatggaacaacagcggtccctttcattgacaaggcatcctccatctccatcggactgccaagagagctgccaatcacttctggcccatccatgtacattaagagggattgagttggcatgtttcctgtcactttcgattgcatataatctcaaagttccgttgggcaatttctggagttggaataaggccacttgtaagacttgtcactcacccctctaacagccctgggttccaaaaaccagagcaaatatttattataaaagttcaaaagaaagtgtatagtcctctaacttcttcgaacttttaggaagctcagtgatggtgtcactggttctttccacaaacaaggcatacagggttcccaatgcctcgattcaaatatgaatcagcacaaagcattagttctctttgtctccattgaatgagtgtttcaattgagcaagaagtcaatcccagcaacctggagacaagggatttccaaaccctagaggaaaaaaaacagaaacggttagctacactcagagcgaagagaaggctggtgtgggtgagtcatacggtcttttccacgcagcagagaaggtacctaattcaattgcttcacttttaactaatatatagggcatcctgttaaacgtgcttgttaattaaatcattggcattttatccagtcagtacacttattaaatcagaat

SEQ ID NO: 68971 - DNA, 1400 bp, Homo sapiens
caaagccttaaacctgaaatgactacccttttctggggggtggggggaaagaaaaagaaaaaaaagtttctggggctctcagggcggcccagatgccagggtcccagaagtggccttttctagctcctgtaactaaacctggcggaaaactccctgcctgctcaccccacccccacccgcccaagaaagcgccttcccgtcttcggtggccctacccagaatcccaaaatgtgggttccaacccgggccctgaacatcttctcaaactcccgggacccaggttccggcgcgcgccccgcgtgccgggtcttgcccctcgggcgggaccgcccaggcagccccaaatccagcctcccgggcccccagcagcgccctccgcctctccaccatcccgtccggctcgcagtcggggccaaatcgagagacaagagggctgtgcctgaaactgagcggtttcaccactcggcacctcctggcagaaacttcccttaaaaaaaaaaaaaaagaaaagaaaaaaaaaagcagcagcacttttgggctagcatttcaatccttcctgccctttagagttcccagttctgcttccagctggctttgggtgttccactagaattgagttgtaaagatattctttaagtgtttatagaacattaagacttaaaaaaatctttaaaattagaggagggaaaaaaaaagccaccttatcgcacacatccaggaaacgcagccccgtgcatccctgttcagggatgagcaggcgccccaagactcccggggacagatttttgggcacccgagggagtcacggggcgcgcgtcggggtccgcggcgaggcccagcccctcccgcggtcccttagaggcgccctccgcccggcccgagtggaccgtcccggccattgtttacggggggatgcccgtccggacgcattgttttggccgcttccaacttgccccggcccttccccgggcatcgcggggggaccctacgccgacgttccccctccgcccgcgccccaagggccaactgggcaaattgggagacccgccccgcggggcgacccaacttttcggaacagccccccaccgcccacccccgcagacccccgctcccggcggagattcagggaaccccgcaccccaagcccctctgaatcgtgcggcgtgagtgtgacggccaagagcggatgcagcccgggatcgcccgcaccttcccgcgggcggaagcgcaggagccggctggggagggggcgccctagaggagcggatagaaagctgagacggggaactgaggtcatcctggggggggacaagacaacgagagccgggcgcctcgggggcggcgcgggagcctccgcaggaccgggcgggcgccccggctggcgcgggcggggggcgcgc

SEQ ID NO: 68972 - DNA, 505 bp, Homo sapiens
gagggcggagggagggagggaggcgtcgcggagtttctctcagccttttgtgcggacacctcccggattccgcgcccgcacccggccccccaaaagacacggggagccgcgggcgaggggtgcagccatccgccgaggagcctagtgccttcgcgcctccaagacccccccccaacaaaaaaggagcgtcccccacccccacccccgcccggagaatataggggccgggctcacctcgggcgcggggctaaggtgagcggggcgggggtgcgcacgggggcaaaggcgcgggcgccccctactcgtccgcgcggggacagtgcaggcgcggggggtccctagagccgccggggcgcggcgcgtccggcgctgggggactgttgggtcagaaagtgttcagggagcagctgttgcgccctccctcggccccgccgctcggagacgccccgccccctgccttcaccggccgccccgccccctgccttcaccggccgcccggccacgc

SEQ ID NO: 68973 - DNA, 1095 bp, Homo sapiens
ccacaccgccccggccccgccccagcgcccacgtgactagcataggcgcgcccctgctccgccccccgccgccgactccgcctccgggacgggagcgagcggcgagcgcgcgcactcccagttctcgctcggcgactcccgcgcacgcgcgcgccgtgccaccctccccgcgccccccgccccgcacccctcctcccgccatccggcttaacgtggcgggcgcgcgccgcggcggtagccgtgacaggtacccggggaggccggagggagggggccgcgagggtgtgcgcaggcgcagatccggccctgtccccgccgccccctcctctgcaaggtgtgcgcgggcgaggggaggggcccgcggcccgaacccctgggtcaccccgaattacaaacaaaaaccttaacgccgttgctcgcgggttagaaggcagctgtgcgcgaaaaacaccaaagattttcttcaagcttgaggaaggtcgagaagataaacagtttttaaatgagtatcttcagaaagctatttaattgttgtgatttttttttttctgaaagggctgggcttgcgctattctaacttgagatttctaaacttagcctaggttccaagaatctacttggttttgatagaaatccatttggaggaaaccggggacaaaaaaagggacaaaaaaaaaaaaaaaaaaaccgctaccctttcccctcctccctacgcacaactcatttaaagcgtttcccaaatgttttctttccttactgaaaaaaaggacaaaaaaaagatcctgattcctaaggcctgtgatatttccccattttaaataagcttcgaggaaccatagacataacaagcacatccacaatttttctaccccaaaatgcaaactaatgcaaatgtgaaatggatctatgcaagtcgctactaacaaaatagccaaatatttgtgtttttaccggccttcagcatatccaaaatgaaaaaactttaaaacacatcaagaaaagcatttaaaatatctatttcctaaatcaaaagaaagaacgcactacagaaacgatccggagctggtgagcaatgcaatcttaataaataggaaa

SEQ ID NO: 68974 - DNA, 3796 bp, Homo sapiens
cccaccaccacgctcggctaatttttgtatttttattagagacagggtttcaccatgagggccaggctggtcttgaactcctgacctcaagtgatctgccagtctcggcctcccaaagtgctgggaatacaggctgtgagccactgcgcctggcctgaatttttattttttttttttgagatggagtcttgctctgtcgccctggctggagttcagtggcaggatcccagctcactgcaacctccgcctcctgggttcaagcaattctcctgcctcagtctcctgagtagctgggattacaggcatgcgccaccacacccagctaattttttgtatttttggtagagacgggtttcaccatgttggccaggctggtctcgaactcctgacttcaagtgatctgcctgcctcagcctctcaaagtgctgggattataggcatgagccgctgtgcctggctgaatatttttacataggaaaacaaaagagagagaaaaagaaagacaatctcaatgcttttctcagaaagaacaggaagcctcaaggaggaagtaggtgacagtttatttttcaacaagcacacgttatcaagtgaatgaaattcctctggaagctataaaattgaagattggaggatggcagtgttcagatagcatgaaaggttgctcactatttaggaatttttttcaaagctaagttattaatgaaagccaattatttgcacttttccagaaggaaacactgagtcattcatgaaatgatctaagattttgaaacttgcttacaccatttttttcccctcctcctttcttacctgtgccaaaaacagaaaagccaactactcactggggcctaaatccagggagcctgcaccaaattagctcaagactggagtaatttaacagactcgtgatgccccgaaggcttaggtcctaccaggatggtaaactctgaagtgcctccattgcccccgcagggtgcagagcacaggggcctggtccccacctctggagggcctgtgattaactggttctggctcagtaattatttagccatatccctggactgcctccaagtttcaagtcgaacagcaaaagggcgtgggcccgcagataggcagaaccgtgctcctaggaggcattacttatttacagccagatccctacggaatttggccagagatgggatacagatgagaatgtgtttggctaggaaatactgacttcttgatgcatttatggaaagtttgtgagcttaggccagtaaaccatgtcaaaaacacagtcaacaaatgtttgtttcaggaataaactgtgagtgaggtggttttaacctagggacagcttcattctgtttctttcctggtgagactatttctaggtactttttaaaaaacgtacgttgaggcaaattcactaagagtcaaaccactgaagtttctggttaggccatcagtggaagctgcttatttcatcttcacaaacaactgtaagtccatgtagataaataatgtagacaaggaaacaatgttttgatccaaacaatacagaaaagcttggaattgtgcctccttaacgtaacaccttatgtttgcattgttctgttaaaaggattttacagatacattatcttaaaatgacactgcaaggtacagaggggaagttgaatgtcccatttcacagattagacaacggtggctcagagagaccatgaccttccgaaggtcacaaaattagtacattgcaaagtccatgcttaaatccagggcccctggcaagagtgctgagcttgccccttacaaaccggatctgaatgttcccttctgtataccaggactctgtgagcttatgtcctttggttttgcattaaacctgagcttttagctcctagaattcacaaggaatattcaagtctatttccactccctaccttgaagctcctggtctgttttcacaacaggggatgtgcctgtttgagaaggaagtggtctagagtctggtattagtgtaaaatggcttcctctttttctccttgaatttattctggtagtattttatcccaatactcctcccccgcagcaaaaaaatcccaaattctgcaacacaattgaggaacttaaaaaaaaaagaaaagaaaaacctttctcatccactaagatgttactaatgatcaccagtgatttttaattccctttgtatatgtgtgtatttttcagctttttttttaaacaatgatatagggtggggttttctaacatttagggaaaaaattatttttaaaaaatctcattatttttgtgtaattcacatggtgtaattcacacaatgggtggttattactaacaccagtaggaaaaaatatcacaggagcttcatgacaaatccttaggcagggtttaggtctcactaatttagaatatgcctggtaagcactggttaaaaattgatgatcccgggaagtctttctcaaacgatttttgtaaaatacctaggagaccttgaactgtctgttacggaggtttccaatcctgaggagaaggacggagggtggcgttcacgagggatactgcctattactcagcttaaagtccccttggctctgccctcctcctcctcctcgtgctgcgagctgggaggagtcagcgttttctctccctaactggcattttcactaggcagaatacttgtcttttgtgaacgttttcattttcaagacatataaaagaaaactttgttctttagtaagtgattttctcccccgacagggagagggttacaaatccctccctctccagcggagttttcttatctcttatttacagagcagtagccattttggggagggggaaaagttgtcagcaactcacgtcctaataatggcagatatttttcttaagccctcaccatgtcccaagcactctcccaagagttttacatgtattaactcagttaatccttcctagagccttatggtatacgtgctattaggatcccgattttacagaggaagagactgaggaacagaaatgtaaactaacctgccaagatcacacagaggctgggattagctctctgacctctgtcccagaggcagaatttttttctaatctcacgagtataggtgaaagtcagagtctcattacagattgagactgaacagaaagttggaatccattgaaaaagaggtgtgtgacattgatcaaggccagcacttttatttttgcccatttatacttccttaaaaatctatgagccaactctgttgttacaacacaaacatgcagtggttccctagccaggtcaggtcagctagaaaatacaacatacgctcttgaacaactagatttatttcaacccaattttcaatgtttatataattcaattgtaaaatgttaaaacttggaggattttattcaccagctgaaggactcatagttactatctttaaaaacagcagtgaataagcaaactataaactaacaaaaaaaccaagcacaacaaaacaaacagcaaattaggtttaatcataatgcttgggagaatatgtatttggcttaattatattttcttctttttttttttttttttgagatggagtttcgctcttgttgcccaggctggagtgcaatggcacgatctcagctcactgcaatctccgcctcctggattcaagcgattctcctgtctcagcctcataagtagctgggattggccgggtgcagtggctcacacctgtaatcccagcactttgggaggccgaggcaggtggatcacgaggtcaggagttcaaaaccaggc

SEQ ID NO: 68975 - DNA, 1539 bp, Homo sapiens
gtctaatgagtacaaaaattggaaggaaaatgacccttcacttcactgttgcatgaacaggaaatggaaatgtttttgggcatatgtatctcttgggagagtgaggtggaaaacaataccagccaccattctttaatttggattgatccactgttcttgattttgaatagcaggtggctttgctgtggtgttattgttgttgctctttttttgtttgtttgtttgagacagagtcttgctctgtcgcctaggctggagcatagtggcgcgatctcgactcactacaacctccgcctcccgggttcaagcgattctcctactgggattacaagcacatgacaccatgcccggttaatttttgtacttttagtagagacaggatttcaccatgttggtcaggctggtctcgaactcctgacctcgtgaaccacccaccttggcctcccaaagtgctgggattataggcgtgagtcactgtgcccgaacgttgctctttaatgttagtattttgttatcccaaagaaagctctcagaccacggagactcttaaaagacaatatcaaatgtttcaacaactgacaaacctcagacttcctgtatttctgtaagttgcagttttcccttccttcttcttctaatttgttaatatctctggggccacaggctctctctctctcacacaggtctctaactagatcagtggatcaaaggtgaggctttgctaagtaatcagggtaatttcaccggtgtagcaagctattaaaaacagacctgcagggtttttcaaggacaaccaaggtattgatttggcaaccaaaaactcctgtagtgcaagcaataatacaccagggccagtgtttccaacaccgtcacaactcctccccctccctgtccctagtgacattacaaaaggcacagctaaggccgatactccagctcctatgcccctgctcctgtcttcaaaaggaacgtcactgttataaattagacaagggaagaaaaacctcatttctttgatgatttttttaaagagctttgttttcccacgcataattgttcttcctattcattatgcctttatgtagactttgctttttcctttaaagaatacacttcttatgtaatttgttttgcatttctggaatgaggaacttttctgctcatattgttgttaaaatctagacaacacgcccgtgtgatagatcaccctgagccttggaaggaaatgattcaccacaatactgtaactgaaagtcgtctaacaccagggctggaaggcaggctatgaaccgctgcattacctgcgtgcagcagcaatgggaggcagccagaggttccctcggcctgcctagctcacttcagctttgttcctgttctgtttcctccgtccgagtagcaggatgctggaaattcatcctccatttttaagttttaaaagaaacccaaaaattgtgattttttttttttttttgacaccgagttttgctcttgtcacccaagctgaagtgcaatggcacgatcttggctcactgcaacttc

SEQ ID NO: 68976 - DNA, 1634 bp, Homo sapiens
tgcttccaaacggattggacttgttgtagtcaattgatgtttatgatttaaaaaaaaaaaagaaaacaaaacctgttcatttaaacaatcattattatttccaggtattttatgaggaaggggcttacacagacatttctgtaactaataaattatttttctgcttctttagagttaattattcacagttactttgcgtagttacatgagttagctcttcccaacattagtagtatttgttttgttttgttttgtttttggaaaattttcatctaaatcaccgtgggatataatcaccattccacatgttgctttgttcagttgtacagtacctaccttagcctctgtaaaatttggtaaatatcactgctttctggttaagttctgtggaagaaggcagaaaaaaaaattacacctcccatgtcccttgttgaattaagagtacacagacttctctttccccttttttaaaataagtatcgtggcagttgaaaacaggtgctaattcagttcattcacgatatgagaaagatcaatgtacatttgaaactctcttcagagcagaaaattgttaagagttgcgcaaaacagaaagcaggtccttttctaaatatagcaacgtcatatgaccccactggtctttgtactcagagaattaaggtattagacacattgctccacggatgcagcatataattactctggggaagagggactatgaccaacgagcacagatattaatataaatattgggcttgtgtctgtcctttttgatctaaggaaatagacttttgaatgttgctgggacatccccacatgacagcttgtcaactgtgtaaactttcccactgcacacagaaaacagttcttccatctctttggttttatttttataccccttttcacagcagtcaatgtttaaacacttttcaaacagtagacttttttttgtctatttccttctttaactgtgaggtctcaaactgatgctaattcagttttgttggttatcatgatcatttatgatactagatagttctcaatttaggtcccctgtaattaatctctgtgaacgtggtgttttgtttgttttgtttggtaacaactctttacagggtaatttggacatgtatccttaaagcttttagtgctttttaatttttttagtctttatttttaaagaccatttcaagtttactgtgtatctgggagaaattaaagattaaattgggagtgcaatgttcaagagctatcactgcatttaaatgtgtttatctgcaagctaaaattcttaacaccaccattctattttgcaggaggtaagtctttccagccaagcaagggtttgcaaagccgaggttagtcagtaagggccgatacatattaaaattgagaaaaggcctgtccaagcttggggaaaagcagctgttctcacactgctatcagcatttatcaagggggaaatttttgtgttagccctctgggcccacgggagggaaggagtagaaggaagtaactatgatagttgcatatttgaaggaagcagaggcctcagctggttgctaaaaaatcaatttaaaaaataaatgatggagctcaggcatacggcaagttgtggactgagaatttggttt

SEQ ID NO: 68977 - DNA, 2598 bp, Homo sapiens
gaattattaactatgtatgccccaaataatgggtttctgatggtgtatttccccctggaaaagagcattctatgcaatgcccagttcccagtacatagtagacattcaattaaaaaaaaaaaagttgaggccgggtgtggtggttcacacctgtaatcctgccgctttgggaggctgaggtggatggatcacatgagaccaggagttcaagactggcctgtccaacatggcgaaaacccgtctctactaaaattacaaaaagtagccgggtgcagtggcgcacgcctgtaatcccagctacctcaggaggcttaagcacgataattgcttgaatctaggaggcagaggttacagtgaattaagatcctggcactgaactccactgcactccagcctgggagacagagggagactctgtttcaaaaaaaaaaaaaaaaaaaaaagttgaatgaataaatggcatattacaaagttaaaaagtaaagcgtctgtcttatcagtcagtttatctaatcagccagttgttcagaagctattaataggtaactgatggtgtaagtccagtgtgttttaaataatccttttctggacttttatgttcttcctaaggagagataggaaactggtggacaagtgttgggtttgctacagtcatgttttctttggctcagatggtattcaaacattttgaaatagtcaccaacatttctaaagcttctacataaaaattgggatttctggctttccttaacaaaatgtgagctctggccacaccaggtccaaactccaagccgcaaggccatagaagggctgtgggcaagggacacctgccccctccccctttgattgccgcggcccccgcctggtggccggcctctcttttgccacctgcctggccccgggaaggcattttgactttgccacagcctgtttctctttttaagtttggtgtgtgtacattgaagatcttatattattgcctcaattcaaaaaaatgttcttgctctctctctcccaaattttcaagacctcactgctcctgaaccttctgtgatggcctgggctttgttctttgtcgtcaccagagagagtagcaggaacaactctctagagagacccatctctcagccgactccactgtaggttggtggcaatcaaagacatcggaatactttctcctgtgtgtgcggggtgggggaagggaaggttgagagaaaggaagaagcataaagattaggagggctgttgctcaaccttcctgttctgggccaatcgtgcctgtcagaccagctacagaaagacatgcacttgtagtatgtttttttgggggaaaaagtatcttgattctactctgctttgagaaaaaaaaaatactgttaactctctttctctgtataattagacatcaaaatacagagaaatgttcttagcactttgctatcagaaaagcagacattttcgactttgtagattccatacaagataaacgccttgacccttgctccccatccccaaataaaatgccaaacttcaattaccagttcgtaagtagtctgcatcgctttatttttccttctgacagtaggtgtttggtgtcaatgtacattttcttaccacaatgatttccttccctaaactattaattttgtttttatgaataatacagtatgccccagttattatttagtttgattgtatgctagcctcatgctctgcattttaatttaagtgtaactgcgcaggaaaaaaatgcaaatctcttctattcaaattcaaaagaaaataaatggattttttatggcctaaaggatctattcattaccaaatcatttatcttttcaggaagaacagtttatgtatccaatatgctctcgtgctgtctttattttctttattttttttctcttttgataaatatgctcactctttcaagtctctcttgaatctctgccgataggggcagcttatagcagcaagaacaagaatataattaatagcattaaacagaaagcaaaggttgcagagaaagcttgaacatattggatattttaaaaataataataaacaaacctaaaattggattgtgtcaaatgaatttttattttaacaattgtaacattaagaaaaagagatacacagttggccctaccaaaacaaaatgacaaaggggtgggaggagaagtccgtgttttcaacagactagcttttttggggtcttgttgcaaatagcctgaagaggtagaagcattactgattttgcttctaacatgatcggctcttggaagtttggcattttgaattctgggctatattttttttatttttatttatatcttgattaaataagccagtttagaggtcactgcatctgggagggtgtcgtaatacacaaacagctgtgatacacaaagcagttttcagtaagtatctttcatgtagcagctggaatggctttctcctgaatgagaaaggcccctaagtgagaatagtggcaagtgtgagtttatgtatgtcatttttttaaaaagacatttgtctttttctagagtactgtactttaaaaatcatataattgtgttaaagttacccagaatgttg

SEQ ID NO: 68978 - DNA, 997 bp, Homo sapiens
ctgcagcctcaaattcctgggctcaagagatcctctcacctcagcctgtcaagtatctagctcacgttttatttattcatttatttattttagagatggggtctcactatgttgccctggttggtctccaactcctggacttaaggggttctcctggctcactcttttcagttgctgaaattacaggtgtgagccaccgtgcccagggagcatttccacacataaaggaacaatctgggactgtcagttaacctcctgaactaatagggtgaccacgtggttccagttggtctgggactttcctggttttagcactaaaattctcatgttctgggaaaaccctcagttctgagcaaactggaatggttggccaccttaccaggttgtccttaatgcttggaaattccagaacattctgatgatagaatgatccagtgatgcccaaatgcagagtaagaaagaaggacatccacatacctgaagcaccaattgcaaatgaggatacctcatcctgcttcagactgacaaaaaatttactgggatgtggcccaagaatgtgtatttctcccaggggatttttatgtgtactcaagtttaggagaaccaaagttctcaaattgtagatggcagcccaagacagaggtcctgataacagccactgtagtcaggtgtaggagagaagagaggagaggaaaaaccctgggcgttggagctgagctggcacctgacttcccatttatttctgggtaataaatgacctcctgaaggctcagttttttaatgtattaaatggggataattaaaggctataatatgtgtaaagcccctgacatccagtaagtgtctgataaattttagttccccttccttagactttgatgcagaattgcaagaactggccataaaaagcaattctgcacatggaaaaactacttttcagaatatttcctcattaggacctcagtttcaaaacctcccaggaagtatcttttagaca

SEQ ID NO: 68979 - DNA, 1690 bp, Homo sapiens
agcatcttatggtaacggattgcaacggggtagaccccatctaaataacagaaaatattagcctggtgtagcagtgtgtgcctgtggtcccagctacttgggaggctgaggtgggaggactacctgagccctgagcccaggaggtcgaggctgcagtgacctctgattgtgtcactacattccagcctgggcaacagagcaaattataaatattgatttgtttattaactgtctccatggactactctgtcagatcaaggaggaagggcaggaacttagctgtagctgtattccagtgactaaaacagtgcctggtatacagtaggtgctcaacaaaaacatatttaatgactgtgcagcatctggttgccttacctctgcttgtctgctacccactcaacctgaaccactgctggggacacacacagcctagtgcagaaacatgtctctaggtctgggaaggaactcataagcagccctttaccagagtctgctgacaaacaccagtgtgagggcgtctgcagccagtgtggcgagccacatcctcgagttgtttgggattctggaacaatccaggtggtgaatgctgattctggccttgcccttcccggggcttggtctgacacatgaccctgatccctaaggttcagggtgagctctggctcacacgtgccaacagaggtgagtaaggctcggagaggacagtgcatgacacacgacaaccatgttttaaaacaaaccagtttcactcacttgctcctcattgttttatgtaaaaacattgcctcatggcgtccactggttccacagcccgcctgcttcattcctgatacatgcgtttgaagaacttgaagttttcctccctccttcccttccttccttcttccctccctacttccctccctccttccttccctcccttccttccttccttccctccctccctctctccctgttttcaggagcatcacaatgaccctcaactgagtgttatgtccaaacaggctgcagctggccaagctgcctccttcaggcatttagcaaaacagaaagccccgggagcaggctggaaatggaaagcgggccccagggtactttacttaacccttcaggcactttgaggttaaaagcgccaacatgaatgcccttcgccaactcaaaattgtatcatttggcagcattcccactagttcgtgcaggtaagaaatgaatggtctgcttgcttggcagcgagctgcgtgaacttgggcaggtcacttaactcctgtgagccctggtgtcttcatttttaaaacaaagcagctgaatcactaacaaccacaacaaactgacaaagtatcttgagcgtggatgtaacatccatcagcttgaattccactgaactcactctggaaaggggttttgcgggagaactcaggtgtcctgtggtgtctcagttttcctctgatgtcctcagattggtgattgcaaaatccaccagagttgctggaaaccaggcgtctgtgacgcggaggtgaggaaagaagagggcaggttaccgtaaagcagtggccgattccaaggctggtcaacatgctgaaaccccgtctctactaaaatacaaaaattagccaggcgtggaggcctggtttggcagtgtctggagacatgttggttttcccaatgtggggaggatcaccatgggtcatct

SEQ ID NO: 68980 - DNA, 4513 bp, Homo sapiens
gaacccgcacacattcttgtgcccagttttagaaccaaacaggctaagacattttcctcctaagagctcaacttcgtgtgttgaaaaataggtggatggataaatatctctgtatatttcacctgcattcttttctttttatttttttcccctttcatttctttttttcctctgattcagaagctggactggaagtgttgtaatatcatcagaaaatgctgcttccggtggtatttttaaccaggaacagaagctgaagtgtctgaaaccaccggagaaagcccctgctctcctgagagctgttctctaattttgctggcagagagcattggatcagtgatcagaaagttaaaatggcagatgttggggcttctagggggaggggaggcagatacctgatactctccggcatttgtttttttatccttccccttaccttcctttctcggatcacaatatccttccccttaccttcctttctcagatcacaaaacagagctggcgtccacttttctaaggtcacacagccaaatgctggcacaacagtaaacaaacaaacaaacaaaaaacaaccatccccaggacctgcctctcaggctgcatcctgaccctcctgacatttctcaaatacagcagcagacctcaatactttttacaaaaatcaccaaaagctaatcaacaacaggcagatagcccatgtcagccgttgtttcatgtgctatttcagctccgtgtgtattttttcaccctcccagatgaaaatacagtaattaactccatacagaggggggatggagggaggaaactcccttttttttttcccttcccctagacttgaaaagaaattctggcagataatttggctgaacatgaaaagggagaggctgcttacagccgcccagataaagtgctaggttggtgaggctttgcgggctaagttggttatttcacgccatgaaaagcagacatttatctgttcccatggagatgtgatttctactagtcaatcaggcactggggaggtcagacaatagccagtggttccctttttcatctcaagagacagtccattcctgttctattgtaacatttcacctacatttaaaggaatctaaatgatctctccgaaatacctgcagacgcagccattatattttcaagtgatcaaaattagcagacattccagctgcctcagaggtagacggggcgtgccccccaccccccagtttcagatcataggttgttccagcaccatccttatttggataattttggcttccacacttgatccttccctcctgaataaaataataaggtcataaattacatgttaaaatttggggagtgggcagaggacttcaaacagaacatcgcgggagcaagagaacgctgcccagaagagagcaaagcccagaactactgcaagtttgataaactgtaaactttgttcccggtcacaggactgggaaccgcctgaaaactgcacatgcagaaatgattagggctgttatttgatcttcagtgtttgctatcaatcccagaaagcagatcatgtctatttgccaaatatgtttatttcagtaggtgaattgcagtgtaagcacctagaaactaggattcacataaggactttgaaaatgatctccgaagtgtctctttttcccgcatcattttcacacatgcctaaggcagaagaaaacgtaacgggggtggggggccttcttcgagctaattgagaagcaagaggctatttccatgggatcccatttgaaaacgctgtctgagaggcttttccaactctcagagcatatttgagacgcagactgtcaaatgtgacttacacagaaggccgttcacaggatggcagcgtaacagaaaacagcagacaggcaaggccattaagtaacttcatgcttgttaatgggagtcactcaagtgcagctcaactgcgcaaggcaggaaagtaaacacaaatacgactcctggtttgccacaagcccggcctctgtagtgagagagctgtgactgcgtttccagctccttgaaggcagagagactcctgcctttcggggcgggcgggctggaacaaagacaccaacggggccacctcggaaagtctttttgagcagtttcagcaaatagcatttaagggaagggaaaaaaactccaatgtactcaataaggtacagtataatatcccattattgaggagccaaaaagcagggatttaccgcaaacgtttttgggagctcgatttctctggaaagacagggcacgcatttctcatgtatcgtgggccagtatttgaccatttcctgtgaccatttctttacataattttctcagtttagtttttaaaaattaaaatagaagtcatacctaatctctttaaaacgttcaaacagtataaaattaaggtaaaggagttgaagttcctcattccttttgctcactcccacgcagctcatgatctcaccagagatagctaataactactttttaacagtgtgaaacatattttccagacgttttccataaaatgcacatatacaaatacacatgctttgttttaaatacaccactggtatcatatttatagacactgttatacaacttgcttttttcactttgagtatcgatcatggacaatttccaatgtaggtatttttctagtgagctataaattttggggaaccatgtcatacatgctcctggggaaaattcaaattatagggcttgtggggaagggtgggtctccctcctcccccgcagacaatgactattagcagtttgtagtgtctcatgccagaaatagtccacgcatagatcagcatatatgcatatcgaacgctcacacctttctttgtctttacacaagtatctttcagcttgcattttccacttaaatctcttggacagcactctgtgttagaaaaacttgatgttttaagtggtggcatagtatttctttaaatggtattccttaatgtatttcacttgccctttttcacagactttttggtggctttcagtgtttgcttctacaaacagtgctacaataagtagtctggtgtgtacccagtgattctctgctcaaacacactcactcctttctgaaagcgactcctattacaccacacctgtcctaaagttgctgtaatccaaagaaaaatggatcgaattaactttttttttaaaacgagggttttaagcagaacattattaacccattaaaaatctgtgataataaactcgtgccctttcctgtggtttttagtctctccttcagcttgagagtaagagattcatgaaaatgaaaagaaaaagtctatcccatcctcacctcctcatcccctatcagccatgtcaagatcactacatagcatcccatgcctgcttattacaaatgcatacttcacactgagtaattcctttccatctactcctttcatcttgggctcagagaaagatcgcagctcacgcttacaacttaggtgcagacttctgctctttttttgtgtgcaggagtaaagccactggggatttagaacaaagtgtgtccttggaaagaagtgggtagaattttgtgtgtgcagtaggtgggggagggaaccccctcccgagggaggagttcgatttcattatacagttggaaacccggtgaaatcatgtatacgactggatcttttcgctcagcgagtgaggtctttttgttctttgtcttgcagtgtgtacagcaaatttctgttgtgcctgggaagaaggaaatttgagttaaagaggaggcccgctccatatgccttgtcacaagtacactcactgaaacattaattcacgaagagattgcaacaagaccaaaacgaaagaggaacagggcctgacaatgttcagagaaggaaaaccgaagaagtaaccatccccaagttaaaaatgacgtggggatgaaaaaataggttgcctgttgtatttgtcattgaaatgcacaatcttgtttactgtttatcttgagactctgggagctctcctgctgcttaggaaaaaagaggcaaaggtttaggaagaaatgctagtcataagaaagagaggcattagaaaccctagagagaatgggaggtgtaaatagtatgtgggcatttggcaatcaccacaaagaaatgggagacaaaggcaagtgtctgatgccagaaatcctaaaaacttgagtggaaaacccagacacaataaaaatgtccaaaagaaaaaaaaggcaaaatcccatgagatctttttttttctctgtgatgttacctaatggagaaaataaaggtgggttttgccacagtgatcatggtgccgtatcctaaaggaagtagcttcatgataagccttcagaggctctctccaggccagccccagccttaggacaaaatgggacaatcttgggggacaatttctttctccaaaaaggggatgagattgggcagaagaaacacttgcagggcagagttattatctctctccccgaagagtttaa

SEQ ID NO: 68981 - DNA, 1720 bp, Homo sapiens
cactgtgcctggctatttttttttgaatattgaacttgattctcataaagtattgctaccttcatgatgctgtaggagctggctctttcttgagggtaagccacaatctcatccaccacaggttagctacattggctgctttctgattctcaaacacaagcccttgtctacctcaagaccttggcacttactgtccctgtgtctggaatgtcacctctgcagactacctgttactgcctgacctccttgaatttctgtacctacatgattttttcaggaaggacctcctctaccccctctccacccctagttattctctttttcacgatctggttttattcttcatagcactcacccaaacccaatttattgttattttttagattgtatattgcctacctgcccctaaaaacataaccttcttgtcaaacatgttcatctgtgtatccgcagtgccctagcccaatatcttgcctacaatcggtgccaaataagtagtctctgaatttgctgttgacttggtgaatttataaacaggtaatcaacatttggttgcagtcatctttgatttgtaggcaactgaattttatttccaattgccaaaagttgtctttatttgggatgacagcaccaaaacctttgctgtcttgtgcaccatgaatatgaagccgagatgtcaggtgataccagataaagaatacgtcatggcagctctttaaacatgtaaacatattaaacattcagggcatcagcccctggctcgtggagaattccatcctttagcacatgacaagttggggtttacagtcaaagtccacttagcaaatgtttgttctacaacgtgctttccttttgtttcctgtaagtatggcttcatgccctgccaggatctgaggtcatagaaacacgaggagacgattaacatatcaatggaggggtctctttggaatccagaatttggaatgatatttgcatcttgagctcagaagccgtgcaggcgagcctgcttattgattgcctttaatttccccttaaaacagtgtctttttctgaagaaaagattaatagaggagggctcagtttgtcgcgtgatttatgctcaagtcctgcctcctttgcattcagaagcgcattgcaagctcgtccccacccctgagatgtttggattcagtttctcaagaaaaatagctgctggtcaccaaagcttacagcttaattgaatttgtctttgtccacttaatcttcatgcttacaaaaagtgggggtgggaggatttatacagaagagatgtacctaaaatatacacgcgatcattaggagggtgggctgaagaaagagatataaaatgaaaatgagggtgccacttagtctatgctgcacttctctttgcttaaggcattgataaatacactagtatctccccagtataaacatgagaacctaagaagtaaattgtattgtaccaactctgagctgttccatcatttttgttttggctaaaaatttgttttttttctttgagggaagaaaaagacacaaaaggaaagtgaagatttctgtgttacataaagtttgggacctctttctataaataaatagctggctatattctgtgtcactaataatcataacactaatagtagcaatcaatttatcaagcacttttttttttagccattgcactaaatgctttataatttttttttttttttttttgaga

SEQ ID NO: 68982 - DNA, 2479 bp, Homo sapiens
aaaaacaaccaaacaaacaaacaaacaaaaaaacgaaaaaaaaaagagaatgagtgaatctttatgtattttaaaaggtgttggccaggtgcagtggctcatgcctataatcccagcactttgggaggccaaggcgagcggatcatgaggtcaagagatcgcgaccatcctggccaacatggtgaaaccccatctctactaaaaatacaaaaactaactggacctggtggcgtgcacctgttgtctcagctactcaggaggctgaggcaggagaattgcttgaacctgggaggtagaggttgcagtgagccgagatcacaccattgtactccagcctggcaatagtgggagactccgtctcaaaaaaaaaaaaaaaaaaagggaaaggtgtcagtcttgctggctctgattcggatttccatttagcctcacagttcttcagtgagatccaaagtcgggaggcatgctggtgtagggcagaggtcagcccacaggtcaatccaggttgctgcctagttttgtaacttaaagatcatgtttgagctgcatatttgagtaggattttgctatgcagatggggaagcaagaacattctaagatggcctagcaaactccagtctgggggccaaacctgtcacactgcctgtttttataaataagatttttaatttgaacacagctacactcatttatatattgtctctgattgcttttactctacaatggcagagactggatgggctccaatgactaaaatatttactgtctgatcctttacagaaaaaaaaaaaaatccacccgtggtgtaaggcttaaacatttaggctatgaatcaacagcctgtgttcaaattccagctccaccaactgacttctgtgtaaccttggttacacacttataaaatggaaatatgaattcctctgggttgatgtgagaagtaaattcagtaatcctagtaagtgcttactcagtgacagttattatgattcatccaaattaaagaagattttcagaggcttcccatagtcttaatgccctagattataatcatactagatgttctctgtccttataaaaattaaacatctaaaatatttgaggaatttgggcagccacctttcctgttccaggaatgaaaggttcataaaatactggcagtacattttcagttatttgatgttgattaatagagtcatggaaacctagaaggtctccaggggtgtgccctgggaccctgtctttgatctatcctggatatcattttgattcaggactaaagaattaaggttttcagatgcaatttctaggagacaaaatattggtattacaggatcaagattcacaatggtctccatagcttcaaatgaaggattggaagaaataagagagcatttaccagggattgatgtggattctggcatcaattattcacttctgggaatggggagacttggccagacagcagttcctgggaagtagttctggggcttctcgttggccacaagttcaatttgagccagatgcatacagctgccgacaagcaaagaatcttaggctgcattaatggagtcaggatatgccttgtgggctccaaggacaataaagaaagaaaacaatttgaatgagctaggcaacccatgtttgcagaatggaggttcgttatggaaacaaagtacaatttttaatgaggatcctgccaaagtttcataggttgagggggcggtaggggaagaggcgagttgatgagtgatctgggaactatgtcataatgaggaatggctgaaggatttagggagtttcccaggaaaagagatgaccacaagggaagaaagctttgggaaaccactgaaggtcttccgtgtggaagaaggtgccttattatctctattgctttttggcaaaacttggagaaaataaatgtgaggtacttatcttttgcgatatcagctcggctcagtgtttcttgtatccctgccctgagtccactgtctcagctaaggggagtccctggaagccatatttgttcttcataaccctgttgatagctgatccaacaagagatgaatgcctgctggaaaccaaaacaatcgagttctctaccccagggaacatggaagttgccttgaggactgtcagtcggcctctttgaatagttggatctgtaaggtataaatctgagcacaaaggtagacattttccaccatgacaatgcaccgacagagaaagtcaatctacagtgaaaagaatgaggccaagatgcagagaagcaggaatggaaaagcagaaggccaggccgggcatggtggctcacacctgtaatcccagcactttgggaggttgaggcgggcagatcacctgaggtcaggagtttgagaccagcctggccaacaggttgaaacaccgtctctattaaaaatacaaaaattagccggatgtggtggcgcatgcctgtaattccagctacttgggaggctgaggc

SEQ ID NO: 68983 - DNA, 630 bp, Homo sapiens
ttatcaacagtgaccatctataggatcatctaaattgggacgctcgtatggatacaacagatactattaataatcacacggggaccgcaagcattaaccaggacagtcctgggcaaattgggctgcaggctcaccccagtgtatctatttgcagaatctggagggcgggcctcctcagcaagcctctggcgcatgtttgaactgctcttaagctgttaagcactaagcgctgtcatcaaagtgtttttctgataagaagctcgaagtccactgagaagaatccagttgagataaatgggctctctactctgtgtccatgttacggttttcaaggttcaatagttacctgcctagggtctcctctgtaagtcaccaataacccagtttgattgtattaaaagcgctggagtttcttaggtcaaaaagaactggcataactgatgtagaaatagcagttattattttcccagcagctcttccactccaggcactgttctgagtcatttcagcatcgtgatctttcttggaggtggtcgttgttagacccattttacgagcgaggacactcaggctcagagtaaataaggaacttgtccgaggtcacacagcctataaggggcaggcctaaga

SEQ ID NO: 68984 - DNA, 922 bp, Homo sapiens
tacagttttcccatttgtgtttttatttgcaaactgacagccgcttaaccctggcactcgtggaaaatattgccttggaaaacgacctcacctgactatggcatccatgaggagcagtgaatgatactgataggggttaagacttgcttgcccctctgcttttgcacaagtggtgcctctgcctggaataccttgacctgcctcctgagctgtgtatccaaatctcagttctggcatccctccctctgtgatgccatcctggggatctccagcagagtcatcatggccttctttgtccctgccccttacatctgctgtgatacttttcctggaggtcaaaacacaaatacgtagaatgctcaatttccacagaaggctaagaaatgaaccaagtgggttgggggtgaagaaccgggaaccaaggcaccagagtgaactgggaagcctgtgctgggtccaagggtgcagctgctgctcaggcctggcctggtttctatgaggaatgtgggctcagggtagccagagctcctgatttttcaagagaactggaaatctgaactttctttttttgacatatgtctatctttaaaggcagttgttccagattttaaaatgactccattcagagttgataaatcacacacattcacagaataaatccactccacgggccaccagtgacagcccatgctctaggcaaaactctccggagtctgaggctctgtcctttctttctcaaattcccagtgcctggggcacggaacctggcatgaagaggcacttaggaaatgtttgttgagtgaatagatgaggcaatgaatcatcaggatattaaaattctttccactctgcatgagccatacatatagtgtaatttgtatatttatatatgctttccttcgggcccatgaacaaagccagg

SEQ ID NO: 68985 - DNA, 1017 bp, Homo sapiens
tgggtcttgtgatataggttgtgtctgctttagggggcccaaagctcagtaattctgtggttcttgcagatttgtagaggtatcgccttgatggtcttagacaagattcagtagaattctctggattaccaggcagagattctaattctcttctcttaccttttcccaaacaaatggaaactttctgtctgttttgagccacctggagctgtgcataggctgatacaagcatccctgtggccaccaccgctaggactgcactgggccaggcctgaagccagcatagcactgggtcttgcccaagacctgctgtaaaaagtccctggctaaggcttatgttcactcaaggccctggggctcgataatcagcagatggcaaagccagccaggcttttatccttcccttcagtgtggcaagtagccccaggccccgggcatgtccacaggtgctgttcgggagccagggactagagttgaaaaccttagaagtctacctgttgttctatcgtactgcagctgagctggcacttcaccacaagatgcagtccttcccacttttccctctcctttccaaaggcagaggagccttaccacatggccgccaactccacggacccacagggagtactgccagattggcattgtgttcccttagggcccaagggctcttgggtcagcttgtggtaaatgctgcctggccagggactctcccttcagggcagtgggctcccctctcctctcacccaggtcaggtacagaaatgttgtccaagagccaagacctggaatcaggaatcccaagagcccacttggtgacctatgccactgttgctgagctggtacctgatttttggttcttatgaagctgttttttaaattttgtgcagatagttgttaaattggtgtccttgtgcggggatgatgagtgtagcattctattcctccatcttgctccactccaggtctccctagagattatttaaagtatacaggaggatgtatgtaagttatatgcgaa

SEQ ID NO: 68986 - DNA, 2361 bp, Homo sapiens
ttttacatattcttgtgccaattctaaaataagcacatatatttctcaaccagttgagtatctcctaaatgatgctttcttctcagtgggaagctttggatacttatgaaaaaaaaaatcagagttctttaagttggagagtccacgctgatattcatcacaatttgcatttgaatagtacaaactacaggaaaccatggttggggggggaggtgaaatttttattatgtgcttggcgaggagtctctgagtgtttatagtttgggaacggatactagcagaaggctttctgttgttgttagggacggctcacattcccttcccacccactcactgccatctacagctcagctttggagtcagaatagcacttttcctacgtttagtaggactaagaaagatttttttttctccccttggcatattcctgcagctggatattagggaagcaaggaagctgttgaatagctttctagctaaccacattcatagtattctttctcatcttccttcagagtttctgtttagttttgttctgttctaaggacctatttcctctctaatgaaattttcgtaggaccctgttgtttgaatgtttgtttctggaccctttgaggtttctttactggcattgttattttgattggagagccaatttgctatctgtgaacttttgcagatgcgtgaatcgtgagtgagatagagaggtgacatatatttgagtgtgtggtatgggggagagaaagagtcactttttgtgctcttccgggcacgtcttcaaacacaccatgctgtcccccacacagtgagtagaattatcccaactgtttttaagttttaaagtgctaacaaacagaaaaaacaatgaaaataattttctcttcaaggatctctgagaactctggccacacctcattcttaaaagcataatatgtgagtgactaggacagaattctttccctggattcccttagagaatgtctcacgaaataacgtctcatggcaatgaatcatcggctcaggatccgaccagtaagccactggccacatttctatttttaagagtcactaggaaaagttggaaataattttagaaaataaagaaaatactctttggcctttctttcattttcttttcatttggggagtaagtggagaatgggggaagagatctcatgtctttgattcatgtaaagccaagttctggaaatatagcaaacgcaggagaactctttcttaagtggtaggaacagtcctaattcccacagtttaggttatctggtctatttcaaggttttggtgcgtgaggtttggtgtcaacagcatgatatgatctgtggtatacttagggttcccaaatatgaatgtagaagcattgaaataatttattttattggatttgaattcactaaatatagcccttgagtcatgtataaaatctcattgttctaatatgaaacaaatgctgagtttattgtcaagcctaattaacatgtcatgaacatggggcacctgtaaatgatagaatctgagttaacaacagctctctgactgtgtgcacgggctgtttggagggcttcttcatgctcaaagttcaacggcatttagagtttcaacagttcactgcttcaatttttgtttactttcgtttcccctgggcagaactctctaatctgggtttaactttttatactatacttgtgagaggtgctcaaattaccctactccaataatagcatactcttcatatgggaaatttgaaaagtgcctctgcccactctatacagaatttcctgtgctgtacatttatcctgctgagacaggaaacacaattattgtttggaattaagctagacccttgaggaacatgaagttctgcttatggtttccccacccccctccatcatcagacatgggtgttgttttatcagaaataaataaaaacggataatgtagctacaaatagctacagggaaggaaaaatctatttgtaagatttttattacttgtgcctaaataagatggttctctgaacatttgctgactgtttacaagagaaaaataattattcctggcttgtaagcctgtcaggccatcacagaagaaggtacaaactatttccacattttttaaccccctcagtttctctatgattattcgttgactattttagctggtgacacaatgaaaaaacagagtctaagcaatttctctaggaatcaagatttatctgcattttttttttttttttttttttggccagagtggcgtgatcttggctcactgcaacctccgcctcccaggttcaagcgattctcgtgcctcagcctcccaagtagctgggattacaggcatgtgcca

SEQ ID NO: 68987 - DNA, 2240 bp, Homo sapiens
cctggaagcttctattcaggtttagctattatccacgcaaagatcgttattgctctcttgtttgtattttagcctggagatttgtcaaggaaagaaaaaacaattaggtaactgtgtaatgacaaaagagcaatttggtttgaaaagtctcagaaaacagctattttttttttttaacttctagggcatttctgcttttttgaaaacaaaatatgtttaggagaatctttgtttttacagatacaaaataaagcaagagggtttctgcctttctagttaaagagcaatctttaaaagtcatccaagaaaagttggctctgttttctgaattgctatttgggagaacaaaagaagcaagggaaagtttgacttgacttcctctacaatttgtttatatcatcggagcagaaagaatctcagggctcagctctccacttcctgaatgaggagagagagagagaaaaaaaaatgcccgtgtgtcaaattcattgagatgtgcaaagtgatcagcaaaaatcctgatggactggagcccaaatggcaaaggaaggatattcttcaattcagctgctatctggcaagagagctgcaaagtcctgatggcgagtgtcaccaaatacctcctcctctcctccccagccacagaaaggacaggcaaggagggtgcagcctctcctggcctgttgctatggagtcgggctaatccaagacaatgtttcagtcggtccaatccaaagacagcagtggtagcaatggaatagcattgaaattataaatatttacttgaaaataatgctcaagccagacttaactgaaatgataaggtcctgtttacttctcttggtagtagccagctgaaacaaccaaaccagttaagcaacatttttttttttttttttttggtcaggtatgtactgaatcactggcagcaaacttgtgggattttaggagagagcttttctctctctctctctctctctctcaattctgggcagaatgcttatttttgtttcgttttgtttgttttaaggaaaacaacaacagaacttgaggctggctgagtttattagattactgattatcactgttagtttcccgctgcttgtatttgttgggggtggtaagggagatgaggacaagaattcagatgaaaaacacccaggcttttctcttcatgaaatcccccctgtgaggttttccagcttgccttcccataacttgattctgatgaggtctgccatagctaacctattaaagagaacattgaaattggtgggtgaaaagggttaaaaatacagcttagcagtgaatatattcgggtttagcacccttactggaggctgtgatttcactggccttggaataccagagggaattgcaaaacatgtagatagaatgaagagatagagtgcagatagagtggggacagaacagagtggtaaagagaaccaggctaagggtggctacttccctctgaagggtgggtcattcttgctaaagtgggtttcttggtgaattacagtggcagctcagagctgggtaagaggagaaaatgccatccaataaggctggaggcagtttgaaagatgaataatataacatgcagtgatttcaaacttcacgctttcttattgaaagtttttcttccagtttggaaggcaagtttcaatcgattctcttgtctaatccctgcttcctgccaggctgagctgttgctgttttcaagaagaaacctgggccttgatttgaatgcttcaaacactcagtgctcaattagccctcttttgaatcctctctgacggttggttaaatatgggtcgaaagtgcttttttaaagtggaactgatcttgggttgaggtaacttaatcttccgggtgttaagacgctgaaaaataatgttttaacggaacaattactagaagacatggaaattgcattaggctcgtctgtccagttctattttatagacatgaacatttcaaagtacaaaaggctattctataaaaaggacacttggctattctttataaaggttccccttgtacttttatagaatgtttacaaggttaataagtatgcttttttttttatcactgtatattttaaatggcccaacgactgctcccacgttgatttgagaatcattgaaactgcctgaatggagcaggggtatcctttgtttcccattgatttggaaacaaaagactcaggggggaaagaaaagtttagtttgcttctg

SEQ ID NO: 68988 - DNA, 753 bp, Homo sapiens
tagaaacgtttcatcacaaacttggtactgctggcaaggaaaagtcaagaactctcggagtgtagttccatttgagaactaggagggcttctgtgaggaggtgacatctgagctgagatgagaaggttgagatggtgaagggaagaggtacaggggtggagaatggggagaaaatttcaggcagaagaaacttcagaggcaaagtccccagtccctgggtaatggttaatcatttacatcttactgcttccaatattctggtttctgatgattactatgatttaacttcattttttagctaccagtaaaatattggtgataatttgcattctttacctccatattggagggatgggaaatgcctccaaacccaggattctaattaaatttgggagaccacagagtttatgcagcgtgtggttggatttttacatcatccttgtttgttttcttctctttccagtccttcgacactggctagtcattaaaatttagagctcaccctaggttaagtggacaatttcctggaaaacagctggttgagctcccccctgtgcatcgctgaaataaacatcccctttggaaaaaggcttcctttaataccttcctgcttagcatctttttgcagtctatattcctgttttgcatgacttctcagaaaaaatctagaatgataagtaaaataataggcaaggtttattaagcacgtcattgcttcacactaccgtcctgggagctaggcactattattat

SEQ ID NO: 68989 - DNA, 3418 bp, Homo sapiens
tgtacctatctatctttatctactcatctatatatattgtatgtatctatcatctatctatctatctatctatctatctatctatctatctatctatcatctatcaatcatctatgtgtcttatctatcatctatcttatctatgtatctctatgacctgtctatctatgtatctatctgttatctctctggttatctggtctccagtgcccacctcctcctcccagtcttttctctcaccctgactctgaacttctccaggcctggtgttatgttttctgtagcgtgaccttataactaaccatcccatcgaagacgcttgggggagtgaaaggaggggctattaatacttctgcaaaaactggcgctgccctgagcacactgggatgcctggtggtggtggtggttaggtgtagatttctccccattccttagtgcctcacaagggtgctgtaaaacgtttgtcgagtgtgttttatcaacagtctcagaaggggtggtaaaaaaaaatactcgtttgtttcatacagagagaaattgcattacaaagtgatgacttacaaaatcaccgaaaggaaatcaatggtgaggtggagccaaacctctgctgtagaatttctggattcagataacacagagctctctccatcaagcatttgtgtgcagaagctaagctccaggcccagggagagagcttgaagcaaagacataataaaacagtaacagctgctaccgaagctgtgtcatgcaactttgcttagccctttactgtatggtctcatttattccttaaggaaggtgagattataatagaaaaggaaaatgaatgtgccgcagtcacacaaatcactcactactacactgccaccagagcccaacagagtagccacaattgttttcttcctaaaaggtgcaatggagtaatactgcacaatttccatttagatgtcccttcaacacgtttcctgggaatcttagagcagttaacacccatttagaaaggagctttttcatttcgtaaatatgttcagtgcaccaaaacaggcaaacaagataacccgaactcttaacttgcctcagcacctcaccccttaagatacatagaaacaaatcagaaattatgctcaataaggaatttgcaaggctgaggagggggagctggagtcaaatcagctgggtcttccgcccccttcagtaggagggggaagattactgcagagaatgtaacaaggagaataagagagagggagggagggggaagagagagagagagggaggggggtggagaaagagagagacagagaaggaaaggaagaaagaaaaagagagagaataactgttggtaacggacagcccaagaaaattgtagaaaagtccatctctggtacctacctggtgccaccttccccccacccccgcgttgtttatttatttatttattttttctagccaccaccattttgttgcctggcagaggtgtgagatgcaaggctgtttacaaagcccccagcaagagcaatcccatcatcaggaggtttgcttcccccccgggccagccctctcgctctccatgcccgtcttggctgcatgcgttgtacctaacacatttaacccgcgtttcttaagagttctgcaaaatggtgtctgctggtgtttgcaagggaagctcccgctgggcgtcccgagctgggtgggagctgagtgtgcggttccctaacgagctggcggccggcctgagcggctctgatctccaattctgacggcttgtccttcaggtgacctatattatctggcacctcagttgctgctcacaaagaaaaagtatcactggaagaaagaaaaaaaaaatcccaagtgattgtgtacatgctctttattgagaatattaaactcagacgccctctgctgggcaagacgggaaggggaggctgggagtaggggagggtggccgggagggctcaggagaagccggggacggcctccttcctgtgagatctgtgggcatgattcagggcaaagggcgcccatcagagctgctttaggcaaagggaaatacaaaacaaaagtgaaaccgctgacaaggaaatcatttaattggggagaaatgacaacttcttcacttggatttttttttttcctgttcctaaaattgttgcttttgataggtgagagggaatggggtgggggagactgctggacactgccaacttattcatcaagacaaagggtttgggtttcagggaagtcctagcaaagagtgtggctcagcgggtagaagggtagctgaaataccaggacatttttgagagtgaaacagagtgctatggatgatgatgcggacacagcaggtatagtccagagtgtcccaggcaaatctgactacctagtccagcactgcacagagagctttctaggatgatatgaatgttttgcatctgtcctgtcctatctatctatctatttatttatttatttttgagacagagcctttctctgttgcccaggctggagtgcagtggcacgatctcggctcacggcaacctccaactcttaagttcaagcgattctcgtaccccaacctcccgagtagctgggattacaggcacccgccaccatggctggctaatttttgtatttttagtagagacagggtttcgccgtgttggccaggatggtctcaaactcctgacctcaggtgatccacctgcctcagcctcccaaagtgccgggattacaggcgcgagccactgcgcccggactgtcctgtcctatatggtaaccaccacccacatgtggctactgggctcttgaaatgcagctacgcaactgtgaggggatgaattcttaacttcatttaatttttgttattctgaatttacatttaaatagtcacgtatgtctagtggctatcagacggtagagctctggtcttactattcacaggaacacaccgtgacccccattgacagcagctaagaccccaggaacaggcttgttgcgagaggccctccaaacaatttattgaatgaataaaaactcagtaatcaaaagtcacagagatagaaattcacaacacttcttggagacttataggagcttccagaaacacaacttctcccagggagagtcaagagagcagtgtcatttcctataaaatgtccaaggccaatcccaggtcccggtgtcagcccttgcgtgtggcactggcaccagcagccagaaaggttacttgtgacttgttttcagtgctttcctgggagtgtcctgaaagctggcagtgtttctgcctcgtcagaagaggcctcattcatttggggttgtaccagcaacttaaaaagtttttttttttcttccctcttccagtgttaatagattttgaaagaggcatttttgtttctaattacaaattcctgggtga

SEQ ID NO: 68990 - DNA, 1212 bp, Homo sapiens
tacacaaagcataaaacaaaatagtttgcactgaactggggagtcagccagcgagcatttaattgagtgcctactatatgccagctactttcataagtatgaaatggtcaatgtaaaaaatatttgcaaggactgtgtaaaattaagattgtgccggggaatgggattatcatggttgtttttccgttctctcctctaacgtttaaaaatacgttgtggtttcataataaagaaaaatacatgtctgaaacagcgtcataataaacgttgcagatgctgattttgtgctaacttgatgccaggcactgctctgagcagtgtgtgtctgtatctgatttacttccatgatgatggtattatcaccatagaacaacgccattattaccataatagcaccacgcccattttatagtgaagaaactgagacaggatgttctagctcagtgtcttagcttgaacaagctctcccacttagctcagtgggaatccatgttcttaaccaagacttccagcatatcacacaggggtctgcaatacagttatgcatgtggcagctcctatagtattttctcgacatttggcctttggagtggctccctcccattatactggggtgttctgtgtttttctgatttatcactcccctaaatctttactcataggcaatactcaatcaggcattgaataaatcaatcaattcccctctcataaaagaggccagggataatgttgttcactttcttttcttttagaagtgtctgtcagctccctgagattttcatagaatttttttttcctacatgccccaccactgccagtttcaacagacaaggctaactcagttcactagacaagcaaacacttcaactgagaaggcagtgataaacacaggaagttatttcaccctgggaatattccggaaaccaactttgaataattgcttcatgttcagttggacacaagttcactcccaggttgactcacgtatgtaaatgctcctgactaccatctgactgcatcacacacacacccctacctttccaaaatgctaactacacagcatgaatcagccgctcctgattcagagccccgagtccttcatcatcaacctgggctcctgcctttgtctcctaccctcatccagtccaacagcaaaccccacccgccccatcttctaaataaatccagaatctgatcactcctcaccatcct

SEQ ID NO: 68991 - DNA, 916 bp, Homo sapiens
tctcaataagtaaataaataaatcaaataaagtgaggattgaacaattgaagggtcactgataatcactgtaaggatttagcgccagggcttggcagtactcaggtgagtaaacgttagttattgctaatattattcatttatcttattattgttataattgagttagttctgtgttctgatccatgagtgaattggcctcctggaagctgccctcaaatccctcctcttttacacagtgattgatggtccatgtcgcctccttgtagttacagattaataataggccctcctcctggaaacaggccaaacgccaaaccccatgcaagctggcctggagaaagcacttctgaaacttcatcaccagcaggcagctagacgactgttgaatgggagggggggtggttttgaagggtggaatggtgacagaattagtcaccaagtaaacaagcaacaccttcgatcaatgcaatggaatgtaggtaacccaggggccctcctcactgctcagctgagggtgacgccaacatggccaggctggcacacccagcagaaccagccctctgcccccaacatcagtaaagaccttgcaggaggaaagaacaaccccgctttgcctgccccacagtcctgcagctccatgtgtgtgcccgcacagtgctaggaacacggcagctattatcaggagtgccaggtacagtgctacaggttgcctcctgtacaaggggacacagggaactgaaatccagtcctcactgaactgcccaagccctgattcctggtatgggactttgtgggtccaggggcaggggtgccttgatcaaaatcaccttggatgttttagggctgcttggtgattgatgttttgctttcggagtacttaattatgtttgcacaaacggatggtaatcctaaaa

SEQ ID NO: 68992 - DNA, 838 bp, Homo sapiens
atcacacagcctatccctccatccagtgacttctccccatgtcctgtgcttgaaatgaccctcaatagttccaccaaataggagttatttatgtggctatgcgcctaacactgaccacattgtcatttgctccttgtaaaactaaaaactttgagatgagtgctatctttgggtccatttcacagatagtggaactgaggcttacacatatccaaggccacacagtgaacagaaggcagagctgggatcaaacttgaccctgtctgacccctggcctctatatgacaccgtctaccacaaacagcaaaccctccagccatgcctaaaggatctgaaagcagttacctgctgagcccctgtgggagtatcttcagtcccctcgtgtcacccggagctgctcctgcacagggtcctgggtctccagtgcgtgctgcccagtgcctggctgtcggtggagcctggctccctgcactttgcttccttgtgcagagcctgctggctgaatacacagagcagggcaaacacaagcctgggtggagtcctcccttctccccggaccatcctgcagaaacaggttctcttcctgatgtggggctgccctcccaactccaataaaaactgagcacctgactcctctcgcattaatgcctccctggcaccccaagtattctacccagtgcccctcacctactgaggctgccgggttgacctggggaagcagtttccttccccagtaaccgtaggtcatggtcagagcagggaaaacacgttctgtgagattttgtagttctgtctgctgacttcagaacaccacctccaccaccacctaaccacctaa

SEQ ID NO: 68993 - DNA, 651 bp, Homo sapiens
tgctctctcagcctgaggtggggagtaaggctttctgaaagaagcatcttataaattgagagttgaataaaaaggtggcattggtcagatgaaagccagaggtctggcagggagaggaaagttgatttcaacacagccagccacatgtgcaaaggccgagcatccatagcgtttctaatggtacagtgctggaatatataagctctacattttgggttcttaagggattgtctcattcctgattgagcttcctgaattcagatccttgcttgggctctccctacctaaagacttggattttcatttgtgtttgcattcagatgttgactgaatcttggtcaatattgtcccagattgtttggtaccaggcctaaatgccacagtattactcagagcaattaacctttagtcgtcaacccaacatattcaccatacccctgttgaacaagagactgggcttttctccagctcatttctcctggcccaggctgcctactggcagacttgtaatgcagaattattttgcctgcagcaaatattatggaagctttcttggaggtctgaggttaaaccagtgcagagtttgctttttgcgtcttcttggcatcctcaatggggacatcatatgccccagcctttttctggtgaggc

SEQ ID NO: 68994 - DNA, 1663 bp, Homo sapiens
ttctagcagaactagttttccagggaaagcaatttggaaaacactcagttgagtggagcagcagcaatgggaatcaagaaatagatttcgtgagacgtgttcattctttacaaggcctaggccttttaatattgccagtgaagggtaggaatggatgaactttttcagaatgaattgattaattcattaatcattaatgaattaattcatttaattaattcattaatgaattgattaaatgtgtattcttaaaaatatagggaatttggttagggaaccacagctcttgcgttagatgtaaattgctgtgtaacaaattacaacaaacatggcagctttaaaacaatacacatttataatcccacagtttttgtgggtcaggactctgggtatgggttaactgggttttctgctcaagatctccaggctgaaatccaggtgtgggctggactgcactctgatccgagtttcagtgtcccttccagttcactggttgttggcgcaattcatttccttgcagcggtagaactgagaatcccttttctgctcaccgtcctccagggacagctttccacccctagggggcgcccacagttccttgccatgtggctttcctagaccattcacaatgtgacgtttactttctcttttttaatcttttttattattatttttaattgacgcaataatcgtatatatttataggttagagcttgatattttgatgaatgtatacaatatagaagatcaaatcaggataattagcatatccatcatctcaaatagttatcatttctctgtgctgggaacattcagagtccactcttccagtgatttgaaaatatacagtaaattgttaatgatagtcaccctatagtgctgcagaacactagaccttgttcctcctatctagctgtttacccaccttggttttccctcctgcccctactctacccaccattccctgcctctggtaaccattattgtcctctgcttttatgaggtcattttttttagcttccatatatgaatgaaagcatagagcattcatgctcatgaaagatgagatttatctttctgtgctagactcccaaagaaacaggatcagcacctgacaaccgctgagctttcttttgacctttggatagtagttgacagtttgttttccttctgcaggttcattgctaggatttccccataatgcatgtgttccagtggggaatgtggcacatcccaggcaaggtcactgaggatttttgagcaatcattttctccaggtcactgtggtcaccggggcatagaaggtgaaatgctccagtctgtaactggtctagattggtagtgatggaaaaacattcttattgtcagtgcccagccactgggcggtggggggggaatgccagctggcaggggcactgagaacaaaaccaaatggatagtacgatgaagcaaggatcaccaggtgcataaaaggagaaacaactaccatttatcgaaggccagtaatgtgccaagcattgtgccgagtgctctttttgcagatgagaaaactgagtcttggaggttttatagctcatccaacgtcacacagctaggacacggtaccagggtacaaatatagactaacacaaaactcaagttggaacacaatggttgcacatta

SEQ ID NO: 68995 - DNA, 1488 bp, Homo sapiens
aattacaggaaaatatatgcagaataaaatctgcaaacagtatcataaaactgatcatgaacatattcatatattgcaaaaatatcatacaagcttgaaatagtgaataccaaattcttgaattcagaatggctgttgtttctggataaggaggaacaaagatgggtttgctgaaaagaaggcagtgcaattcaactgcatctgggatgtgatttttatgaacgtgttggggcatgaatgaccaatgccaagatttgacaaagctggatggtggctgcttttttgtatgcttgaaatgtttcataattgtaaaaaaatcccattttattacttgttttgccttctctcctctttttgtcttcatctgtttcatagtttcaacagacttagcaccttatgtctaggtgtacgttttgaggggacagcaattttttgtgctacaaactttctgtaagaggtcttggacttagggattccagttctcagtgttagaccttgttttctgctgggttcagatgagaggtcatacagtgcaagctggggcccaagttgagttaattatttaataaggcttccacttagtctgtgtaaactccacgagctctcctgatggccaactcattcacactccttggcccacagagggttcagaagggccaggaggtgagacagttggtgagaacaaacggcatccttccctgctgtttatcagtgtttctgctgcttgctcaagtaatcaacagcataggtagggcttaaagaggaaatccggtgcctgcagaattatgactgacctattgaggaaaggttcagagaggctggggagtttgtgaccttccggttaaagtgtgacttcaaccaaggcagaccaggagggtgggtgaggcatccagttcatagatgagatcagtgtcaacgggtacaaatccagcagggtgactccatgcgtgtgtgtgtatatgtgaataacacaaagcatgtcatgaaatagatgcattaaatctgaagtatgtaatgttgtatataatgtcttaaaagttcccaattcagcacaccatgaaatgtctaaccatgacaattaaacaatgaaatggctcgacaggaagggcttttgcattccttacagaacttacattccaaaaaagccaggtggagacataaaacaatccttcctcatagatggtttgtgttgtgttggtttattttattttattctattttattttgataagaacatgtaatatgagatctaccctcttaacagacttgtaagtgtacagtagaatgttgttatctatggcacaatgttgtacatgggtctctaggacttacttatcttgcataactgaaattttatatttgttgattagcaactcccatttcctcctccttccaaaccctgttaacctacattttattcttcatttttatgagtttgactgtttagctagctcttataagtggaaacatgcagtgtttgtccttctg

SEQ ID NO: 68996 - DNA, 2134 bp, Homo sapiens
ggggcaatttctgtggtcagccaaagccgcatttgaatctcaaagcagaaaacccagtatctggaagaaaaacgaagggggctccatgggaaccgtgaccttgttctgttcacctgtgcctccccaatgcccactaagggatgctcaacaaataaatagatggatggatggctgaatgaatgatgcaacacattagcttctattattattaatgttcaagtatggaaacccatctcctgagggtgaatttgcaccatgtcaatttagctaaagtgggactacgtttcccggagtttgctttcttctctatcccctgctgggagttgcctgcaagagaaatgtgcacgtgacttagaagagggaagtgaggagccggcagtttgaagcatctgggggtcagcatggaaccaacatgttcgcagctgccgcaagctgtggcaggtcagcaggctcatcttcttggcgctgggcagtggctccgttcctggctcctgaagcccctgttgaccaactccttctggtcttcaaatcctggtccaggcagatgtgtaactgcatggtgaggaggctccaccgctcatgcaggtcacatgcgtggttgagatcagagaccacgagaaaagtcacagctgcagtgtatcacgaaggtttcatgctgttctttagccttcctacttcatgcccatcttctcgacagccggttctgctgacttcagctgacttcaggagcggctcccacagtcatacaaaacctaatctcataaaataccccttcaaactcactcatcctggtcctgcttccctgaccaaatcctgaggatgagactggatttaagtatttctcaaccttggagcttcttgggctttgctattgcaaatgttaagtaagaatattaattttaaaggcatgtttatcaaaataactgatcaactcagctattttaataccagcgattctcacctaaacatacggaattgttttcaaatgggtgaatatgtttctcttcaagttttatagatgtttggtaagaaagcaagtttttcttttttaaattgtttgcctaagagggatataaggaaatgtctgtgttcgattttgcaatatgtgtgcgaaatgactttgcagtgagtcgtggaggtgatgaagttcagctggcaatcattggcagaccccgccgcccccccgccacccccactacacacacacacacacacacacacacacacacacacacacacacagttcccctgcttgggagctgtgacctttaactgagttcctgagattaaagtttagtcctagtttgaggctagacctaaaagattttaatttttcagatatatgggggaaagagacctgaaagaaggagagagaggctgggctcagtggctcttgcctgtaatcccagcactttgggaggccaaggtggaaggattgcttgagcccaggggttcgagaccagcccggccaacatggtgaaaccctgtctctactaaaaacacaaaaattagccatgtgtggtggcacatgcctgtaatcccagctactcgggaggctgaggcaggagaatcacttgaactggggagggagaggttgtagggagccaagatgacaccactacactcaacctgggcgacagagcaagactctgtctctaaaataaaataaaataaaaggagagaagtggctgcttgagatcctgaccattggaacagggcggggaggcccctgggttttgtaacagctaaggcacaagctctgtgaccagccaaagctggatttgaatctcaatcatgctgtgtaaccagaagcaattgatgctgcatcttcaagtcttgatgtcctggtttagaatgtgggtgataatcatttctccatgtttgcaaaggtcaaataggactgtataccaaggactcggcacagcatctggtgcccagtgcagcagacaagggatgcctgactttgaccttgctaggtgacctgttaaataatttttctgtgcctcagtttcctcatctgtaaaatggggcctactaatagtatccacttgataacattttcatgaacatgaaatgaataaatggtgtggttaggatggcaaacactagattcaaatcctggctccaacactta

SEQ ID NO: 68997 - DNA, 2242 bp, Homo sapiens
ccttttctcctgacttttaatgcaaacttgaagaatgagccagagatgactcataaactcatgaacttcagtttctggtgaagaccatcatttaagacaaagtcagttccccagactgtgggtttccctatttagtgaacaaacatgtttactttaaaatgctaatcaaaaaagtccttgaacagacattgtcttccccaaaattactaaaatagttaccatgtttcaaattatttagaataggaaactaaattataataaaataattgaggatagaaatctaactgatttttcacctattaaaatttgggtcacaaattatacacacacatatacacacacacgcacctacacacacatgcatacacatctccaaaacacaagatagtaagcacgggaaaatttgccaaatgtcctagtggattgatcaacaaacagcccaggtaattctgcatttcttcttggtcgaagtcactttttcttcccaacttctcactcagactaggtacaactaaaatgtagataagtaagtcactttatctgtgttttatttaagcagtacggtggttaggtgcatgaatgctacagccagcatgcctggttcggattcctggttatgccactgttattggtagcttaatgtggagttggtaagacggggatgtggaaatagcagtgtcaattcgtaacttgcttaggaggattaaatgaatgtatagaacattgcctggccctgtgtacaaattcaagactttgagctcagttagtctggagagctagcagattcttaacctttgaatccccagctaaaaaccctgtcctgacgaacgttcatgcacattttgacggcctttcagagatgctcaggccttctctgcctcccttactccccaggctaaggtcctctactctagaaaacacctaaaggaacctggggatgtgagttacatatgaaaaccactttagtcctcctaaggacaccatacatattttctgagccatggcaaaatcaataggtaaacaggtattgttagagggaactaggcctggttcctttttcaatggggtttgaaagttgtattttgtttattaggaaggaaagaagtggacctttccagtgggtgattcatcatctggttccttcaggggaagagagggagtgactagagaggattgatgtccagcctggggcctgctttgctcaacagggacctcatgaaggcaggcttcttcctcctgacatttccagcactcctcacgggcactctggagagggatctctgaatcatcgctgtgtctagacacatcaaagggcaagctgcctgtttctcaggctcaccaaacccagtcaggagcactaacgtggcaggtctccctctgaatcactcagaccagagggagggcgctgagaggtgagcaggttcacccggctgtattcgctcttgggcgagggcaacattcctccctggggaatgcaaagtcatgttgcctcttgccaaagccagtcaggtaaggagacactgttgattttgtctctgcttcctggtgccagagcagaccaagcagggctttgaagatgttgattagacgtaagccttgacgaggaatgtgactgtcattcaacagtgtaggcactcagtaaatacccggggcatgaattcaagggaacgctaccttgcaaaatgggccactcacttcagacaagtaattgaaagaaacatttaaaaattccaagagcaggaaagataaaataattgctttgggttgctcttcggaagcctaatgcaacatacagttaagttttagacttcctgactattcttcacaaatttcttttcttcaaactcatgttgttcttatatctgaatgttctactgcatactctaatagatttgatttcaaccacatcccacacaaaatcatatttacacacacacacacacatacatatacacatatgtatatgtatgcagttgattatggacatagttttctgctttgcagatactttattaaacatctattatatgtgatattgatatttccttttcacatgttagaaatattttgttttccggtctcaaccattttttttttttgaaacggagtcttgctctgtcacccaggctggagtgcagtggcacgatctcggctcactgcagcctctgtctcccgggttgaagcgattctcctgcctcagtctcccaagtagctagtattacaggtgcccgcttggctaatt

SEQ ID NO: 68998 - DNA, 3680 bp, Homo sapiens
tgggtaggttaagaaaactagcaagggaggatgagacacccaagactaaccaccgtgcgaagtcataaggaaagcttagcctgaagggccaagaagatgaaataatttttgcagatgctaagtgaaactgaggcagtgaaggaggggcctttgggaggagctgtagcctagaggaaggaagccagtgccagacacgtggccagagaggccatagaggcagggctctgatctctctcacttctcagcctctgatatccagctggtgcctgcttccattggctgagcccaaatgtaggcactggcaaaggagctggagcccagtgatgcccatgtggaaggcagcctctcggggctagaggagggcagagacggatctagttgggaggacaaacagatggatgggctgatgtgatcccagacacgctcctccaactagggcattctttctcaagagcctcgattccaggcagagccacatggcgtctcagagtcagtgaatccacccgcagtcagcaaaggagcgcctttggctttgttttgcttctgcatggcttgtcttttattcttctgctcagcacttctccttctcctcattttcctctctcctgcttttctcttctttgtcttctgtcttcttctttgtcttctgctcagtatctctctgattcttgaagcctttctcagcctaataagggccctaaacttccactggaatcatggagagctcttttctgtccttttttattttttagtgaataagagtcagattcaggtaggacaggtttaattttgaaacttgaaaaattgctcaggacttcctcttcaggatatgagcattggtcttaaatatcaaaagaaaacaagatttttggtagggttcttttagataaatgcttactacttacaacatataggaagaggaaaaaaaaaacaaaaaagtgataaacattataaatagtgtatttcttcacttcctttaaccatcatttgcatatttgtgcccagtgtccaatactaagtgttgctttcaccactcaagtgactcttgggacctgtcctgagagctgtggtttcaggctggatgcaatgaagtctttccaattgttatacaattgactgtgagctacttaaatctgccacttattaagaatgactggttatgaatcatcccagttcccaaatatgatgatgaatttgtgattactctgcaacagttttcaaaacaagatctcatacctttcatcaggaagagggaaaatggtttcattttcaacacaggaatttgtttccctggttgagacataaaacatgtgtcttaatggttctgcaatgtgctgggatttactctgaaaggatagtgattcacgaagagatggagtcgggtttcacatcctttgaagtctagggttgcccaattgcagtcatggagcaacatgcagctgagaataagagccaactgttcctgagtttgtctttaacggttaaacatgcctcatgtggtgtgtcaaaagcttataaattcataattggggcaaggctgctgtgggtttagttgccaataatgtgttgatgttgggttcagagtgcccaattaggatggaacataaagcaatgcatggcaacgaatgaatatgagatcactcatgtttcagtggaattttctttgaagatccacaaaactggagaaatggctgcccggataacgctgacatcaccatgtggccatattcagagggctgaagaagtcctgacaaactaaagtggggtgcttctgaagttccctaaataggattggataaagtgtagggatagagagatggtcacatgcaggattccttcccacctccttcctgtcatatcagaatacttgttactgtggctgaagtgacatttccatccagaagccaggatctggtttagctgtgcttgtcttccttcccggagctgagtcatgaatggcagtttgggatcctccaaagtgaaaggtgtcttttgttcagccactcgaggctgctctctcactgtgctcagttacagtttaactggcatttccttgtcagtactctgtgctgttgtgtaaagcagattcaagctattctatttgcttcttcttatttgtccactcacacagtcactatttatgatgatccttctatgatgaaggcactatttgagatgcctgaaaacacaaaagtgagcaagataaacgaggtcctttttctattctattcttgttgaggagctagataagtaggcaaatggacaaactaataaaataattttagacagtgctatgggatatgaaggggctaagaagggatgatggtgtaacataatttgtgagagttgcgcgatggccacattagatgaggtggttctctctgaatatgtgaattttatcctgagatctaaagaataagaaagagtcagcaatggaatgatctagaggaagagtgttctgggtaaaggactcacaattggaagagtcctcaggcagggaagagtgttctgggtaaaggactcacaattggaagaagtcctcaggcagggaagagcttggtttattaaagaaacaacaagaacatcaacagaatctgtgtggctctgctccatgagaaagagggtgggggataggggactatgtcagaaagcaatgggagctggttatgcgggccatggtgagaagttgggatcttgttcaatcataatccacccaactgtgttttcactccctatacttccactcttccctccctatactttctctcttccctccttatccatctccttatccatggtttatcactaaaatcactcccttgaaaatatcctgtcctttggtatgagttatctattgctgtgtaacaaattaaacaaaaaatttagcagtttaaaataagaagaatttgttatctcacacagcatttgtagatcaagaaaccaggctggcttagttgggtgattctgcctgtaggtatctcatgagtatagttatctaaagatcatactggggctgggggggttcacttccaggttgactcactcacatgcctggagagttagccctggtttttggcagggagccttagttccttgtcatgtgggtctttccataggacttgttgagtgtcctcatggtatggtggctgactttgcccagagacagtgagccaagaaaagggaaggtgaaagtcactatgtcttttaggatctagttttgaaagtcatatatcattgtcttcataatatctaagtagtcctaaaggctatccatactcagtgtgggagaggagaaaatcacacaagggcatgaataccagaagacaaggaccatggcaggtcatctcggaggcttgctaacacaccctatcaccctcctttgttcaaatcttgcaaaacctcagccctgagaaatctaaagcatggcgctaacatctaacccattgaaaagcataccaacatgctgagtgaactcattttaagttcatgaccacagacatcaaatgaaaccttagtgctgtctgactatccttctacatgcctctaggcaatttattcttttcctagggtgactttcccatatcttcatctcttttatacctggtctcattcttggccaaagtaaaatagaagctatcagaagaacaattctacatacttccaccaacaaattaccaacc

SEQ ID NO: 68999 - DNA, 666 bp, Homo sapiens
ctactagaaatttgaacggtttccatcaatgtattcaaatgaattgctttagtggtgggcagaggaaagatcctgttttttcctcccctaacacgcacatcccattaatcaacagattccttgttatttaataataaataaaaatacattaacttgttgaggcaaacatgtttcccaaagccattattaaaactgaattaccaacaacatggtttgaacagtaatatcatgaccacaagtcatttttctcagttgactttctgactggtgatacaaaatccatgggaactgtctgaattgcgaggcaaatattttagtaatgagtcgatccccaaaacaatttcaacactggaatggaaatttatacattccttaagctttgcttcaaagacaggtaaaattccttctgaattgggtaaatggaatgcattctataaactgtacccttttgttacaatgaacccaattgctcccgtcgttcataatctggcccagcaagccaattctttgttccattgctaatccatagtgcagattttaatctccaacaattagtaacccattcctacatatcttggaaagttcatgactgtcagggtaggcaatttttacgttgtgtatataggtctccaaagagacaatacatgtttgtggaatgaatacatg

SEQ ID NO: 69000 - DNA, 1690 bp, Homo sapiens
caacgggatcattagaaacccaaaccttagcaccatgcagtatatccatgtaataaaccggcacacataccccccgaatttaaattaaaaaaaaattacattaaaagataggagtacctcctttacaccacctgaattatcatggcacataaatctcacaccctatttgccaaggccattcgttcctagctgttttacaggtaggttagctttctcaatgcaagtctgtgggacggatggagaaaaattccccgagccctttgatcctgccccagctgggccccgccgcgctgagccttgggcgcgccccctgctgcccgcggccggagccgttcgccacacccccgtgtttatgtcggtccacgggggttgcctgtccctttaattggcatgtaccaagtccttccaggtcacatttcctccctacgtcccagccgtttggactcactggccaaaagtccaagaggacggaatgtggagacagtgttgtatttttgcggggagttctaggccgaccgggagcgagagaacgctcgggggcgaagcgcgccattgcggccctccccgccgcctgcggtagtccagtcccaagatggcggccaccatgaagaaggcggtgagtggggagctcggggctctggatgctcgggcggcgccggatctcggccgctggggcccgggcgcgggatgctgggggtgcgcagctccgaagcccggcgtgggacccgaggccgaggccgaggccctgagagcggtcccgcggcaaggcctgctcgcgcctggcgccctgagcgttttcctaggcacctggccagccgaggcggggcgccggggctggggccgggagcctcgaaggacgcaggtccgcctcccgcgatgccgagggtgcccccggggagtctgaggaacctgcagccccggcctcgcccctgaggtgtgggaagccgaaggtcccgttgagtgtggttggccttgactcgggcgttgcaccggcatgatcgcattagcctcactggttatgggtagctgctgctgggagcgtggttacgggtgaggaaactgaggcccagagatggggagtcacctgcccgaggttacgcagctcataacggggacagcaggttcctgcatccccagattagcaggccccagagaccctgtgtccaacctggagctgcccatttccacgcttgatgcccctgagtccttcaggctaaaaccagtatttattgagaatggaagatgtgccgggcccagcagccggccgtttatctgttatcctccccgcaactcagcaagtgcaatgggttcctctccactttgcaggtagagaaacttagacacagagcagttagaggccctaaagtgactcagctagtaagaagcagagctggagttcaaactcaggtttgtttttgtttttctcaaagcacgcctgtgtaaccactaagccggctaaacttccatgtggggtttttaatcccgtgagccttcccagatgtgtaaagatagtcagatagaagaaaaagaaaattggagagggggaaggagataacggctgataatttggggagctttacagtgtgctaggtacagctgtaagttgttttgcgtgtattgtttattttatgttctttgagggagatactgtttttatccttatttaacaatgagaaaacaggcgcggagg

SEQ ID NO: 69001 - DNA, 470 bp, Homo sapiens
ttctaaagcctttgcttatttttgtgaatagtaacttccctgggctagctgaagactggggaacagcacgcggtgcatctgaagggaaaggaagaaatgtcagcttcagccagtagttgcgacagagggaagttttgatctggatttgtcactaacttcttttttttttttaagcaggaatcttgatttgcatgtgcaatcactctttttagactgggccactatttgttttttaaagcagtgcaggctacacaacagataattgcacaacagatctggccctgagactgccaggttgcaaagtcaggtgcataatatgatacgtcatgtgcaggcttttcacaggaagtggtagtagaagtcttctgagcagctatgctttgctgctgactgtaatgtttcattatctctcacatccattaatttctttccatctccacaactactgtgatccttgtccaagccttgtg

SEQ ID NO: 69002 - DNA, 526 bp, Homo sapiens
gattctatcagagccaatacatatgaagatacattatttatgaattattttcagtgtttaaaaggggattaaggcaagtggctctttttggttgagaactgggttcatttcagggagcctggaatatgatacttttcttggaatgcatttgccaggctgaaggatcagggcagagaattgcagtctgatgaaaatgctgcaagcaaatatcctgcttagaaatgtttttgatgagtcatttccaaaaactcaaatacactgactagtgactaagagtctaattaacccagacgccactaaaaataggaaagatccattgcacttacgcgaggttttctgttaaatcaacaaccctgtgaggtaggcagaagcaatttaaagtctagagaatactaatactaataatgagggctattaattattaagcatggacactgtgcaaaataatggcagtagaacaagaggaggaggaacttagggtatggagtgcacgcctagccctgtcacctactagctgcatgagtct

SEQ ID NO: 69003 - DNA, 1051 bp, Homo sapiens
caatccaatgtatagcttacatgtatttgattgatgtctcatgtctccctaaaatgtataaaactaggctgagccctgaccaccttgaggacatgttctcagggtctcctgagggctgtatcacaagccatggtcactcatatttggctcagaataaatctcttcaaatattttgcagagttgaactcttttcatttacaaagttcaacttgtgattgaaacagctatctggctcaattgaatagcacagatttcctcatgttagagattaccaaccaaccttctttcagcctttgagcaagcattttacttgcttctcaggaaaggatgacagatcattttgtaaacaagccagaaggagtctgattctctagcccccagattaagactccatttattattaattttcataagaataaacaagttgtaatgttttgagtacatcacaggtaaataaaaccaaaccatattacaaaataaatcagtggaaagatgactttgtatttcacagcaattagctggatgattggtttttgttttgccttgagttttacactggaaaatcaaatttgaaaattatgttgagaataatgtgaagcatttgctacttttattaccaattgctttttgaaagctgtacttatacataaaattatttgagtttcaatgttacgaacaaaattcttgacatggaaagtttcatccaaaattctaagctgaggaagagattcattagttgatgattaccttatgatttgggtctgtcgtaatgagaaagcgtcatcaaaaaaatatttgttgagcaattgtttttcaagacctttggtgtttacaaagcgtaaaagatgcatatgcttatgaaagatggttcattggagatcaattgaggtactcatatattcaaagcctctgtgttttgaaaattctaattgccagcaccaaattaaagtcattgacgtttttaaaaatgttcctacgttttattattgcagtgttctgcacattaagttataaatatttatatacctaagtggaattatgtctcacggtg

SEQ ID NO: 69004 - DNA, 452 bp, Homo sapiens
tggaataagaacaagataagtgtgcaggcttcaatgggagatggttgaatgagatttggagaggggtcagtaaaaatttggattttattcggagagcaacgggaagcctttggaaggtttaaacacgagagtggtatgattcattataagagtatttgttttacaataaacaatgctcatctcctctgttatctcatttaaccatcaccacaaacatgaactctaagctttagtatcaggaatgcaactggagctcagagaggatatttgctctatccaaggtcatttgggtaaaagggaaaattgaggattttgcaggatggccagcaagcattggctgcctctcaactggagctctctttgtttaataattgatggaagggaaaagaaacctttctaaaattgctgctaaaagacacaatgtagcagagtgatttttttttcaatactct

SEQ ID NO: 69005 - DNA, 699 bp, Homo sapiens
tgttacgcgctgtactctcatgggtatttccaatctaatgatattgtgatctgcctttcttccacatcaatttatttatcatacttggcgcaaagcctagcattagctccaaactctactccaaggggcaaatccctttttctctggcaaaggttttttaagaaagccaagaggggagatggaaaaggctataatttcctatttgtaagttgatttattttttagccaaaatatactttaaaattcagagttctcattttttaatcaacaggtctttcttatctgtaccaatatttcttcatctgcttacattacgacttgacttctccatatcctctccagcagtcctcagagtaaagacatttaatttcgttaatggtttgccaatccttgtttgcagcataagtgcaaatatttatctacgatttttcctcttatcttcccagtccagtggcaccctcccctccccctcatttgtgtcccttgtgccttaggaaagcccacaacttctggggttttgtcactaagtgttgcttcaacactagatacacttggttttccagccaggaggtaacttgtgccacatctgcacatgtatagtcaagcactaagccacaaatttgtgcttctacttgctctcttatgtgaaatccttctcatttctgaaagccacttttactgacctggatagacactatt

SEQ ID NO: 69006 - DNA, 681 bp, Homo sapiens
ggaagaacatccaggcagaaggaagggaacctgtgaagccctgagatgcaacaggtcttgatccttctgagaaactggaacaactttaatgtatctgtgtagcaaatggcaggaggtgagaccagacgggtaggctcaaagccagtcactaaggttaatgattgtggattttaacctaagagcaaagaagagccacctaacagttctggaaaagtccctttaattgctttgtagaaaaggagccactaattcataaccaccagataacatataagaaggcactgccacctgtagaattctgtgcacctactacaagagatgacagcaatggtgagacagtgtcatttttcctcttcaggacccatgacaatgactatttctttaataaattccctgggctggaccggagaaattgctgactctgaaaccctgttcagccaagagtacagctcgatgtaatggggactgaaagtcactgttgattgctccatatccttagtaaacaagacacaggtctttcaagacagcagattactggatgtcaaaatatgcccttttattatactttcgtttttgttcacaataacttcaaaagtgtatcccccactactaatggcagaagttcaatcactgcacctgccccacccaccatagagcttgtcctccttgggaggcattgat

SEQ ID NO: 69007 - DNA, 1129 bp, Homo sapiens
tttcagccactgacacttgagagattcactgttcatttctatcctcttaactccccttttgaatgtcctagagttcacagaatcttgttgttaattcacattttctttcaaacttcagaactcttatttctcacatgtagactaagctgcagccaaaaagttcatcactcctcactagagaaaggaatcaaagttcacatcagaaaaatgtgacaatcatgctggctgtgtggtcacctttttaaatcaacttcctggctctcctaaaaataagtgttatgcaaatgcatagcaaatatatatacacacatatatatgcatatacatgcatagtgtacatatacctacatatgcatacacacacacacacacacacacatacacacatggcaacttggtcactgtggccatttctagggagatcaatgtgatttgagggaagaaacggggacatagaggtgaagatattttagcattttactctaaaccctaattctttgttttatagcaaatattcctaagtttgaaagccatttttaagaaagtgcaataattcatggtcatcactggtataaagaataaggatttgttgagaggagtttgattgaatatgcttcatatattgtgataggaaaaccatcttcaggaaaacaggaaatccatgtcctctggttgtcaaagagcttcttacccagaagtggctgctgctggtgctgctagggtccttcaccgggcctgagcaccaagcctcaggggctgttaatgattcacagatgctcctttctccagataatctctctctgccaactgagagcttcctgcctttccaggaggttgcactttcaccccattccccgaagaggctgagccgtttaggggagaagccagtggccaatgccctgctgacatgggggtttgagtgcccagtccctggcctccagtaaaccaaccctgtggagccttttatgccccagagcttccccatgaggttagcctgaggctcaagtcctgctggaaccacatccttgcttagattctcctgctcctttgtgcttccccttcatctgtcctgggagcaatccctcaataaatcactttcacagtaacccttgtttcaggctctgcttcc

SEQ ID NO: 69008 - DNA, 948 bp, Homo sapiens
tctacaagcctttgcaatgtccagaggtgacgtttccaagccagccaatcagcatctgtgagctctccgcagcatccctggacaaaccacagaggcatgggtaccccctccaccatgtgacataatccttgacactgaacagttggtgcacaaagtgatctgaatgcctggcccttctctgagccaccaccacccctctcctaagatctgttaccattttttttttcattcctgtgccagctaggccttaattataataatgtggcaatgagtcagcccttgtgggctgccaaagaggagagcatagagaaggctaaactatgaaataggtggctttccctgttcctccccgggctgtccattaacctcctatcaatcacctgctctttatttgaagttcaaggttcaaaagtgaaattagatactgtttcccaagaaagcaacaatgcattttgtattccaaaatattcagcctagttctattggttataaaattaactctaaattttaataagtgacctcttaagctaaatttgcaatgtcacatgggtaagtctctttctatgagaaagagggattgggatggaggatggatgttaaaataaccagggtttgttccatttctttccaagaaatacacctgtaagtggcattcaaaaataataagaggtccctaaaaagatatacttctcatatatcaatggcaatctgctactatctctttcgaacactgcattcttgccaatattaacacacttgcaagcctcttgcataattccctaaaaatgtactattacctctgggcaacataccagaatgtagtgacagtcaagcagatgtatcaggctcaacacctaacttaaaacacatgtacgtgtataatttcattctgagatttcgccttcttccaagtaagcatcagattttttttgtaacctgatgatagat

SEQ ID NO: 69009 - DNA, 2038 bp, Homo sapiens
ataattttttttcagatttcacccatttctgcagggagaaaagctcataagccacggccctacgcccacctttgtgcccgcagaataaggaaacccgccaactacacaccacagttagaaagcccaagaccctgaaaagacctgcacccacccccaaaggggcggggctggtgggcggagaggaggcggggcgcgctccttcagccccgcccaccagccctggactccggctcccgaggagcggagctagcgggtgagccaaggggatgtgcacaggcctcctcagtcccgcccagcgcgcgcgcgcggcggcgaagccggcgggcggggccggggagggccctcgccgggtcagctccgcccaccctccccggcctccgcccgcctcccgggtcagcggcgcgggtgctgcgcctagctgcgcaccatggccgggttgctggcgttgctgggtccggcaggcagggtgggcgcccgggtccggcctcgcgccacctggctcctgggcgccaccgccccctgcgccccgccgcccctggccctggccctgctcccgcccaggctagacgcccggctgctccgcacggcgcgcggggactgccgcggccaccaggtaagcaccccaccccgaccctgatcccgggcggtgtccaggtccccagacgtccgcagggccgcgccggggtccggccgcctccgccaaggacgcctttgcacttgtagctgcccgggaccgagctcttccagggtccccgaaaccccaaatccctgcaagccaaggaagcgatcctcctagttgacagccagagaaactgaggctcgggaaggtgtggcgctctgcccaaggtcgcgcagtcttcggccgagccccgggtctgcagagcctcagccaggctggggcgcagccgactgacttggtctgaacttccacacgttgcctgcggagttgttgtccaggccttctggctgggtctcgctgtgttttgaacacctcccgacgctcgctgctcctcccttttcttctgagtggaagagcaggcgtcctcagggaagccgcgggcaagaaacccacagtgctgtttgttatgtttcatttccgtcactttccattggtgctaagtgaaaactggttttccttcagagcagtcataccagctttcctttcaagaaatctatcactttcttccaagtgagtctttttaaataaaaatagtagtaaatgaagtctggcggtccaggaatggcaagcccagacacgcggagccggcgtccagcccggagcgcatccggcctggcagtctggagcctctttgtttgcctgggtgcagacagggcccctccattcatcgcccggtgacctcagaccgagtcctgaaggcttttgagcttgttttctgacctttagagggccaaaaatagcaccttcccagcaagagtttgggagacaactccatgagctggtgcaggcctcagcggagtgccgccggcccagcgaacatctcctgaccgtttcctagcttttcagtaaggagcggatggggattggacccaggctttcatcatgcctcctgcccagatcaacttccttccttgccttctccagtccgacaggtggcacacaggtcttggggatcctctccagagtggcaccttctgcacacaccgtgccgcctcctgatgattcttcagggcccagcccagctgttccttcctccgggaagccctctctaacgacctgtgaggtctcggatgcctccactgggcctgcttccaccccatggctgtgggtcttctctgcactcatctggaatggcctcttgtcctgcctgtcagccacattgaccttgtccccagctcaggccctggcactggagcggtgtgtgtgtatacagtggcaaagagttggcctcagactccctggattcctctctctactcacttgttgttgactttgatcaaattcccttctctctatctcaggcccctcatctgtaaaatgggacgttaataattcagacttcatagaatatgaatgtaa

SEQ ID NO: 69010 - DNA, 1745 bp, Homo sapiens
ctccaacacagcagagaccttctgtgcttttcttacccaggtgatctcggaggacaaaatccaatctgaagcccacccacccctcccgcgcatgtcaacaccactcaacaaaccccttgtacctctagctgtaataagtaacaagcagtatcctacagggcgcctcggtgcccaggagcggatgcaaaggcgctgggcgggcacaaggcagcgccaaggacactcagggacggaggaaccgacaggggacttgacgctccgccactccgaccagccgccccttgtccccgccgtcctcgtccgccactgagatatcccccacggtctacccacccgtcggctcccacctgcgacccaaggacccaagtcttccaagagctcagccgttagaattcaaaggttcttctttttaaataggagttaaaccctctagctagaaagccgattggcctgcgctcgagcgaggctgccttgtgattggttgacaacaaacccgacgccttgagtcgcgtttaagggcgcacaccgcgcgcaggcgcacttgctccctaagaacccggaagtggtggagccaacggccagccagacctgtggcagtcccagccccagggtgctctccgcggtcggccatttatcggtgaagcaacagccccttgacgtcaagcttgacgcattggagataaagtccaaggaggtgaactaacctttgaacgtgccagtaagtaagatggcgagaaaagcaagagagagtgggaccgatcgatagcgcagcggtcggcttggcgccctttcagcgtgcgcagtgaacgtgcgctcggagcggtagattgggcaggattcgcgcctccatttttccaggagagagcgggataccaagagaaccggaccagctggtactgggacacggggagagtagctggtgcggtcggctggggcatttagagaaaaccacagaaacgactggggcgagactggaagagtcgagagttagcaaggtggcatgcgcctctactttgcgtttcctaagttgcccggcttggcctgcaccccttcctcttctcgaagggcctcgcttccattcccacccagtccttagttcgcctctgcatccagatggtcgcggcgcatatagtgagggggcatctgtgttctagcctttccaactgcgatgtatccggtcctggatcgggttcttgtcctcgtgtgctcacctgcaaattggggataattaggcttctgtttacctggcgagtgaacgttctgtgggagttgagaagttaggggtgggccacttaaaatatatatatatatacacacacacacacatatacatatatatacacacacatatgtgtgtgtgtgtgtgtgtatgtacacccgggatgtgctcagcagaagtgaagagaccggatagaacagtggtgtaggggaaccaaaaatggcttccctccatccttccaggtaccttattaggactaagagttaaattcacataagacgaattaacagattactgcagggtaaacaggatgtgcatgtaaagcattgagctagcatacggaaattattcgagtcatattaacccaacgttaacagtagaatctctcatcaacttttctttgccagactacccacttgtgattttcattctttattggtacttaagaatctcccatttttttcgggtaactgaacattgtccatgggagaaaaacgatatttaattacgtacaggagtcccacaa

SEQ ID NO: 69011 - DNA, 871 bp, Homo sapiens
ttaagagagagaatacaggtgcggggctcagcatagccctcagtgcagagccagtacccagaagatgttattcattaggtaccatgagcaaagaccaggagatgagcatggggttccgagcagggtgaatgcacaactgacagggtgggtagagtggagactgtgtcctttaaggcagcctgtttgactgcttttatcctggctgtcataaggcaagttttagggagcaggaaggaagaaatgctgaccgctatcagaaatttggcctagtggcctctcatcagggaaatgagcttggtctgttcggttggagttgttccacagagttcaaaggacaagaatgctgtgtgttcatacactgagctcttcgaagtaggaacttcgccctataaagcagaagagtggtgtttttttcttcttcttcttcttttgtggtttcacatagcaaatgagtgacagtctctacttacagacaaagtgagacgtcaggcattgagacgtgagtgtggcttgtatttctggtcctcccctgcttcactgctttcattttactcttatcgtgctttccagaaagtttgcctgctgggagagtctttttgatcgtttcccatgtgttgtcagatagctccatagaattcagtttctgagaaccagccagaagcatgcagtgacattgcacaatctgcctctgaagctggagatactagctgcagagctcaggggagctgctccacatcaccgacatgaagggaacaggcatcatggactgtgcgcccaaggtgagtgatgtggggctgtttgaatgggctctggcggggagcaagctgtgatgattaagggtgttgaccagctttagttgtgactttctaat

SEQ ID NO: 69012 - DNA, 1150 bp, Homo sapiens
cataggcatccttaatcgcagaaacaggagggcggcccttttcctcaaggcgctctcagtccagggatgtgcccgctccgcagccacacaagctggcgtgggatagggtcaaagagcggtggatgcgcacgggccgcccacgccctcgctgccctcccggagcgtgggcgagtgattccgattgtgcagcagaaacccagggtctcacgggaacgaggaaacccgcccacgcccagcctccaagcgacgctctccatgacaaccggcacttggtaacggcctcgccctgccccgctacgccgcgcctagcgtgccgccccgccccgccccgctacgccacgaccagcgtgctgcgtcacggcggtgcgccggaagtggctgcggatttcgccggaaatcccggaagtgacagctttgggggtttgctgctggctctgactcccgtcctgcgatgggttgcgacgggggaacaatccccaagaggcatgaactggtgaaggggccgaagaaggttgagaaggtcagtgatgtgggccggctcttggcgaccgggggtggtgggaatttgacgaccccagaaaacgagaggaagtaagaagggggagccagcggagttccagacctggctgcggtcttttattccattcagaggactcaaaattaacaacagtattaagagtggacattcaatgggtgctgactattgccattcactggacagtaatcttaacagggggtatctcatgtaattatcacaatagccctatagctacatactgttgtcctcattttcagacatggaagttgaggctcaaaaggagaaatttgcaaagctagtaaatggcagagccaggatttgaaccctacctgcgactagtagcaataatacaaatacctagtgtatactgagttttgtatacactaacttcatttgctcagagaagccttcccaaactgttcccttaccacatccttttataaactgtcttagcctgcacacggctgtacgtggttgatttgtatcaagtcttccccgctagacggtaagttcctgatagcagaggctgtaccctttttttctctgcaactagcatggttcctggcacactaaatatttcgaataaacaaatgagtgaataatccctgatct

SEQ ID NO: 69013 - DNA, 528 bp, Homo sapiens
ctaggtttccccgatgttttgctattaaaaacacacatggtacacgtttttctagatcgggcagggtttgcccatctccacttcaagcagcacaaccaccatctgccagtgttggggtttactctacagtcagcaaacactgttggcacatccagtcagagaaactgaaaacagaaagcagaaatggcttacactggactaattttagaatttctaagtacatttaagtgatgactcatcccacttaaattcaaagctgtttgttgtgccatctggctcatcagaacatgaaagacttctcctgcaacctggaaaaaggccagagaggaagacgaatggaggagtcaaccccatgggaatgctgactgagtgttagctccccgtggacaggaatgtcactgcatgaataggctgcagtatgtctgggcctgtttttttttcataaaatgttccccccctgtttttttcttattccaaagcaatgcaacaaaaagcacaagaaatcaaaaaggaaaaaatagatattgg

SEQ ID NO: 69014 - DNA, 2488 bp, Homo sapiens
caggtgtctgccactgagcctggctaatttttgtattttttgtagagacggggtttcaccatattggccaggctggtcttgaactcttgacctcaggtgatccacctgcctcagcctcccaaagtgctgggattacaggcgtgagccacaacgacggcctatttttatttttatttatttattttttagatggaatcttgctctgtcgcccaggctggagcgcggtggcgcaatctcggctcactgcaacttgcaccttctggttcaagtgattctcctgcctcaggctcctgcgtagctgggattacaggcgccactaccacacccggctaattttgtgtatttttagtagagacagggtttcaccatgttggccaggctggtctcgaactcctgacctcaagtgatctacctgcctcagcctcccaaagtgctgggattacaggtgcgagccactgaattctgccctatttaaatgaagagaagacagatcctcgaccacaaagagaaagtggttcgcttctgttgcttactgtggggttggcgctgtggaacgtcccagcctcctctgaattcatctggaaaacgggtttaaaaattcttacttccctgcctcctgcctcctccctagaacggacgtcagttgggatgaatcagagcctcggtattttggctcagccgttgttttggcaataagaatgattaaacagatagtttatttattttactctcatcttctgtacccacatctctggaagagctgtgttcataggtgtggagacaagtaaagagctttctgacgagtcagaagctggtcatgggaaggaaatgagggcatctcctaggtaaaggaatttttattttctcactggatttcttctcactttaaactggttcttttgtgttcttacttggctgggaatgtctggaagtcagcactccagctgctgaactccagaactcagaaaagatgcacataaatagactttggttgcagcatgaaatattgggttagacatcaagagggactttctagtcaatgagattgtgtaggcagaggaagaaatggaggaaaatcataaaactttctactctgtgggaaaggtagttttctgggaggcactccagcgcctttgggtgagaccttgtgccacgttcccggaggcctgggtggcagcaatgaaaggaggaagtgaatgcagccctgatggcaggctactgaggacaacgcagcactgctctcccattttacagctgcagaaaccgaggcaagatcctgcaacaaatatttacagaaggtgtctgcatgccagccttattctgagttctgaggacaccgcagtgagggaggcagagtactagcaaacaaggtcatgaatatggaatgtgatattgtgcaatgatggggctggacaaggaagtgagcggtagggagggatggaagctgctgttgaaagaatggtcagggaaggcctctttggggcagggtcatgtgagatgaaatgactcacccagggtcatttagaccccagatacaattgagtctgcttccctggctcctagtcaggggttcctccagggtgtttttgggcctaagtaacagaaaacccaactcaaaaaggcttacgccaagaaaaaaaagtttgtctaaaaaaatccaagggtagaacttgtttcaggaatgtcttgatccaggatctcaaatcacattgccaagccctgccctctcttatgtctctgcctcttccacaagggttctaactcccaggctccctgtgggagcaggaaggtgacagtgtttccaggcccacggctcccaggttcaagctggcaagaaagagctgctccatcctcatccatttgaacaaaaatgctgggcctgactccctcagccaggtttgggtaacagacccgctttctgaaccaatgggaatagctagggggattttctgcatggactgggcaggctgtgtcccaggcccatcctggagccctgggctgtgggaagggagggagcatccccaggtgaagttttgacccttgttagcaaaggaggaaggatgattcaggccggccccaacctagccatgaaagtgctgcctggccccctctctgtactgtgtccacatccatcatttcccccaggctttattgagcacctgctgtgtgcgtccatctctgtttcccagagcttagacttcaaggtataggaattgttttgttttcatttttttttataatcctccaagatcttccagtctacttgaagaaacaaaagccacatcctgttttttatcctgtctttttgtggcttgctcatggcatgaattttctagctgtcaacaaagggaggggcgcttttgggctggaggagtcaagaggccttcaggaaaaaggagggcttttgatacattttctttctttccttcctttctttccttccttcctttctttcttttctttcttctttcttctttctttctttttt

SEQ ID NO: 69015 - DNA, 1249 bp, Homo sapiens
acccctttgcaatgtgactttgcagttcctccattgaatggaggagtcaattttcacatccctgggctggccttgtgacatgtttggcctgcaggatgtggaagacgggacaccctgccagctataagcctgtctcaggagtccttacaagcttccactaactcttttagagccctccaggatctccaagtggacaggctcatgctgacctgttgaatgatgagagaccacatggagcaagatgagccatcccagctgagcccatcctaggctacctggctctagctgaccttgaatgagatcagccaagatcaaaataactatccagctaattccagcctgagttactaacttcagaatcatgagcaaactagctggattttagggatggtttattatgcaccagtagctgataaagtcccttgagccagccaaatagagatgggaaaaggcaatcaagtagttggacgtacaagtatagggttcagatttgagatttaggtaggagaaacaaatgtgtgtatctcctggatagaaggaataagtttgtgaaggagacagaaaaggagtggctggagaagtggcagagaaactaggagaagccacagaaggaagaagttgtggacagtgtcagctcctgctgaaggtttaactggattttaaagcaagggacagcatgagcacagtgagtggaggcatggctggagatggcccagagatccctcacctgttagggtgaagccaaagcctgaccctgaaaagttctcgatcgtctatttacaatttgcttagttttttgggaagaattgatttttgattgcacaagtgaggtgattgcaaaaacagccacagattcttcccatccctgtttgtgtgccctttgcaatgactttgcaggaactttcaagaggtatccaccccatgtatctggctggaacacatgacttgctttggccaatgggacaataacagccatgacttaagtagaggcttgaagagtgtatgcatgaagcttccttctgtgttctcaggatccctgctatggccccagcgtgaagaagccaagactagcctgctgggtaatgagagatagatggcccagtgattcctgcttcctagccaatagccagcaagccccagaagcagagccacctaggtaaatggcagatgactgcagacacttggaggagcccacccaagatcagcaaaagaactgcccagttgagcctggcccaaaatgctgaccctc

SEQ ID NO: 69016 - DNA, 569 bp, Homo sapiens
acacatgcagaggccttcgaagtccttgcaggtttgggctctactcttgtgccccagtgatctgccatgaggagaatacgcccaggataagctgctgccccttcagcctgggccccagaacaaacacatgtgcggctgcatgagcccaacctgtgtcctataaccaaggccagcggaccctgagcctgaagcagagacctccagcagggccccgcttagatcacctgcatcatgatcaaccgctgtcactgttccaagaaaccgagcttagtaacggtgtgttatgcaacattgtcaatagctgacttgcacaatagtgaacatgcaagaggtccacacactcctgttccccaagaccctaaagtcacgtgggggaaagtgatagaactctactctggggatccaagagcacagaaaatctaggtcaagcattcatagaatacaggagctggcaaactccccacatctccctgagacacagaggagcaggtacagaagaaatgtctgcctgggtgcctggaagcctcacagggtttcatcggctcagaacgccccagtatccaatgaaa

SEQ ID NO: 69017 - DNA, 1116 bp, Homo sapiens
gggcggggggggcggggggcggggcggttcacgatgttggccagacttgtcttgaactcctgaccccaggtgatcagcccgcctcggcctcccaaagtgctgggattacaggcgtgagccaccgcgcctggccagttgcggatttataaaagcagtcgcttagtaacttgcagcggctacatcaactttggaccaattcgcaaactgctggtgtaaagcgtttttgcgcatgtgctgtcgccttgcgggaaaaggagcctttttcttcgacgatttccgggcgacgcaggaagtggctccagggcgcacgcgcgttgtttccgcggtagtcagggcagtttctaccgcaggcttaaggaggcttcgggctcctgggatttctgtccgcgctcctggccctcgtccttcgcgccagagcaggttcgcaaactcctcagacccttctgctcccggccgccgctttccgccggggcgagacccccaggtaggccccgtgccgcgcgcgtcccgtcgttaaccgccgccatggctcccgcagaggccgagttgcctcccgggagcgcgcttctgcgggatgctggggcgcgagcgggactgttgactaagcttcgttactgggccctggaagcgaggtcagagctggaaatggccttaggggtcacctagggcctaatccatcgtttctcttgtgggggaactgagcctctgggaagggtcacattgcgttaatgcagtgtgtgtcgcctctgtccctcccccttacacgtctggcgtctcgtcagatacatgtcagctcctgggagaagctttccctggccgctttgcagaagggcgtccccttttagcctcttccacgtcaacctgctccatttctttcgtagcagttaccagtctctgaaactaagtctgtttctgtcttagcccgccaagtatttattgtatacgtatataggtgccaccgtacaggcagtacttctccaggcaagtagtattaaacaccagccgccctgggccaggcattgtactgtgggacccagtatgcattaagggaagaatccaggcaagtggctgccctcttggagccagcattctgggggggaagagattttgagtgta

SEQ ID NO: 69018 - DNA, 1480 bp, Homo sapiens
aggaagattgcctaatcccaagagttcgagaccagcctctacacaaaatataaaattatcccggcatcgtagtacgcaccggtaatcccagttacttgggaggctgaggtaggaggatggcttggagcccgagaggtcgaggctgcaatgagctatgatcgctacactccagcgacagggagagaccttgtctcaaaaaaaaaaaaaaaaaaagtgtgtgtttgggtgaatgactgattgtcaggcagaagctggtgacccgtggagacatggggccgccggagggggggagggattggtgatccagatacccaagggggcccgggggcggggggcgaaggagtgcgactggacccgcacctgggcaaccgcgtctccagcctccacggccctgtcccgcccccttccgggcaggcagaggccccggggctgccctgccgcctgggcccggcccccgcggcagcagccgagcggccgcacccctttgtggggctgtcgtgccgggaggggcgcgggcgaggcgggcccgggcggcgctgggacttgtaggccgggagcccgggcgcctccgggctgaagcccgtggccacgccaccgacgcggctccagcctgcccaggcaacgcgacggctggggacagccttggaaaaactgaaggggaaaccgaggcctggtgaagggatccagctggcgcaaaagcacgcggccgcgcagtggccgcctcccccggcctctagggggcaagtgaaggtcacacttaaatgaaagttttcaaagtcgcttcgaagggcctccggctgggccagagctttcccccaccccaccttgttccatcgtggatacactcaacaaacatatcccagagccctctccttgccaggccctccagcttgggcaaaacatcccaggtccctgttctcgcagcgcccaaatagcaggggaggggctccaggcaggcgaacacacagggccggggaggtgggaaactccgcgaaggaaggagaggaaaccacgcgggatgaagggcaacgggggccgcaagcgggggcaggagcgccaggaacgaggaacgaagggggaagggaggaaaggacgcccaggcttccggaagactcgggggtcccatccccactgtgcagagggctagagcgggagctgggggagggagaggtcagaggtcaaggctgccgcgtggagcgtgggccgtggagtgggggagggggcgggcagactcctccccgccggcagccagggcagagggctggaggaaacgcggagaactcctcggtgctggaggaaacgaggggaactcctcgccggccttgcggtcccccacagcccacggagtgccactcccagtccccacagaccccacctgcgtcgccctgtgctgagaggaggccgcagggctggggccgggagtgaccccaattagagctgctgtttcccagctgcataggtcccaaccgcgggggctgga

SEQ ID NO: 69019 - DNA, 1587 bp, Homo sapiens
ggaatatgatctgtgctccgctgcagcctcgcgcccagagtaaatatcggtcggatgaactaatcttacatataaaacagaaatcatttcccttttttaatatggcacgtggctcttccctaagtcgccctgggttaaataccgactcaattaacaagatgctaaaaaccgtttacgtttttttacgttttttacgtttaattcaccagacggtgcgctccacgagggaaggggcctggcctccctagttcagggttgtgcttagtgcctgcaaccggccgggcccgcgggggcagccaggagagaaaggcgcgcccagcgcccccaggcccggatccgccctcagcccgcgtgcgctcccctcccccctccccccaatcgccgcgcgcccgggtgcggctgggcggggttagaactacgcttcccggcggtccccgcgcgcccggggcggggcggggccggctgggggcggggctgagctggcgggggcggcaggctacaaagcccgggggcggtgccggggcgcagagtccccgcagcgccggtcgggagcgcagcgcggcgcacgtcggcgcgcacggcgggacgggcgccggagtggtcgggcctggcggctggacgggcgcccctcgctgccccgcgcgctccccgccgccccccatgagcgcagccccgcgcggcccgggtccgtaggcggcggggcgccccccatgctgctgcagcccgcgccgtgcgccccgagcgcgggcttcccgcggcccctggccgcccccggcgccatgcacggctcgcagaaggacaccacgttcaccaagatcttcgtgggcggcctgccgtaccacactaccgacgcctcgctcaggaagtacttcgagggcttcggcgacatcgaggaggccgtggtcatcaccgaccgccagacgggcaagtcccgcggctacggcttcgtaagtggcccccgcgcccgggcccgcaccccgccgcacaccttatcgcggcccgggcgccgagtccactccggggcacacgcccagacggcccgctgccgcccccgccccaggcgcctccagccggcgcccgcacctgccgcctctcccgggcgcgctcctgccggtcccgcccccaccaccccaggccccggcccccacccccacccccacccccacccccacccccggtttaaaaggaagagccgctgtgttcaattaggactcctaagttggtggggaggttttggagccagagggcactcgggatttcctggagcagcggggggtgaggagcaatggctccaccccggggtgttaggagctcttcggcctcccccatatttttaacagccctctcagccgccccaaataaacatcagcttaagtaaaaacgtcttgaagacactttcctgcttaccttccaagcatagcgtcgcaaactccttctcagaggaaagtctcggccctcactggtgggcaagtccaggcggccccccaagctcccttcggggttcatttttgccctatccccgcaggggattatttttgtccttgaaggccacatttcccaggccttgaactttgacgggaggagctg

SEQ ID NO: 69020 - DNA, 1512 bp, Homo sapiens
tgcaacctccacctcccgggttcaagtgattcttgtgcctcagtctcccaagtagctgggattacaggcacccaccagcacagcagctaatttctttttttttcttttttttttttttgtatttttagtagaggcaagatttctccatgttggcgaggctagtctcaaactcctgacctcaagtgatccacccgcctcggcctccccaaagtgctgggattataggcgtgagccactgcgcctggcccaggctcaggtttttcaaagcctgaaattatgtcaattttggacacaatctttaagaaaaagagatacagttacatgtacagaattagggccagggcctttcccctaagctaaaacttggacagcctcagggtgaaccccatgtgagctaacactgaaagaaagactggcgctgatgacaggaaccttcttccaggcagggggaacagccgcggaaaagcttcgaggtggcaaagagccgggagagttctgtgtgactgcagcttggcaggggatccaggagaggctggaggcccaacaggccggaccaggaagtgccaggtatgacataatgtggccttggtctctcaggagtccagagggcaagcctggcgagatgacccttgggttccagcaggactgagccctctgccagccaacgttttcctattcattccagtggccccagccctccctgtcggctgccaggaatgtgtcactcctgcttcggggtccctgctgccccctgccccactcagaaagatcccttggggctggttggggaggcagcctccccctcctcctctccctgagctctgctcagaataaaagctcccggggtcctggctgaggatgctgtgccctcgcccatccgtggccactgccagccatttgcatcacaaatgaggcacagtcgtgccgttgggcaccagcctggtgctaccctcggtgactcaaggacacaggccaggatccagctgctgaacgtgctgccttgccccacccccagccgcctaaactgtgtcgctggggaaggatgccccggtccccagcctgcctgggatcctcctggcctgggcagctctccccaccagccaggagagcaaccatcgtcggggtgataaacccaacgctgggcaaggagcgctctgcatgtcaggtgggaactcagcacttggcagacattctctctgttagctttcacggcagcctgctttacagaggaggaaactgaggctcagagagggtgagtgacgtacccatggccgctcagctactcagctatactcagtagaactggggcttgaactcatgtcattctactctagaaactgtgctgtgagcaccggctgtcccttccaaggccatccgtgcttaccctgggcatgcaatagctgtgctctggatgaataaaagtgaccaatagctgcgcactaggtgaatataagtgaccaagagctgtgcattggatgaatataagtgaccaatagctgtgtgctggatgaa

SEQ ID NO: 69021 - DNA, 896 bp, Homo sapiens
acttgtggagcgctcacactacgcgaggtgccggacacgcattagctctttgatcctttccactgctctgtgagttgtggtttatgaacctcccattttacaataagcaggggacacaacagaggccagccctccctccacagccgctcaggggctcagagctgaggcacctcagcgccacctggagcttgggttcccctccctccaagctgtttcttagcaacatgaggcaaccttgtctgcgaaagaggaggtgaccgcagctcctggggatgtgccaactctgggatgtgacgggaagacaaagggcttctgtccccttctgcctggcggtaagagagccggccgcccggcaggcatgccccagcctgtggttctggaatgcgggcaagccaccgtccccagagacctgtgttggtggccaggccagcccacacacccgattggcacatactcttgtgcttgcccaggagcggagtcagaccattcacgctgccttcatgggagttgaacagttgaactgatgcccttaaacccagtgtttccctctgggaagacgcccgggggcctcgtggttgtaggtgctggaaggatagctccagctccaggcacctgccacataaaggtagttgtgaaatttcggacatgctcttggcacagggcagaggttggggatctcttgcctgtgcggagaggacaaggggacaaggggacgtgcctgaggctggtgtgggtgttgatgtgacctctgctcttggggtccagtctccccaactctggctggcctggatgagtgtgccagaaatgggactctggccatcgcagtccactgggtgccctgtgtggtaggcacagtgtccaggggaatagctgtttgtctccaatgattgttctct

SEQ ID NO: 69022 - DNA, 468 bp, Homo sapiens
accccctagcagaaggtgttgcccaggcactggcaggaggtggggccaggccgcacactgggcactagttgctatttgccttcctctccatggccccgcctggtgtgggcagaggtggcatggggccaggcgggtggtggggagggcacctggctgtcctctcttctctccctgagctcctggtggtgctggccagcaactagtttgcccagaattgagggctttcctgggaagcctgactttcagttctaaaactgggaaggtcccgggcaaagctgggtgagttggtcaccatggcagcagaaaacctgagcgggatgggggtggggcagtagaagggacagcagggagtcagggccaggatcagccacccgggacaatgtgctgcccctccagcaccagacagaaccgagggaggatccctgtccccctcccacatcactgattctgggagccttagtttccatt

SEQ ID NO: 69023 - DNA, 1883 bp, Homo sapiens
catctcttggccggttgagtggctgccctgggcctggtatggtgccccacccagatcaaagctcaggatgtggtcgtggagtggaagaataaatgaatattgacctgtggaggtcccaatgggctggagaaagagcccagtgtcttaaatctctttcctcctctgagcctcgatttcctcatctgtcagcaggcatgagaggagcatctgagtccttggtctctgtgaggcatgaatgaggggacagagatgaagtctgttcagtgcacttggccagcagcaggactcggggcctggcagctcccctgatggcaccctgggggcactcctccccactgtttcctccctgaggcctgaggaccccatgggcggtgggtgctgctccacgctccacacagaccaggaagccaagcttggggccacccccactgccttctcccgggcaccactgcccacggctggcctctcctcaggccacaggtctggcctggctgcccgaactctcagcctggaggcagctgaagcgtcacatgcccttggccagccgtctccgggggggcgggttcccctcgggagacttcagcacattgtcaaagctgtcaaacaatttccctgccaggtttttgcaggaatccaaggcctcgctcccaatgccaaacaccctcttaagacgatatctccggggcctgcaggcctgctcagcggcgctgcctctcctcggccttatatagtcaaaagccggggaatccctgtcccaccctgggctgggatctgatggaagctgccacagccttggcctgaccccgggatctcccgcctccaaatcggccatctctggccaaggggccgggtgagaggcctggcatgcgcacaggcctgcgcggggctctgggtgtcccatcagctggcagctggagcggccaggccagcacaggctcttaccaaataaggcctgggcagctgggcttggccaggctcagacggcggcagctgggccagcagtagcaggcctgcctgtctcctcctcccgcactgccctgcctgcccagcaaagactctgcagactgtggtcccctcgactcaagggagagctccaccctaagaagcctgggtagacggtcccggatcccctgccagacgcgctgccatgaggaacctctggcaaatttccattgggaaccttgagggaaggcaaggtggagaaacattcctaggactcccgctgctgcaacgggagccccgagccaggccaagaaatgacctgtccctcccccaggaccccgctcccactcctgcatcccccagggtgttccgatttggatgttgcttgtcccaccagtcagccccttcctggtgcctggtctttggggccaaagggcaaggctggccaagcggtttgggaagcgggcccgggctcaggagcacactgagggcccttgggcagtgacctgccctccaactgtggctatgatgaggaaggcgcatgcgtgctggttgaggagggaagacccccatgaccatgagccagtgtgggcagaggaatgggcagggggaggggcagggggcaggtcctcccttaggagccactacggggcatgaggctcctgtgtctgctcgccttggttccagccagcagctttggctcttggagcctcagttttgctatccttaaaatgggtgtgatacaaacgctatctcagggtggcagcgggagttcaaggggacaagatgcacacctctcagggccctgcagggagttcctggaagattgacagcagggcgagggagggatctctcctttcctcggagatgggggaggcaagggctctctttctgtccctgacaccccctcctcagctcctcctgccctccctgctgtctca

SEQ ID NO: 69024 - DNA, 610 bp, Homo sapiens
ggcggggcctgaccactccagcctggtcactccagcctggccttagactctgaggtgagtggtgccaggacctgccggtcagcctggattcatcatagcctctgttgtccagtaggcttggcaagaagggtctgtggaagtttataaaagtgacaccccccagcccccaacctggggagcagccaggagccctatgtcagaatgtgcggcccctaatgaaagtgctcttccagccactctatttaagccaggtgagtttgttctcagggactggaggccggcaaggtaatgcagctgtttttagcgttttagcaggaggcaggtgctggccaggacgcctgtgacgctgtgggtgacgatggccatgacccggacacatacaggttgggcaacctgggcagagctggtgtgcctggaggtggggcggggggggtgcctggaagactggtgtggcctggatgtcctgagagcgccagaacctctccttggggctccctgggtggctaccacctttgactcttgccctaggggcacacactgccacctttccagaaagttctctgggatctacagaaactgaccacccatccaggtgcttgaacgtgtcaac

SEQ ID NO: 69025 - DNA, 850 bp, Homo sapiens
gcccccgtttccatctcaaccagggtcacagtgggaggctgtcattgaggctaaggtcaaggcaggtgaaggtgctttgtcaactgggaagaatggatgggtttgcaaagttcgccctttgttctagaaaggaaaaaacgtgtgaagcttccagatgggaactttctgtccctgcatgttccatgcagaggctccatggggatgaagttcaatatttcttgtggaaagtcacttctcatctctcgctgtgattctttcagaactgaggcttcctgggtgccttgcactgcagccagccacgttccagggagcggcagctcctcgaaccagaagttctgagattgaatcctgggactgtaacctggtaactgcactagacaaatctggttcaacttttatgtaacaaagttgtgagttgttttcagttgccatgaacccccaggttgaaggtcacataacctgggcatgcccagacacaccaagcatgcagccagggacggaacctaagtgctcgagccaggatgcggggactgaattaagaagtggacactgcatggcaggatccaggatccaatcagattgagccctggcgtcaccccatggcaggatctaatcagatcacacctcctggcatcacctgatgggaacagccaatcagatcacacctcattatcctatgcttataaaacctgacctagcccccagccgggagacagatttgagtgtttcctcctgtctccttgccactcacagtaaacctttctcgctgcaaaaacgcagtgccttggtgtttggctttctgctgcatgtgggcaatagacccagttcggttcagtgactgacctagttg

SEQ ID NO: 69026 - DNA, 771 bp, Homo sapiens
aaataatatctggaaaatatcttgccattttcaaaaggtaggctgtcaaactttatcatataaaatgacttcagtttcatcacgcccatccagccttttcagtgactgatctcaaacaatagaggctgttaacatgcatcagccaggtcttaggtttgtttaaaagccatcctttatatagtaaaactgttgtcaaacaatgttgtaatttaaacaccccctccctgcaaaacagagatgttacactgtgcaagaggtgtacattccggaattatttcctgctggatctcaaaactattttaagcaaaagcatgtcactcaccaagcattcacgaactcagagccaactggtgtcctcactcccaggttttgcaaaggtcccttctcttccttgccaaggaaaaaatgttctcgttctgtatcgcggaattaataaaatcgccaagactttgctataactttccgtgcttcctactctcgaatagtgaacctgtctcaatatcggaaaagacagaagcgactgccctcttgcgggcactattgtcactgcatctattttggtatcaaaagcactaactgcacttgaggaccaggtgtttcaccttcttgccaggtgtgggtgagagtcacgcacgtaactgagtaggtattgatcatctcatctgaattttgttctacatctcaacaggtgttgcacacacgaaacactgcaactatttataaaagtgtgcttataggagctttcgtcttgagacggagtcccactctatt

SEQ ID NO: 69027 - DNA, 799 bp, Homo sapiens
aaaaaacgatttttttttaacatagagatggggtcttgctgtgttgtccaggctagtcttgaactcctggactcaaacgatcttcccacctcagcctatcaaaatgttggcattacaggcatgagccaccacactcggcccaatccttacttctgatgctgttactggccaagtgggatcaactgctcagtgaggttgattagactgtatagaagttagtgtccaaaagcccagggaccccactgccttccaattcatgagcacttgactctggtacttaaagagagagctccaaaggcctgggagctgaggccagcccctgcaacagacagccatgtcctcaccctgctggccctgccatgtcagctcccgataggcagcgagggatttggaaagaggcctcttgcatcattgcttccttgtgccaagccagggaaagaaaacttgtataacctaggccggcttttggcagaaaattggaaggtggaaagccatggaaatgaaagttaaagaattacggaccttaccttatacgagaacgtgcaggtgcccctgaaccctgcttcccaggttcctgtttgaaacaccaccaacttattgagaagatgagtcctccctatctgtgttggcttgtgattctgttatcccatagcagatttttcatctgcgtcacaattttgctttttaaatattgaaaacaccaaaatgtacatttctttccccgttaccattgatctttctaggttgcttcttcaaagcaatgtaggctagttttgggaaggacacttgtcaactggca

SEQ ID NO: 69028 - DNA, 1013 bp, Homo sapiens
gttcccacatcttcaaaataaaagactgaacgatataatcttttttaaaaattgagatgaaattcacacaacaaaaaattaaccattttcaggtgcaaatttagtggcatttactacattgacaatgttgtgtaatgcccctctgtctagatccaaaacatttctcccagaggagatcccccaacccattgagctggagtgacgtcatcttttaaggacctttttaattatatgattctatggcatcagaataggcacttgactcattcagctctgtaaagacaccctccagactgcaaagacattgagataatcccacaaacatgaaacttctaaatatttgtccctaacaaacacaattgaggtggggtggatgacctgaatcgccctggtggatgactttgtggctgatcgttacagggctgactggtgttttcctgctgtcagaagcttcatgatggggccagtcgggtgcccagtgagtagtatccctggcaacagagacccaggcagatttgcgtaaatacctttcgtcccaggacatgggatttacactgtgtgtttctcgtcaccttcaggaaaaccactgtccctttttttctttgccagataagagtcaggctttcctacaaattcagattcctgaaccaaggggcatttttgtggtcatcccttcggtgttcccgtcactgccgttggtggctggggtgaagtgaggaggttgtggctgtgtgtgtgagagccttagcttgggaaaatggtgtctttgccgtctctggttctcaactcttcagcacaacttggttgtgctgtgtggattttcaacatgttccagctgtgaaattccttataccacaaacatccaatatggaagccggaaatgtacaacaggtcaaatcagagatgccatgggtgaggagggcttagagcccgtctcctacagcctttctctctcctctgtgaggggtgagtggaatccccctaaatcccttagagcccagttgggaaaacac

SEQ ID NO: 69029 - DNA, 2051 bp, Homo sapiens
gaactggcaatagtagctgctcattcactgttgaaggaatgaatatgattcctttctcgaccctcgtctatacccagctgggttgagaccctcagtttcctcatctataaaatgggaaagataacaaaggtacctacatcggagaaaatcatggaatgcatcccatttctggcatgcagagaaagcccagtattatgaagattattatgcccggtgctagagacatagcaagcatttaataaacgtttgagctgaggcttcctagagaatatgagattgcagcaaattggatgcaaaacttctctttacctttttaaatccgtctaattatctcgtatcaggatatagctggtgtggtcacaaagcagggaaaaagcaatcgatatccctgagtaactgcaaaacatggagtggccccaggaaggtgcagggaggaagtcccttttagtttgaaactattttagtgtccgatctttctttctccttctttccccaattttgtatctgggctcaactttttatacatttttcaaaagaagagcagccttggacctaagaaaatctgagcctaaggagctccccaaaagctaggaggtctctatggcatccgtcccagaaacaactaacgcaactcacaggcagcgtgagccacctccatgccccacccactgagcacacactgcaaagtccactcggcgggttaactgggggtcctcagggatcccaccagcagggtggctgtttggctgcttcttcgggtccctgttgaaaccaacagacagtagttagttttgaggcttacttacaaataagctgacagtcagatgaggaagacccatgcttccggccagccccttgaaattgttgtcaatgagtccccactggggcagggagtctctaaggacaggaaaaatgggggcccgagggcatcatctgccaagacctaaggcaactgtacccatacttttgcctgtgtgtcctcaaaacccctctactttatcatgattcttcttccagagaactctgtcctttgaggcaagtctgtaaaccaatgtttgctttttaacattttgacaagggacagttgcgggggaatcattaccgtccttccacgctgtaaatgcaggtaatgaaaggatcggatgaaggtcgttggtgactcactgctctgacgttttacttgaactagctgtttctctcccagaagactcagaacataagcacctggaatggatgggtcgcatttaggactccaaatgagttctgctttccctttttgttttcaatctatgtgctctttcaggtactcaaacctgttaccgttttatcagcaaaatgggactttctaccaatttggtgggatgagtctcgccgggagtgatgtgtgtgtcacggaattgtggtcatgcatcgggatggctaattcactgatgtcagatgctaacgaagtggcctcggctactgagcatcacgtcactgttgggtttagacacaacacgatcttatgtatggatgacagcaccactaataacaaatgccagtgacctaaacggggaataacttcaaatgaaacaaaaagcacctcatatcatatttatcctgaaagacacaactggctgaataaaatctgaatacaggaaacatagcaatgggttgataattttggtggaacttgatgatgtgtgacccacgcccaacacagtgtgacccaagcccccaggagggttctctaagtgagtttggtcggaggctgccattcacagtgacttgtatttgccacagcagctctttctaagcccagtcctgggattatctcagggatcatcccacaccccagcggggagatgggccaagtccccacctgacctcatcttaggtagagaggcttccatggaagtgtgggctggctgtggggggttgagacctagccccgttcttttgacatttcaccctgtgttctccaaactccagcaagcagcttccatagctcattaaatttgactgaaggtctgatggcttgcaaagcaaattctttacaactgttataaagg

SEQ ID NO: 69030 - DNA, 1211 bp, Homo sapiens
tggctacacaatctctgcctcagtttccctatctgtacatgggttgttcatagcctccacctcagagggtagtaatgatgccaagctcttagaacagtgctcagcatgtgtgcatcctgtgcctactctatgccaagcactacagagagaaaaatgaacaaaatagggagaaatccctgccctcatggagtttacatcggggcagggggcgggggcggcacagagcagacaatcaatacagtgattagcccccagttaggttaggcatttccaatctttgccaataagccacatatttgcccaagttagggtgcatccttcccatgaactttgactgtgacctttgactatggggtgacatcttatagctgtggtgttttgccaaccagcagctcttggtacacaaaatgtgctgctagcaggtgccccggccaaccttgtccttgacccacctgcctgttaagaaaagggtgttgtgttttgcaacagcagtaaaatgggtcaaggtttagtcagttggaagttgtgtcaaaactcactatggttggttgagggctcgaagtctcccagcattcattaacaactatctgttcaatgattatctccctggggcgtgttgcagtgagttggcccaaagcataactgaccctggccgtgatccagagacctgccccctgacgtcagtggcgagcctccctgggtgcagctgaggggcagggctattcttttccacagtatttaaagctgggaggttctgccaccaagcacggccttcccactgggaacacaaacttgctggcgggaagagcccggaaagaaacctgtggatctcccttcgagatcatccaaagagaagaaaggtaagtagagctttgcatttacattttgaaaaattacaaagatgaactcatttttttcctgagagcaataactatttggcaatgcacagccctggcaaaaggccgtcgaatgtgtttgaaggtgtctgttgttgtttttgttcaggacgcttgcgttttctatttcaggtgacctcacattcgtgccccttagcagcactctgcagaaatgcctcctcagctgcaaaacggcctgaacctctcggccaaagttgtccagggaagcctggacagcctaccccaggcagtgagggagtttctcgagaataacgctgagctgtgtcagcctgatcacatccacatctgtgacgg

SEQ ID NO: 69031 - DNA, 767 bp, Homo sapiens
ggttgagccgacagacttggagatggatggggtgttgggggtgaggggaagaaaaaccaaagatgacccctagatgtttggcttctgccagcaagtggatctcagcaccatcctgagtggggaacaccagggaagctggctgggcagggccgaggggtccatgtgaaaatgagggggtggcatgcattcaaggggggctgcccccttgacaattctgctttgcccccctccccaaccctgcattttcccgaggcaagtctctttctgggaacctgactccctctgagaacaggcctggctgagcagcctggggaggagtggttggggcagtagccagggccactgggtggtgtgggggaggggtggtgcacacgctgcaaagtccagtcctgtggcctgtgaagcgagcaacaactgtggtactcggggaacctctgttcctggaaggaatgatcaggcagaggctagctcaccccacaccctggctgtgatgtcctgactccgaaacatctaaagctcagcggggcaaaaaaagatagctgcatttcaccgttgcatttcaaagctttcagacaatggttgccacccaaagatggaagcccccaaggcaggccaccctgctgcgcaaaaagggctttggctgggacaccagtgggctccctgtgaatgttcacaatggagaacagagttatgctaacaccagcaactgatttaaaaagtaggtgattattttaaaatagcattttaaaatattttcatcatttgat

SEQ ID NO: 69032 - DNA, 767 bp, Homo sapiens
tgggcacacagcaggttcctcacaggccccactcctgctgtgtgccatggccacccccactgcccaccctctgctctgggctgtgttctgaccagggcctggctcgccaggcgagaggaggtatccagggcagaggtaccacgtctgggggagtggccctctgtgagcccctggcctgctgggctcctggcctgcaagtagccccctcccccaggaatgcctccagatttaaacacacccatgtgctgagaaaaataccagtccccctgcccccagtgagcgccatccagcactggggattttgctgtcccggcagtgggggtgtcccctgtgtgtccccttcaacaaccacctccctctcaggtggctttgcaaggccttgtttttccggaccaaagtcctgagcagaggggaagagcttagatggggtggggctgctcccagctaacccatagccagagtctctgagagctggaagtttccagcaagagatccagcccgagctggctccgttaatcattctccgtggattcgggacttggcctggatggagttttcaggccacaggacggcctgggttgagcacgaggatggcacaaacattccaatgggggtgttctggtgacctgcccagggaaggggcaggggcagcggtggggagagcgaatgcccaccctgtggctggacgtagccaagggaggccctgctgtgatgctagaggagtggtcccctgggcttgcccacacctccttccccatgttccttcc

SEQ ID NO: 69033 - DNA, 653 bp, Homo sapiens
agtagtggtaccacgcatggctgttgtgaggctcacgagatattccaagtatagagtttagaacggagcgtgacagagcaaaatctcaatgaatggcagctggtggtggtgttgtttttattgttattattactagcagctaagtagacatcccgatttcttccaaagtgtcccctcaacagtggagctggagttaccttttctccctggtcttcctggtgggggctaagtcttgccctttctcctgccccaggcattttggtttctgaattcctggaactttgcaccgcagcatcggggctctcatgatcccctgagccacttagcctgccagcctgtgagtcacctctgtctactggggaaaaccaagcggcccagaaaaaaaaattccagactcccatgggcgtccccagctgcctgctgccgggatgagcagcgccaccgccacccccatccctgccagacagctgggcaggctgccaggtccgcggctcacacccaggatggcagcagacagctccactgggctgggctctgcgtgtgtgtgcgtgtgtgtgtgcgcgcgcgtgtgtgtgcacgcgtgcgccgcgttctttcccctctgctggcctgggttgtttcgctctgggctgcgcattcatttttagattccg

SEQ ID NO: 69034 - DNA, 916 bp, Homo sapiens
ctgtacaatacaggaccctgacctccccccacccagatgccagtagcagtccccactatttgggacgactgaaatgtctccggacattggcaaatgcctcctgggggcaaaatcactgtggtagagaaacactaccttagaagaaccagacactcaaaggccaggcggtcacatgaagaagccaggaggcccagggagtgttggggactgtgggagacgaggaggacacctcgagtttctcaccccccagggcagccaccactctgcctgctgccaccttgccaggatgcggtcccggggctgtctgatcccaccccacccaaattctattttcgaaagaagccggagactgcgggttaatgtgattgtttgtttctgattttgaaaactgagctggcacacacacacacaaacacacacgcacacacatctgaggaccagctttggccctcagcccaggggaccttgccccactacaagtgcccaactccggactctgaccccaggcttctggcatcaggccttcctctctcagggagccaggcccgtcggggcatgggacaggcaaatctctttcttcttcttggggcatttccagggatctcccaagagctccgaggcctggtgaccctagagcatggagagctggagaaatgttggaaaaccctgtcccgggaagctcgggctgcatccaggaatgtggccgtgagctgggcctccccactggccccaggagggctgtcagtgtcctgtagaccttgggggagtcttcacaccaagtccttagctccttacacagaatctgtctcatggcttattgggtcaacccagtccctagtaagctaaaatccaaccagagcctaagggccaaattgcattaaaaatgtgagcaaagccctttctccaggctccatct

SEQ ID NO: 69035 - DNA, 1381 bp, Homo sapiens
gtcatacagactctttatctccaggtctctacgcatttcttaactgcagtaaaaactggcaacgctgttcagatattttccttacatagttcacactggacacatttttcccccagactatgtctactgaagaagtccaaaacctttagaaaaatcaattttgaactttttttaactttaagagttttagaattcttacattcctaccttccgaacttgaaagagcttcctgtcaccacacagttcacagaatcgggggagtagcaggcgttcaacggtactcttactcagcattgaagccattttgcagattatctataaatttttttaaaaaatcgaatcatttaaaatgtcaaagcatgtaagtcacatgtagcactaaagatatattccaaaagccaatattcaaaatattcccaacatacctaagaaggaaaaataaaaaacaccttcttttgagttttgtcaagttataagatcaacagaaggcccaacatttctccagtttgactcaggtaactgtttgtcagaagctcaagagttacaatctgccaggtccccaccttgtgcccaatacacaaacaaacaaaaatgtatgtgcattggctcattttaccttcccaagaatcctatgacatgggcattatttatcctcatgtttccggatggggaaatgctgcaagaggttaaatagaatgactaaacacaaacagtggggaggtgagtcatccagtgacagcaagacatggtaagcactggaagatgatcacattctggagaaactaaagactagacccttacaagaaaaaaaaaaaaaaaaaaaaaaagattaaattttgcatttatgctgctttttgcctgagggtacttcccgttctacatggctatacagggtagctagacctcaagcaaaagcaacaggtagaagtcctagccagagcaatcagacaagagaaagaaaacaaggcatcccaaccagaaaaaaggaactatctgtgtttgctgatgatatgatctcatacctagaaaaccctaaagactcctccaaaagactcctagatttgataaatgaattcagtaaagtcttgggttataaaaccaatgtatacaaattagtagcactgctttatacgaacaatgagcaagatgagaatcaaatcaagaactcaatagctacaaaaaataaaaataaaatacttaaccaaggaggtaaaagatctctacaaacagaactacaaaaccctgcccaaagaaatcacagatgacacaaacaaatgtaaatacatcccatgttcatggattagaagaatcaatatcataaaaatgaccacattgcccaaagtaatctacagatttaatgcaattcttatcaaaatatcaa

SEQ ID NO: 69036 - DNA, 885 bp, Homo sapiens
atcacaagtctcaaacacctaacatttgttcaaatatttgtccaaagtaagatcataattttttcctatataattccttacttccttttttgtacatacataggtgaaaaaggactgaaggaggggagccgtcagaaaagaggtgcaactaccctgtggccactatactgtgagaaggctgacctagccaagtggaaagggcacctcgcggagaactgaagtcctggccaacagccaggacctatgccacccacataagtgacatcatttcggacttccccaactgaaaccacattaagcagaagcaccacccagtctactcacagatttgtgggaaatcaaatgctgttggtttaagccattgagttttggggtggttagataactgaagcagctagaaaatagctttccagtcagaccaaataccacatctatgaatgacaagcaccatcatggcaactaaacattgtttatccgttgtatcaacggaaatgatacaactccttcaatctgagcatgcccatcggctgaaacattcagctgggtaaacctggatctatactgtaccaggctcaacagtgttaaataactactaataatgatcacatgaataacggtaacagcagccattatttaccaactgtttattacatactaggcattgtgctaaatcctttattcatttaatcccttataaaagccttttgaggtgggccactataatgcccattttactgatgaggtcgctgaggcatagagtggtacagcgacttgcctgggatcacactgacagtaaacagtgatacgggatttcactcttggccatctgattccacagacaccgggctcttaactatcagcttgctttaccccttcaaaagtgtt

SEQ ID NO: 69037 - DNA, 2429 bp, Homo sapiens
ctcccaccctcagcccgccccgcccagggaggagggaccgccaccagtggatctaggcagttgggggtcccgctgttctggtcccgacaaggagtgcctggcttgaggttcccccgccccgcgcttcgtgcactctgaattctttgagagggtcccagggagggacaggggtgccccaactcttacttacagtcgtctaagtcatcctgcaagtccacaaagtacagggggatctctgaaaaccaagaaacacacaagaagttaccagggggctgcggcgagaggggacggggtcgggcaggggcccctcggcctcgcggggtggtcacggggcgagagagagaggggcacccctggcatcccccgagcccagccccactcacccgccatcttgggatgggcatggaggcgggaccggcaggggcggggccctgcagacaggggcggggccctgcagacaggggcggggccctgcagacaggggcggggccctgcagacaggggcggggccctgcagacaggggcggggccctgcagacaggggcggggccctgcagacaggggcggggccctgcagacaggggcggggccgtcggcttcgggccccgcccccgatccgcgccggccggccggccccgccctctcagcgaaggtggctgccgaggtgggcggggaggtcaggtgacgcggccggcgtcccaagatggcggcggcggcggctcccggaaggccgcggcggcgtcccggctgctaaggcgggccccacgcggctggcagcggacaggccggacctacggccggaggacgggcggcagccgcctctgcgcggaccggggctgggccgtgcggcggcagcggcgccaggggatgctcttgctgggcctggcctctcccttctcaacttagggcggcggcgggcccgcgcccctggctcccgggccatggcgctgagggagctcaaagtgtgtctgctcggggtgagtggcggcgggtccggccgggagggccacgggaggctgggctggcggggaccccggatcccccctgtcccctcatcccttcccccctcccacgtccaagacgctgtctgccagccccgtggaccctccctccagctcgggagccgtcccgcccacctcttgcactctcgaaaaggtcctggaggccgaagggacccttccccttcccctccctggagcccgtggactcttcccgccccacaaagagcaaacagcccccccttgcctctctattgcatctgggttaagagaggttcttaaatagttttctcccaacttaccaaggtattagttgggagttggccaagtcttccaaagtaaaaccaataacaggtctttaggttttacaagcagcattagcctactttgtctcttgggtgtttttgaacttgtgggatacccctgccacttgtccaaagagttactttgccaagtaactcttcctgtggagaaaaggggtgttcaaatcaggaagccccaaagactagtttgaagcttcagcttcctgtcttgtcaggaaagacaaggtgttggccatttcaaagccttctttctgaaattgatgctgtcattccagagtttctgccttaaagatcggcaggaactccaataactaatctttattcccccaaatagggtggggctaggattcatcagggattactcagaggtaactcaggagttcaaagtttactaacatatgttaaaaagcaagtggacttgttactttttacacgaagcagaaactttgggtctctcaaaaggtcctaatctgtcttaacggcaaaaacctctcccttttagtacagttggaatttcctaattactctactgaatttttatgacaaccgcttttgtgttcctccgtttataaaatttacacgtctagggtgatttttctaaaatcctgaacttatgccacaaagtagtttttggtgtctgccaaaaggtaaactttttctcagtccctcatctcgttctctttcaggatacaggtgtaggtaaatcgagtattgtgtggcggtttgtggaagacagttttgatccaaacatcaacccaacaatagggtaagagacttttatttgatacacatctaaaggtgcattgaaaatccttccaaatacatagtgtgttacaggtgtaggccctgcgctttgtagtcattgaattctgagtcgctggttcgcatcatctctggaaggacttgaaagagtccagtgaggatctgtgtattttaggaaaattatcttcggacttgttgggggtgagaacttcaaaatgcaaatatgaattggagttctactaattattagaacagacacagaagcttcggtctataaatatcaacagcaattacaccttgaaataaggcagatgaaaatagatcctggtgctattctttcaggcat

SEQ ID NO: 69038 - DNA, 809 bp, Homo sapiens
atccctggtgatgtgagaccccacgagtgtgccatccttgtgataagagctaacatcactgcagcaagaactttacttgcatccgttcactgagtcctccccagatccaagaggcaggaacttccattatccccaccgtacagatgaggaagtggccgaggctcagacagcgaggaagagataatcagccagaagctggcctggccctcgcagctggccttggtatactctctcctgtcgaagagacactgacatcaacacaaggccacaatttcacaagacaatttcggcaatgtcacaggacactgacctcacacaaggccactctgaccatgatgggtcaaaacataaacaagacttctccgtcactctagtccttgtggatgcaatcacagtatgaccccaagtcttgttcccgacagcacctaaccaagagcaaagctcacttcctggacccctgccctgaaatcaccaatattatccccaatccccgagtctcttctgacccctcttagggaactgcttcacactcccaaagcgcccaggcggcactttgaacttattcccccacacatgtgtcctgggggtctttgtctgcaaggcattgccagcagcctaaggccacacatctgctgagtcacagcgctgcgaagggcaggttgggacccaggccatcggtctacagagcccatgatttccctactgcctgatctgcacagggagcggtcatagcaaagacacattcctttctcagcacaaaatggcagggcctgctgcgagcatttggatttcaggagagcgctgcaggt

SEQ ID NO: 69039 - DNA, 1447 bp, Homo sapiens
gttattattgaataaagcacttaacacgaagctggcccccagcgggcccttaatagtttccgcggtggctgtcgtagctggactacagaccccgcctcctgagcggcccgaagccccgccccttactgccccgcagtcccgcccccgtggcttgtgccgcgcctgcgcactgtcccggaaggggctctacgcgcgcagctttagtccccgcccctggagccggcggcgcagggcgcagcttcccgccgccagagcgggccagcctgctgcgtgcgtgcgtgtgtacgactctgcgtgcgtgcgtgcgtgcgtgcgtgccgtcagctcgccgggcaccgcggcctcgccctcgccctccgcccctgcgcctgcaccgcgtagaccgacccccccccagcgcgcccacccggtagaggacccccgcccgtgccccgaccggtccccgcctttttgtaaaacttaaagcgggcgcagcattaacgcttcccgccccggtgacctctcaggggtctccccgccaaaggtgctccgccgctaaggaacatggcgaaggtggagcaggtcctgagcctcgagccgcagcacgagctcaaattccgaggtaagccccagaggccgccaccttcctgcccgcggcctccgccccagtgctggaaggacggagcccggcgcggcgggtgacgtcggccctcgtccccaccccgacggcgctgtcgcggggggcggcgaggccgggccgggccttggcgctcgccgcgctccccagaactgcccggagtggccgggacccgagagggctggtgcgggagccggggcctgcgcctcctccccgacccccagcctcctgggacttgccttcgaggcacttgtcactttgtaacttaccagtttgtgatcctctctagtgtgagcctccgccgctgcctttgcctagaagtttcttcccctgctccgtgacagtgttgacctcagggcttagttgaggtgtcagctgctcagagaggcctgctgtgaccacccagccaccgtgcacacctgctgtcattccctattccgtcactgtttcgtggtcagcacggcacttttcatacccaaaatcactgtttcaatactagaagggaaactgcatgaggacaggctcttgtcagttcgctgctgtgtacccagcacacattatacgcctagtaaataaatacctgttgaaccaacagatgaacatgttgaaccaacaaatgaacctcctcaggacttctgatgggattgggcccattttcctttcactgcgtccctcatgctgtctcctggttgcggtgcaaggaggctgccacggtgctgggatcctttttctccgcagagctgtctggagcaacacctgcggcgatgggaagccatgaccctggtttctcccagatactattacctctgtaatttgtgcctttatgttttc

SEQ ID NO: 69040 - DNA, 884 bp, Homo sapiens
ggtgtgttctgttctctggacccattggtttttgtatttcatctaaatagcttctctaaaaattagcattttccttggattgctgtcatgtgagcatcagggatctttacaaataaaccttgttcctcctcagagctctccagagtggtagacttgggagtggtgcaatagctgttcacagctgggagaacagagtctcaagggtaagacggtgtttactactagatctgtgccctgccaaaaatctaagagtagttcaggtcaaagttctcttctttcctaaactgaaaaataccagagcatgattttgtcacagccaaggaagacctgaaattcttaaaactgaattcactttaattttagaaagggaacattaatctaacagtgaatcccagctccaaagaaggttgacagtccctgtccaggaaggttcacagagcatgtaaagacattggctctttactttaaaatgtgtgttttcgttattgcaatcttaggggcaggaaaaaaacacattgggaatttggctttcagaaaaagcattgacctgccagtctggtcatttgtccctgaggttaagtgtcaagcccaggtcggtaaatgttccaggtctgtctgtaggaaaggtcagctcttgccagctcagtgatgccagagaaagagttatgttgataaaaggtttactctctgacagttattgaattttgtcctgaagaagtctcccagcaaggcttccttgtagctcagggccttcaggtgggtcttgtgggcagtgaagctgtctgggtgactagggacaccagtgcatttaagtccaatgcatggttaggtctcagtggactttctctgttcccatggtgaagagtgctactgcatccctaaga

SEQ ID NO: 69041 - DNA, 1134 bp, Homo sapiens
ttctgtcacaaactttcttatttgcttgagatgcaaatttatgacacttcacccctaaatgcttcagagcaaggacagtctcttatatagtcatgatactattaatcatagctgaaaaaagtaacttcaattcagtattattatgtgataaattcatattcattatttcctagttgttccaaaagtgacctttagtagaggacacccaaacctttttgtttttcaaactttgaactttttttttttttttttttttttttgagacaaagtcttgctttgtcaccaaggctgaagtgcagtggtgcagtcatggcttgacctccacctcagctgttcgagtaactaaaactacaggcatgccaccatgccggctatttttttatttttttatagagttggggtctcactatgttgcccaggctggtcttgaacttctgggctcaagtgatcctcctgcctctgcctctcgaagtgctgggattacaggtgtgagccactgcaccctgcccaaactttgaacttctttttttttttaagagtccaggccagttgacttacagaatgtcctgtattctggatttatttgattatttcctcatgattaaattcaagttaaatgtgttttggcaagaatattccatagttggtatttcataccaggttgttccgctgttggtgatgctgtttgatcacttggttaagatggtgactgccagctctctccactgtcatagcacaaagcacatttgcccctgtggttaataggtaatctgtgatactctgagtcatctgatactttgagaccatgtgaatatcctgctcgccagcagtctttcacctggtgcttttagcattcagtgatgatccttgcttgatattttttttgacttatgtggtaggcacacgtgtacaggtgtgtgtgtgcagaggagcagacttcagtattctttgcgattttttcacttaacattctggacattttctccatctaactgagtgctcttcagcatcatttgagtggcagcatgctgttccgtttagtggatctgccataatttttgtggcagtcccctagggtcagatgtatagattgcttcccacttttggttcttggtacctgtgttacagtagctg

SEQ ID NO: 69042 - DNA, 3366 bp, Homo sapiens
atgtttctaatctgattctcctaccgacgaccagctcagttgttatttacaaatacctgtcccctaaaggggggagcggggttgggggggcttggccgtgctgctggggtcagagctcgcaggggggttctgccgcagtgtggggacaaactctcccttattgggcaaatatttcccggggcgctacgctaagcacacgggctccccgaatttccctccccagggcctctctgtctttggatggcctgtcagcaagtccctgcagcctccagcccggcccgcgcggcgacccagtcccctgtcgcccgaatcttccaccgctgcgaagcgtccccgggcgagcgccctgctctccgcgctgcgcggaagccagagccggtcctcacagtgaactcgcccagccctgctcgcggctctctcgattttatgtgggtttcgttggatgcattttgttatttgcctcaatggatgtttcacattaatttttagttgcacaacgaacgcgcgggaacattctccgtgagagaaaaagcacgggtggggggcggttaccggtgcttcccccggtcgcctgggggtcccgcacgcgccccgcgggtgccgctgtctggctggggtccctgggtgagccgcgggcaccggcttcgcgtctccccgggcgcgactccgctttgcaagcgctcagcacacgggaaaccctcggaaaacacacacgtgtgtaaagtttgttccacgcagaaacaaaggacgcgtgggggccgcttctggggcctcggtcctttgttggaaccccgcaccgcagcccggcccgcagcctcgccccgcaaggggaagccggccctgcacaggcccggggcccggaaggcgccgccgcacagctctgcgcccccgacccgctccggccgcgcgctgggccaggcccttggcctcaagcctcccgggcggctccgggccggacccgggtctccgtcgcgggacgccagcctgtttgtgggtgccgtgctcgggcccgggcggcccctgcccgacgcggccccacggagcccctgcacgaaccccgccgacctggcccggggcggcaagtcgaggtgcttagggcgccctgggcccggccaaccgtggaaaacccggcccggggcacgggggggcgcgggggtcgcagggccagggcccaggcagggaacagagatttttttcgcggggaggggggtgggaggtgtcaaagttttcggggaacttttccacttgagattccacgaccctgcagtgccccctacagaaagcggcagctggggagggcgggcgcccccgacgacccccgactgccagcggcggcgcggccaggctgcctggagttcttgttccttttttttttttttttttccttttatttcctcgtggttgtttgtcggatacatctttttccagagtgggaaaaaaaaaaaaaaaagcgagcgccgccgcctgcagtagagcgtgctcggcctgcagaggcagtcgtctccaacttttcctctcccgctccaactccccgcgcccaaaacttcagttcttggggagcccaaatttgcctgccgcgcaacttccactctaattcagcgaccaagggccctggcagcggtttgcagcctgggggccacgctccccaggctcaggcctgctcgttggcctgctcctagtgcctggacccagttgggggaggcgaaacagggcgcccgaggagcaccccgggagagggcggagcactcccgtgccccggggcaggagtgcagggagctcccgcgcccggaacgttgcgagcaaggcttgcgagcgtcgcaggggggcactcgcgagggacggacaggaagagggccaggggggaacgccagaacccgggaccacagcacggaaacggtccggggctgagctgcagtcagatccggggatggagggagccggagaagaggagtgagaaggccggggaggcaggccctgctgtcttcctgcaggccggcagcctgctggcagtggaggaccaggccgtccaggaaaggaaggggtcaggaggtcgggcagggcctcagcaggttcagacaagtccccagaagggagctgcaggcgccctcgagtccaggccccaagcctggctccggttgtccaaagagggcctaggccaggcctctggtgcggaaactgagtcacagccagacctcagggcacggcctagacgcttacgagccaaagttaggggtagagagcagagacctccggggggtctcagggagtagggggcttcagggcctcccagtctagagccggattggcgagttagacgcttgtagatccaaggttggattggggtggggtctctgggacgttggatcgctacgcaaggattggggggattcaagtgcttagagatcgaagtctgccctgggtagggggagtcagacaattggaaagcctaggtagttatttggggaggggtctctacgccttggcgaagcgcacagctgcatctttttggcttgaggcctgaggccttgtcgagaagcttccgtgaaagggtgggccagccgggccacgagaaagaaagtgaataaatcaggaatataagtgggcggggggcccctgagaggggggtcgcaaagggtgagacatggccaccaggcgtttaaccgacgctttcttgttgttgcggaataattccatccaaaaccggcagctgttagccgagcaagtgagtagtcacatcacctccagccctctgcattcacgtagcattgctgcggtgagtctcctggcggcctctccgacacacggaccgtgtgcactgcggctctgcctgtttgtctgtctctgtctgtctctctgtttaaaaagagaagataagaataataagactaagaataataagatctcttggctagagtcagggggcatctgtagccctggatgaggaagaagcggtgctgtgaggccgcagctccacctctgcccggtcttctcctcacttccgcagcacccccccccccgcaccccccgccttggcgtcactgcgctacaggccgcctgtaatttacatatgttttaacgctaacattgggaagcattgggcctttctgaagcctttttgtttcgttttgtttgaagctcccctccccccagtaatgagcctcagtttggtcctaagggctgggtcgccggatcgtagacccaaatccttgcaaaatgaacgactccctcccctcaaagaggagggagttgtgttgttgttttgttttgttttgtttttccgcccgttttcttttaacggccccgcagccctctgtgtggccttgttccctgtgaataattgcctcactgttcttcctgggggcttgc

SEQ ID NO: 69043 - DNA, 1944 bp, Homo sapiens
cccctgtaaggcgactgaggtgactcaggtcaccctgctccttcctcgtctcatctcgtccctcctttcctgcttagactgtgccagatgacccttcttgcaaaggggtgggcgggaaggccccccatgcagccaggcagtgcctggatttgtaactggccatcccagcagcagtgccctggatggaaagccacgtccctgtcaccctctcacatccagggcagtgcctggcagagcggggtctgataaacgccagggaacctccgattaagtgaggaggaagtgaccgtccacgctgtacccaccatgccaggcagtgggacaaaaggacctgactcaggtccaagagtcactgggcccctccggcctaactgatgggtggccagggtgcggggtccctggggatcaaaagcagctgctaagggacctcgggggacctgcttggggccagcctgaggcctgaccgggcggaactgcgtcgggtgggcttgggcctacgtcggcccaggccccactggaggccaggcccgtccgggaggcgctgcctggcgggccacgtcgccccgcgtgttgggcagggccgctaggcccaggggcggcgccgctggaggccgggcgcgcgggccctactcggcagggcctgctcggggccggcttcgggcctgcccggccgggcctgcccgcacccttccgcccggcctggccggcgccccctcgcgccccgggcgggccctgcacgtctcgcgagcagcccggagcggcgggggaggcggggcccgcgggctgccgggcagggccggggcggtgccgaggccgggccggagcggggcgaagggggccgagcggcgggccgggccgggccgggcagggccggggcgtgggccggcaggaagatggcgaacgtggggctgcagttccaggcgagcgcgggggactcggacccacagagccggcccctgctgctgctcgggcagctgcaccacctgcaccgcgtgccctggagccacgtccgcgggaagctgcagccccgggtcaccgaggaggtgagcgggccgccggccgccatgcgacccgcgccgcggaagcccaggcccgggcggcccgcggaggccccgcctcgcccgccgcacccccgccgccgccgggccgggcccaacgaggccgggccgcctccctgaagggctcagccgccaggccagtcctcgcccgcggaggcccagccccaggccccgtcgccggtgcggcgcggtggtcctcctgtcagcccagccctgcgccccgcgaggccgcgacacctgcggacggcggggggggagacgtggccgctcccagggccgcgcgtcggccccgcctggcgacaggccctggcttccagaagttcccatggcagtgtccccagctgcctttccttggggacacctggcccctgccccctctctggtggaagccgcctaagccctatccgagtgttggaagcaaagcagcccccagcctggcccttccaggcttggtggcttcatcccaccagggggatgcgagccagcctagagacagttagctctgcagagaggcgacacatctccctaaggatgggaaaacggtggccgggagctgcgcagtgcccttccaggactgcaggagtggttgtggccgtggctgcagggcagggcctcctggcacgtggccgctgtttgaagcctctgtgtcttgtctctcccttctgatctagctctggcaggctgccctgagcacgctcaaccccaaccccacggacagctgtcccctctacctgaactacgccaccgtggctgccctgccctgcagggtgagccggcacaacagcccctcggccgcccacttcatcacgcggctggtgcggacctgcctgccgcccggagcgcatcgctgcattgtggtgagtgcttcgagaggaggcagccacgg

SEQ ID NO: 69044 - DNA, 786 bp, Homo sapiens
tcccagcagacaccatggtggcagcagatgacctaaccaaggtcccaggaaaggcgggctggggtcaactgcttgaaaatttagtaaccctgctcctaatcccgtgcactgctatatcctagtgtgcggcgggacacttgagagttttgaaagaaccctcaaacaagttcacgttccgtaaactacttttccctctgttccagagcccccagggcgcccaggcaaggccgccacctctcccacctgggaggacgcctcgagcaccgactccacagccacggccaccgctcctcggctcccgtgacaccggcgcgcctgctgcttcgagcaggggaggctttgcactcccatcgcacttttctcgtccgaagatacgaaactccgtccgggcgtcgcaaataattcgaattcggctctctgacacctacctcggcgggcgcgcgccgctgggagggcggggtgggtggctggaggtaaggaggcgcacagcaggggtaagcgccgccgtcgcacactttgcacgccgcccagggctacaccactcaccgaaaattgggaggcaggtctgggaggcggggttgagcgcccaccgccttgggcgcgcccgcgccccccgccatcgcggcccccgcgcccccggcccacgcccgcgcggtcccggcaccggcctgcacccccagggtgcgcggcggcccatttgggtgcgtccccggtgggccgatttttcgcgcttccccttcggtttataggggccgctgctatgggtcggtcctctgaagaggctgg

SEQ ID NO: 69045 - DNA, 1773 bp, Homo sapiens
tcccggcccgcgtgaggccgcccgcgcccgccgccgccgcagcccggccgcgccccgccgccgccgccgccgccatgggctgcctcgggaacagtaagaccgaggaccagcgcaacgaggagaaggcgcagcgtgaggccaacaaaaagatcgagaagcagctgcagaaggacaagcaggtctaccgggccacgcaccgcctgctgctgctgggtaagggcgggcggggggcgccggccccggcccgggggccctcgaagggcgccccgcaggccgcgcgcgccgagcccgccccccgccccgggcgcgcgctcccgagccccccgcccgttcgcgggctctgtctgtggggggcgaggccggaagggggacccaggggcgcggattcggccgggcgggggctcaaaaacggggcggggggccgtggcgacgcgggcgcgggtccccctcccccggcctgcccgctcagtgtctctctcttgctctcgctctcgctctccccctctttctctctttctctctttttccgcgaggcctacacgacgccaggggtttgggtgcgtgttggggagggggagggggagcccatggggctccggagactgcgacaaaaagagggtttcggggacaggaaaccgggtggcgggtagagggagggggacccgcctccgtggggtgtgagatttgttgggagagggaaagaggggaagaaaggggcgaggagaggagggggtgacgctggggggcgccgtggtggcggagggggcctcgccaaagggaggctttggcggggagaagtggccgaggagagtgggggggctggtgacatcagcccctcggaaaggatcggagcggtaaaggtggtgcagtgggggggagggggcgcaagggagtcgtggcgccggagtcgggaggggggcggcgaggggaggagggagggcggttgccgctgggcgcgacttggtgcgtttcgggcaggaccgactgactgtgtgtgcgcggagcagacgtgtcccgggccaggccgggccgtggaaggaggagaaggagagtcaaataaaataagaccaccccccaacaccaaaaaatggatagagttagtacgagaagtgcccagtgaagccaaatgacacgtcattttacagtgtgacctttttttccccttccagacttgcaggctttttcaaaagcagagcggagaattaattgtagcagctgccccccccacccaccacgagcagcgcccccccaacactattttaataaaccattaaaaaaaacacattttcctgctggctggccacattgagagtgctttgtgaaaagaaaaaacaaagacattcacaaatcagataaaactggagaatgacatttgtctgtaaatggcttcttggtctggaaatggcgtggtttctttttttttttttttttttttttgtcctcctcaaggtgggaggggggattgagagtgctctaaggagacttttcctccaggtgggaagagataaaaagacattaattagttgtttatcaagtgacatttagttgtttggttttgggttttctttttttgattgcgatttttcctctgattaaaaaaataataataaaataaaaaaaggttaactataaggagatggcctttcctccttttttttcttaaggtgctgttttgggggaaaaaaatgtaatgaaatgaccaaaagaattacacagcattaattaaaaatggaagttttccacttccttgataatttggctatctgaataaat

SEQ ID NO: 69046 - DNA, 1474 bp, Homo sapiens
agactggcctcgaactcctgacctcaagtgatccgtcagcctcggtctcccaaagtgctgggattacaggcgtgagcccccacgcccggtcgcgtttagtactttttaccaaaactaaaagaaattaaaacactttcgtgggtcctggacacttccggaaggatttgtttccagctgccagatgaggaaactggggctcgcagagccggcgccgcaggggaggggctgtgcacgaatccagtgggaaacctctctccggagctaagcccctggtccacccgggcatcgctccgggatcgactgggggcgttccttccgccggtcccctttgttcccagtgccgagcccgcggccctgcccttcctccaggccccgccccttcttccaggccccgcctcccgcccgggccgaggcgcgcggccgcgcgtgcgcccgcccgcccgtccccgcctcgcgcatgcgccgcgctcgctcgcgggagggcatggcgggggccgtgccgggcgccatcatggacgaggactactacgggagcgcggccgagtggggcgacgaggctgacggcggccaggtgaggcggggcactgggcgcaccctagagagaatcgttcgtctccgccgccggcgggccggccccactcccggagaggccgcgcggcgcgaggctgcgggcgtgcggggggtgtgcgcgcgcacggcccgcgcggtcaccgtgtggttcaagcacagcccgccccgcccccgcccgcccggggtcccgcggcgcggccgccggggtccccgcctcctcgcctgcaggaccttggggtgggggtgaggcgccggaggctctggcgcggggcggcccgaggcccccagtaccccctcgctccggccaggcccggcgccggccctgcgacccccgcggcgggcgggacaccaacgctaaggtggagggttgggtccggagctcacagacttttaaacaaaaataaagtggaaaaacttcacagcagcatcatgaggaaaaagtagaacttagggcattcctacatgtgctttactgttttataaactgtactcttcagcaccttgggctgatttcatctgtttttgggcaaactgatggaaaggattttcgggccttgaccttccagggtttggggtggaagcccaggagggatcactgttccaccctgaggacagggactgcagagccagggcaggtagctctagtctggacagtgtgtccccaccttactctaaagacccaactgaggcgcatgattgaaatgtagcttctcacgtccctcccctggagacggcccaacagttggtctggacgggagcctgggaacttgcatttttttttttttttttttttttttttttttttgtggtggagtttcgctcttgttgcccaggctggagtgtaatggcgccatcgcggctcactgcaacgtctgcctctcggattcaagcgattctcctgcct

SEQ ID NO: 69047 - DNA, 1990 bp, Homo sapiens
aactccactcggggaactcctttccaagctgacctcagttttctcacaagaacccagttagctgatgttttattgtaattgtcttaatttgctaagaacaagtaataagtaaatttttaaaaagcctttctgctgggttggattaagtcctgatgtgacattgtttttgtgtgcgaataaggcacgggcagcctcagtctcgtgcagagccagatactttattcatcacttgggcgatttgaaactgccaactccctccctccctcccccacccttgattctaaagtgacataagaatggtgataagtctgaactctttcacctcttaaatgccatattattgcccacagttgccaaatacaaaatatcaagtcctctgctgaagaagactgaggtcccatcgtttcctgtgtcgcaggtcacttcttcaccaggtggctgactgcatcattgtgaggcagagccatgctgtgcaagtgtcataagtcatcccactttcaactctcaggaacactcgcagccagtgccacgctgtcctcgccatccaatattgatagccaccccagttcctgccagccagcctggcacacataaccataggatcccctctggtcatgggtcaccatgccttttcttaaactgcgcttctagtgacatggccttaaacgatggggtccccaaatgtacagtgctcctcgatggcaaggttgtatctggcgcccttcccatccttataggtgctggtcacgatcctcagccagcctctctcgccctgtgagaagtgggatcgcgcgtcagcccatctgcagccgtctcccgctccccttgctgccgtcagccccctgccccctgctttctgcctccatctctcaggccagccttgggggatccagacagcccactcagctgcccctcagctttcccatgacccctgttctgaaataccttttgtgaaacatttcacttggttaatgtttaacatgagggccctctatgccagaagtgaattcatctcacaaaacatgttgactctagactggtgcctcctccagctactactacccccattagtcacctagtaaaaaatgacgacatttcatcacctgcacatgaaccgctttccccccatttcttaatcatgaatttctgtgtcttaaattattaatggctaagactaggtctggcagttaatttctctctcctggatttttggcccaactcgagtatttttgaaaaaccgacacagtattttaggggagcccaaaaaccatgatgggaaaaagaatgagctggttgtaaaggaagagggtggcagagcccctctccagcagtgctcacagggacttccccagggcaccaggcaccatctggagacggttttggtcacactgggattgcggggagtcacctagtgggtggaggggccagggatgctgctgaacacccaaagtgcacaggatggcggcagccgcgcatgtcagagaagggtctggccccaaaagccactcgcgcggtggctgagacagctggagcaaggaaccctctgtcaaggccccagtttttagctaaacgtaaacagaaccattcaagcgagaggagtaccaggacgtttttttctaggaatgaccttaagaaaatgaaaacatcttacccatggttcaccccatgaattccggacaatccagtactcagtcccatcactgatgccccacccagccacagaaacgacatggtttatatatgtggtgtcctggtattcggcatagatgcctccggtgtagttagccagtctttctgttgccattattccacagctgagagcaagcagttaaagaattaccacttttaaattgagagaatttaccgtcattagaaataatctgatatggctgggcgccgtggctcacgcctgtaattccagcactttgggaggccgaggcaggtggatcgcttgagtccaggaattcaagaccagcctgggcaagatggc

SEQ ID NO: 69048 - DNA, 3592 bp, Homo sapiens
gagcagacagctggggagaggggaaggagtggccagggaggtggaggcgggcagtatggtgcaggagaaggaagcatcctggggagacgtgatcaggagaatgcttcacggtgggccccaggtggcagtggaaagaacagtgccggtggagtggcagaggtgggactgaggctggagtgggttcaagggtagagaagaggaagtggagggactccagatacttccctagggagcccagaattggggcggggtggggccgggggctttgtgttccttttttccaggtgggagagcttccctgagtgggaagggacgggctcagtgaggggacaagacagttgatcctgggggagaggagggaagacaaatggaggacctgctgccttggctggcaaatggccagggccccgtggaagtccccttctggtggcttctattcctcagtgaaagaggaagcgagtgcctgggcctgggtgcgctgagaaggaggtttcaggagaaagtggggtgaagcagtcatccgcccagagagagtcccctggggaaatgcggcagggctgacccctggccagggtcccacatccatctgaaagccatctcctttctacccgcagtccttcacagacgcacatcttgtcacctgactccctctcaaagagttcaaggcttcccacaggcacctgttgacctttctattctcccctcaccctcaccccaccctcaaaggctctttcacttcctcagcgggtgccaggcctggacacttcccctagactctgcccagtcctctgcctctagccccacccacaccctgcagcccgcccaaggtctcccagaccttccagctccatccacatcaaagggacctttgaacgatcagaagtgtgttccagcccccgggggagacgccacggatgccacagcttcagctggctggctctggggtccagaccctacccccagagcaagaacccctcattcacaagactgagcccatcagacatcctggcacaaagcccaggcttccgggctcaaatctcagctgtcactcacactatgctcaagcctccccatctctctgcaaaaagcctgcttcctcatctgcaaactggaagcaatcatggcattgaggaggcgtcagtgagatggagcacacgcaaacgcatgtcccccagccttggcccacagcggcagccacactgtagtctatccttttcacatgggtgtacagcaggcctgacccatgaggaccaaggccagggaagaggcaacagcaccacagtgctcatgggccaaactcccaggccacgcaagtcccatctccaggggaaatccaggctcctggaccctgtgctgtgactggagaggggatagcagagtcccttccaaatgctgtggggtgggcctggggctggtttgcagctgtcccttctcccgccttctctcccaaagcagggtgcagcagcctcgttgatagggagggccttagtttccccttcctctttgctaagagcctccctaccctactcctgccaaaagcctaagatagaaacccaccaggctggaggtagtgaccaggttaggccatgggctgtagccaactagcctcacccaatattccaagcccaggacaggctttcatctgtgctgagaagcagtttacttctgtatcctcaaatacagcctggggactcagtgattttgcatttctgtttctatcccaatggctgaggtcacaagctttgggggagagagggcacctggcagccacttgtcactgggattcagtcctagtcctgcctgtcacccaaaagccccagaatgacccagcttgggtcacctcagcagagggcaaaggcccgcgctcctcggccttagcaccccagcccaggctgacctggccttgaatcacaggcccctggaaccgcgggctgagctgcctgggcctataaacaggcagccgggatgggctttcctggcccacagtcaaagggcggccactcacccgccatagcgctggtgctggcgtgggcccagcaggagccgcagtattgggggatgtgctggttccgggtgatgctggcatagttgacaccatccacattgcgccagtcccagctcttgggcagatccgctggggacaggtactcatgaggccgggggtatgtgctgagaagagatcatccccacccagatcggtgctggggctcccgggggccgtgggcccaggaagccctcggtagggccctcccgcctttcccaacacctgagggcatgggagtggggccacaatcaccagaggtgagccaggtgtgggcccacctcacactaggaggctccagcgctctcagaatgtgaaggaggcagggcacccccgaaaggagggaaccgggttgctcccccagccatgccgcgccgtaagggccacccccagaggccgaggaggtggggctggcctggctttctggccaggtggggcttgtccaaccccacaaacatcagggctcaccctggatgtggaagagaaggagcgacccccaaaacgaagcggctggatctgaccttccaaggcctgttggcgacgcagggcccccaggaggcagagcgcgcgcctggcccgggcgatgggcctcccgtccccccagggctgcctccccgccggtgcccacctgcgccccagcggagccagcccgtccccccgcagaggccggtagcaggtctgtccccggcggaagtagaggccgccctgcgccgcgcccgccagcagcacgagcagcagaagcggccgccaccctggcccgcgcctcgccatggccccgcgccggctcctgggtcccgctccggatcccgctccgagtcccagatcccgcgccggctcccgctctggatcccgccccggcctcggcctcggcccagcacccggccgaccccgcactttgggcccctgccccgcccggcccttaaggctgcggcggccaggccgggacactcccccggggcggggctgtcccatcgctgctcctgccccgcccggtgacccctgccctccccgcccggctccgcgccccgctccctccctggctccggggcacctgaactcgcgggccaggcgcgaggtcgccgggcagaccccagcctgaccccgccgccggccgccgccctgagcgcgggactgtccggctggactcatttgccggggttcctggcttcggggtggggggccgcaggctcatgggcccccttggccctgcattcctggggccctgagccctggggagaggcccccagcctcacatctgggcccaggcctcccctaggaagggatcctgggatgcggccaccgcccccaaagaagggtccccgcgcctggctttctaaaccccttttcccaaaggcccaggccctttcggggggacggttcccttttgcagagaaggaaggagggatccttctagaaaatgccccaaaggaagattccacttggcgcaggcatcaggagttatccaatgtgacttccaaagacgccttgaaaaggttttctgctaacgaaactcttcttagtcaaatgaggaaccaaaagcagaagtggccc

SEQ ID NO: 69049 - DNA, 2032 bp, Homo sapiens
tgcttccattcttactaactgggtgaccttcaggctgttcaaccttttcagcacgtttactcactcacctgaaaaaaacaacagaataaaaggacaataatacctgtcctgctgatagctgggaggaggaaaaacaagtgtgaaaaagtatggatcacagggtaggttgcctaataaacggtatctactactgggactatcatccttccatccttccaattctacaagacttcgctggcttgacctcagcaagtcgggaagctccgctgtagtgtacccacaaaatgtaaagtgctacaccatccagtcaactaacaaggtgtgtcacctagagcaaggtacttctgctcactcaggtgcacgggtaaaaaaaaatcggatgtgacagctagaccaatggtttgcggttccactatgagacaccatgtcctcaagtgggttccatatttgagctttccaggagccacctctcatctttgtgaggggctctcgacagttatggctttcaccccttttagacataaggaaacctgaaatcaacaggacttaaaagtttaaaaaaaaaatgtgtaaagttgtaaaaggctccacctcgatgctggattaaaggtcaaagctgctaacggcggtcacgtggagagaaatctcctgtttcccgaggtggatgtgactgtactactttcaccacctggctccagcaccattctagaagaaaaaggtttgctaaataagagctggcctctctctcgagaaacctgccattcacaaaggtgtccaggggcactctgtgggtgctgggccgcaccgtcgggaagcgaggcaggacacagacgcgctcccacgcgaggtcgaggccgcgcccgcctgagcgctttgcccacagcgacgccatcttggcggcgacgcccgaggcttggcccaaccccggtcacgcgtggggccgctgctctgtgtcctgcatgacctctgggcaccgggatgcgcgcgggccggctcgcgaagcccttccctctggaggcctgggcctacctgagtccagcctgtctccagtaggccaccatgctgtagcgaaagcggagctcgtcgggccgaatcgccaagacgccggcaatgtcggctcagccgggcggttcagccgcaggaagatcagaccacagaagcggaagaggcggggcgtgcggacctgccaatcaccgcctcctacccggccccgcccctgagcacggcccctgctgccctgccgcggaagccccccggcgccgggagccaatgggcgcgcgcggtctggactgcgggtgccaatcccggggcgggccggccggccgcgcccacctattggctccaagagctcccggggcgtgtgtcccccgaccttccgtattaccccggcggggacgacgggggcaagaaggccggggtgtccccgctcgctaaggaccactgagccgcgtgctttcgggaagcgaggacgcgaggcggcgcgggcacggccgccccgagggcctggctttgcgcccgcttcagggaaacggcgccggcttttttaaatctgtggacagacaagcgtgtcctgagagctgagatttagaaaggctcttagggcaccccctttctcggagtgacactaaaccctggaaacccagtggaggaccccctagcgttttctgtagttctaggacctgcttccgatgtgcgacaagacggagggtaaggcaacagttgtcactgttgcccggaatggatgggaagaaaaatgtgaggaaaacccactggaggcacagggaactgccaggcggccgggaaaatgctcatctcagagcctgtgatttagagaaactaacccaacgcagtgaaggctcacagtctaggaattaaagtgtttctctcataaagaaaaaaaagcctttgcccttcacctttaattactaaaaagaaattataatcaggaaaaacatcacttaaaagaaagtttttattaacaaaagttttccttaattcacatttcaactttattaaatagtccaagggtttc

SEQ ID NO: 69050 - DNA, 1828 bp, Homo sapiens
gaacacgggagacggaggttgcagtgagccaagaacacgccactactctccagcctgggcaacagagcgagactctgcctcaaaaaagaaatttaaaaaaaatttgccttcagagacagttttaaaaacataaatggctttgtagcatatttatttacaaggctatactaattaaaacagtgtggcaacgacattaagatcagcggaacagagcaggtaactcgggaaaaaaaaggatttcgctgcttaaatttgtggctcttttgtaaatggaatcagggacctagaagagaatataattctccacatccaactggttcaaggcttagtttcgttagtaaacagttcacattatccaaaaagatgttcctgaacgtggcctcaaagagctaacacgggtaggccctgacgatcgtccttttccatctctcagatgaaaatgggtaacccagggtcacacgcttgttacagccagagctagaccttgaattccaaatccaaggctctgctgcgtagatgaacgagttgtgaaaaggcttcacatcctggtggtcagagttcacccgaaattcacattcgaaggtagaaactccacccaaacggcggccagggaaagtacactctggagaaaaccaacacctccctcttgggatcctcgggtccacgtcccaaagtggtttcacagggcgggatggggcaaccctgagtgctgtcaagggcttcgtgctccgcgacgcccccaggacctcaggaggccgccggcccgaggctacctcatggtgggggacagcccggaagtgaccccgtagccctgccggtcgcaaggccgcctgggtctggaggtcggagccgtcccctcggctagggcgcctcggggtcgtgaccttggtctgccctccgtgtcgccggggcccgcaggcttcagagttcgctcccctcgctaggcccgacgcctagaagcctcctgcgggccgcctctgcctcgcctctactccagggccggcgtgcctgccctccacggagccgacccgcgccccaaacttactcaaagacgtgctccgaagtccagatcttcatggtgccggcaccctgagagatgtccgggtagcgccaggggacaacgaggcacagaggctacacctgcccctgccccgcccccagcaccccagccggcggcgcagtgcgcaggcgctgtcgggcccgacgcgagggacgtccagacgcgcggccccacgccctatcccggcccgggttttgccccagccttgcgcgcggcgcaaggaaaccccgcctcttagcgccgggcgcatcgcgccggcgcagtgccgccgacggcagctggaggggccggcgcgggcgctgtgctgcgcaggcgcggcgggcttgtagcgagccttgacctctgggcagagttgggtcaggtccaggaggtgcctgcgcgcccgcttggccctccttgtccttctggcccagcacatcctcgcctggcatttcgaggcgtgtggacgcatgcggtcagcctgctgacatagatgttcgttgtggtggtcacttgtgcaaaatttcctggtgccctatagagagttccagccacctcctgggtcagcccgggctgttttcccaaatccaccagccacccagccgatcagctgggccagtcccacctgcccgccaggagcttgcagccctcggaggggataaataaggcgtgacgcggagaagctaacatcagacctgcccatgaataatacccctacgagggatgcggtccggaagcacggtgccaggggtcgggtagaaaagcttcctggccgggcacaccttgccc

SEQ ID NO: 69051 - DNA, 1005 bp, Homo sapiens
agtggaagctttcagaggcctcccgggagcgcagggtagcgcctcttttttcttcttgcttccttggaggttcttacaagaaggctgcgttccgggagcggcccctcccactttcccggtccgcggcgttacttacaaggctgcaacttgaccgggtgcaacttcctagcgagcctccgccccgcccctcgtgacgccgcctgcaggcgggcccccgccggcctcagctcagccagggagctcagcggagctgcgcgcctccgcctccagctcccctgccgcagcgcgccgcagccgggcgtccccgcgcgggcgccggagaggaaggaaggctggcagcctcgtcacgtgtccgctgcagtcgcgaaacaggtctgatcaatttctgtttacgtctgcctggattgcgcgcctatcgatcatagactttgtctgcacaaacggaggacaaggaaaatgcatgctgcgtgtccttagatttctgggttgtggatggggggagcggtggtgcaaaaaccggccttgccaggagctggtctcaggctaattttaaacatcgaggccagcccacactttggacaggttcactgcaacctggacccttggtcagaccgagggagcctcactgcgtagaggagcagcgtcatgtccacatcacccagaatgctttgccgcaccgaatggccagcagattcccttgagggtggggaggggaggtgctgctgttgtcttcctggactccgcgccagagaggaagacaggggaacaagagttattacccgctgatgacttctgcagctgcccttaatcagcctctggcgcttggggagcatatttgtagccagaatctccgacttttagctttgtttccaagcaagccagaaacaccagcaaggcctggagcttgttttctgcctatttagaaccctgcaggcattcgtgtctctcacccggtagctttgagcacaaaaccccacagcctttggtgtaaagcataccaggtga

SEQ ID NO: 69052 - DNA, 520 bp, Homo sapiens
ttattcatgtgctcgctcccatccacagataattcaatattctgctctcaataatctttgccagcgttatctgtattcattctctcgttctgtaaagaaggctgctaagtaattgttaaatatctttcctgctccctgaataaattggagatacagaaaaataatagggatatgattgcaacatattcatttggtcatgtttgccctgatttagtggggcacagcagacagctccagcattccagaactattgccatacaccgagaagggtcaaagtcacacttttttccaacgatttttctcagacactcatgctccttaaagctccctcataacccatcaccctgtggtggggacaccaattcttagcgtccaggtatcttttccactgaagagacattcacgtcaaaattctgacagttttcttcttttatttaagctaaacatttccatttgagacaagaacattttaaccattacatccacaggctttgtatggtgcatttgcaggttcagtatc

SEQ ID NO: 69053 - DNA, 606 bp, Homo sapiens
ctcaaaatacgatgttatactaaaaaatgaatttcctattagttcatataaaaataatcagttgattcgctttctggctatgtgtatgaagcaaaacctctttgagccaactgtatgggaaaacacacttgtgtgaacgtgaggtcaaagtgagcgtgaagcaggagccttggagccccggccgccagggccacgtgggaaagacccgtgggcgggaatggagcagcacggactctggactcttctccgctctggccacgcttctccaacgtacacaggcccattccttaccgaaacgaacctcccccaggctccttgagtttatttttctgtgcagcagctgcttgtgccgagacagcagaaagggctttggttccaggtaacacggcgggtttcaccacagggactacaaaacaaacacacagtggaaaccacacaaggcttttattagatcaactatgtgctttggtgctttacaggctcaagggcacagctaccactctcctaattagctacaagaaagtttccaaaaacttcatattaataactctaaattacagtacaaagtgtaagctgtacctctcgagcatttattttcctgtattt

SEQ ID NO: 69054 - DNA, 734 bp, Homo sapiens
tacgtgcaaatcaacacaaaagaaatggcaacaatacaccaaactccgagtgagaagttcaccctgaagtttaaagactgtctttcacctcaaaatgcagaggcactgcaaaagtgcatctgtagtgatggccagatgtggctctcagggcccagtgcagaaacctggagtggaatgaagtttgggaagaagccagcctcgcagccctgagagccgagcagcgtcgtcaaaagagcaaggtgcaaaccctaaacgggcactgtgactgatgggacttgcccctggaaaaccttcacccagccttcagcatcggcctacacagtccctcctcccccttggcattatcacagttgcaattcggtgactgttttgtgatttagtcattccctaacgtctgtctcccccctcaacgcaagctccctgggctcagggattaaatctcttaagttcacacaaatgaacagattggagaaaagtttagtgaatgcacaggtgtgctgtgcctaccccaggcccatcctctcccaccgtatatgctaattccttacctgtctccgtttctcctgccaaccacaaaaccatactactggaactgtgtcaaatttatccattttcagaacaggataaaataaccttggcaaataattaattttctgcattggattcctaaaaaaatcattaactttacctcacaaacatctaaatcacatattcattcaagaggtgtttatgca

SEQ ID NO: 69055 - DNA, 949 bp, Homo sapiens
gagttcccgagcctcaaggagggggcgtcgcgcccccgtcctcgcctggagactgaagaggctcgagcccagggtcaccaaggggcagaaaggctaagtggggacacaggccacacgcctaactgcagaactgagcaggggacagctgctgccactcacagccccaggtactgccctcagctctgcagaccccatcgcctggcccagggagcccctgcgctgagcctaccaacccgggcagggacgcatagggcgggagcaggtaaggaccactccactaagagtcctggctgagccactccgaaacagaccagccccaggcacaggcagccagcgcggacgtcagggacagcgacagggacgcaggctatgccgactccctctggctcactcgcagacagccacccgggctggccccgcacctgggtagagactgcccctcggcctgctccagccacgggcctacgggacagatgaccttagcattccaccagcggagaacttcctggaactggcagctggcgctgctgggagccgcccttccctcccgccccgtgcggccactcacctgggggcagctggaagttctggatgttggtcgggttctgaggcggctgcggcaagcggggggccagcacggtgggcgtcagggtggcccgaatcccgctggtggtggccgtgggcgtccgggacaggctctgggtcactgcgccggccgcgcctttgggcagcccggtgggggtcccgggggcgggcggcgggacggcggccgggctgggcagcgccccttgcatagttggcccgatgaccatgctggccgccgtgctggccgggccgctggccgccagggtctgcgccgccgggggcgccgcctgcaccaccctcttgggcgactcggccttgacccccggcgccggcgccgcagccgccgcgccgggcccgggttggc

SEQ ID NO: 69056 - DNA, 1990 bp, Homo sapiens
gggcggcgcgggccctgcggggacaagggggcggcgcggtgagggggggcccgggcgctgcggccccccgccccccggccgcgctctacctgcggggggcggctccggcgccgctccgggcgcgccctcggcgggggcggccggccctgcgcccgcggctccggccgggctgccgctcacaacatggttcccgagcgcgccggcggccgcggcccgcacctcgggcgtgcgcggcgcgaggtggtggtggtgggccgcgctggccgccagctgcgactccagcgagcccaccaggtcgctcaccactttctcgtccacctcgctgttgaagaagacctcgtccagcagatccgagcccgccgccatcttttttcctcggccgccgccgccgccgccgctcgggccgagcgcgcctgggcgaggaggaggttccgactggggcgggcgctgggcgggcggggggcggcgcgcggccggcggggggcgggggcgcgcggccggggggcgggggagcgggggtggcggccctgcgcaggcgcggagaccgcgggcgcccggcgattggctgcggcgcgcgcttaaaaggcgcggccaatggctgcgagcgctagaggccggggcgcgggcggtcggccggggtgcggcagcagcggcgggaagcgcgggggctggagctcaggggcgcgggcgccggggcggtggcggacggggagggggccgccgggcggggcgcgggatgcgggaacggtgcgctgggccgggccgaggcgggcgcggggcggcgacggggcctcgctctttgtctcggctcgctccaaaatggctgcggcggcgctgacgggagcgccgggcgggcgccgtgcgcggtggcagcggcggcgcagggcccgtccgaggcccggggaacagcgcgcggggatgccggggcgccgccgggcggcgcgcaggccctggagtggatgggcctgggaggcgggcgggaacggggaggggactgtcgcagcgcgccctggggacggggaccggcgcccggcccctccaagccgccgcggggaagctgggtccgcctctggctcagccggtcccgggcggtggggaggggtcctgcgcgcacggctcttctcgccctccaatcgtgaccacccctggcccttccctccatttttaatcaataaacccagccgccccgggctgactgtccccgcacccagctgccttggagacaggagtgtcgtataagcccgtaggtaagagcacggtgcttgccaggcgccaaacgaagttcccgagcctgaagccggcacgtctggaagtagctttttttaccttctgctgggggaggggagtaagttacctaaagtgttcccaagcaccttctctctagaaatacttcagtaaaagttccagtcccctctttctgcgtgttttattttccaaccaaaagatggtgttattggacatttctagtggttttcctttctctcatttcttcctaagagcccagaataggtttcagagagacgcttccttgcctcggacctcactggggccaagaggccacagggtcagtcttcgcagctgaagacagcgccgcaataagcagagacctcgggacgatgaatgacgttgctgacaaagaaaatgatttttttaattgctttaacaaaggagactgctagtctcgaaagcagacccgaactggacccttgtgcctgttcgaactgtagccttgcaaaggaatggacttactgataactggaatacgggacttcaccccaggcttgtttctcgacagcagcagcagccaatgagcattgaggacggagcctaggagaggtgcctcccctataggggaacagtgtttgggggaaatcactgcaaacgtacagctggagttttgtacctgaactttggctcccagaaggcaggaaaggaaatgaatgaagcaagctgagtatggcggggagggcccctgtgggtacacctacgg

SEQ ID NO: 69057 - DNA, 466 bp, Homo sapiens
acatactcacacatcctcctgtgtgtatgactgtgactgtatatgtgagctatatgtacatgtgtgttcacacacacacacacacacacacacagatacagtcatacaccacataatgacgttaggggcaacaacggactgcatatataatggttgtcccataagataacagtggagctgagaaattcctttctccaagtgacatcatagccgtcctagggcaatgcatgactcatgcttgtagtgacgtggctgtaaacaaacctactgactcatgtttgtggtgacctggctgtaaacaaacctgtgttgccctcacgtagaagtctagcacatataattatgcacagcacataattcttggttatgataataaacgtctatgttactggtttatacgtttactatgctataatttttattttattttatttatttattttttggaaacagggtctcactctgt

SEQ ID NO: 69058 - DNA, 2486 bp, Homo sapiens
gcttattctatttcatttttattattatttttcttgagacggggtctagctctgtcgcccaggctggaatgcagtggtgagatctctgctgactgcaatcttcacgtctcaggctcaagcgattctcctgcctcagactcccgagtagctggggattacacgtgtctgtcaccacgcccggctagtttttttgtatttttagagtagagacagggtttcaccattttgcccaggctggtcttgaactcctcacctcaagtgatccgcccgcctccgcctcccaaagtgttgggattacaggcgtgagccaccgcgcccagcctattgcatttttatagtcaccacccactactttttttttccaggacccaatattggtccgtgatctgatgatgttcacggtcaagacggaagcaaaaaaagcacacaccgcgcgccctcggtcactaatcacgcggagtatacgcgaggagggcccgcagctaagcgacggcgggcggccgagcttcctccacggccggggaggtgggcaaggcctccgggccgcagccccgggtacgagcggaggctccgaggcccccggtagccagtcagaatttattttaagggaaatggaaagctgcggcaggctttgggaggaggggcaggattaaaagagaaagtgtgctcagcatgttatatttagaggctgccacgccggaagcgccgccttcccgggagctgccgccgcgcccgccccccgccggcacctgggcactggggcgggagtcccggggctgcccgggaacacccggcgcccagggcctccgccactccccggtcccccatgagggtgagggctataggcgcatctggcccaagataggggagtcgtccggaccccacttctgtaggaggggaaactgaggccaagggggcaaagcccccgtgttcgcggcgcccagggtccggggcggcgccggcacgcgcgcgggcggggcctggcgctcctccccggtcccgcccactgagcgtgcaaaccgcagccgcccgcccacgcgcacgcgcgctcctcccgggccgcttcccacccctccccccgcccgctcagtctcgtgctcccagctccgcgaggggcccgccgggagccggccgagggtggggcggatcgccggggagacccgcccccggccagcggcgccttgctgcgcaggaacgacgcgagggcccgccccccagctggcggcccggccatatttaaaggacggcgggcgcggcgagccaatgggcggcgagcgtgaaggggcggtgcgtggcggtgcgtggcggcgcgaggccccggatgtggctgcggcggcccctcctcccccgcgctcctctcagagccccagtcgcgcgccccttcttggttcgctcggtgcccgcgcaggcccctcgggcggtggcgaggaggcgcccaggcggaggcggcggcgggcggaggagcgcaggagcgggcggccaggccaccgcgcggcggcggagcgggccgcggcccggcgctccttccccaccgcggcccgacgcaccccggccgccgccatgagcggctcctcaggcaccccgtatctgggcagcaagatcagcctcatctccaaggcgcagatccgctacgagggcattctctacaccatcgacaccgacaactccaccgtggcgctcgccaaaggtagcggccgccgcccgcccgagcccgctgacccccgtccgccaacagccccggcctgcggtgccctccccgccccggggcgccccggagcctggcgcccagaccccgcccagaacccacccagggcacacccggcccgagatcccctgcccgcgccttcaccccggacgcccccgaggcgcccccttcccgcgcgccaccctcccccagcgtagccggccgcacaatggtctccctgggctcccagggcggcgggattgtgcgcgggcgcccggcggtgtttggtgaggggcgggcccggcccccgcggtgccgccccctcggccgcccagcccacctctgcaggtgccagctccgaggagcagggcggctcccgtcagcgggcctcctccccgccagcctggggggatccctgcgggggagcctcgaggtcgggtggcggggccagtgtcccggcgtctcccgaaggctgggggtggggtcacaacacgcgaatcctgcaagcctttctggaacttattagacagctggggccttgatcctgaacaaataccgcgtcctaatgcggcctcctgccaaggcagaagcatccgttggcagccagatgccccggtttaaacggttctcctgctctatcctgaccttcccactgtggggcttaccttttggtgacagccgcctgtgggtgctcgtaaccggctgtggccgctggaggacttacaggaggggggctctttagagtcagaatctctgaggttgttgaggcagcgggtggtccagagtttctttgtcttcatca

SEQ ID NO: 69059 - DNA, 1592 bp, Homo sapiens
ggcacggaaggggttttcccatggatcatgttgtataagtgaaccagaccaccctgatggcatccacagtgatgtcaaggttggggctggccaggggtgggtggactagaagcatttgggagtagtggccaggggccctggacgctagccacggagctgctgcacagagcctggtgtccacaagcttccaggttggggttggagcctgggatgagccccggcagcgccttggcccttctgtggtccctgccagcctctgacctgggccggtcagtcattgctggactctggccacacactggcgttctcatccacttggaaacaagccagtcttttctgcaaggtcagttgaccaagagcatatttcccctctgttgtacatcgttgttttgtgtttgtgttgtaacagtgggtggagggagggtggggtctacatttgttgcatgagtcgatgggtcagaactttagtatacgcatgcgtcctctgagtgacagggcattttgtcgaaaataagcaccttggtaactaaacccctctaatagctataaaggctttagttctgtattgattaagttactgtaaaagcttgggtttatttttgtaggacttaatggctaagaattagaacatagcaagggggctcctctgttggagtaatgtaaattgtaattataaataaacatgcaaacctttaaaattttcttttctgatgctctaagaatcctgttgactcttctgcccaagtcacctctgcatcatgtccaggtctggagcacacacttaggctggtggaatttggggagacttgggccccatcaggtgatggaacgaggtggctgacccaattggtcgggtgaagtgcggccagcagacccgggttctccctgtgggccacccttctgggatgaatggctctgctctcagaaactggatacaaagttcttttaaaaacccagctcacagataacacctgtatcataagcagtggcccctttgccaccttcctgctgcctccaagctccccagctcaggagcgttcaggttctcaggcaccgtagagcatgttacacagccatgagcaagctgcaccctggacccacgcagaaaaacaaagacatggctggttctaggctcagagcatcccattttagtctaatgggtttccaggtgaccttaaaagtggccctcagagaggacgaggagacacaccagctgcatgagttctcctttcattacctgcctgtggccatcaggctccacagcagaactgccagtggggggccctcccatttcttgggtgggggtaatgggtatccttgaccagcagaaaaataaatgttacgtgtgccagatactggtggccacagtcctcacccagctagagaacttggtgaaacaggtattgcctcccagagcatcgcaaggtagtcaggttatcgtgtgccagctgaccttgctgttaaaatgttcattgttttgacaactgtacattttacgctgagctcaaaatgtatctgggcccctttactcctttttagaagatacatgcccaaaaccaaggaccagaggacccaaaagccttaaactgtgg

SEQ ID NO: 69060 - DNA, 3245 bp, Homo sapiens
catctactgctggtagagctagcccaggcgtgctcacctaggtgcccaacctgggcctttcaaatactgagatgtagttttagttacaacatagctagtaagtaaccattatataatcggcatgtgtttcctttcaacccaatgaatcagtcccatgcaaagcctggaagcctgagactttcactcaagtctggtgttctgaaggcagtgtttctgtagttgtgaaattatattgagccacaatgcactgtttcctgcactgtgacatactcatgtgacagccatgagaaggggcctgatttgccgtcagtggacaaggtgtcaagtgttatcccaaactgtttatggctgatgctggagaaggatatggctgttattaaaagcatgaacaatcactgacagtcaacccgagtcaagccagaaacaaagggaaccatcattgggataaacagcgcctcctggtttagagcagggcttctccagctcagcactgtgagcacctgggcagggggatctccctgtgcctgccgccctgagcacgggtgggatattgagcagcgtccctggcctctaccctccaaatgccaagagcacctctgcaaggtcttaccactggaaaagtctccacacactgccagtggctccgtgtgggcccaaaaccatccctggctgagaagtattgatctgaagtgtttgggttttctgggagctttctcaggtactgactcacttgaccttcgactgactcgaggcccagagaagctatatgggttcgttaaagccagcggcggccagctggcgggggtggcagtattggggtgggtacaggggtcagccgactcctagtcctctttaagctgagttagatcacctgatgaatactgggccttcatttcaaaacaaagattcagaaaatgaaaacaaatcaaaatttacagaaccgtgtgtgctgctttctctgcctgctcaaacctctgaataccagatgataaaagaataacgatctcacagactgaccaattaaactgacacgtcttgatggtacgaatttaagtttcaaacaatgtcactaaggtcaatgtacacgagccctcgtcaaaacgaaacggccgcgtccaaaccagtcctgacccgggcggctgcagcccggccccgggaaggctcctcccggcagagtgcggagacctgggaggcgcccgccaccggccaggccagcgagccgctttgttctcgaagcccacctgggcctagagaataagtgttgccccggagcgggtgggggtccccataaggggggtttgagtagttcgctccccagccacccggctgcgtgaacagccccccagcgagcgcacggcctaccccccgcgctccgcggcccagagcggccctcgcccggcctctgctcgccggggcggcggcgcgacccacgcgcccggccggggccaggggtgctcaagatggcgtcgtcacggcccccgtgcccggggccccacgcgaggccgggccccaagcgaggcgctgagtggggagaacgagcgctcgcggctcacgccaaacgccgcctctgcaggcactcgtggagaccggcagcggggcccgcgctcagctacagccctgaccgcccgcgccgctgccccgcgcacgcccgcgggcgcccacagcgccgcgcccggccccggccctctctgggctccccagccccacttccgcccgcgtccccggccccgcgcaggccccgccgcctcaccgcggtcgagcccttcttgacggcctcctgcgcgtactccacttggaagaggtggccgtcgggcgagaagacggtgatggcgcggtcgtagctcatgccggcgggcggcggccgggctccttccgccgcgactctcaaaagcgcacactcacggcccgcgcgcacccgcgactcccggcgccactacgcccgcgccccaccctcggcgccgtgtcctgcgctgccggcgacgggcggcgtcaggcggcgacgggcagcgtcaggcggcgtcgggcggacgtgatggcgcgcgccggggcggggtcaggccgaaccaccggtggccgggggtgggaggcggtgctccggcgagggccgggcgctgggtgcgagggggtcgccgggggccaccgttcggcactgggccgcagaccgttctgcagggcggagcggcggcgccgcgggcccggaggcgcggcgacggcgacggggcggacgagcccacgacgcggcgccccccgcgctcccgcccccttccccccctccgcgactgcggataatgagcgcctcgggccgcccagcgcagccggagtatccacctcgatgaccacgggctgagccccgcgccgccaccatgtccgtggccttcgcgtctgcccggccaagaggcaaaggggaggttacgcagcaaaccatccagaaggtgggccgggccggagcggcggcgctgggcggcgggtctgcgggcgggcgcgcgcggggacggggcgcgggcagctggcgggcgcggggcgcgaacaaagccggggcgcagccgggcggccgcgagccccgacggcggccccgtgcccttccccgcgtcccacgcctgcgcgccggcgggcacccggccgtgtggggggcggtccccggagagcctgcgccaactttgttggggcgcgcgggtccctcgggccggggcactgggcggtgggggccgggcggacgctggaggctgccggcccccgagcgcgctgtcccccgagtccgcggcgcgcgctgggaactgtcctgggctatgccgggcgcacggggacccctcggggccggagccgcggcgagggcttgtcgcgctccgcagccagcttcggtggcgacggcgggcggtactcgttttctgcgctcattttggttagtggtgaggggcccgggtcggcctccgggcgcacttgcgaccgcggggactgtggccggggctgcccctcttgctcctggagcgaggcgcgaacgatggaggcacggaaggacgcgtcccgatccccatttgcggggcatcgttacgcagcccggccccgtagggagcgcaccgccccctccgtatcctcgcggctacgccgggtttcagcgtgacaccctcgccagccgcctcgcctaacaaacttgacggatttgctccacaacctttcttctagctccgtaagttcggccttgtggttttcaagagacagcgtttatgtgggtttgggacaccgttatc

SEQ ID NO: 69061 - DNA, 795 bp, Homo sapiens
gcattctgcttggtagtgaaggagaaagaggtctacaccttgtccttacagcattctgtgtgggtggagatcttccaggccaacttctactcaaccttcaaagcctcactcacgtgttccgcgtctcatgctccgtcggcagtcatgtggcccttgtagcacttgcttgagctcctgagtttggcatgtgactgattattctttgctgatccccagcctctcatagtgtctgagcacagttagtgctgagcacgtgctggatcatctgtgacgctggtcccatcagtggaagcgttttgagataagcagatgcgttcgtgtcctgtgacttccttgacacattcccacaacccaggtggcttcaaacaacagaaatctattccctcacagttctggagaccagaagtcccaagtccaggggtcagttacctgctcttctcctggcttctgatgactgcgggcagcccttggtgttctctggcttgtaggtgcatccagcgtgtctctgctttgatcatttttttttttttttttttttgagatggagtttcgctcttgttgcccaggctagagtgcagtggcgcgatctcgggctcacaacctccgcgcccccgcccacgttcaaggttcaagcgattctcctgcctcagcctcctgagtagctgggattataggcgcgtgccaccacgcccggctaattttgtatttttagtagagacggagtttctctgtgttggccaggctggtcttgaactcccgaccccaagtgatctgccccctcccccccttagcctc

SEQ ID NO: 69062 - DNA, 653 bp, Homo sapiens
caagagcgaaactctgtctcaaaaaaaaaaaaaaggtgctgaggcattggggctgccagtggttttatagggctccagggctgccatgccttcagctgagcagctctggatttgaggctttccgtcttacccaatggtgcaggagcagaaagacatcagaacagactcccactaactagaatcatcacaggcagctctgggaatgagaatgtgacgtgttcggtcaggctggaacagctttcctccctcccccacttcctcgctgggggcattcgggaaatctgatcattaactagctggggacacatggagaacaggcatgcagatgatgatccgttgtcttcccctgtggcagtctcccgagtggctttcaccacaggtccgatgctccgttttgctgcccaaggaattctgccttgtggccttgtggggcacaggctctctagtttctcttcttcatgttgttttttgttgttgtttttgagatggagtcttgctctgttgcccaggctggagtgcagtggcacgatctcgctcactgcagcctctgcctctcgggttctagcaattctcctgcctcagcatccggagtagctgggattacaagcacgtactatcacacctggctaatttttgtatttttagtagagaca

SEQ ID NO: 69063 - DNA, 1762 bp, Homo sapiens
agccactgtgcctggccgaggctaattttttctctttttttgtagagatggggtcttgctgtactgcccaggctggtctcaaactcctgggctcaagcagtcctcctgcctcggcctcccaaattcagatttgtttttgaaacagggtctcacccagactagagtgcagtggtgcaatcacggctcactgcagccttgacctcctgggctcaagcgatcctcccacctcaccctccaagtatctgggactattggcacacgccaccacacccagctaatatttggatttttgtagagatggagtctggccatgttgcccagcctgggtctttagatttttttttatagattgaaacccatcaccctggtcgtccccgctcccattttcttactgtagcaggctcgggggcagatggtgtttgcattggctcccagtggggccagcttggaggagagccttcctgcatagcaggcccagcataaggctctgatgccaggcctggcacaggcccggccgcagcgatgccagtgtgtgactgaacaaatgaacctttggccctgtctacgttgttagccccaggcttggccagtggcttctggaaagtcgttcgctgccccgcagagatgtgagcagaggttgtttgcttgctgttgtccctcctaccccctgtccgggctggggtggacgtctgtcttcctttcactcattactataggggtgtaatctgtgtcttgatctcttttagggccagtatggaaattaccagcagtaagggacacacattctggctggagcccttgtggtagcgtgttcatccaggggccggatgggctggcggcagctctggtgaattgtgacatgttggttacctgttcgcccagtgccacgtctgcatgtgaagcgtgctcatttcatgctgggtatgacgccgagcgcacaccactggcgtgagacagcgcttggtggtgtgatacttttggtgctgtgtatagtattgtatgtcggtacacggagaggtatcctttttttgtcccccgcccccttctcaatgtttctagctagctttgggggtcattttgtcatcagagcattctgtgcccagggacaggacagatctcgaggacaccacagtccacctgttcccgtcaacagacgttaggtctcattttcctcctcatgcagtgttgtagtgtgggttgtcaacttttctttaactggctacgccacagctggacacacatgcagcccctggagggcagcctcttcctgtgcctcgatggggtgggtgggagggcatcttctgtgcgttgggtcagtttctgttacgtaacgaaaaggataaacatctcccacgggagaggccacagatggccacttccagagcttgcccattgcctgtctctcgccaattccgtttatccaaaaaggtacatgtttttgtattaaaaagtaaacagggatcagtgactgtattccaaataaatatgaatccctaagggccgtggacaaattgcctaacccagggccagcggtattgctgaaggaaaggggcagctctctgggaagtgggccctcagagattactctggctttgacccttgtttagctgatggtcatttctgggattggaatatttaataagcccaattctaagttgataggtaattttaaatattcaaaccaaatcttcccaacagttggcaagttgtttattttatattatttcttccaggacctacttgctcagatctccaagcaagc

SEQ ID NO: 69064 - DNA, 2209 bp, Homo sapiens
tgacaaattcatattggtatgcaaaagctcatcacccattaaggtttgttgttgaatcaacagtactcagcatattaaaacagtacatcagaactcatgccaacagtctttatgatgggattaaggtggacaagatctcctaagatctgtgaatgggattaaggtggacaagatctcctaagatctgaaaagaaaccttaatacgctcatatggttggagtgttaagtgaacctctgattttgtcagggtttttctacgtgtaggcgtgaatagggggcaccccttcaaaactgtacaaagaagacgactgttttccatttccatttaaacatttttagccacttcatttctatttattgaacaggtcaaatttgtcttgttatttgtgagtacagtacatttaaaaaacatccttatcggttatttttttttcagtcggagtttgacgtataaattgtttatgcttttggtgtaatctcttaataaactggttcttcaaaaatcatcctataaagtgagttttcatgaagttaacgggattttggtgtgatgtgttttgcaaatacttattaccgagaccaggtagatcgtcacctcggctcccgggcagagttcgcgtgcgtccgcaccggattccccgcggcggcaaggcgaagccagggtaagggcggtggggacggcgccccggggctgccctgcggtccccactgcctgctctgcgttgccccgtagcctcctcgggcaacggcggtgtcctcgtcagacccgggaggttccgcaaacgccggaggggtcagagaagctgggggaccttgggcaccgggtggaacgggcggggcggctgtccttgtgctcgggcagcgagggcgccggcgagaagcgcggctgcagctgagcgctccgcatccctcctgccgttgctcctgcttccgctaccagggacaaggtcgcctctcggtccgtcggcgtgttttctgcacctgcgcactgggcaagccttgggcttccggagccaaaaggccccggaagtggtcggccgcttgcgacgctccggaagtgacgtgctttcccgagccggtgagtgcgggagcggggagcggggagcgtgggcctggggggtggtcgcggcccgggcgcaaggaggggcctcggcttgggccgcggggtaccggggcgctgggagcgggagaggccccggcctaggagctgagaggcctggagggctgccgggctgcgaaccccggcgggaccgagcgctgcggccctggagtagcgagcgctcgggcggtggggagcggcgccttgctccccggtcctgccccactctctccgcagaaccgcgttttggggtcagaagtcttgtcagccaccccggtggtgctctgtcacgggatgggtgccgtgtgtgagttccgagtcaagttgttaggaatttgccttgatccagcgctctaagtattaaacattttaaagtgattattggcagtatacagttgcacaaaacaacataaatatatacacatttggatgataaaacaacaataaagttttgtattgtaaacgcgcctcagggagacgcatttccagataattcactgtccgtggctggcttctgcccagtgagagcgggttacccgttctattcccatttacgttctcgtagctgtggataccgaggaacggcgttcacacagacctgtaggtgggaattagaggggttgttgggcagtgtcactagagaaatacctttcttttgtaaaggggaggacccattataaaagggggacgggaaaggagaattcaaattgttttaaacgcaggttcgtcctcaggcagttctgttttagcagagagaacgtagcgaaacttgggcagaaaatggattcctttgaaattatcctggccttagtcccttgggaagtctgtgtaggcgaacctcagtgagaagattcctgccgtaaaatgcaggtgtcagcagcatgccagggaggccagaggatactatgtgactttgggcaagtgactgaacctctgtgagtctcagcctccactgctttagatgggcataaaaaatgtaaagtcaagaatcaggtttccgctgggcgcggtggctcacgcctgtaatcccagaactttgggaggccaaggcgggcagatcacgaggtcaggagttaaagaccagcctggccaacatggtgaaaccccatc

SEQ ID NO: 69065 - DNA, 989 bp, Homo sapiens
ctgagattacccctactaggtcttgatgtgtgatcctttctgaactgctggattcaattgggtaatattttgttaagagttatttgcatctatattcatgaggggtatggtctataattttattttttcttagtgtcagattttggtactagcctcataggatgagttggatagtgatctcacttcctctattttctgaaaaagcttgtgtaagattggcactgtttcttcctggaatgttacatggaatttaccaggaaaacaagccgagctagagttttcctttggggagtgttcttttataagaaatttaacttattgagtagatacagggctattctagattgtttattcttgtgtttctttaataagttgcctttttcaagaaatttgtccatttcatgtaagttgaatttgttactgaatttgctggcatgaagtcgttcccagcattctcttgccctctggctgtctgtaaggtgtgtcctgataacccgttgaacattcctgacagtggaggtttgcgctctctcgttttcctgatcaggctagaagtgtgttagttagcttgtcttttcagtgaacctgtttttttctgttacatgttattgttgtctctttatttctgctctgtattattctcctccttctactcgacgcttactttgctctttctggtttcttgatttggagccttaggttactgattttagatctttcttctttaccaaggtagccattagagctgtaagtttccttctaaacactactctagctgcatctcttaaattctggtatttcatggtggcgggcgcctgtagtcccagctactcgggaggctgaggcaggagaatggcgtgaacccgggaggcagaactttcagtgggccgagatcacaccactgcactccagcctgggcgacagtgcgagactgtctcaaaaaaaaaaaaaaaaaattctggtattttgcatttccattataattcagt

SEQ ID NO: 69066 - DNA, 1870 bp, Homo sapiens
agggttttaagtatggtggtgaaacggtcggggatgcagctggaggggtaaattggcgctggattttggttggcggtgaatggcatgcaaaggaggtggacgatattcaggatttggtaggacagtggaagcagctacgccccagctatcgcacggtccccagcatttgtaggaaaaagcccccagggctttgggtagcctcgcaggcccgcactgccgccaggacgcagtgcacctgagggcggagcacccacgccccgggccacctgactcactgtttgtcaactctgctctctgcagccacgccctttcctccttgcctccctccccttttggctcaggggcggcataaccccgcctctctcctgctgtgactggctgtccttgccgtcactccgctgcgtgggcggggctctgagggggcacaggtagaggcccttcgcgaagggattagcatagtcccaccccccggcgcgagcctcgggccgggcgctgattgggcaggcagcggccgacgcggcggcgccgggcgcagcgagtggcgggcgcgggctgtcagtcggcgaggcggcgggccgcacttccgcctcggtgtcagtgggtcgcgggcctacggggcgggggcggggcggcagtgagctcggccggcaaccgagggacccgcgtccaggtgagtggcccccgccgccgccacgcgaaggcccgggaccccggcgagctgcggggcctgggccgcgggctggggctggagccggggcggggaggggagggcgggccgggcaggacccgggtccgcaggccgcctccagccccggccccggccccggcctcgacccccactgggaggcgcgcccggcctaggccgcagcctggcgccccggggaaactttgggaggaaagttccggccgggcgtggggcctgggcctgggtcccgcggcccccgcacccttccccctgcggtcgcccggcaactgcgatcccgggacccccggcccggcccccccgagatccccagcccccctgctgccccgctgagcaggaagtggggacgggcgcacctgctcgcggcctcgccctctctcaccacctcaccgggaacagggaaggatttcgtgcgcatttagggcgatcctgtaggtgaggagggcgagttccgccgggaagaagggcagggagacgcagtcccactccgaccctggccttcttgtcccgcaggcctgtgtgcacgtcgtcccggggagggtgcccgcgagcccttgtccgttcccctgggctctgtttttgtttttaatttataaatcttagcagactacacacggttgagaacttgctacctaaaacctatctttggtaatgtaattttaagaggttccttctttcgccagttatattttggtactcagaagaatacgtctttagactttccaagtttataagcccagaccaagactgttaggtcgtcacagcacctcagcctccccgcttcatgggaggaccggcgacgaggcagtgggtgtcggggtgttgcaggctctcctggggtgagggtcacctcccaggggcgtttctatctgaaccgtcctctaggacaggccctggcctagcctggctccggcagctttgggatgactgcccggaacacctggagaaggggtcccattcggtttggttggatagacgtttctcgaatgcctgctgtgggcctggctgggtgctgtgcggccttcccaccagctggatgtgtggtgaggacagcggagagttgaggagcccggaactggtgcaggggccacatgctgggaagccacggccgtccctgctgcccttcctaactcgtgcccatggcctcttttctggctgtcagcctca

SEQ ID NO: 69067 - DNA, 1680 bp, Homo sapiens
atatgcaaagcacggagagccacatgcaaagcacgtgttggcaacatagcacatgctgctgctcaccaggctcacctgggatgacggtgtggatctgagtcgctggccacgtggcgacgtctgccctgccctagtgtccaaggacggtgaagggtcgggtgtcaccaacacctgcagccttctcaccgggcgaggcttgggttgtgggaagtgggggacagctggccctggtccccagccctgatggacatccggcattttgctggtgcaggctgtcctgaagccagaccctcccgagactgctgtctgggaggagagcgagccagcggcccagatgccttggtcgtggggaggtgcctgtgtgtaccgtgagtttcccagcctccggcggcaagtgggaaagccggtacaggaagagtggtgcctgcaggtgctcccggtcaccaccaccccttccagacgccatccccagagctcacatctgtgctggctggagggtcagggctccactctgcccgacaagcagtctggtgcaggggacgcaaatgtcagacccagcagggcccggcacttggagaagtgccacatgccaccctggtggcctccgggcaccccactgtccacgtgtctgagcatggagctgtccatctggggcattggccttgaacaccaaggacctgccccggtttgccaggcacatctgaacacaaggtcaggaggttagaacaggacaagagaaacgcctggaggcctcctcacaaggcatcctgctctttggggaaaatttctccccagcagaaatggggatttacaagttttacaggtccttgtcatttccgtgaaggaaaacaaagcaaagacagttacgagttctggtgagcttcccactgagctgggcgacagagttcaggtctccaagtgccgggccctgctgggtgtgacatttgcgtcccctgcaccagactgcttgtcgggcagagtggagccctgaccctccagccagcacagatgtggacgaggggcgcagctggaccccagaggagagttcgatccatctgcaggaagtcctgatggtcccagttttctttgatggccacatctggacttgcctgtgtgtaaagtggacacaaaagacggggcccctgccgtggccgagaacgtggcggtggctcctgctgcttgccaggcagcacgggagctgggtctccctcggacccctcaaaagatggttcctcaccgtcttctacaggctgatgtaaaatttctgtgaggcgaaagccacatttgccagctctgggtacgaagttcacttcacagtcggtccttcgcttggtgagctttgggagccaggctgccgtggccagatgtttaggagcacgacggtggctctgcagagggcgatggtgtgcagccgggctttcctgtcgcccacaccttgcaggccctcacccctccccgtgccttcacccagctcctcctccagtgccattcatcccagcaggcagcaaggacatggcagctgagaaaagatgccagcagaacgcacttattttataatatttaacaactgtcagtgccaaactgcattaacacagtcatcctcagatttttcagagggctgtgtacacatctgtgaaaataaatgttaacctctaagatttgaatgaagattctctgaag

SEQ ID NO: 69068 - DNA, 2674 bp, Homo sapiens
gtagatggaattacaggcatgtgccagcatacctggctaatttttgcatttttagtagagtcggggtttcattcaccatgttgcccaggctggtcttgaactcctggcctcaagtaatccgcccgcctcggcctcccaaagttctgggtttacaggcgtgagccaccgcgcctgagccctctaagagcccccgcctggcgtcgctgtaggcaaatcccaaagaacgtgtcccttcagcagccggctggggcgccacaaacactatctgttgtcttcgctttagtttgtgtcaaagtgactcaaagttacacaacactggcgggcgactgccgcctttttaccctgtggcctttcccatccaggcgtccagagggtgagcccctgccctccaggacccctcccttccaggaccctacccgtctgggactcaggccttccctgactcctccctcccggactcacccctcccagatccctcccctccgggaccctctcccctcccgggccccctcccctccgggaacccctcccctcccggactcacccctcccagatccctcccctccaggagcccctcccctctcgggacccctctcctcccggacccaccccttcctgacccctgccctcccggacccctgcgggactagatgtatacagctgagaccatatcacggttctcaccctcgctctaccctcccggacccctgctctcccggacgcgtggactccagctcccgcctgggtccccaaagcgctgaacccatggtcacttctatgcgtagccctggtgcccgccgcccacagccggaccgcactcctcggcctccgcctaacccctggctcagccacacgagtgacagctctgcccgcccgggcgggcgacgccgaggggtgggctcggccccacctgagcagttccccagcgcccctctgaaacccgcctgtggtccctggcgccgcctctaggggccgccgccgctcccctatgacacagcaacaataggggccgctctggtccaagcgccctgcggcccgcgcttccgccggaaaagagccgccggcgcgggggcggaccggggaggagcgagtgcgatggacggtcgccctcgccaatcgttggcaggttagagccggctgcgcggcttacggggctcaatcggcggcgagagcggcaggcggggcgggccgaacgcgggtttccggcggggcccggcaggcgccgaggaggaagagcgagcccggacggcgcctctcgaacgagtgtgggcgcgaggcaggtgcgggagtcgccgggcctggggcggccgggggcgaccggaggcgggggcaggggctgctggaccaaggatggggcgggggcagccaagacgagaaggtggccggcgcggcgggtggggcctgcgggggccgggccgggcgggggttctggggtctcgggcgccgccccggttccgcctgcggctctgaacgtggggctcggcgggagctcgggcgggtctgccccgcggagcgggtcgccggggtggcgcgtcgaggctggtgccccgcggagacggcgtcaagcctagggccggccccactaggcttggcggggctgccccggcccagcgccgagtgcgggcggtgcgatcgtcgtgagcggggcaaacgcggaaaggcagcccggcgtgtctgagtctgccttaggcagctctgggcgcaggccccctgctcgcaaacaccccagggggcgggagcttgccggaccgcaggcgacagtgaccgccgcgtctcagcgtcctctccgcgctttcaggatgacgacctcaggcgcgctctttccaagcctggtgccaggctctcggggcgcctccaacaagtacttggtggagtttcgggcgggaaagatgtccctgaaggggaccaccgtgactccggataagcggaaagggctggtgtacattcagcagacggacgactcgcttattcacttctgctggaaggacaggacgtccgggaacgtggaagacgtgagtgtccctgagccgcagcagcaggacaggcgacttctcgggccctcggagtcctcgctttggagttcgcggtgggggcttggccgcatctggggaccgctcgtggggccgtcatcgactgccctgctgatgggtcgtcctggtttccgcggtgacaggggcatctcggccactgtgtatcttgaactgtccgtgtgaggtgcctgggttggaggtgtggccctggagagcccggagctctgtgcctggccttgaactgtccgtgtgaggtgcctggggttggaggtgtggccctggagagcctggagctctgtgcctggcggcttcactcagtcttctttgtttttcaaactcttagttgttctttgttacatttgagagcagttcagcgttgactttttaactactctgggaatgttgtttccagcacgtctcagaaaccccgttgccatctgaaaggcccctttccctgctctctcccccggccttgcctttcatgggctgtctctgaccctggcttctctgccttgtggagaccctgccagcgaggggtctggcggcttagctgccccttgcgcaccccacccggttagacccagggctcagtacgctctcctgagactgggcacagtgatgccatctgcgccactgactctctc

SEQ ID NO: 69069 - DNA, 1089 bp, Homo sapiens
ggctggtagtgggggtgatggtttgggtgggagtaaggtgatggtggaggtaaagaggcagaaaattgctggctgatgacatggagcccccttccctggaggagaggtggggtggcgggtaaagggtgcagggagaacatgggcaggctaatgttttgggacactggtgggtgaccaggtcctggtaacagaggctgtggttccatgaaagattcccagtcacccctgcttgcacctgcagggagagctgagctcagtccacacccaggtgcggtgagtcaggggatggcaatgtcttccctgcaggccaaggcaagccccggctcccgcgcccttcctctccttggaggcccatttggctgcctggtgggttccactccctgctgtcacgagctgcgtccccacttggcacttaatttcccaggacaagttagctctgctggagctcagcacctgaagctgtgctggcagcaacaagtgcctgggtgggtccccagggcccacagctcctggcaaacagcccaagtcctccggctcaggtgactgtgccactcctcccctcagacccaccagccacatccgaaggggcccagggctcccgcctctgctcggcactggccgtgagaatgggagtgaacctttgtcctgtctgagctccacccgcctccccacctcccctgtaaactggagcgtggacagagcagtaaggccccacagaaggcaagggcgggtcccaaatccaagcgcatgaaagttgggctgctcggttgcaggcactagatgagccctgccagctccctgctgggggtccaggagcctcgtcacacactcagcctcagctgcaccactctgagtggcttctgtccagccccatgcctgcactgccaccctagggtgttacaccctccgggcaccacgctgagtactggtttgcgtgtttcccagctgcctcccccggaacaggtgctcctgaggccgggctggggtcccaccctgtgttcccattcccaggaaaacggcccagcgtgtgttaggcgctcaacatacagctgctggctgaaagaaccaacgaagggagggaggaaagga

SEQ ID NO: 69070 - DNA, 4731 bp, Homo sapiens
catggcgcccggacgtccgttcaccagggacaccacgatctgtgggcagtatgcggtgacgccagtgtggccctagcccctgctcagcactgcccctcccgggcccacctttcccttctccagccccgctcggcactgcccctcccctacccacctctccgttctccagcccccgtaccgccctgcccctccccggcccacctctccgttctccaggggcacgatgcgtgagtactcggtggtgcagatggccgcgtcgtcccgtgtgatgcgctccagcgtctgtggcccgaaccgctccagacagtccctcttggaggctgcggggaatggcgggaggggagggcgctggatcaccagaaaagcctgggtccccgcggtgcccgggccccttgacgtctccgggccttgccactgaggctcccacaggccaagaggccgcgtgacagagaccacagctcactggctgaaggggcctggcccgttggactgcactgccccccaccgctctcccttgcacgctttgagtgcgagtgacccccctcgacgaccatcctcacccccttccttggggacagacgcctactgcccatcactgacccgcccctcccccattctcaggccagggaattttgggggacacgtgaccaggcctgccctattggggaggagcacccactcccaccagcatgactggtcagggtggcacggggccagggacggccagcatccgggctaggactccagtactcttgacgcaggtggctaggctggcaggaggtgaggtgggagctgccaggccccttttgtcaccacgggagctgccggtgcatgaagccatccagaggcagccaagagatggcaccagagattcctggcgccacagcccctggacttggctgtgcccgacgccagggacaggagccaataaatccccatgagccttcgggtcctcgtctgacagtcatgaccgcagcagccgggtgtgagggcagggctgggtattcggagaccttcagaagcctggtcacggagggcctgcccagggacccccctgcctctccccccaggccccacggcggcagagactcacaggcaaagaactgccagggctggtaggtgcggccgaagtccatggaccgctccagcacccagaggtccggccggggtgagttggcaaacttgatgaggacgtaggccacgtggaagacctgtgggccgagagggcgtcaggggagccaggggcgcctggattcccatgctcccaggggcctggctcattttctgcccctcaggtgaggccacagcaggggatgtggcaccctcgccgcacagggggcacctctgggtttgcctgtgtggggcagacgaacccaggggagagggctccccagggatggagatgagcccccgggaaccagccctcctggaagggctccccgcctgggctcgggaccaacgcgctgcctcctccccttccctgccgcaggagtttggggttcccccatggtcctgcaagctctgtggctgcagatggagcaagctagggagaggcctacctgcggcccaggcagggactggccagggtggaggcaggaacacaccccagtgtccccacagccctcacgtccagccaggcctggtggccagacagtggtccctgccaccaggcaggtccaaaggtccaaccccctagtccctctgacaggtcagcagctcctaagatggggcccctgcccccacctcacaccgggcacccctccccaggctctgctcagtcccatgctgaccagcccacagccaggggcccactgagcccccagggactgggctgcagggagcaagcggggctcagccttgcaggctgggggccctcttgaagctgagtctgcctcggagactccaccagcccaggcactggggcagtagcactgctgtggcccggtgcacgtcagggcagccctgcccagggcagaggaaagctgctccttcccaggcctccgaaaccccaagcccctgccccagccccaccttggctctgcctactttctccccgtgtgtcagcctgacctccacccagggacagcccatgtgtctgtgcctcggggctgggggacagcctggctcagtcttcacaggacgctttgtacacctcctcagagaagccttccctgactgcagcccctccccctaaccctcagctgcggacatctccccaggcccaggcccttctctccgcacaggccaggcctgctgactcccctcaggcctctgatcagcctgggcttccctccctccctccctccctccctccctacccatcccctgacaccctgccctcaggactccaggcctgagcctctcctgcccccagcagtcagtgctacccagcctcatatctgcacccacccgacatgaccgtgggcctccatgcctgcacctgggggtgcacacacacccgcccaacagtgaaacaccgtgggggtggctcctccatggacccaggccacaggccccctctgaaaaggtctctggtccctaaaaacagcccatggcctcaatggcaagaggctgcacccaggagcagggggggtcccgaggcacacaggagggggcggtgcccaagcagcaccccgccttcacactcatgcaagccagggctcagcccctgctgcagccaagtgctcccacccgccatagcctctgaggggagccctaggctccccctacctgggggcaaaggagggaagttgtctccaggccctgtcacaagcctggaggctccaagggagggtgagcccctccccagcccctctcaaacaaaggggaaagggctctcccaggcagaggctccacagggacctggcagggaggcggaggaaacacgaacctctcccccgcctgtgcgaggaggcccgggtgccgggggagagaggcaactcatggacccacagcacaggtgtggcctgcctgtcccggcccacacctcccctgacgggcccacagggtccacgatggagaccttgggagacctcagtactcagcccaactctttgtgggcggcagtggggaccagcccctcctctgctcacaggtgggcacccaggtgggccctaaaaaggccagcaggcctccgagggtcatgccacaccccagggccacccaccacacctcctcgggaccctgacccgccagtgcccactcctccggagagtttctccccacagcaggtacgcccgggaacagctgggtgctgttggccaggtaggcctggaagcctagggccccaagggggagagtggggtcccccagagctgcacaagacctacagtcaccccactggactgagccggactgagactgctgtggggtcccccatgaaaagaccacagacccctcatagcttcagcccttgggggcaccagctgcccagactccaggtagggggcaaggttccaggactccagacatcccaggtccaaatcccacccttctcggagggcttggcgttgcggggactgtgggagccaagcgcagccttccggggttggggcggggcacaggcctattcaccggctgccaggctctgaggtcatcgtctacctccctgtgggtggggggcagggagacatgccctgcccagcagggaggggtatgagcctcttcagggacagaccctatacccagccccacacccgggcctcagcagccccctgtgggcctgaccacaagcattccagagagccccaggtgggggccagtggcccctgtgcctggacagggaaggacccgctagaggtggacaggggcagggacacaggctgttctcggggagctggcaacacagcccctcccaccaaaggctccgaaggagactaaaggtcccgactgagccccctgggagccgcccccgctgttccctgagtgcctggatggaggctgcgctctcctcggcccgatctgtcctcctccctccccttcagcaggccagtcacatttttcccagctgagagcacttgcacaaatattgacttgaagacactgatcagcaggatgagggggacacagacacttcgccctccccacccctgggatgcacaggaagatcctggcctcctgtctgtcccccatcccaaccatctgtctgtcagacaggggccctggacagctgtcctcgagggcctggtggctgcacagatggtcacaggaagggaagcccgcgctggaggactcccatctgtctctgacctggtcgcggctcccagggccacaccggccgccctcgccatgacccggagcgagcgcagacccctggcttcgggaccgcccttccccctccacgccccgctcagctcagctgccagtgctgacctttccgctgctacatggttctgtgcagaaagaaaaaaaaaagtcttttaaagcaaaagccaaacaaaagctgcctgagttatttttaaaaatcggctattttggggcaggcacgtctccaggacggcagccggacccgcctctcagccactgcaccctccagtccccactacccagcttgccctgggagggccacggttcccagaggaggcctctgcccggtgaccactgcctcacagggggtgggcaagagccccaggagtacggggcccaggacccagggcccaggccggctccaggcttcaggggttgtgcggccctggagcggacacttccccttcctgggcacagggcagtggg

SEQ ID NO: 69071 - DNA, 714 bp, Homo sapiens
actggcgctccgaaggcaaagctgcggaggggactgagtaggtgctagggtctgggcagcacggtgaggactacagagaaactctggtggggctttcggggaccctggggatggcgtggggttgttggctagcagcctcctgggctgaggcacccacctcaccatggggtgggctgtggctggaacctccagaggaggggaggcggtgctgtcctgtgcccaaacccagctctgccctgacccatcttgggttggggagaccagggccaggtccaggtgcccgctgtgctgggtgagggccagtcagccttccccggcagcctggatcacagcggtctgtgactcagcccccgccctgcaggaagaagggcgttgtgccaattcccggggcaggaaaagcccctcctagccccaggcgtccgggccagcaccctgatcgcactgctcggacagggcaccggggcacccagccccctcgatgcccagagtcctgggccagcccagcccttgcccgctcctgctgtgtgcctcccctcgaagagaccccatctggaaacgtagataagccccacagcaggggcggggcggcagccgggagcatctccactggcccccagctgggtgaataagcacggcggccacacaacctatcaggggtccggaaacgtgccccacacagacacctctcccagagggacgtggagtggaaaagcc

SEQ ID NO: 69072 - DNA, 760 bp, Homo sapiens
cccaaacagtttcgtcttcactgagctgtgttgtcagaggccaatgtggtggctcttgtttagaaacagacagaaaacaggaagcctttggggaccaccagggcctggggggtctaggtgggtgctggggcatctctgtgccctgagtgccaggtctggccgtgcagccaccaagggcaagcatggcgcgggggtgcggggagaggagcggccccatccccaccttggcatggcagccccttgggccgtgtcctccttccaggacacgtagagggagggttttgccgtctatcctgtgccaggggaggggagtggtgcctcccaggacccccgccgtaccccccagggagccctgctcaagtggctgcgtctggttcagcccgtgcacctgtcccggccgccgagctctgtaactagagcctggccgcagctgcacttcctgtccttccctggacaacccactgaccgtcctggggcactggccacatggctgagtgcccaaccaggcccagggagccaagccagtggcaccctggaccagtaggcctgcccagggcccaagccggccagccagagagcaggcagtcctgaagggtgaggcagcctgggcgcgctgggcctccggcaggtcctcctcctgcggtgctcctcccatttacagaggaggaaccagcccgggaacccagactgcagacagcatggccaaccccacagtcctccagaccccagcactgggaccttgggcactccacactggccc

SEQ ID NO: 69073 - DNA, 1239 bp, Homo sapiens
ccctacccgcaggccgcactgcaagctttgatggtggcccccaaactcaagagctcaatgacagcacggcgcacacaggtcctgctcagggtggggccaggggctcctggagaaggtaggtgtgggcggcgccctctggctgggacagccggacctcccagggaaggctgcttgctggtcaagaccctcccagacacacgagcagcagagggaagctgggtggaaggttgcgggtcaagggtcagcctctactcttccaggaggtcagggaagcacctgctcagtccctgcctgggccagcgttggtccagttattgggaggcagttccagtccccattcggccactcactgagccacagaggacagggttgggaaaaccaggctcccccacctccgctgcggagggtcccgtgagaacagagctaggaaacagcagaagggccgataaggacttccccttccaatgagtcaccatgctggcctggctgcccagtccccaccttcccaggctgggccggccagggatcccctgatgcccacctggggctgtgagggccacaacctccccctgccctctgcctgctccagctgcccagcagggttcaccccgacccccatctgggatgcccagctaatgtgcatctcctacagagggtccctgagagcccctggcctgcagccttgagaacacactgcccagccccaggccccatagccttagtgagccccctcagatggagctgcggcttcatcgcctgggcacctcctgtgcctgcctgccttgccccaaccgcagctccactccagaccggccggcaaggacttctcacacgcccaatccgcggccagggcggtcagcagacccgcggctctcagatgaaggaggcatccaaggtcatacccgtccagctcacgtctaccagctgatctttctacatatctggcagcctcagcgggcactcactgctcagagctcgagactttggaagcgaagggttcacctctattgctagacatgagctgggcgaggccggctggtttctcatccaagctggctctgaggcatggagcaccacagcccacagctgccactgaaactgtggccacttcccaggctcctcgggccaagctcacagtctcaggtgaggggggccagcacgctgtgcccattttaaagacagcttgaggctgacagagggaagccacacagctgaggcagaggagaggggcgttgacta

SEQ ID NO: 69074 - DNA, 5531 bp, Homo sapiens
atctccagctactcgcccctgccccagcctctccttccgggaaggcagaggtaccagggaggagacagctcaggttacacaggccctcagggcccctagactctccctaaggtggggctgaggtggggaatgggcctagagcggccggttgggagccgttggagctgactttgctgctcctcacccaaggctgaccccaggcccaacctaagtctacagggccccaagagccttggttttcaggtgaggtgtccatgcatggagtccaccaacagaacccgcctacaggtttaaggcttgttggggaggggacatgcaccccagggggtcttcagggcctgaacccacatctcccagggagactgaagcccccggaccctaccacctgctgggcagagatgctgcccctcctgggagccacgtgttcccagccccagtcaaaacttcgcagctggccctcccctactttggaggtctcctcgagtccctagactcctccgagaggggctagtgggagcctcaggtggctggcccctcccaccccatccagaggccaacaggttccagcctgtcccgggtagggcggagctgcgccccctccccaccggcagcaggcggcggaggccaagtcccgccctccccgggatcccggacttggggccgccagggactgggcccggcccccctcccgccccggtcaccgcagtcgaactggaccggcgcccagccgcccccgggtccatgccggggactttaattccgccttcccggagggacgcgaagtttcccggccgagacggagcggccgggtcggggtgccttcttgggcccccaaaatgcggaaccagagagtccgcacctggactcgccccgggccacggcgctccccctggggtcgggccggtgttccgggtccgagtgccccgggaggaagccccacggcccgcccctgcgctcacccggatggtctggttggggtcgccgccggccacggggccccctaccagcttgcagtaaaggtcctcggtggggcgcggggagccgcgcgccggggcctcctctccgcaggtcgcggaggcggcgatgcgggcgccctcggccaggttgaagtagggcgggtgcaggctgaagccgccgcccgcctcctcccgcgcccgcgccgcgcccagcagcgccagcccgaccagcagcagcggcgcggggccccgggggccgcgaacacacagtgcgctccccgcgcagagccgcttcgccatcttcccggctccgggccgcgtccccgagctccagggacagcgcgcgcggcgggagcccggcgggtctgaagccaggcggccggcagggctcgctccgcccgcggacgtcaggccccgccccggcccgcccgagcgcccgagccccgagccccggggagaggtccggggaggcggggtgggggggggaaggagagaggagggggaggggcggccgggcggccttaacccttcggaccccggcccggccgcctcccggaaggggcacctgctggcctcgggccaggccgtgggacgacggcgccgccgggcccccagcccaggtcgtagctccgggtcccgggtgggaccctagcgctccccacgacgccctggcccccagagcgcccaccagctcctcccagcccaggggcccactctttgttcccctaacttgggtgcaccactcggctgcccccgctcctcccccaacagcgtccgtcctgctggctgcgggaaggtgccctctgcacccgcgaatgaccatctgcagaggaacggggcagcctaggtgggaaccccctgcttcctggggcagccaggtcaggttcaactcggcctggctcccgcctgccccagcagggcttaaaaatactctcagatagggaaataggggcaggagggactggcctgcagctgcagccccctttagaggacgggggcggtgctcatggccccacagccgccaaattggctcttaaggaggtcgggggctctggtcacagctgctgagcacctgctgggtgcctggaagcacctgtgctccggggcccggtggactccaccagctctctcggcctggcctccaacccgctgcacagccgcgcacgcgttcctgccacgatcggcggctcgaggacgcctggcaaacagcacaggacctagaggccgagatcaggtcttcgtctgcctttgggtggctgcggccctgggtctcctacttcccttgggctccggggccaaatctgcctccagggaagccccgagggggtggcggcggggtggggctgcagctgccgagctggcagcaaacccccatccctgagccaggccagctgggcgggccatggtcccagatgggctgtggggctcatctctcgctgggttccctggacagtcccggggggctgggtgggtttgtggggcactggccagccggttctggtgggggttctgagctagcagctgtccctggagggtgcacctccttgcacaccttcctggcgccctggcctcctgcaaatctcaaatcccaagagggtgtatggccctttctctacggagtcgggagggcgatgggaccctctctccctcctcctactttccggcccggcaattcttccataacttcactattagttctcccacctgggggaggggggagaggaggcggctccccttggcaggagaagctccaagtgggggaggggctggctggagagggggcggagacatcaaggaatctgcagtccaggcgcagagtccggctctgagctgctttagatcccgtgtgaggcagagagtggcctctgggcagtagcgggtccccaggtgggggcttggccccaggcagtgtgctctggctctgggctcccccttgacagcttggggctctgacagcctgggggactggaggtggagactcctgagaccctgagggcttcttgggatccctggagggtcgggtggttggaggggtgggattgcgagtggcggggcagggggagaggtgggggtggggagagcactttaagcctcctagcggccagatcaggccaagctgccaggcctccgctgtcccccggcactggccaggaggggagcgggggccggccctgagaatgcgctgtgtcagccggagctgccagcaccagcagggttaatcaccgggctcactgcttcccggcagacagctgccccgggagcaactggcaggcaggcgggcagcgcagtggacaagagaatgtggcccaggggctgggtaaagagcccacactctgcccccaccctgtgtctgctggtgcacggactgggaaggaggcagctggggcaggagctgagcgtatggagggcgggggggctgtcccagccgggctacacacagggggttggggaggtgagcagggagaggggcagctcatctctgcacacccccacccctgctgtctttgtcatggttccagtgagtcatcaccaaatggaccagcgagcctgtctccttgtctttctgagtcctgcgcagcccagccacctcttctatttacaaatggggaaactgaggccaaaaaggccagggtcaatcaagagcacacaagttagtaaagcaagaggaagtttgtccatcattcatttcttactcctatttactgggcatctttcgggcacccgcccgtgacgtagtcctcctccctgcaacaggtcagacggcaccccacccccaaacacgtcctgtcctgaatccacaggagggagctgcccagtctgggagtggaggggagggtaaaaggaggtggctcgccaggggagggccgtggaggagcctctgtcccaccaggctctggctgccctccagggacaatccaagatccagagcccctgcccacccagctccagggtgatggagccccagaggaggtgggtcgggggcaggggtcagtggcagcccgagagaagtaggggcactcctggccctggggaaggggtctcagatcctcccccagccctgggacaaggtctgctgcggagccctgggggcagccacctcacctgagcccccagtgctactccagtggcattcctgagaatgcccccaccctactcggccacacctgcaggcagctgtgggggaccctgagggtaggccacaggcacatctgactcagccgtgagtcgtgaactcctgaccttgggagcctcctggggacaccgctgtgctgaggacatggggcacccccacgcccacactcagctgcatcacaggcagccacaatcagtaacagatgactctgcagaccctcctgtcccagagcccagggtccaagtgggtgctgtaccctcgggagaagcccccaagaggaagcgggggctgagcaagaaggagggctggaggctgggctcctgctagggccgggcctgcgggtgaggccttgtggctcccactccagaactgggaatgttgtctcagcgggatgaggtctggaggaacgccagcgctgtggtttgggatatcggaggccacagtccctttctcagggctgctgggatgcccttccgtggagccggctggtaagaacctccatccctgtccatgaaatagagaagctgggagcgggcagcaaggctggttctgaactgttcgcgtgggccagctcagtcctctgggaggaggacacagaacagcaggtgccgggaagacaaggtctcatcaggattgcataaacccagcggactgggagagcttctgggcctcttggcctaggaggcccccactgccctcagcctggacagactgctgtaagagccagcccggagttgcagaccctggggggctggcctcaaaggaatggaggcagagcccaggaagaccctgagccatagccagacccctcccccaggcctggagcccgccttcccccagggctgccacctgcctccagcctccgagggtctgcaggttcctgctgccagaaggatggggccaagggatagtccggccttcctggcctaggcagggtctggaaacagcccgtttggaaggagtggtgctttttcctccctggctgtgaccccagctgggccactgctgggctcctgacggcctctgggacatgtggttgttggaaagcacagagaccaggctccgggttgacactaaccaggaatgaaggactctgacccaccgctgcctggcccctggcccctctgccacttgctgtgtgtgcccagctcacaggccacgcagccccaggcaccactcacggggcaggccctccacagacttggggctcttcaaagccttccaggccaggcaccatgccaggagcatggccaccgccttagggctccaggagacaagtcacccgtgcaggtgacatgcctcacgcctgcccactccccgaggcccgacccaaaggctgccactgggttcacacctggggggtttcaggtgggcccccatgccagagggggtgcagacaggcttaggtggtgcccagtgtcggagatctggagagggtcagc

SEQ ID NO: 69075 - DNA, 641 bp, Homo sapiens
ccagccccccggagctggtgaatccctgccttatctgcaagtggcttctccccacacagaaaggcgaaaggcgacctccgcctgagtgttccagcaaaggccgactggctcagctccaatatgctgagctcggcagagcctggacagggctccccaggccccgcaggaggctggcgcaggccgcaggctggcctccctatctccaccaggaatgcactgagcccctgcacccctgcccacccaggtggaggaatgtggcaggggctgctgggaactcggagcctggaggagggcttttgaggcctctgcctcctggaattccccaggcctggcaccaggcggctgctccctcaggatccgcctgcctcggcctgcccccaggcggccgtgctctcagattctcctcttcccaggctgtggggacctgcagaggaaccgggccatctcaattccgctcactctgtgaaagtcccctgctcagagaggccttccctggccaccctgcccctggagccccttcatccgggccatggcccttcagagcccctcaacaggcgctggtcagacagtctggctggacactgacctgaggtggggccgcttggcccccactcccaagaggccagaagcacttgccctcc

SEQ ID NO: 69076 - DNA, 1327 bp, Homo sapiens
cagctgtaggctaatggaagtgtgctgagtgtgtataaggcaagaaggctcagctgtgatgttccgtgggttaagtgtattagagcatttcagctgtcggtatttctaacctaccacgggtttatcaggacgtggcctcacggagggtcgaggagcacctgtgtttgtggagtgaatgaatgaaatgaatcaatactggttctcatgtagccttgtcatgcaggcctggagctcagatggttcctggctcctggtgcaggctcctggggacagcagtcaggcaggggctgccctgtgtcctggccggatggttggggagctggtgggcctggcccattccttgcccagtcttggctcagtgcctccctggctgggagcctgggagagtcttagggcttcaagtgctgagcagggacaatggtgcctccctgctgggtggccgtgaggccccctgaggggagtgggcaaaagcaccccgaggcaggggccccaggaagcgctgagaggtggtggcgctgtgggagggaggtgggggccgcggctctgcctgactcccaggccgggtgccaggttcttggcaggaaccctcctgggccctgccagttgctgggcgcctcccaccagcatggccggttgagaggtctgcatggcacgcagtggccggcccgggggtgcaaccccatcccctctctggggtccctttgcagggcagccttaggatccattcactgtggccccagggcccagggcgacctgtgaccctgcggagccacctgcaggagtcccagcagatgagggcctctggctgcccctcaggggcttgttgggtcccacaagaacttccagggcctcggagctccagccgggccacagagctgggaaccttgagtggctgggaaccctgaggagctgggagagccaggctgagcaagacaagcctgggcgactcacctggggcaggaatgtggattccatcactccgcagaggctttcaagcaaaacacagcctcgtctctgggcctgtttctgccgtgcgggcacgtccagcccgacgctctcagaagcagctgggatgggctcggggaggtgggggtggagcaggagtcccagccgccttcctctggggcccatcccaggctcccggctgggcgccagcagggctccagaaatgagggggcctcacaccgttgcctctggacgtgccgtgcccgaaatcccgccattcccactgggcatgccgggccctcgaatcctccatgactccagggaagcgactccgtcccgcttggcctcagtcactgctctgtcaatgggatgataactgccc

SEQ ID NO: 69077 - DNA, 2438 bp, Homo sapiens
agtggcgggatctcagctcactacaagctccgcctcccgggttcacgccattctcctgcctcagccttccgagtagctgggactacaggcgcctgccaccacgcccagctaattttttgtatttttagtagagatggggtttcaccatgttggccagacgggtctcgaactcctgacctcaggtgatccacccacctccgcccaaagcgctgggattacaggcctgagccaccgcacctggccactgagtcttaagttttctgaggctagttctacatcctaggatcatgtcccccgcccagagaagaccccaacataggccgcgctgctccctccgtctaccggtttggagcttctcctggcaacagggttcaggctactaacaaggccttcctcaagaccccacccataaccaacgaccatacttcgtgggtccatctttgtaacatctttacttccttggagcaaattcccaggaatgggttttcggggtccaagggtatgcacctctagcactacgacaaacgcggccaacacgcttcagggaaacggtgccccagtttgcattctgcttcccctgccctgccctgggggtctgactggtgaaacatgggatggcagagtggtcgggtgtttcagattccacggtgggccggggtcttttcctaccctcgggagccgtctgaatttctcctctgccgagttcctgcgggtgtccttcgcccaccggcccgggggagtgagtagcaggcaccaggtgagcaggcctccgctcgcagcggctacgtgcacgggcaggagcaccgccccacgccccaggtggccgcagggtgaggggaccggagggcgggaggcgcacaatggggggcacgcccgtatctctagcccggccggcagcgggcagcgaggctcagtcctcgccccttctcccagctgctattcggggctcccgaggcgctcagaggggtcgactgcgtccgtggggcacaacccaggggccaggctaagacgccacacacggcaacgaccctcaacgacaacgacccccacgacgccccgcgccccagggccagcaggctggggtccgagaacctccttgccggaagcggaagtgcgtcacggcgacggccggcaagcacgcaccgcgcagactcgctgtggtggcgtgacccggaagcgctcgccgaggcccctccttgcccgccgatatctctgccgggtgactagctgcttcctttctctctcgcgcgcggtgtggtggcagcaggtgtggcgcgcggcgcgggcttcgggctcagggctggggctggggcgggagtgggggcttggacgcgggggacggggtgcggggtgctgggtgcggctggggccgtgaccctaggggccggtttgcgccgggagccggggcacggttccggccgtactcacggcgccgcgcggtgactccccaggcgcagcccagcctcgaaatgcagaacgacgccggcgagttcgtggacctgtacgtgccgcggaaatggtaagcgccccccacatgcctctcttccgtccttacctaaccaccacgtcccctcgcctgcccttgttcccccacacccctcccgtccttacctcgtcacgtccctaacttgtcctgcccccgacgttactcttttccattcatatacccccaacctccctcgtcccctctttcattcttaccgcccaagtcccctctgctcactgcgccctttctccacagctccgctagcaatcgcatcatcggtgccaaggaccacgcatccatccagatgaacgtggccgaggtgagctgggagcccgggaggcgggaaggttgtgatatatgtgcgggaaaggcaggctgtcccattgtggaggagcccctggggtgaaggtacaggcagaggctggctttgaggattggtgtttcccaaacctgggggagtggtttgtgacccttcttctctttctaggttgacaaggtcacaggcaggtttaatggccagtttaaaacttatgctatctgcggggccattcgtaggatggtgagtgtttccctgggctttgctcatcacttcgggacatcgtggactttaccgtgcgcattggagtgtgtgatggtgcctgagtagatctgctggcagagtagtttgagccagctggactgggctggccgcctgccgcttcttgagggtggaagaggggtgctctgagaagacactcaggcagcagactctgcctctcactaggaggtgcccccccgaccccgctccaccatagtcaggctgcaggctgccccgggagaggtggctccccttctgcgcctgtctccattcgctcagcgggggagagacgtgggctggtggcacagctgaccttctgccatctcaggcagccggagtggaaatattcttagtgtgcttttttttttttcttaa

SEQ ID NO: 69078 - DNA, 1498 bp, Homo sapiens
aacccatttcagagcactgacaacgtggagatccagaccccgtattcaggggctgggagaattcaggggacaatgaaccctatgtgtggggggtgacagggcctgaggaaaccctcagccagcccaggaacccccagttctgtatccaggactgacaaggtcccaggtgaacccaacccctgtgtcctgggctgatgagggcccagactgaccctgacccctgtgtcctgggttgacaggggctcaggtcacctgaacctctgtccagggctgacaaggccccaggtgaacccaacccctttgtcctggcctctgtccagggctgacaaggccccaggtcacctgacccccttgtcctgggctgatgaggccccaagtaatcctgacccctagtcctgggctgatccggcccccgtccccgtccctgtaccccgcgtcctgggctgacctggccgggcccccactcacctctggcgctgcccatccaggccgaggccggtgggcacctgcgtggggctgagcaggccctggggcgcgggggtcctggcgggcagcccggtggggggctccggcggcggcggcgctggcggttcgcgggcctcggcgggcggcggcgggggcttctctccgcccgggcccaggctcgggggccgcccgtccagggagatgttgttgaggaagaaaagcgcggcctggcggcgccgcgagtccccgcgcctccgcagcgcctgcggcggggcccgagcggccgaggtcggcgcggcgggtggcgggggcccggcggggccgggggccgggcccggggctccaccggccgcggccgcggccatcctcagactgcgcccgccgccgcgaagcgccccaccccctgcccgcgcgcccgcgcgcccgccgcccattggccgcggcgcgcccacatgcaaatgtatcgccgtcgcgctctcccattggccagcgaggtgccgcgctcagggcgctcccctgggtcctagaggcggtcggacgcagcagcagggagtcgggagctgcgcgcctccccgccggttcgagtccccgtcttgggacctgcggccgcggggctctcgctttctgttccctttgctgtatggcggccttcgcggatggcctccatcgagcgcacattttaaggctccggacccagggcggcgtgggtgaggccccagcacacttccctgtccggaggtgtgtctgggcggcgcttcagcgggcgcagggcggcccctggaggagccccaccgcttcccggaagggcccgcgtgccatctggcctccttcattgacagaagggaacgagggtctgagtggagaaggcacctgcttgggatcaaagccccaggcagagtcctgcacttcctgcagtagcaaagtgaccttgagcctgccttgtgcccaggcctgtttcctctctgtgcctgggtgcccctgacttcagaacctgtgagcccgtggcaccgggatggtcagggcctgcctctgg

SEQ ID NO: 69079 - DNA, 2164 bp, Homo sapiens
agaacccggagctgaaactcttgggcatgatgaagatggaatgggtactgtcacacacatgctgcttgcgtgagattcagataagggaggctggcccgaagccaggtcgctgctggatctcagaaagacgtcagaacgaggccccaacggaagcccctggaggtgcacagctggtgagctgagtggtgccatgtaattctcatcgtctgcggccgtctgatgggcatctgtcggaagccacatggctgatatttaaaagaggattttaaatttgctgatttaaatgtgcataataggtaactttcggctgagctttacatatttatgtcagagcttttaattcaggtaaaacagccttcagcttggagctgtttggacacctacaactacctgttctttctcagttgtggctttcattttcaagaaggaagtccttctgtttctctgtggccattgctggtcacgaaacttagcaatctggcttcctctcaaagctatgcagacgggatcctcccccttcccccttacctgctttggccccagcgtctggtcctgaggccagggctgaacaaactgcctgtatgaggcaagcccagtgcccgggcgttgagcgggtgtttcacggcagccagcgtcttggttcgcaatggtttacgtgggcttgcccaccattgagcatcccagggaccccatcagatcctttgcagaagtgctgccgaatccgacccactccccctgcccccgcctcccccaccctgccccgccccacaccccccacccccgctcggcccccctccccgtgccagcacgtgcagctaggcggaacctctgagcactctcccgcctgcgtcaggctgttccttggccctgttgaggctccttcccttcatgttctggcccagcccggaaatgaggtcaagtttctgctatttatgtgtgtgcgtgtgcacgtgtttgtgtgtgtgggtggaccttgacctccaggcagtcctcagggtagttcttggctctgtgttcctgcactaagaaaaacaatgcgagggaaacacacccacaggctgcctggggagtctgcgtggctctgagcctggcctgtcctcctccgggcctctgaggttgctttctgtttcggcggccggcggccggtggagcccttgcgcctcctcgtcagtcccgccccggggctcttgctcctccggcttttccgctgactcctggcattcgagttcttgtgttacacatgctcctgggacgtcatccttgtgacagctcgcttcagtagaaagcctgtggctcgtgggtggccgtgggtggctctctgccccttggggaggcgtggagcattgctcttacaatatgaatgtctctccttccacgcacactccctttctgacgcagcaggtcccaaaccagcctggcctgccagctcgtggataggtgttggcattgtaaataaacccccgggtgtggccgcgggcacccagggagcaggccccaggcatgaatgctgtggaatctctgctgtccgaggcctccaaatacggcctcaaacagcctcccggcagtgtccaaggtcaacagcggctgcacgtgagtgccacacgagcgtgcacggctctttcagtaggtgtcagaaggcagctgtgacgcagacgcttggctctggggccagactgcgggggctgcatcctcattgccaccggcgggctgtgtggcctcgagcaaatgactgacccccctgggccttcttcccctactgtgaggcctgggacggtgcctggtacacagctggtgctcagtgtgcacagcgggtgttagcaccctgccacccagcgggattcttcacagcagctgcccgccttcgtcccaaggagcctggggctgaggcatccattcgctgagagggcgagacctccgattccacagaggagccctgtggggaccgcgcctcggcagaggacgtggcgggaggacccagagcccagctttgggggctcaatcctgagatccctgtggccttggggaaggggtgctggtaccgccagatctctccagacgtaaaacaagccttgcctggacctgggggagatcccatggcctgctcccggcctgaccatgctgggcccggtttatctgccttcacagatgaagttgcccctttatt

SEQ ID NO: 69080 - DNA, 1076 bp, Homo sapiens
gacactcaccttgccactaggcaggactgtactcactggctcggggggcgcccaggcaggagacaaagcattttcccatggcatatggatggcttccgtgtgctgcatgactgggcagtgtgagaaaaacgcaacccccagtgactgctgtagaggacaattcagccaaaaatcaaactgccaccgtcatctgctgagaccttgatttcccagggcctggtggtgctgaaatactcagaacatcctgaatgaatgaatgtccacttccttcaccagctctgtgctggggagggggcagggcctgcgtctgatcaggagctcctcccccggggaccagcctggaaccccttatagcgatcaggagacacaggagacaccctgaatgacgacactgagctctttccaatctcttgcttgtcccagcgagtacagtgagcacatctttccctgtgctctgggcaaacccctgcggcagcagctcctaccgtgaaattggtgtttctgggtcacagggtttgtgcctttgtgattttgttgctattgccaaataccctctgcagaattgtgccaaggcacctccccaccagcctgagcatttgcagtgaaacgctttagcaatcctgacatttctgccagcatattccacagcatgctctctttgccacattaatcaacaggagctcagaggaaaacttgaacttcaggctgagccatttcctgcaatctgaaaaatgaacgtggccttcggacacagggtggtcccttgccagggactggatggaactggttcaattccccgctcctgggcttcctggtgtgcaacgtgagccatgctcaccccagggtggctgggaaaaaacgccggtccgctctgagcattcgtttcagtgatggctgttcttgttcacgtgagatgtgccaactctacaatactaaaccgttgggagaagcttcaaggggacagcacctggggaggggcagtggcgggctccaggttgcccaaggctgtcatggagaggaggagaccccagtccagcccagccttgtgcctgcagtggaggttccagttgtgaagg

SEQ ID NO: 69081 - DNA, 1331 bp, Homo sapiens
gcccacctgcccagcacccacagctctcggcctggggctccctctgtctctggagcccgcactaaagtgtgcgtctccatccacgactggcagggcttggggcatagacatcccgctgccttgcctggaggcgccccaggcctccactcccacactgtctcagggctccccggggctcggctctccttgctcacagtggtccgggctggggttccttcttggttgcatttccagctgtgttctttccttcactttctcactctcccttgcctcagggtctgcatctgggggtccactggggaggactcagcctctcccgcgtcctccatcccacacacctgtccctgggcagccacggggaacaggagcacaggggacagcaggcagagggcagcgcccgggcgaaggggactttcgcccttgcttcatgcagccctggcacccgcagcagggtaagacgagatcccagaggaggagtcttggccgcagaactgcagggccaaggcaccagccgctcgggggcctggagagctcaggtcacaaacttgaagtcagctgcccaggaagcagcctcagctgggggtcacaggccaactgggcagtgcccttggccacacctgtggaaggaggacagaggagggcagggcggaggagggaggtgctgggctgcaatgtcacctctacagacctcggctgatcccaagggggtccacagtggatatggtccttcaggggtgcccttgaaggcaggaaggggacaggactttatactgttcctcccaccccttcgagcagtcaccaactgcagcccagatgaggtcaacaggtacagaaaggagggggtgggacaggaaggaggggcgggacaggaaggagggggcgggacaggaaggaggggcaggacaggaaggagagggtgggacaggaaggaggggcgggacaggaaggagggggcgggacaggaggaggagatgggaacagggaggtggaacgggaaggaggaaatgggacaggaaggaagagatgggagcaggaaggagataggactggaaggaggagatgggactggaaggaggaaatgggacaggaaggaggagatgaggcaggaaggaggagatgaggcaggaaggagatgaggcaggaaggaggagatgaggcaggaaggaggagatgaggcagaaaggaggagatgggacggaaaggaggggataggacagaaacgagggatcagggtcctattctaatctcctgggggcatgattgcagggggtgacatgattacttccagccagccctacatgagccacctcgtccatggagtcagccccgcc

SEQ ID NO: 69082 - DNA, 914 bp, Homo sapiens
tctgaggcagtagaatcgcttgaacccaagaggcagaggttgcagtgaggcgagatcgtgccattgcaccccagcccgggcaacagagcgagactctgcctcaaaaacaaacaaaaaagaagccggtccccatccgcagtgactcgcgtttccctccccctcccccgtccccggcaaccgtgcatctactttctattcctatggagttgccagttctggctcttcctgtgaatggattcccatgctgtgtattttcgtgtctgaattctctgactttcgtctcagcccgcacccacgctgccgcagtccgcgctcgctgcttttaggctgaacgcggctgcgccgtgcgggtgcccgcgctccgggcgcccctcgcaggttcagccccgggttgggggcggcgcttgcctcgcggctgcgggtcccagcctgaacctgtgtcttgttccactgccgcgggcgcccgccacggagctgctgcttcctagggagacggttccatcgttgaaggaacggccagactgtctttcgcagcagcggcccatctgaccgcacagcacgaccgcacgagggtcccgagccctgaccctcgcagcactcgtcaccccggccgcgtggttgtggcggtctcggcggggcagggggtccccacgcgggctgattctagtttcgcgtgaccgatggtgctcattagccatatctgtacatctttttttttttttcgagtcggagtttcgctcttgttgcccaggctggattgcaatggcgcgatctcggctcactgcctcccgggttcaagcgattctcctgcctcagcctcccgagtaactgggattacaggcgcccgccactacgcccggctactttttttgtatttttagtagagacggggttatacgatgttggccaggctt

SEQ ID NO: 69083 - DNA, 2562 bp, Homo sapiens
gaagttcattatcagatataggatttgcaaatattttctctcatctgtgggtcgtcttttcacttttctgatggtttcctttgaagcacagacttttttgtttgggtgcagtgtatttcttactgtgctttaaagaggaacacgttttaagaacccccgcgcggggcggagcagggcggagtccccggcgggaagggacccgagacctcggctgcgcctgcgccgacgccggcgcgtgagcccgagcgcgtacccggcggagcgcgcgcccgcccccgagtgcgcctgcgcggagctcgtggccgcgcctgctcccgccgggggctccttgctcggccgggccgcggccatgggagaggccgaggtgggcggcgggggcgccgcaggcgacaagggcccgggggaggcggccaccagcccggcggaggagacagtggtgtggagccccgaggtggaggtgtgcctcttccacgccatgctgggccacaagcccgtcggtgagcgcccaggctgcggacgcgcgtgggggcggggcgggcaaccggcggggcggggcggggcctgcgctcgcgacaccctcgcccccacgctccccgccgagcccgggccgtgacaccgccgccacacccgtcccgggacccccgccccctcccacgcgcccttcggaccccgccccggaccccgcccacgacccctacccccgtgagaccgcgaggtcccagcccgcagtgccccacccccacccccgccccgggacagcccaccccctcccacacacaccacccagccctgcccccccacagcccctccacaccctggccctccccatctctccgcagccacccttgcccctccagtccccagggcagcccgtcccctccatcccctttctcctcaccgctcaccggttatcccgccgcccctcctcccctcaggtgtgaaccgacacttccacatgatttgtattcgggacaagttcagccagaacatcgggcggcaggtcccatccaaggtcatctgggaccatctgagcaccatgtacgacatgcaggcgctggtgagcccaaccgccctccctgtgccgcccgatgggggcacgaacccgcacaccgctctctgagagtcagcctgagctgggcagaggcccctccatgtctgctggggtctgctgggcagagtagaggcccctccatgcctgctggggtctgcagtgagctctcagggtcagcctgagctgggcagaggcccctccgtgcctgctggggtcccctgggcagagacccctgcagtgaggctcgtccttaaggaggacatcccggggctccagagcctgtcatggaaagcacaaacacagtgctagcagctggctagcttttcaggggctctgctttagactgggtgctgggccagagtctccagctgagaccctggggagggagggaaggatgcagagtcccgggcccttaggccattgtcagcctcctgggaggcccccgaagtgctttaggcagagggtgaccctatctgagtcacaccaaggtgaatttggtgacttctgtgggagtcagacaagtagagttccagtcctcgcagagcttggagctggcactgtgtgacgggcgagcgggttaactaggtaagcagggtggccagaagagacaggtgggtgttccaggccctgtggcagcaggaggtggtgggtccaggagctcaaagaaggtggtgtacttggagagtggggtgggggtcaggggtcaggtgaccaggaggagtggggacctgtgctggtggagagtctgtgccagccacgttggactcagggccacaccggccatcagtatgacataggtctctccctctggtctgtgcgacctcaggagggcagtgcctggcaagcactctcttcttctttgcctggttctgtgcctgtggcgctcccaaccgacaccctcggtgtccatgggctcctgccacgtggatgagaactcgaggtgcctgcggcctttccccagggctgtcactgtgccctctgcatgccgccttggggaacgcagtctcatggtgagactgcaggccgtgctgggcaggcggagcccacaggtgtgtgtcaccagggctgcccggtcctcagggcccgccttagtgatgctggccccggtgggtcttcctgactcctgcatctgctgccgctggttctgccctccctgggtctgtctggaaagcccagctgtggcaggcgctgttcacaaaaagaagaaatgccctttgcccttgccccgcccgccgcagcctccaacacagtgatgtgtgctcattggcctctccccaagtggctcttacacggctctagtgacttcttgaaactgcatcttcacccttgtttcttaaacaaaactctctatttgatatcagcatgagtctgagattcttccattcccgaatccagagaggaacttcgtccttccagaagagatcattcaggaggtccgagaaggtgaggctcgggaaaggttgggcttgggattcagaaaaggccagaccctggccaagggcagggaggtg

SEQ ID NO: 69084 - DNA, 2324 bp, Homo sapiens
ggacatcctctggggggatttctcttgggggacagaaatattcctggaagaggggattctctgcggggcaggcatcctccggggagagaatcctgctgggaggacatcgtcgggaagacatccttcctaggtacccggctcatcttccggggagaccgtcctctggggggcgggcaggctttggggacattttcgggagggaggatctcctagggcgggcatccttgcgagacggggtggggcgaatcctcccgggtgggcatcgtggggtgggggtgggcgttccgcgaggggcatcctcccgggcggacgttgggggattctcgggggagggaggggcgcggggcgggcgtcccggggagggaggggcgttgcgcgcggacgcgggcggggcctgggccgctccgtcccctccccccgcccgccccccgcgcttcctctgctttcggtttcgcttccgcctccagcgcgagccccgccgccgccgagcatggacgaccccgactgcgactccacctgggaggaggacgaggaggatgcggaggacgcggaggacgaggactgcgaggacggcgaggccgccggcgcgagggacgcggacgcaggggacgaggacgaggagtcggaggagccgcgggcggcgcggcccagctcgttccaggtgcggccccgcggcgcggaagaggcctggggtccccggcgccccccgcccggctgcgtggacgggagacccccccatcccgggcggagacacctggagcctcctggagctcccgcagccccggggacccccccccagaccggccgacccccagccccagggcccggcggggaagtgcgggggccgcgcgtgggtgacagcggagctgagcctcccgggccccatcgtgtgtgggcgccgttccccccgggggtgcctcgggcgcgtcccgcccccagccgccgtggccgcccctgatggaacccctcccgcctcgggcccgcgcctcggcctcctggcggcccctgcgcaggccccgcggcctggggctggggctggggctggggctggggctggggcccgggccgggtctggcctgggaggcttcgcgtctgcacctgcgggagcccggggcgggccgacggggcctccgcttgttacttttgttaccgccgggcgcctgtcatcgccggggttacttttgttgccgcgctgggaacgccacactgtcgcagtccggcccccctgtcggggagctgggattgatctgggagcggccttccagctgagctgcccgggttgcggagggccgggaagtgcatggaactcgacggctccgcatggattctccccttggcacccagcactgtttgcgtttgcgcctggccatggtggagcgggcagtgagagagcacggaggggctccgccctgtcgccgggagggcagcggccaggcaggctgggcaggggggtggggtctggctctgtcccacaggacggtgtgacccctgggtgggctcttgacgggctttcctcactggagttcctcaggccgctctcctgaagcggtgctcagaggccctgaccatcctgccaggcgcccgtgacccctgacctcttccctctgcctcctgctgtggcttctgtccacaagcccctccccttcccctttggacccctcaggcctccccagctgcctgcgctggaccctggcggggctgtttcactttttcctgggcagtgtcatgtatgcacctgtgggctgactgtgtggccacatccagtcaggacccagcctccagaactgacccagggaggctcccgctggccccaggaaggagaagtagaaactgatgatcaggcggggcgagagaaccacaccagcggccctgttgagaaatcaggccgagaggtcggtggcggtggctcaggcctgtaatcccagcactttcggaggcctgggcagtcggatcaccagaggtcaggagtccaagattagcctggccaacatggtgaaactgttgtctctactaaaaatacaacattagccaggcgtgatgggcacctgtaatcccagttcctccagagattgaagcaggagaatcgcttaaacctgggaggtggaggttgcagtgagtggagattgcctgggaggtggaggttgcagtgagtggagattgcctgggaggtggagattgcatgaagctccatctcgaggggaaaaaaataagaaagaaaaatcaggcagagaggcaacgccaggtcccagctggagctcagcggggagccaggggatacagtggctgaccgggcctcctaaccccccttctagcactcccccagg

SEQ ID NO: 69085 - DNA, 604 bp, Homo sapiens
ggcacggcctacccagggccccagctcactggaaggagcctgtgggtctggtctgggccccagccatgctccaccaggtccttggggacctcgtgtgcctgctgtggccacctctgctgggcagacagacccctttttagatgtcaatcccgagaagcctccaggacacggctgcagatgccccgtcattccagggtgatggtcattccagggtgatggccggggctgtggacaccaccaccccatgggggatagcgggctgtttattggcctccaggcaggacattccagaggtgggggccatgccagcaacctcagggcctccgagagatggcagggctggcacccgccctgcgggcactgcgcctgtcccaggtgtgggtggggcctggtggctgaatttccctttcactttaaactcacgggaaagtctcctgcttttctgccctttgggccagttctcacttatgtggccatgtgagcaaatggacattttttaaagggattcatagcaactcccagacatgtcctcatttcacaatgccgggggaaggtgattagatgagcttttgcatctttgactctactgtgacggaattatcct

SEQ ID NO: 69086 - DNA, 4880 bp, Homo sapiens
ggcagtgtatctgtctaggaacgcgggggccacagggtatcaggcagtgcatctaaggcctgcactttcctgtctgtgaaatggggacggtaacgacctcacagcttcctacaaggttttctgaagcgacatcctgtgccaaatcatctgcggcaagtgtgcaacagacggtaggtgccacctaagaaagtgacacagcctgtgctggcgagggcttggagagaaaggccctcttaggcgagtctatttgtccgacatatttgccaacagccctttatgggcttggcacagggaagagagcgggtgacatactgttctcatggagggcagggagtgcttcacgatgacccaggagaaattaagtaggaagtacacactaacttatgagtgttttttttctcacaaaggtgacaaactgaacacaaactaacagaccagtttgaaaaatcaagaaacatctatatagtgaaattctttttgttgggggtggggggtggacagagtcttgctctgtcacccaggctggagagcagtagcagaaccacggctcactacagcctggaactcctggcttcaaggggtcctctggcctctggcctcagcctcccaaagtgctgggactacaggagcacatcagcatgcttggcctaattattattattttttttttgagacagagtctcactgtcgcccaggctggagtgcagtggtgcggtctcggctcactgcaacctcgacctcccaggttcaagcgattctcccacctcggcctcccaagtagctgggattacaggcacgtaccaccacacccagctaatttttgtatttttagttagagatggggtttcaccatattggccaggctggtcttgaactcctgacaagtgatccacccatcttggcctcccaaagtgctgggattccaggcacgacccaccatgcccggccgggaattctttaagggtgatgaatcatcacatgcacagccgtgagaaaaactccctggcacctgagtgagagccgcagacaagccggccagggcagtggccacagcctccaacgcatcccgttcactagtgcaaaacagctgtaacgtggagcttttctggacagcaccctttctagtgtctttactttctatttttacataatgtttaagtttcctgtatgtgtattacttttgtaatcaaacacattaaggtatcttcattttggaaaaaaagttgatttaccttattataaaggtatattaagtaccacttaaatgtctatatcagcatacgcaaaacaaaaccacggcatcaaaatttgatacccaaggagagaaatgcctcctttacaacttacacacgattacaaccgcctattaagttttatggacatggttacagaattcttattaaaatatgtacaattacctattcaacttcatataacaacttaacctcaaaattactactcaaaaaataaaatgaggcctagacaacacagactgtctcacagatgactgtgtacacgtacatgaaatgagcaaactggactttgttctttgacctcctctttcccaattagtacatttccattaactgttaattatagaacttttgtaatgcaattaacacacatcatttgatagtagtcataaaaaggctgatcttagtatccactgtaagggaccccgtcatttaaataagaaatgtaagtgagagactctgtttagagagaattttctagtggtcttctgagcctgccagagagatgagacctctcaggcaagggcacagtgcagggacccacagatagtagggagtcacctgttaaacactttcaatcttagctcttcaagagccaaataagccacttggtattatgggacaggcatataaaaaggaaaaacgtgtcttgtttacagagattccaaacaatgaagacgtggcacagcttaaaaataaacactgaagagaagcaccctactgggctccacagaactgaccttaagggaattatgaccctaaggctgtagaaaaactcacagtatcaacagcagaacctgccaacttcaccgcgaacaaaacgggagccaatgcccattccaatcatttcctccttacatgaagaaaccccagcaccctccaaggcccaaccgatgatccgcacgtcctagacaagcctttgcgaggctcacatatgcacatgcaacatgggctgggctgtctggtaaccatgggtacggctgggcagtcaatcacaaattatcttatttgtgccctgtcttctcaccacagcacaatgagctctgcttgacatagtctgaattcaatcaactactaataagggacagcctctggtggaaagcctgaaaaaattcaagatacgcgcttttccaaaacaagaggtatcttatgaaacttgctgaaacaagtctacaagaacagacatctcctccccatgtacacagcaagtaggaaaacaagtgtgcattaagcagggagtttcacaacagggctgtgtctgtcttcctgggtgacacttctgagatgtctatgccgtatttaaaatagtgaaatagtcacagacacacatacactaacagcaacccaaagggccactaaagagccctaggctccaggtaaacgagttggcaacacctgatttaaaggaaggagctggaataatctctcaagttccccagtgaacttgtctccaggactgggacaggggccaccttggtcactgctgtatccctcgtgctaacagtaagcaatgaatgctcatttaaaaaaagactgtatttactccttaaaaggcactgctaaggacctttctcagaactgtatttcaaccaagtcatatgtggccctacggaaaccatggaacacggggtatatagcaaagttatgtgaatataccgaaaagacgttcccatctgcctttccctcctctaagtccctgagtacactaggctcaaatctcattccatcagcagacagatgacacggatatcgaaggcccaggcacaagttaaagagtattttcaataactggtaacgcagtaagctactgctacctgtggcccaaactctaaacttatatattaaagtcctttatttagagcagaaaagccggccttgacctccactgtctcagaaccgcgagaaggagccccggacgccgcagcggaggcagcacgagcacccctcccgccgagcgcaagagcgggccctttcggcttccggggtcactggaaggcaaaatgtgtcacaaatacggccagtacaaaccaacgcaacaaactattccacaaaaaaactgaaaaccagcgcggggaggtaaggacacactcttcagaaaagcgaatccgggctcttcgcgcttcctgcagcgccagccgcccctgcagtgccggaatcccccgaaggcacgccagaagctaagccggccaccccgaccgcacccaaggcccgggaggaagcgccgaggtccccgagaatgcctagggaaaccagctgcgcttacaagccagctacgcagcccccgagccccgggccgcactcgcccaggccagccctgcgctcttccccgcgagcggccgccccgactcccaccctcggaaccgttccagccgcgaccaccgagtgctcgccagtcccctcgacctcacgcagcccaccagggccggcgtctgaggcccgcgccccaggccgcggcggctctgaccggccccgcccgctcgcccgcccgcccgcccgctccttcccttccgcggccgccatcttctcggcgggagcggcctgtgcgggatccgcggctctcgccagccgggctccgatgccggccccgccccgctcccgagggcggcccaagcggcggccggctcttctacccggcgcccgggacgccacttaccgcaggccgcaggcctctagggtctcgcagccatttccccgaacgccgcggagtgggcggacggccaccgagatggcgcggggctagagcggcgcccccgcgcggcgggcggaggacgagaccggccaccgagacgctgcggggctagagcggagcccgggctgcgaagcccggccccggactgcgcgcatgcgcccgtctttcatacctgcactccggacgcgcccttcgggtctgcactgacaatgacttgcttgcatcctttgtggacaccttatttccccgactccaagagtgaaagctggggcagtgcccttgcggggatccctcggaacagcccgggcagggcgcaggcggaacgtggatgctagccccgagggactgcactccgccaggatttcgctcttaagaccgataaacccttcaagtcggtggggatagaaagctcctgggctaaatttgtaagaggtgtaggggggcggggacaggggataaaagaagaaaaggcccaggttttctcttccagattgtgtttctcaaaacgcaggcccctgacggcctcggctgggaatggcagcgaggggcgaggtccaggtgtgggcggggtttctctccaacttgaagaccctacctgctgcctccccaccccaagctcggctccagaaaccaggagcgtgggggtgggggggagagaaaggagcacagcgaggaagggaggcgggcacgctggacctctaggccccagggaccttggcggtgtggtcccaaagctctgcctcctcccaccatgtcaatcctacactcagaactactgaccagtagctagaactcaaagaacgcatggacatgtttgcccacaggggttggagggaaagattagacacttactatcaagagaggggaaagtgaggtatggtagatgtcaaccttccatgtggattttcttcagttcgctcaatagtaactagagtgac

SEQ ID NO: 69087 - DNA, 663 bp, Homo sapiens
ctgcaacccccatgccacgcaaagtttcagggaaagtctttgaaagtacaatccggaaaactcagcaattcttaaaaaaaaatggctttccgctgttataagcctccttcctaagactcagggtccgcagcagaataccctgacccaaaataaaaatactatgacaaaaatactccaggaggcagccggctttacttcgtttaaagccggatttcgcttagtcccgtgaaagcgaaggagcaccagcgcttcctgattccgcacagttctctcggcagagacggcccgtcctctccaagaaccggaagccggacagcgtcaggacgttttattcttctcacctgggattcagagaggcagcggccaaggacagggcccccgccgaggccaccgggcagcgtccaggtctcggcctttgggaggggagcagcgggggaggggcacggggaggggcgagggcggggcgcgcctgggcctcggcgctgggctcctcctctgcccgctccgggggacacccacaggattcttgcagacctctgccgaggcaggatggaggcctgcagggatgcaccgcgggcccgcgacccgggcggccggaacatagttctttctggccggagatcggcccggtcgtgagtcgtgtctgtgccaggccccccacgc

SEQ ID NO: 69088 - DNA, 2135 bp, Homo sapiens
taactaaataaagaccaataactgtttcccatagggttatgtagttgcaaatgaaaaaattactggcatgtactgcctctgcatatgaagcataattttgtcaagaccttatacctgcagatttagctctttcgattaacggaaaatgtccaaaatcagtctcctccaacctatttgccgaactggacttactgtcgctgagtagaccgaccgacatagcttacacgttgttcagctcgcttgtaagcaaacacacgaaaccacctcacccctgacttcagaaagaagccgtcccgtgaattcctcacagatgaaatcaggagctgcccctcaaggactctatttcttccttcggctctatcaaatattttaaggtacttcccagcaacggaaacatgggaccctgcaatgacagacttcgcattcctcctgagcggacaggcaataagcaagtaaacgcgcaaatacccaagtgcggcctcaacccgcgctcctgccgggagggtctccagtcaccgagtaaccccggccctgccccgcgccgccgccgggactccgccccgcaagcaagtggggtctcctttgtcccgcgcgccctggccgcgtcccgcccttcggcgtagcccatgggaggcgccctgagggcagggcccttctgattccccacctggcctcgagtgaggacgcgctcaacaacatctcgagtaaagcgggggaactcgcttcaacgcgcagacagcacagctctcgcccagcccggtctcgggtcagccgtctctccctggacctcagggacactagccctggaaggccgccggtcgggaggggactccctccccgtctgaggggcggccgcggacacccggcgcctttcccccgccccaccccgtgcggcctcacgcaaacgacaggaaaaaagctgggaccttcgcctccgactcagtgtagacgtcgccatcccggttccagatttccgcgctccaacgcctccgcagcagccatcttgccagagggccgacgccttttgactctggcgccaacccgtagtgcgtggtcgccgcgaggggagttctgcgcaagtacggaagctgaggttccgcgcttccgggaggccgtccgccccgccccctcgcgggggcgcttcattggtcatcggctcgcgctctcgcgctctcttgctgtcgcgagaggtgctgaggggcggcctccggtgcgcctgccctcccgctccccgcccccgcccccgcccccgcctccgccgcggcccccacctctgcctccttctactcgggcgccccggcggccgccacctctccccagcccaggagaggctgcggagccgcagccgcccagaccgcgcagcgcgggaggcaggttccgcacggtaagatggcggcggcgggcccgggcggccgggccgagcgtctcccggggccgggccgggcgggcaggcgggatgtggccggggtgcgcgccgcccccgctctgggggccttggaagcgccggcgctggcaggtgcggaattggggcgcgcagtgagtccaggcccggacggccgccccgcgccggtgcccagggggcagtcagggctcagcctccaggcgcgcggcctcaggcgctggtgttctggggcggtcccggccagcctgaggggcggcggtagctgtctctgtggaggagcgacgtccgtaacgaagtctttttaataaaatctgctgctttaaagcagaaaccgagcgggtgaggatgtaaagtgtggcatggaaagtaggagtcttcagcacacgggtgttttcttctgctgaatctttttatgctggagtttgagactaccgagttcttcctgctaacaggactggccagttctacaaagttgttgcttttcatgggcgcacgtaactgcccggagtggaagcgctgtgagtgccgatcaccgaatgggccgagagaaaaggtgccttttcctagggagctcttaacgttggtcctagggccgggcgcggtggcggaggtcgaagtgggcggatcacttgagcccgcgagttcgagaccagccgtggcaacagcgagactcccttctctgctaaaaataaaaaaattagccaggcagagtggtgcgctcctgttgtcccag

SEQ ID NO: 69089 - DNA, 1941 bp, Homo sapiens
ggaacccaggggccaatgacaaccttcacaggcatctgctgagaagacatgggccagcgctggatttgtccagctctcccaggcttggtccaagggctcaggagtggacccatccctgccccgaaagatccattttaaaaatcagtgaccctgtacttttactctctttgcacttggttaagactttatccctgattttatttgatcggtaaggcagggactgccatcattccccattttatagacagaggacagacggccccatggctccgtgtcgtgtccaagggatgggctggcacctcttggaccaggcttaccaccagggcccttctctgaagccccagtctgaccggcctgctgctgggaatccccctctgcccccacactaacctctgctggggctgagccagggcgcgtcggacagtcagggcgacccagccagggcgaccgttggccccgctcctatggggcagcagggaccgacgtcagcagggtggggcgggcacccgagtggtatgccccgccctgccccgcctgcccgccctggtggccgtctgggggcgacaagtcctgagagaaccagacggaagcgcgctgggactgacacgtggacttgggcggtgctgcccgggtgggtcagcctgggctgggaggcagccccgggacacagctgtgcccacgccgtctgagcaccccaagcccgatgcagccacccccagacgaggcccgcagggacatggccggggacacccagtggtccaggtgtggcgggggtgaggggagggggggtgggagcggtggagatggggccgtggggagggagctgagatactgccacgtgggacgatgctaggtggggagggctgagctgggcgggctcctctggctgtggggccccctgtgttccttgtgggaggtggaaggaagtgagtgccctgtccttcctccctgccatgagattccaggaccggacctggcaagtgccctatcccagccagtgttcctggggctcttccaggcagggctatgttccccaggccaggggcattgtcctggacagtcaggaggcatacccctcgccaggtggaaccaccctgtgtatgcatgaccctgacaagcaggcgccaggacagtcaggaggccaggtagggggcacgggctggagcctgcagctggacggggttggggggggtcctgccaccacgtgccagctgtgtgctgaggacgagctccccgctggcttcagctctcggagcatttggtggtggggagaagcagggcctgggcaggtcgcctggccaccagcactgctgcctgtaggaggctccctgggcaggtgacgcctcagaaaccgggcgagatggtgaccgcgggccattggtcagctggggagggcctctgccagggagctcctgagagcagcccccacactgctgaaccccttggctctgggtcttgggctgaggccttaagtggctggaccctgggcctagactcaggccctgtgggttccagagcagtctcctgcctgcactgagtccccagggtacctaccctgaccatggcaaggtaatggcaccttctggccccaccagttcccagctgtatgagggctgaggaccctagaagtgctgggaagagttgtaggaaggcccaaaggggcagtgccaccatcggatgttggcacccagatgaagggagcgctggctgcatgggaaaagctggcagcccagatcacagccctgtcaggcgccaattagaggggagggctgccctcagcgggccctgccccttgctctcttcctcttcccccacccacgttcatccaggcctgccgggcagggccagctccccagggattcagggcctcctcactggcggctggtttgagtggctccgccttcactacgtccctcccaggctcgatgtttaaaaaggagc

SEQ ID NO: 69090 - DNA, 993 bp, Homo sapiens
gctaatttttaaagtttttttttgttttgttttgtttttttttgtagagctgaggatgtccccatgtttcccaggctgctcttgaactcttgggctcaagtgatctgcccacctcggcctcctaaagtgctaggattacaggcataagccaccgtacctggctctaaagctcctttttaaaggcacctttggactgtgtggcttttagtggaaagttaagggtgggggcccccatgtcccttctgcaagcctcgtgtgttaagtcaatgaaaactgtttacagagagcctggggctaggtaaacaacagggctgcgggtatcaaccacgccaggacagggcgtggaggccagggctgtactgggttaggcagcctggcagtgaggactgtgtccttctgtggtaacccagggagcagccagatatggggcaagccagttgtccccagagtggaacctggctgcaaatgacgctggcgaaaccacactcactgccaagttccaggacagacagcacttcctcccacacaactttctccaaactccaggggttaatggttggccctgccgtggggaggggctggagccaggatagcctctggcagagcaggaggtgtcagaggacgcagctctgggctgctggagtgacctgttcttgcctctgagatctcgcccggcctccctcaccaggattgggagtgtgagctggccggcctggctctgtgacctcgggcatggtcagtgcccgacttggtggtcttttctcccgtgggaagcgtctaggcgcagacttgcagagagtgccgagaaggccgtatacctgcccctctgtccacagcacaccgtcatccactcactcatctggggcaggttcttgggagcacacacccggggtgcagccagctccccgcaggggcagacaggaccttttgggaagggtggggtgagactctccagtgtccgactcctctgccacccatctcctggtcaccctc

SEQ ID NO: 69091 - DNA, 1052 bp, Homo sapiens
ctggagccggcgctccccacgagcccggactctccgccgcgcccgggagctgcgcaatcggctgctaagacgccggcgccaccggctgggccctgttctcccctctcttttctacagtcttacccgcagctgacagggttcgaaagagcatgaaacggaggagacgttacagcaacgtgtcagctgaaatgatgggcgtagacgcacgtcagcggcggaaatggtttctatcaaaatgaaagtgtttagagattttcctcaagtttcaaatgaggcgaatcccgttttccgcgatgctgcagcgcgcgggttttaaccgcagggtcacgcggaacgccgcgccgcgcgactgtgcctcggtctctgcgcccggctctccctccggtccgcaagaggaggaaggcccgcggcgtgccgaggtcagcggcgcggagccaccaggcgagacggtcacggacgcctgaaccgaggtcaccgaggccacggggccgggaggccctcagcagagcccgggggctccgcacctcaaggccggccaggaagaaacagcagcaggagcccagggcgccccggggagcccccgacacgcgggccgagcgcccagagcggcccaggccctcgcgaggagaccggcctccccagggcggggcttccgactcgggcgcccgtgagccccggaggcggcgcgaaggggcagagtccgcgtttctaaccagcccccgggtgggcggtggcccgcgcggcacggtgggcgcgagcgccgtgggctggggccggcctgggctttcagggcgagggctttccgcgccggccccagcccacccggccccgctgcgcgcccctcacgctgcagcctgggaacctgggccgggagctgcgggccgctccggggaagcgggcctgacctcccctccccaccgccgcccctgcggtgagatcctgcctgccggggcgcaggggcccgcggttgggctccgggagacggaagaggccccacagctcgggccccacgcagtggacgctgccacttaattttggcgtaattgatgtca

SEQ ID NO: 69092 - DNA, 2232 bp, Homo sapiens
atgggaggcaggtttgccctcagcagttctcagcgtagctttctccctttggctcagtgatttgggtgccccaagactggttttccttttacaccacttaccttcccactgttattatgctcagccagaaaaagcaagcaaaggtaaataaagtgctgggccttttccaatcttaaaacacgatgaaccgtatttggttacacctgagctgacacacaaactggctaaaaaagtgttccaagtaaacgtgaagtgtcacttaacagttttcacatgagtgcgctctgagggtttatcccaagccataatgtcacaggagatgctaacagacttggaaaacgggctgcaactaccggggatgtggagcttagcctgcagaaccttggactgcccctctcctagagcagcccctgctgggcggaaaaaggcaagtcgctcaacccctgcggccatgtccacccggctctcctacctccccttccccaaagcaaatccatgatcatgcggtggggagagacgggcccaaactactctgagcaatcatttattcacttcttgagaagcccctgtcttcgacctgtcaaatctcccagaatcgtcgcacaacctcaagttttatctccctgaagctggcggaagagagaaagtttccggttccagacgcagcttcctggaccgttccttccccgtcctcctccactccagcccgcgccggccgtcccgggactccgctcacctttattatcttgtccttttgttctctgcaccgccgcaggccgggacgtggggtacacacaacccgggggaagagggaaacacaaagttattcaccagagaactggtctccaacgggccgcgagctccgccggccccgacgcgcggtcacgtgcgaccccggccccgagaccccggtcccgcctgggcccggcctccgcgaccccgggctctgcgttccagccccaggacctcaacccagaccccgcgcctcggccccggccgcggcccctgtaacccggccccgctacctgggtgtccacgctggtggccgacatgcttcatgaacaactagacgcggggccggggcgcccgccggctcgggcctcccctagaggccgggcctgtcaccctagctcgcgcggccccgggccccgccgccaattccccgggcgccggccgggcggcggcggcggctgctgggcgcgcgggcccctggcgaggcggcagcggcggtgagcccgggacgcggacgcactgaggaggcgtcgactccaatggcggcggcggcggcgacagcagcggcgacggcggcggcaggggacgagactgcgcggcgtcagcgtgcacgcggggcaggccgggagcgccgcgccgggccgccacacttcgcgcctgcgcgctcccgtcttacgggatggatttcgctctcaggtcccagtctcgtgcggcggggcggggaccgcagccggctgggcggggaagccctgagccggggaagtcacgtggggcgtgtccggaggcgccgcggggcctggcgggaaggggctggcgggctgctgccaggtgtacagccgcccacacacaccccggccacagccgcacccccgacgcgctaccggcactgaggcctctgtagttttccccaaggtccgaagactaaacgctgttctggtccgacagctgggctacgggtctgtccggggtcggtctgcccttcccccgcgcgcaaacacctgcccgcccagagctccgagcccccgcgtgttccaggtcgcgcgcctcggcccttgccgcgggacctgcgggctttgttcgctttgcggccctggccttcagccgcagcggagccctgggcccggtcccggaggtcagctgttgtgtggatgcacccctggacctgcgagaggctcgccggcttataaccaagttctcatgttagattcttgaccccgatttcatcaccaggaggaaaagcagtgctctgtgccccagcctaggccgggccaggggacttgtcatctttgttcgaggatggacagccccttcttagcagcaactgtgcaaagagagcccagttctcagttcctaacccctcagcatccccaacctggacgcccttctggtcaaggtgttgaatttcgctccctgcagccagtatccaatcctgccacccttgtggctaactccctacagaggcttccaggttgatatttttctttccagctctggcagctg

SEQ ID NO: 69093 - DNA, 2238 bp, Homo sapiens
cagatcaaggaggaatacgtggaatgcacagaaaagtacaaagtaaaaacaaaacaaaaagtgacctgcaattaacctcccacaggtgatcgctttttcagctttgtaccttcctagtgcagactcaggtcccaccagggcgcacctgcgctctggggcgtctgcgtggcaggggtggggacccgcagacgctctcaaccccgccgcctcccaccagggcccaaaggctcgggtggtgggagacagaccccagggcgggagcatgggccccaggacgcaaccctccacccccgcgccggtcccccggtcccctgctgcccactgcctgtgaccctcgcctccctgcctgtcgcccgctgccccagtcctcctacccgagtccccctgccggtccccggctgtcctggcccctctgcccccgccccgtagacctcgctcccctgccggtcctccatggcccccggtcctcctacctgcgtcctcctgcccggctgtcccagccccgcagctcccgccccaggcccccacccgccccgcccccgttgtcggcccccggtgaacgcgccgtcccagaagcacctcagcttggttccgcggatgaacggacgcttctcccgcccggcccccaaaagctgccgtcctccgcggccactacgaccagctgcggtccggggcccggggtgggagttggactgcgtggctgcgcgtccccatggcgaccgggcgggtgcgcgcgtcaggggctggggcctgaggcggaagtcccgcccttgccggctcccgtgagaccttgcaaagcgcaacgtagccggaagctggtggcggctggtgggcgaccgggcgcatcctcattgcagtgcggcggccctacctcggccctggcctgaccccggcggccctgcccgcccctccctccaggtaagcgcgcggctcggcggcgcgggctcggcctgaggccccggctgccgcggcgtcgtccccggccttcgcgggcggacctccctgccgcagcctcctccacccggaccccgctccaccctgaggctgctgccccagagcttgggggcgcccaccctgacctcccccagttccctcggcgctgggcggcggggcccttctcgcgcggacgccccgctgcagccgcccctccgccgtgccgccccccgcccctcgtgcccccttccgtacgaagctgccctccacccgcaccccggatctggaatctcccaccggttacgggagtccagagggtccctgcccacgcacgtcgcctcccggggcgcgagcaggaccctgccccgtccgcttcaacacccttttcccgagctccttcggacccaggactcggcctggacacatcccagtcaggtggcctctgaagcccggtggggcttccaccccctaagaagtgagggtcctaagaaggagatatatttttacatcttggtttcaagcgttcagagtttttgcgttatttttcaagataaactatatttgtacttttgaaggttaggaggtatttgctttcgtgttactaactttaacatttcagggaactagggctcttgaatattcaaaatagtcacgtagaggagttcctcttaaatccaagccaagtcctttcctttttacacactctctccctccggtagttctgtgagtatcctgtatgttttacagttagaaattccagccgtctcctcatggttctgacttttgtttgcctgtgtctgttgaccaatacataagccccgagggcagacgtggtgctatggaaagagtacaggaccgagtatggcgaccaggattggtctcgtcctgctttggcggctcacctcctctccgtgggccgtggcttctgcatgtgccgtggttctgcacagggccctcagtggctgctgtgacaagaatgtgtcccgaggcccttgtaagctcagtcccgctccctgccccgccagggcacctctccccacaggttttccctattccatcctcagtcggctgtataggtggatgctcagtttgatgacggtatccgcctgaatgagtcatgctgggggtccaagtcctgcggtcaggagtgagcattcagatgtctgcctcatgatctgtggttcctggacactcttacagaaggcacagaattatggagcagaagggagcccagggtgaacttttggttttgttttgatgaactgcagaaaacaggtgtttatttcctaactttgaataggttta

SEQ ID NO: 69094 - DNA, 1123 bp, Homo sapiens
cccggacccgggcgcggggccttttaacccctgcagacccaggaccggccgggccgccccaagacgaacgccgcagggctgggctcagcccaagccagacggcgagagtcgcaccgaggtggaagctgggggcgcggcctcgccggggccaggaaaggggcggggccgggtggggcccggggaggagcctgtgcgccccgccctccgtgacgcgccgcggcccccgcgcatataagtgggcgcgtccgcgcgtgcgcaccccgcgcgcgcctctctgtcgtggcgcggcttcccgcggtcttctctgcaaatgggctccgtggcctagcgcccccgtccccgccacccgtgatcgtgcgccgaggcccgcgaggggtcgccgcccaggtgaggggcgccgcgcgcgggtgggacgagcaggcccgaggggcggggggcgaggggcggggctgggccgggggctcctctcctctccgcctggcgagcgctgggctcggggtccccggcgggctcctctcgggtcgggcgggttgggacggcgcccaccaggttcccgacgtctgggccggggccccgcgcacaaagcgcctttgttccacccgctcggccggtttgggctggttggagccgcccgcgccccgcgcggcgaaggcggtgccgggagctggggagccccgcctcggtaaataacccagcgcggcggctccacccgctggggagcgcccttcatgacggaaggccgctgacccgaggggctcctccacccccatgcgcagatcccaccagccagcaagctaaagcatggcggccatcccctccagcggctcgctcgtggccacccacgactactaccggcgtgagtagcccctgccccccatccacgcggatgctctgctggcgccagtgccggccccgtgcaggctgcggaaccagcgctcggcctgaaggccggtgggctggggggctccgcgccccgcgttgctgacgggacctctcctctccaggccgcctgggttccacttccagcaacagctcctgcagcagtaccgagtgccccggggaagccattccccaccccccaggtgagtgcaggatcgcccctttctccccccgctcctccagg

SEQ ID NO: 69095 - DNA, 1730 bp, Homo sapiens
ggccacggccccacccgcctcgtccagcagcgtggcccaccaccactgctcctccttcctggccacgtggaagacgtcccccgcgcggaagctcagctcctcgtccgtccgggacttgaagtcccagaggcccacatacttggggcccaggtgagcctggtcccgggacaccatggcgggcgggcgcagcggcaggaccaggctgtggcccagctggagcacccagagctgggcgtggcaggcgggccgtcccacttcctcatgacaggccgggaagcagccacacccagcacccacaggcgctccagagcaccccggctcctcctgagggcccagccggccccacaagtcctcaggcccactggggcccatctgagcacttagcgcccgcactatgggaacccactgggcaagcaccgccagggccggcctgagcgcaggagagggggaggaggacctcccggttggggcttcttgggggtccaacttatggacactcaggcactcagggaagccaacggccctctgggaacaagcctcgcagcctgagggcaggaaggtgagggctgcaggcgctgccttcccaaccctcagagctgcgggggcacaggtgggggccgcctctctccccgcttccggcagcttcccctccacccgtcggtgccctcacccagccccagactccacccctgagcacagggcccaatgtcaggagctgctgtgggcaggcgtcctgagagcggcctcatgggcaggcccgccctcgggtaagggccaagcagggaagagggagtggaatcagggcagcgacagctgtgtgggtcggcccggaggacttcccggaagaggagggcccgagggttttgggggatccccggggaggcagagccaggggcacccacggctgaagaaacgggcactgccttcctccacacggacgccagggggcaggcaaggaccgtgagtgcggcctggaagcgcccatggcgctggggcccaaggccacaggtccctcccaggcagcccctcccgcctccagcctctgcctcctcctgtccagcccgcaggacccctgcccccttccagctggcctcccttctcccgactcatgcctgagtgagccctgccgtgacccccacctgcacccgacggccgcctgccccccagcccctgagactcgggacaccccctccctggaggcccctccccgccccaccctcccactgaccctactgtgtccacccgggagctccaacccagggacctggactggcagccacaagggggcaggaaggggcgggaagggaaattcaaagtctgcaaggggtggtaaggaaagtccctaaactgcgtatttcaacttttatttttattgcaaagagaaataatggcaccttccactcattgttttgagattaagaacaataatctggattatttaacaggctcatagatttctgggcagcccagctcagcgctgaccaaggtggggaggggcagcggggtgccggcctgggcagtgtccctcaggccctcccagctctgtctggggtcggttggggaggatgcagggggaggggtggggggtggggaatgcggaaggagggtgccggggcacctggccgggcagcgtccctcagagcccggccagactctgggcccgtgagtctatgtccaggaagcctcgagtatccctgagttcggacgtgcaggactttcagtctaagcca

SEQ ID NO: 69096 - DNA, 1472 bp, Homo sapiens
ctctggtggccgcggggctgttgggcagcagggtggaccctggaggcgccacctcgaacaccagcttggctctccagggaggcgtctgaggctcctgagctcacgggtccacgcagtccactggaactgttggccacggttcgaagcctgcgacagaaggagcaggtgagactgaggccagaggacatctggtccaggcccagctcagaagcacggcctctccaccaggcaaggagctggggatctgcctatcctgatgcccaagcagaggcctctccaccaagcaaggagttgggactctccccaccctgacgcccaagtggaggccttggcagtagctgtgtcctgtcagggagtacagggctcactgacccggacacagccagaccctccctcctgaagggtctcaggccccacctagaaggagccaaggtgactgcttgtggagccctggagggggcagagcccttggcacagtgccgcccccaggaggccgcacccctctgccccagccaggggtcctgtgcaccccagggcctcaggctcctgactcttctaaggacacagcacctccttttctattgaatgaccactggcccccaggaaaagaggactccacatctgcacctggggaggggcctcacggagaggagggtacagtgcccaccagagctcagggtgccaggaagagatgggtccccgggtccccaccgcagctgggatgctacaagaagagtaagtttaaaagcaacagactggaggcagacttcagtatgagaacccggcactccccgcggacccctctgagaaaacatccgagtctgccatccagaaaggacgggagccgagaccccaaaatcctgcgctccagtgggtgcagagaccacagcgctgggtcttgctgcggagggtgctggtcctggacgggctgcactgccccgggctgggtctgtggctcccgggactccgcgcccccggctgcactcaccctcccggacccccccctccgcccccggccccgccaccctgggacccccgcgctcaccctcctggagccgcccctggacccccgcgcccccgcccctccgccctgggacccccgcgctcaccctcctggagctgcctgccctgccgagcctgcccaggagctctcagtttcgattctggcccgggcactgacgctgatcgcggaaattacctcaccgccccccgccccgccccgccctgccccgcctccagcgacagctcggcccccgctgcgagggaacctcgggaagcgccagcgagcagaggacgcccctccctgaagggccagcgccgtcgaaggcggaggcggctgggggtgggggtcctttcccgcacccctccagggccccacgccccgtccagcccttcacacaccagagacgccccgatgatgtgccaggcggaaggggtgagaccctgcccggccctggacggcaggatggtct

SEQ ID NO: 69097 - DNA, 3367 bp, Homo sapiens
tcctgcctcagcctcccaactagctgggattacaagtgcacaccaccacgcccggctaacttttgtatttttagtagagacagggtttcaccgtgttagccaggctgctctcaaactcctgacctcatgatccgcccacgtcgggctcccaaagtggtgggattacaggtgtgagccatcacacctggcccaagaaaatatttttaaactagtattcttgaccggcacggtcaacactgatgtaattgaaactgttgtatttgaagtgttagcaaagaaagagaattctggttcaacagaaaagtcagtcacgacttttcagtcacgcatgaattacacagtaaccaaatagataacatgccatgactgacgacgggcccacaacaaatcagctccgaccaacagggtccacaccaccatgggtctacacagatccaggtcccgcctgtgagcctacagtgacgcgggcccctgtggggtggtccctgcaggtcaggtccctgagagtgggtcccagtggggtgatccctgcgggtcgcgtccctgcgagttgggtgcctgccgggtggcccctgcgggtcgggtgcctgcggggtggtccctatgggtcgcgtccctgcgggtcgggtgcctgcggggtggcccctgggaatcgcgtccctgcgggtcgggtgcctgcggggtggcccctggggatcgcgtccctgcgggtcgggtgcctgcggggtggcccctggggatcgcgtccctgcgggtcgggtgcctgcggggtggtccttgtgggtcgcgtccctgtggggtggtccctgtgggtcgcgtccctgtggggtggcccctgcgggtcgcgtggtggcccctgcgggtcgggtgcctgcggggtggtccctgtgggtcgcgtccctgcgggtcgggtgcctgcggggtggtccctgcgggtcgcacccctgcggcgtggtccccccgggatgggtccaccgaggaggccgctggaggccgagcccgcgcccgcccgcggcgccaagatggaggcaggaagcgccgccgcccgcgcccgccaccgcccgcgccgcccgcctgacgccgccgttgcgcctgacgccgccgcccgcgcggccgcccctcccccggccctcccctccccccgccgtaacgtcctgacgctccgcagggacccctgactggacggcggcgcgtgagcggagcgagaggcctcgccgcgggggggccgcgggctcgccggcgccgcttacctggggccgcgccgggcctgcttaggcacccggcgggggcggcggcgtcgggagctgcggcggcggcgggcggcggcggcggccgcgggcttcgctccttgttggggattcggcggcggcggcggcgcgggcgcgcgcttcctagtgacgcaggcggcggggccgcgcacgcacggggctgggagggccggacacttatttggcgctcgcggaggaggaaggcggggccgtgaaataaggcccgacgggccccggggcgcgtgcgcggaccgacactgtcagctcctaacgccgcaggttcctcctggtccccgaggcccccggtcgggcgttgcctgccccgcgcgggcggccgggccgagggacgatggtcagtggacggacggcgccagggagcagtgcccacgcgcggcagggcggtaccttcaggcctccaggtacgggcgctcctcgcccggacgctgctgtgtgtgaatgggcgcgaggggactcccctgcggggcggacgcctgaacacgaggctgtggaggaggacgctgtagggtgcgcggactcacgcggaacatgccagaggctcagccagccacggcgctcccagcgtggagggcgaggggcatccgggagcggccgggagggctcggtcacccctcaagctgtcaccccagtcccacaaccagcaccccgatcctatcgcagtcccacagccgacaccccgatcccacccctgcccaacagccggcacccaccccaatcccatagctaacaccccggtcccaccgctgtcccacggccggcaccccgatcccaccccagtcccgcagctggcaccccgatcccaccccagcccaacagctggcacccaccccgatcccaccgctgtcccacagccggcaccccgatcccaccccagtcccgcagccggcaccccgatcccacagccggcactcaccccgatcgcatagcatagctgataccccgatcccaccccagtcccatagccagcaccccgatcccaccccagtcccatagccagcacctcgatcccatagatgacaccccgatcccgccccagtcctatagcccgcaccccgatcccacccgagtcccgcagccggcaccccatcccacccatgtcccacagtcggcaccccgatcccactcggatccggcagccagcttggatcctgtggccctcctccagcccccagggctcatttatatgttttattggcagaggctggggctggctctgttggcctctgtgctgggtttcttcctctgcaccgcaggactggctctcctgacctctccaggtgtcatcgaacacccttgtgcttgctgtcacccgctgcctgtctgcaggatcccggattccgtatcaggggaccgaaattagtcggaaaataggaagcaggtgctcgcttggatggaaccctgaccctgtgctcacacttgtaggaggagggctctgcaggccgcctcccggaacgggaggttcccaagccactgcacttcggaggggctgtaattagagttgcacattcattcagttcccagtaaagtagaacgtgctccagccagtgaggaaaaggtgtttttaaaaattagattggccgagtgcggtggctcatgccttttacctcaacactttgggagacaaaggtgggaggatcacctgtggccaggagttcaagaccagcctgggcaacagagcctgtctctggggaagaataaaaaaaaaaattgagcctttgtcagtgctactattttattatctggtaaatatgagagggttcacgcggtctatgtgtgtcatttatctgagtttgcctatcgtcacgttttggaaataaatgtcaataaagtcgaagaggagtgctgaggggggcctggggatgggagggtggctacatcatgcctgtgtgttgcgcaagcccaccgaggtcggcctggggtgagccctggggcctgttctgcctccttcactctggggctccaagagacaaactgggcaacaagagagaaactccatctaaaaaaaaagaaaaatcacctccaagataacttagctttcttctgctggcataacaaattatctcaaacttagtcgcttaaaa

SEQ ID NO: 69098 - DNA, 940 bp, Homo sapiens
cctggggccttctggggccttctggggcatgggagctggggccgcctgagacaaacatccgtgacgctgggctgaccccacagaacggtgcgggcctcgctcttggagtcagccctgctgccagccagtgccgggtgctggggactcagggaggcccgccgggaccactgcgggacagtgagccgagcagaagctggaacgcaggagaggaaggagagggggcggtcagggctctcaggagccgggtcctgggcaaggcgcagccgttttcaaattttcaggaaagcggtcggctcacactcgagcagtaaaaagatgcctctggggaggaggcccgtgcagctctccgggcaatggtggtggctcggcctagagaggcggtagtggaacgcagaccctggtgggggaatgacatcaagggaggagacgggcgggaccccagatttctgcctgtgggcgatggaagtgaggttcactggccagcggagccggacacagaacgcgcaaaacgccgtgtaggcctggaggagccgaagagcaggcggaccccctccgcgggggaacagtttccgccgggagcacaaagcaacggaccggaagtggggggcggaagtgcagtgggctcagcgccgactgcgcgcctctgcccgcgaaaactctgagctggctgacagctggggacgggtggcggccctcgactggagtcggttgagttcctgagggaccccggttctggaaggttcgccgcggagacaagtgagcagtgagtcgcagtgaccctacaagtggttcttttacccgagcggctcgtaggcgcgttgcggtttttcgaaactacagctcccggcaggccccaagccgccctcggggccgcgggtcggcggattggccgcgctgcattttgggacctgtagtttcctgcgctcgtggcgctggcgcc

SEQ ID NO: 69099 - DNA, 2624 bp, Homo sapiens
gaaacaggcaaggctcatgaccttggtcctcgacacacccagtcccagctctcccaggggatggggcaaaccatgctggtgccactcaaatgagacttgagaggggcccgacagggctgtggccacgggccagctggactgtgaatatcacggcatcctcaaggccccaaacccacagcctgctattgagacccttactgtttaggcccacggtggtggtgattttggatagactcatccccttgtagttcttgttaaatcgggttttcgactgctccaggaaggtctgaggagagaggcagaggcgaaacacatcaaggaggggctatactggcttccaaatatccttactcaggtctgttctttaaaagacagaaacagaaacagagcaacactctgctcttcaggaggctggtggtgactatcctgccgtctcaggtgaaatttggcttccgtctgggtagtgaacgtgcagctgacagcacaaaaccgaagggggcgccgccaggccgtgggaaaggtgcgcgcaagggcgtgggcactcaccgtcttcccagcattgtccaggcccaggatcaggatgcagtactcgtccttctgaaacatgtacttgtacaagcccgacagcagcgtgtacatcctgccctgggcaccccaacataggtcagtgtgcagccagaaagcacctcccctcccccgggcttctccacggtggtcagtggcgccccacgtccagccgaccgctcaggacgagagcctgggggccattcccgactcctcgtccctctcccaccccgtccctctgtaacttctcccaggtcagccgccactgtgtcctgctcacagcaatgactgcgacctctccgcatacacatcggttccggcccctcccctgctcgcgggactacccagccgggtgttcacagtgagctcagccgcgctcccgccctcccccgaggcttcgctcccacgcttcacgcgcgcggaacggggaacacactcgctgcagccccgcctgggccacggcaccctcgagcgccagccccgcgccccacccgggagcagcgagccaccggcgcgctccccaggagcccctgcaggcgccgggtagggacgccccatcaccccatttcttaaaacggggacggccctggggggagcggactacagggcgggtgagcagcggcgcggctgctcctggagtgcacctggaggcggcgcgcggctggcagggaacgactgcgaaggaagaacctgggtcgcggcccccggctacgtccgccccaagccgccgccgccaggtctgaggctccccgacaagcagccaaagctggctcctgtcacacccgcgtcccacctcgagtcctgggccgcccctcgggcctcgcgcctcaccgcacagcctgcggcctacctgcgtccgccgcgccctcggagccgctgctgctgacccccgctgacctccgctgaccccgcgctaaccccgcgcggcgcctgacgggacgcgggccggcctcagggaatgagctgaaccgcgtcccagcggcctccgcgctccgcttcccggctgcccccgcgcgccaagcacttccggaagcggcggcgctcgggaggaagtgccgatcggctgctggggcgaaaagggggcgccgggccgctctagccggtgaggccggcgggctctctgtggctgcggctgggaaaccgcgcggaggaggtgcccggccggggaccaggtggccgcggtttgcggggacgcggccctggccagacagaagagacgccgggcgggggggcgcggccggcctggaaggcggcgggcgcggcgggtgggctcggcggagggtgaggcggcggggcgccccgcggggaaggggctccggagtgacgcgggacccggctagcggcgagcccacggcggctcggaagggaagcgcggagcctgagcgggggtacccgggctgcgacctctgcgctgggagctgtgcctctgagccggtgtctccccgagggaaaggggacgtgcccgtgcccgtgcccgccctcaggctgtggggtcggtcccgagacgcggggctcagctggcttctcttcttgcagccctggtccagcgcctccctctctcagcatggacgaggagagcctggagtcggccttgcagacctaccgtgcgcagctgcagcaggtggagctggccttgggcgccggcctggattcgtctgagcaggctgacctgcgccagctgcagggggacctgaaggagctcatcgagctcaccgaggccagcctggtgtctgtcaggaagagcagcttgttggccgcgctggacgaagagcgcccgggccgccaggaagatgctgagtaccaggctttccgggaggccatcactgaggcggtggaggcaccagcagcggcccgtgggtccggatcagagaccgttcctaaagcagaggcggggccagaatctgcggcaggtgggcaggaggaggaagagggagaggacgaggaagagctgagtgggacaaaggtgagcgcgccctactacagctcctggggcactctggagtatcacaacgccatggtggtgggaacggaagaggcggaggatggctcggcgggtgtcc

SEQ ID NO: 69100 - DNA, 634 bp, Homo sapiens
atatggtagtggtcagccagggatttgggcaagagggtgtgctcaaacactcctaacccaaaaggctccccaccacaccatgtggtttcagagcacgttgtgagttcagccagcccctctctctttgctttcacttcaccctggcctctcttggagctcccaacacctgcagtggtttcctcaagagccaggcccttcctgggagagctgagcccttctgtggctctcattttcagagtcttcctgttaagtatctggctggcccagtgctcactccagctgggatcacagccccaaatgatcagggctgtcagttttctttgtaagtgtttatcgagtcaccacttttaactacgaggcctgggttttcccttctgtcccacatccacctctgctgctgctggtttttgcagccagccttgacctggtaaatcactcagatttgctgactcaggagtaggagccaggggcagccccaggtgcaaaggctgtagacttcccagtattctggcccaaggcccaacatttttcaagaagaatctcttctcagtgagttctcagctttggtcagtttccagaactctgaaaagttctaaatcagtgagttttgataattttgtctagttttagatta

SEQ ID NO: 69101 - DNA, 741 bp, Homo sapiens
ccagaggggtgtgtgtatgcgtgtgcgtgtgtgtgtatatatgtgggaggtcacctgacccaagcatggcgggctgagtccaggaggggtctgcatgttggaggtgtacccagggatcagtgatggtggtttctgaagccccatgtccctggtgaaggaggactgaaccaaggactctgtgagggcaggtgaggcgctcacagcctcgcgaaggtggagaagggcaggggcaggagagggctgcggaggaggggccacggtgcagcaggccgtggggactgccatgcactctgcctggtgtcacatgcccacagcagcctcggtgacgagagcacggagcccaagaggtggggtgtcgtggctctgcccaggatctgagctcattggtcaaagcccgggtcaccatgcacaatcctctggcctggctgggccactgccctctgtccatctcttgcagtggtggggtcggacgccgtggactctgcacagtcctctgccctctgtccgtctcttgcagtggtggggtcagatgctgtggactctgggacctgcagctctgcctttgctggctgggaggtgcacacgcgaggtataggctccagactcctcaccaagatgggctatgagtttggcaagggtgagtacaagctgccctggagaagtgggcaggctgctgcagcatagcccaggtccagcagccatcaggttcccggggtcccgcagccatcgggttcccagggt

SEQ ID NO: 69102 - DNA, 841 bp, Homo sapiens
atgctgtggtgttgcctcgagggaagtcgctggaccagtgtgtggagaccctgcagaagcagaccagggttggcaaggctggcaccaacaagccccccaggtgccggggaagaggggccaggcctgggggccgcccagctcctcggaatgtgtttgacttcctcaatgaaaagctgcaaggtcaggctcctggggccctagaagccggggcggccccagcggggaggaggagcaaggacatgtaccatgccagcaagagtgccaagcgggccctgagcctgcggctcttccagactgaggagaagatcgagcgaacccagcgggacatcaggagcatccaggaggctctcgcccgcaacgctggccggtacgtgtggggcccagctcagggcaaagggcgacccagggtggccctgcccccgggatacatgctggaggtcacctgacccaagcatagcgggctgagtccaggaggggtctgcatgttggaggacgggcagcgggcacacaggcagtgggtacggcagactggggttggtggcatggcccaggaccccacgctgactagtgagcccctccgcaggcatagcgtggcgtcagcccagctgcaggagaagctggcaggagcccagcgccagctggggcagctccgggctcaggaagccggcctgcagcaggagcagaggaaggcagacacccacaagaagatgactgagttctagagaccccacaagcactatggacgaagcgtgggaccccagcacgggctgccctcaggaagaccagtgttgcccgaggaggggccggcctgctggcctggggcgtgcagacactgctgagt

SEQ ID NO: 69103 - DNA, 1336 bp, Homo sapiens
ccgtgctgggtgttaccgtggtcacccgcagggacacggaggggccaggcagagcagccctagttcacctcaccgggagcccccgccagaaggtgggcacctctgggagggagggactgccaggccttggggcttcctgtgctgagtcagagctggaacgggagacgcaggagccccgcagccgcgggaggtgcagatttggggctgccaggtggcgccaggtccccttggccagcccccagcgcccctttcttctgtccccagggcctcggcttcacaggatggggctgccagtgtcctgggcccctcctgccctctgggttctagggtgctgcgccctgctcctctcgctgtgggcgctgtgcacagcctgccgcaggtaggtccctcagccgcgttctgtctggggcctcgctgcggctgccattcacagcccagcgcgggaaggggctggaggcaggtccgcgcacccagctcggcacgcgcgcctgcaccgggccttggacccgaggctgacgaccccgccccccgccccccacctctacccccaaggcccgaggacgctgtagcccccaggaagagggcgcggaggcagcgggcgaggctgcagggcagtgcgacggcggcggaagcggtgagtgccaggctgtcccggggaccagggtggggtccgcagggcaccgaccagccttcctcgcccccagtccctactgaggcggacccacctctgctccctcagcaagtcggacaccagactgcacgagctgcaccggggcccgcgcagcagcaggggtgagcagagggcggggcgggggcggccgggcggggcttactgtgcagcgcgtgccaacccctgggccagacccgctcctgccccctgcccggagtgaactctgccctgaccccacccccagccctgcggcctgccagcatggatctcctgcgcccacactggctggaggtgtccagggacatcaccggaccgcaggcagccccctctgccttcccacaccaggagctgccccgggctctgccggcagctgcagccaccgcagggtgcgctggcctcgaggccacctattccaacgtggggctggcggcccttcccggggtcagcctggcggccagccctgtggtggccgagtatgcccgcgtccagaagcgcaaagggacccatcgcagtccccaagagccacagcaggggaagactgaggtgaccccggccgctcaggtaacgtgggccagggtagggcgctgtgggtggggccggcagatcctcagcaggttggatggtgctgacccctcctcgggttggcttcctgtctccaggtggacg

SEQ ID NO: 69104 - DNA, 983 bp, Homo sapiens
tgccagcccgtgaggtccgtgaggtcctggccgctctgacagccgcggcctccccgggctccagagaaggcccgcgtctaaataaagcgccagcgcaggatgaaagcggccagcctcgcagcctgctcttcttgaaagctgggcgggttggggcggggggcttctctggaaggcttggagctgtcccctctggccttgggggactggctgcccccggggcgcccgggcctagccgaggcggtgctcctgccggccagactctcggtcagtgcgggcacggggtcccagccactcctagggggcagcgcagccggcagggtggccgcccccgggtgggacttggaccctggactccacgggagggctccgccacccagcctggtgttacataaggggtggtggaggtgggcagtcgagcgttaaagagtaacctgctgccgggaagcccgccaagcaatcgcggccccttccccggctctggcagctctgcgagcgcgcccgtggggaacgggccctccccggcggggcgcgcgggcgcgcgaggtgggcggaggcctcggagctgtgccgggccgggcctccctccctaggccagcgcgggagcgacccggagggggcgggcccggggcggggcctcgaagcgctggccggcgggagcgcggccggccgggcccgcccgcctgcggtgtggacgccgcgcggccaatgcgcgcgccgggacgggacgggacggggcggggcggggcgggacgagacggggcggggcggggcgggccgggcagcctccgggcggcgcggcgcgggcggcggccggatccagggcgggggtcggcggcccggccagcccggcccggcccggggccgcgtcctgagagtcagccctcgccgctgcagcctcggcgcccggccggccggccatggagcgccccccgccccgcgccgccggccgggaccccagtgcgctgcgggccgaggcgccgtgg

SEQ ID NO: 69105 - DNA, 1831 bp, Homo sapiens
gtgcccacgccgccgcaggtaccgggcgccggtgggcgggggcgccgaccaagtttctctcgctgcaaagatggcgtcagtgctgcccaaacttcgggcccccgggggcggggcagcggggagggcggccgcgtcggtccgcgcgtgtccgtgggtcccgccggggctgcgccgggcggccggggagcccttcccgccgcgccgggctgggggcggggccgggggcggggccgcgccgtccacaccggccgcagccggttttcgaggcgggcgccgagcggatccgcggcggaggttgagggacccccctcccccggccaccgcctccgctgagtctgccccctccccatccgcagggctcttccgtgggcggcggcttcgcgggcttggagttcgcgcggccgcaggagtcggagccgcgggcctcggacctgggggccccccggacgtggacgggggcggcggcggggccccggactccgtcggcgcacatccccgtcccagcgcagaggtgagcgggaggcccggtgcctcgggactcggtgtgcgcaggggcggtgggtggggtgcggagacaccggccccgacggaggccaggtcagggccccaggtttgtaattaccagccacccccaagctcttcagccctggaggagctgagcagaaatgatcgatgactgggagtccctacacctccctccaccgcagttcctcggggctagagctcagaacccggagcgggtggctgtgcgtctctgtgcagaagaggctgcgcggtcggcatggggcgactgtccaggaatccctggggctcctgaccgccacctcccaacccctgccaggccggacacctcggtctggctgccagggcaggggcgggccctggcctggctcgctggggcctggggagctgcccgtgcttccagcccagtctccccctggctgctgccggctgctggccactcccacctcccaggcctggcgtgaggcccacagctgctgttgcacaaccctggttaatgtgtgatggggggaggcctgggcctggcccgcccctctgccagggcttcagacccctgcccagccccagtatctgaaggaaccacagtggagccaagcccgcgatgtggagaactcaggcttcaggagaccctggccctgctcctggcggctccgggtggctttcagctctctctgcaacctgagctgggggaggagccaggcctcatgcccagggctgggagtggggagcctggtgtgcacgcgtgcccaggcctgcacgtggaccgaccaggggaggggcccagagctctggctgggtcacccgcaccccgcccccatctcctccagagccaccccaggaaaagcccggctggacgaggtcatggctgccgctgcccttacaagcctgtccaccagccctctccttctgggggccccggttgcagccttcagcccaggtaagactcagatgtctgcatttaggggtgtgggtggggacagggctcagaacctacagccacccagcctctgtggggcaagcagagccctcaaacctgggactcctttctaaaatggactcccgcaccctcagtgccccctactgaggccaaagcggcaggacccaggccttctggcctccctgacctgctcacctccacgcggctggccacacacgtctgccaaccctttcctgtgccgggggggtttctccccaagccctggggccagctcctccaagacgctctgcccaccagtctcaccggacttggtgaacaggggcagctcaggattagggactccctggacccacccgaagttctaaggcgggg

SEQ ID NO: 69106 - DNA, 2939 bp, Homo sapiens
ggaatgaaaggttaacctgacccggtttatggcaatactgtgtgatgggtgccttgatcaccacaaaaggatgatgggaacggggctgtggggtcccagggaggagcccttcacctggcctgggttacaggatggctcctgggaagacaatgccagctgtgcgctgaaagtctgtgcaagctgctcccgtgaaaaggaggacattggcatggcagggctgtgggcaggtcttagtggctggacattcccaggagttagcactggctatcattctgtagggctccctcccacctccaaactcctggcttctacaccagggcattcacagacagattgcagactcacatggtggcatgtgaggctacagatacacttgcacaggccagaggatactactgcgtgtcccctggagccaggcctgggctggactttgttcctggcttagggatgcaacacagaatgggacaaggcctctgctcacaatggtctgtaatgtcacatctctgtggtctgccctgaactgcctgaagcagggactattgtccctacatgtccctagtccccgggctggcctggttgggttgagcaagaatctctggaaagaatgaaaggcagcaaatggagaaaacattactgagagcacgagagcaggctaaggccgtggtggtaagggactcgggcctgtgcaagagtaccaggaagacacctgtgggaggaggtggccgggtgaaggaaggggcagtgggaggagcttccatgcctagggaccagtaccaccccaggctggaagcccagagtggagtcctaggacatcagatcctaaagggcttgaataccgtttaaggcttttcttccgggagcaagtaggagccaaagaagggaagttgcgggacttgttttcgtggggccagttgcctggtggttacgcgcctctcctctgaagtcaggcatcctgttccagagtatcctggttgcgcttcaacttgcggagtgacctggggcaagtgactttaacctcagcttcctcatctgtggagtggggagggcgcagcgctggtcgccctgaacaggaagtgagacaacctcggggtgcacacgcgcaggcccgagccgcagggtccacgcccgaggcgaggcggcagcggcgcctgcagggcgaggggacgaatcgcgatctttttcagagtaacccgcgtacaataaaaagtccccatgaaaaggacaaactagccaggcgtgaggggcggtggctcacgcctgtaatcccagcactttaggaggccgaggcgggtggatcacctaaggtcaggagttctagaccagcctggccaaggtggcgaaacccccgtctctactacaaatacgaaaattagccggacgtgttggcgcgcgcctgtaattccagctactcgggaggctgaggctggagaatcgcttgaacccggagggcagagattggagtgagctgagatcgcgccatggcactccagcctgggcaacaagagtgaaactccgtctcaaaaacaaacaaaaaaggaccaactaaaaaaagaatataaatacaataaataacaggacttacgggggcaggctgacccctaaagtaaggggtcgggctggaaaggatctcaaggggtcagagtttgagccgccgaggcgcgcgagccccagcactcctaggcagctgcatccgccccggaagatcccctggggccctgcgctggctttccacagcgccatgttggacggtcctcccacttcccaccttcccagtcctcccgctactctgaccgttctacctgtgattctcgctggtggagtcaacctggaatggattcccgccgaaccacgcctccctttcctggttcgcccgcagtttcggcctatcaggttgagtcgggtaaaccaggacgggccaagcggcactctcattggatatcactggtgggggcgggaagaaggcggagcacgtgcccgggcggaagtagccgtcgcatcgcggattacgaaacgccgcggagctgaggcagttccgctggctagtgtgtacgcggcgagcttctcccggcgccgcccgctcggctcccatagcgcccgcgacagcggtccggacgccgcccgaacatggactccgccggccaaggtacctgccgggcccggccccttcgccgcagatgggcccaggctgcccgttgttctccgtctcccggggtcgcgtctgcgactctctgtcctctcggtctcggttcacccaccccgcggcccctcttcagctcccggggccactgacctcgaagcttatgatggtcgtggtgtgttttttgcccgcggcccagaccgcttcctgggctctctccagccgccctcctggtctcccctgggaccgttccgaggtgtggttccctggcgcccgccgttgctcccgtagtttgggttctgtcgctcccagcaggtctcgcttatgccgcccaccccgtgccctgctcttgcttgctctgccaccccccggtccctgcgcggggccctcgggttcacgctgtctggccctggacccagtccgaggtgttgagggcggctcccgagcagagaaggggtcttcgcgttcagcagagctccccttgggcagcaactctgctcggagctcagcctgcttaggggttgcctcatggagagggggtggagtgagtcaggggcacacccagcataccaggcctgtttccagaacagtctccccagagcagtatgagatggccactgaggggcgtggagcgagcccaggagattaaaatcttgagaagatgataaaagtctgccttgcattttggggctctagagagggatgctaaatttctttctttctttctttctttctttatttttttgagacggagtcttgctctgacgccaggctggagtgcagtggcgcgatctcagctcat

SEQ ID NO: 69107 - DNA, 2532 bp, Homo sapiens
tcccatctcggcgctccagggttgagcaaatgtcagtcccaggacggtggctccgggtgggggcgggggcgacggtccgcagccgtctcccaccagctccctgttcagttctttgatgagaacgattacgttttctcagtcttacttaaagcgctgagtaaactcacctgcaagaccagcaagccctgcgcttctctttctgcgcggttccccgcagcacatggcgtgtccacccgggacccacctgcggccacctgaagactgggaggactggctccgcccccgcgcttcgtccccgcccactcatgggcggagcctccacagggcgcctcggccccgggctgtcactcgggactccgccccttcatggacggagcctccgctcggctctctgagcgcatgcgcagccggtcccacccgcggctccgacacgccggagcccacgtccttccgggagcgcgcgcgccggtgcgggtgcgtgcgtgagcgtgctcgtctccgctgccgctgccgctgccgctgccggtgccgcacccgcgccctctgccgccgccgccgccgccgcccggggtctccaggctgaggagtgcgtcggccgctgcccagcagcgccgcgaatcggggagcggagccgcggagccggcgggagggcgggcgggcgggcggacgggcaggtgagctcgctgcgggtcgggcgggcggatcggcccacgtcaggcccgggcaggcgggcgggcgggcgcgggtggggggcgggggcggcactccagagccggaaatggcggcgacccccgggccggggctgcgcgggcgctcggggccggagctgctgcgacgccgcggcctgggccggggcgggggcgcgggaaggtcggcgccggggcctgcgggagccgggccgggccgggccgggggtctgagcaccgtggtgggggctggggcggcgctctccgcgggtctcttcgggcccggacgccccctccgctcccccaggtccccgcggccgcccccaaccccccggggtctcctctcctgcggggggactggagaagctgggccatcgctggtcttagggaggcagataatttagtccctgggtcgttgtgtttatagctcggggaattgaaaattgttctgtaacgcatcgtaaattaatctttccgacgttgtaaattccaaaaagcatttggtttgttagaaaaaacctgttttctccgctttataaaaacatttgaagccatgctttatattgaactcttaaggagagtattaggaactcgtccgttcaggttctaacttgttggtgttaagtgtctggattaaagactctctttttcgtgtgccgaagccatgatttctcaaattcattcagttgtgtcatacaggaaaaggaagcaaaaatttcagctttatttttgttttccggcttaggcttggttgggaagatttgatggtggttagacacgtctgcccttatttgcctgtttagaaaaacctattctaatgacaaaaacagttacattgctcccactattgtcatggttacctgaaggcaaaagtttactcaaagcttctgagattttatgttcgtttatttgcttctctttttaaaaaaatgtcagctgagtttcaggaatgagtagtctgtcaaacaagagatgaaattagaagcctggatctaagggctttggggaagtttcggttgagttcccctttcacttgtgtcggtgctgtaggactcggggtggctccagctggcgtctggcccagcagagagctgtaggggcccgctctggttgctggctgtgtggactctgagggacacccctggcgagggtgttaatgagcctgcagcgtctgagtccacccaccctcagactggcccctgactcactctgcacctgccatatcagcctccttgctagttctgaacagagccacatgctctgtccttggatcttcctggaatgcctggttccttaaccccctagcctggcgactgcctgcctgccttgccacccagttcccttcctcgcttaattttcccacagcgctgaatcctcctagtgtcctgcttaatgcatttatcatacttaatattttactgtgagttagtaaggtccgtggagagaatgttttgtgaaaaaaacagttgctggcacatgatcggggcccagtaaatatttgttcagtgaatgaacgtgaggagcttagcagcagctgtgcgtggtgctggccttgtcacccggaagtccttgtcggtgaggactgagcatgtagaggtaagggttcctggagtgttggccctcaggacagagagccaccatctctcacctgcccaatgaggaaagacagccaggtaaggggtggcttggaagggtgcatgggacccttgtaaatcttttcgcaactttgaatctataattattttgaagttaaaacgtttctaaaaagtcagatctgttgggggcacagtggctcatgcctgtaatctcagcactttaggaggctgaggcggacggatcacttgga

SEQ ID NO: 69108 - DNA, 2590 bp, Homo sapiens
acaacgcctctttggaaccagcagaggaacagactcaggccctattagactccagccatgcaaagttcctagtcactgcccactgggagggtgtggacctgaagggacgcagggccaggggaaagctctttctgctcagcagctcctggagaggagcgaccctgtgccgggacacccttccccctgcggcatccagcgcagcccatctctgagggagtcctggctcacagcgtttctgacaggagtcacagcctgaacccaggcaagaggcgcctgagtgggaacaaccccttcctggggaccccgcgggctccccaagggacacttcagacccggaagggaggggcagcgcccagagcgccctcttgcagccccgggcactgcgtggccaccgccccctgacggccacggccccaaaggcgccgcgcagggcccggctcccagaggggccactcggggtgacgaaccggggtgggggcgggttcctcccgctgcacccccacaacttccccacttcatgctcttgcaaagcccccgcagaggctcgaaggtgccacgcgcgtgcgaggcaatccgaaggcaccgtgcgccgcagcacctccaaatcctaagccctggcctcgcgggtcgggcagggccacaccccgagccgacaacatagaccaactcgcacagtcgagcaggcacacagcccgccgggcgctcgaggccgagggccccacccaccgggggcagagaccaaggtcaacgctgggggtgcgcacccggactccttccccgagccccgaggagcctgccggcttgggccaggtccgtcctcccggccgcttcaagcccgcggggttccacccggcacgtgggagaacggggcgccgccgcctggcctccgggagtgggggacttgggctcgcggcggggacggaccacccgcccagctcggccggatctgcagccccttcccgctcgccagtggagtggaggcgaggcccacgcctaccggtcctcgcacgcggtctcgcttttctcagcctgccggcctggtgtgtctcgggccgtaggtggcgacgtgggcgaaggatcagcgtccgcgcgggccgggggcgcagccatggcgctcggaggcctctttgcgggcctggccgggcggcgcgcatgggccgccgggagctggcgggtccctctcttgcccaccgcggactacaagccccacaaggccgcgcgtcgcggactacaagccccacaaggccgcgcgtcgcggactacaagccccacaaggccgcgcgtcgcggactacaagccccacaaggccgcgcgtcgcggactacaagccccacaaggccgcgcggcgggcatgggggacccgtagttcggcagcctccgccacgtgcctggagggccccgccccctgtttttcaccacaaactgagccgcacaaaaaccctggaaaaaaatcaataaacatttatttgatacagtcattttaatacatacagtgatggcccgtccccacgccactcgggaccagggcgcggggcggggacgaggaccggggacagatggtcacaaggcgggcggggcccgaactcaccgttgaaacatctcgcaaataaacactttgtagatagaatatatatgtatatatatatggttacaagtgatagctggaacctctttcaaaatgcacttatgtactgagaactggcattaaaaaacccaaaccaagaaacccaaagcacgggacgcccggccgcgaggcaggggaaagcctggggccccagacccgggcctgggggagccgcctggggccccgccaaacgcggcacacggggacggcccctcccggggtcaggctcactggctccttcccttcagcgccaccaggcaggagggccaacggtcacacaggaggcaccctcacctgcctttgcaccagcaaataaagtgcatcccattttcgtgtgagcgtcggcccggtgagtcagcccttccgggccctttcctgttctcagggcagggggcgtgcgctgagccagaggtagatctgcagaaagggccccgactgggcctcgggcagggccggcgcccaccacactctgggggtcagctatgctggtccctctcactgagggctcctggaggcctatgtgggccagcgtagggagtgggcagaccctgctgagctccacccagggccccaccccttgggaggagggctctgcggaccagcatgtggcagagggagggcagaaaggagggggtcagacccaacagccacttctggcagtagcccccacgcctaccttaaagacaaagggggttaaagtgctaaacatcaaggtatccaggactcctcttcccacaccagggattatctgtgggctttgggagtgtcccggaaactcacccccagcaaaaaccagaccctcttctcttctccccaagggccaagtacctgagaggctggggcaggcaccacaccctgcaggtgttcaggtccaccctcctcccgccattggtggcaaggacaaagtgcacctaggcccccgcccagtgcctgctcccctcccctcccctcccctcccctcatgag

SEQ ID NO: 69109 - DNA, 1804 bp, Homo sapiens
tacccaggcaggtacccttggaatcttctctccagacacagatggaaaacagccaaggtgggcactgaggacccctggcccaatctggcactgcaccaagctcccgtccctgtgccggctgaactatcctacctgatgctcttcgcagacttgtctccaggcttggcaggctgacccgccccccacctctctctggatcctctcagtcctctgcctacagacccaccactaccacttcagccaaacaagtcgtggaagcaccagcagtgaaggcccaggatgctggccagagagaacgccctgctgcccaaggctggggcccccgagggcctgtgctgctgggaaccccatcctgagagctggggagcagaggagactctgggcccagccctgtggaaaagccacggaagggggtgggacaggaagcagggtgagggttgagtgggcaggtggccccctcctgatagcttctaattaacttggatccgaggggatgggaaggggctgctgtgtccaggagggccagagagctgaggtcagaggtcaggacagtcactgcccattgccaagggggaggccagtgtccggggacaaagttctctggaagtcctcactttgcaacttttgaaaggagacagggccggcatgagtcatcccagcacctgatgaccccggtggcctggggtgcaggtgcctgctgaggccccacttccaatttttctgaagcctgggagaagaattcagaatagtggggcctgaggccagggccagcctgggaggcagagacgcgactggcgccccggatgagaaggggcttcggccctcccgagcccagcggggacacagagccctcgcggggagagggggctccgccgcgctgcgcgcaggagacgccagcagcgggtccgccgcgtaggccgttcggcccgggaccccggcccaggcctggcgcgcgggtgagcgcggccagggacgcgcacctggggccagcctcgccacccacctgtcacctggggccgggagcgggcgcggggcgcgggcctcggcctggccgggcagggccgatcgcgggcgcggggtgggggggcgaaggcagtgaaccaaaatggcgactttttctggagaaggaggaggcaggaagacggcgccggcgcggggcgcgggggctcgggcgcggcggggggcgggggggctccgggcccggccccctccttggcctgcgcgcagggtcgagatccggggcgcggtgggcgccggggctgcggccagaatgggtccggggcgcggccgggcgcttacctgcggcgcccagcggggctgcggccgggccgggccgggccggggcggggggcgcggggcgcggggcgctgggtccgggcggcgcaggctgcgcgccgcgctgcgcacatgcgcgctcccgcccctcccacctttgacagttttactgcgggggggagggggcgaactctcgcgttattcccgcggccgctccgcgacggggagggggcggggagggggcgggggcgggggcgggggcccggcgctggcctgtggttcccccgctccgcggttccgcccccgtcggccgggcccgcagtccagagtagccggttctgccgtcctggggcgggggacgttttttggacagtggggtaaactgaggcccgataggggcgctaggcactgcccggagtccggcgcgcacggattgaggcgacctgattccgccgcatcctggcccgcgcggcgagtgtggtctctgggctcgggaccctgacctctggccctgggggccgtgcaccgg

SEQ ID NO: 69110 - DNA, 568 bp, Homo sapiens
gagcaggatggattcttagatcagaggatgtgccctctagggaagggaacctgagacatatgacaagaggagctatcctgggacagccctgacctcacccttgccttgggctggcccacaagtcttgcacacaccacaccagaccaggaagtgcacacacggcctgctttgaggaaaggcagatcccgagtccggggaggtcgtctgtgctggggaaaccgggctgaggatgctgcttgcccatcgccactgaaggcacccagttcacacagccctatctggtgttggggcccgactcactgactatgactcattgacagcctgaactgtgggccaactgacaagcagggctcactccgcaaacacgcgctgggctctccagctgtgccgccccccacagggcctgcagcccgggacaacaccggccatgtgaatggtgggtacccattggatatgggcgggtcagcacaggtatgtggggtgcagccattgcttggggacccacggtgatgctctgtgctccctcttcccacagtaactgcattaaagtgtttcatctgagctttgt

SEQ ID NO: 69111 - DNA, 1559 bp, Homo sapiens
tccaggtctggttacagaggggcaccccacattcattgtcaatgaatgaatgaatgaaggctctgtatggtatctgcaagtgaacagagcctgtggggagacagaaggtgggcacaggcctgcccctgtctttacagcaccctagcacccaggccttcagcagggcaggtgaggttcccacgctagggccctcatcccatccaccctagagtgagagaccctcccggcctcagactcagccacccactccacacccagggcaggggttggggatgtgtctaggaggtctaagtatcggtgaaaaccacatcctacttccccgtcctcccacgcctgtaagacttaggagacataacaccttccgcccccattcttgcaactttcaggaaccggacccctgggtgactccaaatttgaggtctggggtcagcagagggtgtgctcagtgggccaccgccccgaggtggcccctagtgctgtgggaaaaggcttattctaagcccgcgccttccagcggacaggcgccgtggtcgccgggctttgcagggcctcgagcggcggggctggtgcagaagcgcgcggcagtccggggaaacccgtcggactcctcagcccgcacggcacctgccccggccaagcaggctccgcccatttcctgcctgcactcccggagggagttccgtccgtcccgcggtctgtcggtccggtccctcccgccccaacgtcaggattccagaaggaaatggggcgggggcaccgaggcgggatgtgacctcggccccctttcggccccactgcaaaagcgggggagggttttccccgtgcgcaggaaaaggtgacccgagcgtagtgccagcctggacacaggcgccccggcttgacaccccctcaccccaagccaagggcgcgctgacccccaaggcctgaggctggctgccccctaaagcaggacaaaggctacgggaccccgttgagccgagacatccgccgaatacccccagccaccgccgctcgaagcccgccgggtcccgccccgcccccgtgcctctgggtccctgagacccccgcccgagaaatccccgctccccaatccagccccgctcaccgtccacatcccggcgctccccgaagcccgcgcgcacggccccggcgcggccacgcggggggctcagcttggacctcagctcggtgaacatggggcccgcgggtgccaggcccgcgcacacgcccctcgccgagtgcagggcggccggtgtggccggcggggaacgcgcgccgccgccccgccccgccccagccggccccgcgcccgagccggtccccgcggcccgcgagtgtgcgcgacgaggcacctgccgccgagccctgtgtgccgggcgcgctccgggagctccgaggtgtgtcggcggcgcgcgggcctgcgtgcaccaaggctgtccgccagggcgaggggcgtccgtgcgcccctgggcacggctccgcggaggagagtccccgtgaacctgccgggcgtcctctgaggtcgggcccctctgtgcgtgggggtgggctgaggggca

SEQ ID NO: 69112 - DNA, 2281 bp, Homo sapiens
ctcacaggggtcttctacctaccggggccaggacaaggggcaggtcaacgcctcccacacactttcctcggtctcctacgtctttactcgccttcaaataggcacccgcttccccggagaaaccagcttgactcttgcttaccgcccaccccactgtgaacatcagggtggttctcccttccctctgcagccccagaacctggctcagtgcccgggggagagggggcggtacagtgctctgtaactgaaaggggcttggcttgcctggagatggggcagaggggaactccaaggaggctgtagcaggccggagcggtgtgtttgctccaggactccagtgagaagtgctgagatggggctgggctagggaactgtggttgcctggtgcagcagcaggccaggcttgcaaccagctattcggcttgctctgcccaggagcctgggtgctctccctgggtgtatgtaggggctctggaggatgtcttacagcaggaggaccagagatgcacacagacatgtagaaatgcatgcacagagtacagtcatgcacttgcacccaaaacacgagcacacgtgacctctgtgcacacaccccactaatcacacacacagaattcacccacatgcttgacagccatgttcatgtactgacgtgttcccgacagctcagctgcggttatttatttcgtcaattagctctccaggagctaaggatgtggccctcaccagaatgtccaaggcatgttggcgggcgtgggtggggtctctagtcccactggagggacagatgcctgaatgggggttcaagaatatgagtgctaaaagcgtagggcagcagtgtgcgcacaggacgcacacagacaggtgtgcccataaccagtacacacaagctctacacaactggacagggtacagctctgctcggacagggcgcaccaggggcgagggcgggcagctgggctggttcagagggagggggccatgggttcagagggaggggaccatgggtcccactctcacagacaggtctccggactgcatcagagcactcgggaagcagcaatgccccaggctgtttttagcccccaggggccagttagggtcccagtgcaagctcgacctagcttcttccgcctctccacgaggaggcgctcccgcgcacgcgcctaccacgttcctgccccctagccgcggccggaagtcgtcgaaccaggacgtcgggacttccgcccagggaatcaaaagtgggcggggcgtgtgcggactgagcgctctgcttccggggcgcgggtgacgcgacgacggcgacactttgctacggagtgcatcggacgtcgaagcctagagtctctgcgtctttccctcttccgctgcctcattcctttccttcctagccttggtcgtcgccgccaccatgaacaagaagaagaaaccgttcctagggatgcccgcgcccctcggctacgtgccggggctgggccgggggtgaggcctggggcggcgcgcgaggggcggggacccggctacaggagcgcagtgctttggggcgtgtttgggggcgggggtctatggccgcgcagtctgaaagacgcttggtggatcggcttaatccctgcaggaagcaacgggctttggggtcaggacatacctgtgtgtgcaccctgcttgccgcctagatgtgacacattgactctcagcccagtgttttggtctgtaagatgggtaatgctgtatacggtctgcagtgaggagtagaggaatctgacgtgtagtggaaacacgcgaccaccttcctcaggtcgggctgacactccccccccccgcccgcccgcccgccccgccttaagcgtgcctgggtcctctatgcctgcaacacagatgaccaccgtgcgttgctggataagtgagcagtcgttattatcctatttggctattcatttgatgaggaacactactgggtttttcttggtggtggtattatattggaatctgtggggcacacacaagctcactaaggagggtttgctattaccataaataagtacgtaaagaggaccagatttagaacccagtgcttaatggagagtagcattggagccaagtttagtaagagagctggacttagggctgtagaaacggtgacgatagaagagaaactgacattctgcgtgtgggagttcaaaaaaagtgaggcaaggaggaagcccagggaacaggagggagtccagtgtgagtggaatgtacagcgaatagaatagagctcaggaggttggaggggcct

SEQ ID NO: 69113 - DNA, 1224 bp, Homo sapiens
gtgatgcggcgccactgcaggacgctgcgccaggtgtgcgtccctgagtgcacccagagccagacctcccttaacccccacagggccgccgcgcgtcccggggctccacggccctaggctgaagtcgggctgggtcgcgtctcccttcccgggccgggccgggcgcgggggccgtgcgcattcgctgaccgccctgtccccgacagcggagccggcggcccaagatgcgccctgcccggcgtcgcggcggccgaaggcagctcctgctgcgcgccctggacgccgtcgccacctgctgggagaagctcttcgcgctgcgcgccccggcctccagggactcctagcgcggcccgtcctggccctgcgcggggaggagaaccagcggggccgcggcagagcctggagacgcgcctcgttctgtagacttgttggtgacctcggcccctcgctcgacgcagcccgcgctccccggagggcccaggacttggagaagggagcgcgcctggccgccgctgggtcacggaggaggcccgccctccacgcgccgaaggcctcaataaacggagctggcgctgcgggtccggcactcccttcgcctgcctctctgtgggcctaggaccgccccgggatctgcgcctcggtggcggggggcggtggagggggaatgcggagacccgcacttcctgtggcacctggacggggcggagccgccgctcccagcctcgggcagcagagggcggacgcgggacgctgggcgcgctccggctctgtcagcggctcccggctgggcggagggcagagcgggggactcctggggcccctaaaacgtcacgtatccgtcctgctccactttggaccggggccgggggtggaaattgaggggaggggaaggctggacttggtgaattcggagcaaaacaaccggataaaggaaacgggcccgaagggaagcgggagctgcgggccttggctgtgagcttggccaggctatttcctgctgcctccggaggggtgaccacggcctgggctcagagactgcccagccccctctgcaggactggccaggctggggcccgctttctggcccctggaaccctccatttgctgggggactgtcccctggttcccccatctgatgcgcaggtctgggagtctgtcacccccctcccccaatctcggcccatggaggagcaggggaggtaaagtacctgacacctgttaccc

SEQ ID NO: 69114 - DNA, 5180 bp, Homo sapiens
caggaaaccacccagcatctgcattactggggagctgccaggcagtggtggggatgctggccctgcacctgtccccgtcctcaaccctccctaggcctgggccatctctctggctgcctgcagtctggccctacctagggacctccaacaacaatgtcaatgaacactaattgtcatgctccatcccctctctgttctcaggcatgtgatgtgaatcagctgacatcatcttgacgggagccctgtgaggcggacacttaactccagtttcacaggtggggagactgagacacagtggtcaacgtgcagagcccagaatctgctccctggtagctgactttgcaggcaggggccttgcccacgcagcctcggcagaggcccccgcacttcgcgaaccccagcaatggccccttccagacgccacgtccagctaccgcgcgctcacacctgcagggccccacaagaggcctcccagtgtgcgcgggcctcttgaagaagtaactctactcagaagcccgaatgacccaaactgggctctgggaggctggggacggccttctaggccaagtggggcgcgcgcagggctcagcggggcccaagagaagggctgagggcactgggtcctgagccacccaccgaaggacgccgcgggacagcaaggcccgaagcaggaggagagaagggagcagattcctgggcctcctggggcccggtcgctccgggatgtctgagctctgggaggggcgtgcccggggcgcctccctcgcggggtattgtgggatcacgagtcactggcgacggtgggtcaggactacacttcccaggaggctgtgcgcgccgcgtggcgcctgggagttgtggtccagagcgcgggcgcggcgggcgcggcaggcgggcgcgtggactacgcatcctaggatgccgcgcgcggccgcggggccgagggtttgaaccgggggtctgtcgtccgcggcggggctgcgtcggctgcggcgggtgtgggaggtggcgacggccggggccggggtcctgcccggctgcggaggcgggcgcgacgggcgcgggggtcgctgctcctgaggcgatgatgggcaaggaagaggagattgcgcggatcgcccggaggctggacaagatggtgaccaagaagagcgcggtgaggggcgcgggccgccaggaccccgggaaccccgccccgccgagaccccgtcgagcccgccgacccccgttagggccggaagacgacctgaggggcaggacgagacccctccccggcagagactaaccgggacgcaggggagacccccacccgtggccgagacccctgccccgggccagccctgccgttcactcccgcaaccccggcagaggccgcgatcaggcctggaccttgtcccgggagagccacccgctctggactcagacccctccctcgcccgcagtcacaggctccgcacccttccctgtcccttaactccagacccccagcctggcccgtcgactccttccttggccctgtcccgcctctcggagcccccggggtgttcgggcctcctctgcgggccgcgccagccccttgccttcctccatcccggcctgggcatcctcacaggccgagccccgccccccaactcagccctctcccacgctccgtctcttacagcgtttgtcaccctccgtctcccatagcatttgtcgccggcaacagtttggagtctgaggttggatccccttttcttctggagcttccgtgcctcccctgcctcttcccagcccttgtcatcctccttcacaggccagccagatacctgtcttgcctgtgggcccattttcttccctgtctgtccccaccccacaagaaccaggtttctctaataaattctctcccttctttagccaggacttagcccgcagcaacttgggttgtgggtagttatgtggacaccctccgaaaagagccggtgtgcttatataagagccaggaggtcgggcaagcctcctctgggagtgtctgggcgctggagcctctggccggctctgttcactgcggcctgggcctctgttgtcttgcggccacagcgagactttggaggaggctgtgtgtgaggactttgaaggggccaggtcagtgggggtccagttccagcgtcatgaccttggcaacctctgcaccctcccacagaagcatctttagaggatgctgcctgcctcctggggggtggggaggggtctggccgcaggtcatttggagctcctggctggctcaataaacgtgacctgtgctttcccacccagactgtgaactcctggggcagggccagctgtgtgtctgccaggccagcccagggcggtgaaggtggctgagtcatgggctttgggtgatttgtgcagccaccccagggctgtgtgactgcagtgggggtttgggggaagctttttgggctgagcagggttgagtctgggttcctgtgaccagcgttctggactggggtctgccctgggaaggggtgggctcccactcattcctgctgggtgcagcacccccatcattgcgttcacacacaccccggaaaactggtcagcacaaagtaggggtctgcgaaccattcatagctgtttccagagatgacccgagaatggagttgttccccttcttaaaggagacaaaacacaaacgataaaagctgtaggtgggagaagcaaagatgggtcatggagccaggggagggctgggtggggctgggcagaactgatggggggtttctggtggaagaacagcttgagtagaagccccaggggagaatgaggaggggaggcgggcgctgtgcagtggggagtgggagccagcagagcctcctgggggtcccagtgcctgaggtcccctcggggacctgggggccaggtgtgggggtttttttgcctctggacctgagcccactgagagccacgtaagcaggtgcagggctttcaggggacagtggccttggctctggctatcacctcaaggctggactctgtacagcccaagaggcagggcctgcctgggagggctcaggaggggctgcagcgtgagcagactatgccacccggattgctggggttgtgcgggcggtaggtgggacaagcccctcccatggcctgtgggtcgtgggactctgatcaggtcaccttagggcagagggaatgatacacacgtggaaacacatgcacgtgttacagaggagatggggtgttgcagggcacagttgcagttttaaacaggagaggccttgctgagaaggtgttgttgaaataaagcccgggagggagggagggagggagggagacgttgtgggaggccgccccaggcggtggagctgcaggtgcagagggcctcggtggcggctcagcgcccttggggagcactgagttgccgggcctggtgtggaaatgtgaccggtttgtgcctggcctcgtcagtgttgaggacctggaggaaacgcagatcttgggtggggagacaaggcggagagaacgaggtgcattggaacagtccaggcgaggggtgctggcctgcttgggggcaactcagaggcctggaggatagatgaggaggggggctgtgggccttgtaggtgttggctgtggccgtgcctggagtggagggacccttgaaagtttggcctcagctcgggacactgatgttcccgggttggcccttcatgagagtttggcctcagctcgggacactgatgttcctgggttggcccttcacagctggtgggcggggggtgctttggggagaggctgccctgcgcatcagggcatcaagacacaggggagtgaatgaacctggggctgcagtttcacctgggtgtggccctggctgctggggaggggccgtggctctgaagcctcatgattggccaggggagctggcatttctgttctggtttgggtcagtgacctgaggtggttacaacgaagtcagtgaggtcattgccacggatgtgggttacaacttggaatgcttgaggctgcagaacccctccccttcttgactgagcagtaagggttccctgctgtggtgcaggaacatgtgggcagagccctgggtgtctccaggtagaggaattttggtttctttttgaccccaggttgaatctccaaattgtcactgccttgtgttctcctccagtaggcagaaggaggtgatattgtctgttgagatctaaagtcctttatgaaggtcctccttctccttccaggagggagccatggatttgctgcgggagctgaaggccatgcctatcacgctgcacctgctccaggtaggtccctgcctgccccaggtccaggacagctcctgggtgcagcccaggggatggcagttctgagggcacctggcagggcttccccaccctccccaccaggccttagttggcacaaatgcctgttcctgaggagagggtctctgcctttctctgggctcagtgggacagggaggggagtctgaggataacccatcttgtcctccgtggctgaggctcctgggttccaaatgggacagtcgccattgggagaggcctctacctccctgggaggtcccgggctcctgtcctgtgggggccaccaaggctctgccaggagaatctgacccctagggtgggcccctgcctcccccaacccagaccacttgcctcgtagtccacccgagtcgggatgtctgtcaacgcccttcggaagcagagctcggatgaggaggtcattgcactggccaagtctctcatcaagtcctggaagaagctcctgggtgcggctcaggcggtgcccactgagtgctggggcaggggtcccagaagtgctgcctcttgctggtcagcacagtgtagagtgctggcagtgtccaccctgagccaggtcgcttgggagtggggcagtggcaaacccagaccatgaagcgcccagcttggggctggcagtggatcagtgggtgcctgtcagcattggctgggaggtgtggcctaggaggccagggtgtgtgctgggggcagggttccaggtagaacaaggagagaagagagttgaggccaggacttgaactgacagcactgagagactggggtgagttgggaggtcacacagaggggaaggtcatggccaggaggctgggaagtgccgggagaggggaagcgggaggg

SEQ ID NO: 69115 - DNA, 1039 bp, Homo sapiens
ttcccatctgccaccctccacatctggctggtgggcgagccctggcctggcccctccagggaaggccagctctccccacctctgaaatggtggtggtggcccacccaccacgctcctctctctgctgttagggtccagtctggagaagcctgtgttctcctccaggtgcctctttcttcagcctctgacgcccccacccctacctcaaagctccctactcaccagcgacccaaaggcggggtgggggcaggaggggccaggttgggtctgggccccaccctggctgccgaaggggcgtgcactgcagcagcagggactcaagtcagacggcaggagggactcctgcggcgctctggagggaggctagcgccaggagcccccgatcggctggggccgggggcgcagcgcctcccctacagctcgaagggctgagtggctgccagatccagcggggtgggggcgggggcggacagggtgtcccgccccggcccctcctcaccgggctgagagggggagggagacgcggaaacctgggttcttccggcccccacctttgagcaatcacttccccaggctttgagctccagaaaaaggggaacccggctgcggcgccccctcccccacgcgcggggggcgggctccacttccactgcggcccagggtccacgtggacctggcggcgggagcccttggggttcgagtcccgtgcgccggctcccgaagctcccgcccagcacggtccccgggcccgggccgggaggggcagggccgctgtccccggcgctgcgcgcgcgcactcaccagccgcgctcccgagccactcgcgccgccgccggcccgcgcgctccaaggtccggcccgacagtcggggagggggcgcgggggcgcagtgcgcaggcgcctcggcggcacttccccaaagccaggggccgggacttcctcgcgccggcggtcgccgggcccgccccgcccgccgcgccccgccccgcgctcggccggctccgcaccccacccgccccgcccgcgcgtcggcccccac

SEQ ID NO: 69116 - DNA, 1072 bp, Homo sapiens
tgcttcttctgaagcagatgaccaggaagtgtcggaagagaattttgaggagcggaagtatccgggggaagtcaccctgaccaactttaagctgaagtttctctccaaggacataaagaaggagctgctcacgtaagtccctgtttggctggcacagctcctaggggaccctctgtggcctggggaggaacaggccctggtcccaacccatgacgaccgggtctgctcaggctttccccgacctgtcctgaccacctcgagccaggcagcctgtgacaggagccagggtattcagaggtttcccaacacctttgtgttgtgctgggctttactgcaatcttctaaaagtgattaagaacaaagaaatcccctggccaagctcaccaagcaggacagagcagggcaggggcagagtggaggagagctcctcagagagctctgcaggaagccctcggggcacccagaggcctggccctctccctgaggccgcagctgggcacgttctgccctgggctccatggccaaggcctggaatgtactgccttagggctcaccaccctcaactctgtcagcctggctggcccagaggctgcgtgtctgagctggtccgcatggggttggaacagacagagttgctgatggatatgaatcagatgtcaatgaccttctggtcagccttcattgccagccacctgtcctaggggactgtgagaggctgtgcctggcacctgctccacaggtgatccagctctcacatgtgctcagagtacatttctggggtccctcttctccccaacctgaacccctcttgtaccctcacacttgtagcttgccctcctgggagtggctggatccagggaaggccttgcttcagggcctggagaagggaaggagctcctctgcctaaatattcgtgggcacatacacgtgcacacacagcacatgtgcgtcagaggcatcctaactttaagctcaactttaatttggttactttttcttcttgagttaagttgtgtgggagaaacttccagcctgagaggcaccggctgtcctccaaggactgagtggagga

SEQ ID NO: 69117 - DNA, 971 bp, Homo sapiens
ggtgaccctgggatggcggtggtgggtgacccggggctggccgcggtgggtgaccctgggatggccgcggtgggtgaccctgggctggccgcggtgggtgaccctgggatggccgcggtgggtgaccctgggatggccgtggtgggtgaccctgggctggccgtggtgggtgaccctgggatggtcgtggtgggtgacccggggctggccgtggtatgtgaccctgggctggccgtggtatgtgaccctgggatggtcgtggtgggtgaccctgggctggtgaatgatatgtggcctctgcttccagtttgtcaggctgtcccagagcaacctttgctggaaagaagggaaaactgtcaggggatgaggtcctcagtccaaagttcaagactagcgacggtaaggatggcttcctggatttccctgctcatggctgggtgccagggtaagtgagagctgtgcaccttttgtgctggtgggaagaaggttagggagatgaagcccctcctggaatgagtcacggcagaggcagatcccttcacctaagctgacagcctttcggaccttggctctgaagctcttgacacctgtgtctggggtccctggccctgaggaggtcatgcctgctgtaacctgcggctttggtgaccactgggatcagagtccagtggagcccatgtgctgtgagtttgtggagaggtgtggctcattcccccttaggtgaggaaattcagcattgcctgaacaaacttccatctttaatgtagcatttaatacctcccaaagagatttaagcctttccacctgccagccagctcggaaggcaaactataaacactcatctcacaattttcaagacagatttctccagcgcataatgtggggtatgagccccagagagagatgagctcggaaaaccaggaggggagacctctgctgcacagggggtttcagttctagaaagcaggctt

SEQ ID NO: 69118 - DNA, 750 bp, Homo sapiens
ttcctgatttccctaaaatgagcatttgtaatcagaaaaaaaaaagcagtaaagatcttattttgaaaataagagcatgccccacctgtggctgctgagtggagtctgcagccgtgctgggggagacataactgtgcccctaacagctagagggacaaagggacaaggaagtgaccaggtcccacagagaatttgggcagagcccctctgggcagggacagatggggagatggtggcctccaccaaggcagcaaaaaatgagtaacatcctccagccccacgtgtctcattactctgctcttgtctctactggcaaacaggctcatgttgactctgctctggtctctactggcaaacaggctcatgttgactctgctctggtctctactggcaaacaggctcacgttgaccgcttgttactcaagagcctgtataaaaatagcatcaccccacagggatcaggaaggattttcgctgtcatgcacatgtcgatgttgcatccccccaggttcataggcagtgacgacagagaaggagtgatggccctcccggcggagccatccccgtcccctcctggtgtctctgagtgtggagatgcactgttgtgtgggtgtccattttgtgctccctgctcctccccttctcagagtccccagggccttcatcagtgtcagtgtcgttggggtagcacctctgatttctttttatttgccaaaaccaatctttttaaagacagattattacctttta

SEQ ID NO: 69119 - DNA, 736 bp, Homo sapiens
aattgaagtttttcccaggagtcttctcttagggtcagggagaataacttttcctgctgaggttgttagacttgggggtgtggaactggggttgccctgggctatctctcctggccacaggatgaagccatcagtagtaggagagagttcagacattctggaggggggcaaagctgacaatggaggtagatgtgaaggaaaagggagctctctgatgatctttttagagctcatggacccagccatgtctgaaggcactccacccttgaactgcccagttatataaggcaatggtttatttttttttttaagctggtatacaaggccaaaaagccaatgcataccagctttaaaaaaaaaaagagacttctcccctttttcattttcgtacttttgtgtcaggtggagctctagtgctcctagagtaagacctggacttgggacttctagtcacattcagcctaaactgtcaacatgcttttgacctccctggaatctggccctggtggtagtcctggagcgtccatctgatatgcaaacaaaggatccatcttcactgacaaattcttagaaattctggactgagtttccaccctctgctgtagtcagacagggtccacaacacctgtggaggacatttgatctgccttcaaggctccaactgctggttgtgggggcccaagcaggtgccagtgcccactggtgggttatgcagaacatgttcaactgtgaggaa

SEQ ID NO: 69120 - DNA, 1830 bp, Homo sapiens
tttattttgccaagggtgaggacgcgcccgtgacacagcctcaggaagtcctgacatgtgcccaaggtggtcggggcacagcttggttttatacatttagggagacaggatacatccatcgatacatgtaagaagcacatcggttcggtctggaaagacgggacaacttgaagcaaaggcaggaagactccaagcggggagggagcgtccaggccacagataggtgagacaccaacggttaaattcttttgagtttctcatttgccttttcaaaggaggcaaatcagatatgtatctatctaagtgagcagaggagtgactttgaatggaatgggaagcaggcctgccctaagcagtttcctgctggagttttccttagtgatcttgggggcccaggatatcttcctttcacagctgatttcacaaagccggctgggtaggagggccccagggccgggtggccgtccgcgtggcagggcgggggtcccagggcggctgtgcttggtgctgggaggccgcccgagggcagcgccggccccgagtcagcagccgcagggcaccctggagatgcggaacgcccccagccgtgggtcagcaaaggcgtctcaggtgacccttagggagggcttctgaggcagcccgtgcggggtccgtcctggctgagcactgcgcggacggcgcgcccgcgagactcggacccggcctagggctcagcgagctctcagcggggcgggcggacgcaggcagcccaggggagtggggcccgccctgcgccgccatcacccctttaagtgccaggcccgcggcgcatgcgcagtcaggccgttgtgcgcaggcgcagaggcggcggcggcggcggcggcggcggatgtttacggcggccgaggttggagcggcgctgctcggccgcggacacacgagggacgcgcccgaggagctgcaggtggcagcccaggcggtccgaacccgtcggccggccgagcctggaggtagagccgccgccgccgccgccgcccctcggtccggcctgcggcgagcgggtggtgtgtcccctcggccccttccctcctccttccccacccccggcacccctgcgcccggagctctcctctgggggcgtcgctcctccccacctcgggcaccctcacctccccccagcggcctccagggcgtcccgcgtttctctctccgagcgctcgcggtttcccgtcggtctctcccggtgcccgttgctcactcacactcttgggtctggttagtccagacctgcagcttgtctttgacttcccaagtgggaaacgtttgcagttccaaggcaagccaagagctaaggtttagaacaaagtctgccttggaccctttcagaagatgacaggattttttaaaaaaataattgcgcccccccgccccgtgccttggagatagtaagaattggagcagagcactgggacttcaattcacgcatggaaagagatctttgttagttggaggaaggagaacttgcctgagcttcgggcctttgttttgtttttgtgagagggacgtgtctcctaaatgaatgtttgctccagcgttgcacctcaaataagtcacctaaatatccacgccctctttatccaccccctctttactcgtgtgactagaatagttttcatttttcttctcaagggaatggctaaacagctcctatctgggcgtttgatagactgtcattcaagaatgagtgaagttgaggtgcctataagcaactcagaaattgttgtggccacgcttgggggaaatagagccctacactcaggtgatgagaggagacctcagaggtgaccgatc

SEQ ID NO: 69121 - DNA, 2366 bp, Homo sapiens
  modified_base (1)..(115): a, c, t, g, unknown or other
nnnnnnnnnnnnnnnnnnnnnnnnnnnnnnnnnnnnnnnnnnnnnnnnnnnnnnnnnnnnnnnnnnnnnnnnnnnnnnnnnnnnnnnnnnnnnnnnnnnnnnnnnnnnnnnnnnngatcccgcggccgtgttttcctggtggcccggccgtgcctgaggtttctccccgagccgccgcctctgcgggctcccgggtgcccttgccctcacggtccccggccctcgcccgtctgtgccctcttccccgcccgccgcccgccgatcctcttcttccccccgagcggctcaccggcttcacgtccgttggtggccccgcctgggaccgaacccggcaccgcctcgtggggcgccgccgccggccactgatcggcccggcgtccgcgtcccccggcgcgcgccttggggaccgggttggtggcgccccgcgtggggcccggtgggcttcccggagggttccgggggtcggcctgcggcgcgtgcgggggaggagacggttccgggggaccggccgcgactgcggcggcggtggtggggggagccgcggggatcgccgagggccggtcggccgccccgggtgccgcgcggtgccgccggcggcggtgaggccccgcgcgtgtgtcccggctgcggtcggccgcgctcgaggggtccccgtggcgtccccttccccgccggccgcctttctcgcgccttccccgtcgccccggcctcgcccgtggtctctcgtcttctcccggcccgctcttccgaaccgggtcggcgcgtcccccgggtgcgcctcgcttcccgggcctgccgcggcccttccccgaggcgtccgtcccgggcgtcggcgtcggggagagcccgtcctccccgcgtggcgtcgccccgttcggcgcgcgcgtgcgcccgagcgcggcccggtggtccctcccggacaggcgttcgtgcgacgtgtggcgtgggtcgacctccgccttgccggtcgctcgccctttccccgggtcggggggtggggcccgggccggggcctcggccccggtcgcggtcccccgtcccgggcgggggcgggcgcgccggccggcctcggtcggccctcccttggccgtcgtgtggcgtgtgccacccctgcgcccgcgcccgccggcggggctcggagccgggcttcggccgggccccgggccctcgaccgggaccggtgcgcgggcgctgcggccgcacggcgcgactgtccccgggccgggcaccgcggtccgcctctcgctcgccgcccggacgtcggggccgccccgcggggcgggcggagcgccgtccccgcctcgccgccgcccgcgggcgccggccgcgcgcgcgcgcgcgtggccgccggtccctcccggccgccgggcgcgggtcgggccgtccgcctcctcgcgggcgggcgcgacgaagaagcgtcgcgggtctgtggcgcggggccccggtggtcgtgtcgcgtggggggcgggtggttggggcgtccggttcgccgcgccccgccccggccccaccggtcccggccgccgcccccgcgcccgctcgctccctcccgtccgcccgtccgcggcccgtccgtccgtccgtccgtcgtcctcctcgcttgcggggcgccgggcccgtcctcgcgaggccccccggccggccgtccggccgcgtcggggcctcgccgcgctctacctacctacctggttgatcctgccagtagcatatgcttgtctcaaagattaagccatgcatgtctaagtacgcacggccggtacagtgaaactgcgaatggctcattaaatcagttatggttcctttggtcgctcgctcctctcctacttggataactgtggtaattctagagctaatacatgccgacgggcgctgacccccttcgcgggggggatgcgtgcatttatcagatcaaaaccaacccggtcagcccctctccggccccggccggggggcgggcgccggcggctttggtgactctagataacctcgggctgatcgcacgccccccgtggcggcgacgacccattcgaacgtctgccctatcaactttcgatggtagtcgccgtgcctaccatggtgaccacgggtgacggggaatcagggttcgattccggagagggagcctgagaaacggctaccacatccaaggaaggcagcaggcgcgcaaattacccactcccgacccggggaggtagtgacgaaaaataacaatacaggactctttcgaggccctgtaattggaatgagtccactttaaatctaatccaggaaaagagtacaaaacgccacattctcacttgtattgggagctgaaaaatgggatcacatggacgcaggaaggggaacaacacacactggggcttttc

SEQ ID NO: 69122 - DNA, 1865 bp, Homo sapiens
ctttagtttttaatgaatctcgtatttggtatcaggaggctgtgttatacacctgtgtccgctcatattacatatgacccaaaacatgaattttcagggctctgtgttactaattgttagctcatcctcatcaacacataactcaaagaaataaaaccaagtgcgaatcccactttccacttccagctacaggcaacatttcagaagcatttcatcaccttggagacgcggggtgggtgtgtgtgtgggtgggggataggtaattccaaacccgatgtgatggaaaaagcctccaaattcagcatccctgagccgacagatccggatgtagctcctcccccttcctccacaaaggggtcctggaggtgcacgttctcgcagccttccatagcttgccccaattcaacaggcaattcaaaaacctaggtgctgttgaaaggaacgcctccctaagcctgatgtccctgggatggacacagctggtcgccgtctatcctaccttggcctgcaggggccggggccctcctagaggcgtccccgcccccatccactccgaacagccgaaaaccgtctctaagtcacctttctgactccccttccgctgctccagctagatccaggaggtgagtcaaccacccctgcccactctggcatcctcagatcgcctctacgcccgcaagagcaacaaggacccccgggaacccacctaagatcgtcatctctctggccatcacagtcccgccgaacaggcttgtgatgactgtaccagacgtgaggcaccgcccccactcctcccggcagtcccgcagccccctgggaaatgtagtccgcttgctctgaggcaatcggagaagctatcgctctgaccaaagcaaggacttcatctaccgtgagggcgcggggcaaagagcctccattcaaccgctgccagtgacgactgagtcccccttccacgcaacggccggcaggaccagtgagactgagggggaggagcgccgtggcgagagactggcgtttataatcaaacctgtggtcccgcgatcctacttgagggaaaacaggctatctctttagccccgccccgcgctttgcattctgggaagcggagttccagcctttctctttccgcgggagggaatgaaagggagggtgagaaccgttagttatttctttctttggtcgtgcccctaatcaggtccaggattcgagtttgtgttctttcgttttaattccttttaaagcgcgttcgtttgcctgagatctagcttctagatggcgttcctatagcctcccggagccccagccatcctccgtagaagggtccctgccgcagtgcggggcctgagggaagtcggctctggcgtccgtgctccaacgctgggagcagccctgaaactccagtgaccctcagccgtctgcctttgttttgggataaatgaattcaagcattcttcagtcaattcgatttatccaagggatcagggacacattttctctattgctagcactgacgtgggccattaaaaacaaaaacaaaaacgaaattaaaaagaaaacccttagctctctcttcaagtaagtcttaagtggccaaaattgaccttatgggcaagtcctgtaacgtgacagccattttaggacgcttgtgacatgctgttcaggttctagtctgaagtaggatttttctcgcatcttggtcactggtagcacttaatgactcctctgagagtggttttgtcatttttgctgttagagttcacgataactaagatcctggagaattgaatccattttctcagcttagatataaatcaaaccatccctgttgacaacacgtcagcctgctgtgggaatacattgctggt

SEQ ID NO: 69123 - DNA, 649 bp, Homo sapiens
tatgtaatagtcttattccactgtaaaaacactaaaaccctttcaagtcctaacatgatattctagctcctccttcctctcaagcagattttgatgtgcataattctggttttggaataacatgccctctgagaacacagtaaaaaaagaaaggagtctttcagaagccacacaggcccaattttccatagtataatgaagtcgcaatgtcactgccatttctccacttctgcaggggaagccaagactgctttttgctcactgacctatagctttgggtcagtctttgaatgtggacacactgccaagctagctgggagttgccaggattacacaaaccagcattgcaaatgggggttgtgttgatttaagagaaaaggccacagaagccacatctttcttacttcctgcgtaatatcctctgctctgaaattttgaagaagtttctagaactactcataagaacatttctgtttctgggtacacctcctagctgaccaaaaattatgaacaataggaaatttaagagccagtatgcaaattaattaatttttattaagtatctattggattcttagcaagaagaggagctatgaatggaaaattacacagtaaaaaaacatttttatctaatatttatttcatatac

SEQ ID NO: 69124 - DNA, 836 bp, Homo sapiens
gccagggtactccctttgatttcttaactccaaactctttaagaacaaaatgtgggcctgattcacctttacagtccccacttccttctatggccatttgagtaactactctcatccactgaaactgttgccttcaatgctactgatctgaaaaagatcatgaggccaagttagggtccagtgggcaggaatgttgtgattgattattaatgtctgtcatgggcagtgggtagaggacagtagcagtatctgtgcctggaattttccatctttcattgtatatttaacaaatatttgttgagtgaaattcaacaagaatttagaataaagagatcctaggaaaaggctctttgagtctcctttggtttgagaaatgacaccacctttgtccacagagcccagcaattgtcagtaagaactgaagccacctgcattaacatgacaaatatttgttcctggaaattcttgctcaagaatataaggttataaatcaataaataacttcactatttgctttaggaaaattcctgcaaaccaacttgtctgggcaaatatttggtctcctatcaggacagtagattgctcacctgggcaaacaaatcacttatccaacttcagtttacttatcaggattcacgttaagactctcccgtcttgagtccaccaacatgaaaatattatgacacaaatatttcctaggcataatcagttctccatcttaaaccacacaccctaagacccacttaagcccagattctatccaaactctatataaatatcctctcctgacatttgccttcttgaagcatactaagcctcaataaagtaatgttctc

SEQ ID NO: 69125 - DNA, 512 bp, Homo sapiens
caagataataaataaataaattatgctatgctcaaataatgaaataatatgcaacagagaaaagcaataaactacaggcatgactgacaatgtgcaggattcccatgaacaaaaatgttagaagaaaatgtcaaatgaacacagaacaatatggtataagattttgtatacaaacttttaaaacgtacaaaaggatattatatacagctaagagtacctgcaattattgtactaaaaacacagtggaagataaataccggtggctccctctagaggcaaggaagaaatgagacgtgatcagagaggaatgcttaacggcacttcaaatgtgcagggcgtgttttatttgctaagctggtgttcactttatttttctttatactctccttgtatgtgtaaatatttgcaaaataaaatgtaataaaaccatgtaggtggcgatccctgcccttagaaattaaaaaaatcttattatggagaaaagatatttgcacattttttcaactttatat

SEQ ID NO: 69126 - DNA, 2657 bp, Homo sapiens
tatttgctccttaaaaaaaataaaaataaaaatatccttacctttcctatattttcctacatttaagacataatttaaccttttattgttaactgagatttatcattgttataaatgcaatatacaaatataaatctctaaaggcatttcagtaatttgtcttttatgacaagaagaaaatcatcctttgaaagatatgtatcttgttttaaatttgcatttaaaagtctatcactagtagattagttttgttattttgctcttaatctgagcacaaaataagtttgttttgattatctcaaactctgggaggtctttaaaattaaataacaaatccgagttttattcaaaattatttacaacagtcttttgtcttattctagaaaattaaggggactacacatagcaaaaatcccgaggctgtgtttgtttcacgctgttacttgaatctatgatgaaatcatttcctaggcttattctttagaaaataaaactccttagggcagactgacccgagttgcacaggaatgtaaataaaaatgattatttctctctttacataagacaaatattttactacattgtgtactataataatctttctcatggccaacacagaaatattagcatctaccaaatatggttaaatcctcaaagcctacttataaagcaaaagcagcactggaaattgacatcacttacatttagtcacattttcaaaagagcatgattaatgaaacagaagtgttctcatggagcgtgtgcaccatgtgctagtgacagttatatcagaacgaactacatgtagcatttatcttccttttgctctggtatctcccgagtgaaacgcttgggtgtgtatgaaaagcatagggagaatgacaactcatttggtattgacttggcctttgtcccagctctctcttacatcatcaaccccttcctcatctctgctgtcactgactttgagaaagcacatggttcagccatttgacatcctctctgtaagaccagggatgagtctgctatgcgtagctctgtttattaaaacctcaattttaagaaggttaccattctacataaaacccttgacctctcagagttagtggtatgagcctaaaagttgccaggacatgctaaacttttcctgagaaagagtccagtcaacaattttatgacaatccttctgacctgagctttgcttaataccatcaaataagtcacaggacagtcaggagattggaaatgtatcacttgatgaggtttttcagattgataacacgagggtaagcaactgtgtcatccaggaggctccaaagtccagggtccattcagggccaactacagcagtgccccttcctaagtccaggccattcacaccaaccgaagcccagcagggggcagcttcccaaagctaaatctaaaaagaccatagccagcccagctgaaagtcccaggaaaaggcaatgttgcctaacagtcatgagacagctggaaaagtccctgcacctgacacacactgttacagacagtgctgcctcatagacgtgtagaaggcacatcagggagagtgtcggggtcaggccagaaacttcacattaaatcagggaggatttgtttggggctcacatttagacagagaacaaagacttctctgtcatttttgtagttttgttcatttgtatttgaaaatagcagttctctctctggcctgactgcatccctttgatggtaactgaagctttccattgcagcggtgctcctgacgggggcgacattgaacctgctcagggctcagggctcctcttcccggctctgtggcctccccgaacatgagtaacactatggcctgcaaagataggacttaattgtccttaaaaggaaaaatgcctgcatgaccagagttggaccaagccagaacaggagcccctgagaagtgctaggtacatttttaacagttcctgtttactttccataggagattatgagaagaacacaagagcacatttataagtagttttcatgattcatgttatcactgaaaccagatgctattctgaatcaaacaaccctgaagtgatgtgcaattctaatatctgcttaattaatcaaaatattcattaatacgtaagaaaacacattctgtttgtgttttagagtacacatttatcacatgctcataaatacttaaatacaggaggtatgcttggcagataaattattaacttttcagagatctgcagattttagaaagttttggggggaaattaaattttaataaaacagcattttacttaattacagaaaaatcaaataaaattattttctagattctgaaagaaaaacaaatagattataaactgtaaatgccctttgtcttatgataaccttgctagctttagtaattgtataatattatgaaccttgggaaacagtgcaaagcatcaaaaatcttatattaacatatatattgactctaataaacctatatctgtattagtgtttaatattgattaaaattgcttataagtttatattaataggaaatacatcctgatttagtaggattttaataactacaatcatgtattgcttaacgatgggaatatgttctgataaatgcatcagtaggcaatttcatcatgtgaacatcaata

SEQ ID NO: 69127 - DNA, 4938 bp, Homo sapiens
cagtaatcccttgtcttgactgactctcagacaaggaagagcaggcagaggagattgtaaagcagaagcaaagtagttgaaagccactgagagtggttgaggacatgggtgggttcacatctgtaatgtgttggaagctgaatacagctgtttggcactttcaacaggcagtgaccatgaatgggatgtcctgcctccagggcagtgcaaacaggcctccagccagacagccatctcgctctccttttcctccagctgtgtctgcagaagggtcccgagtagcatcctgtagttccaacctgcttactccttaggactaggaaacaagaaaatcactgctaaccccactccaaacttgcctgatttcagagctcagtatcattctgcagtttgcagtcacactgggagggtctttttctcgtatatgagaaggaggacagaatgttggaagggaacgctcctcgacagatgggaatgagagtggtgtgagtaactaactggaggcaataaaggtgttagcaaacagcaggagggaagagtgggccccaccgatcactggctgtcccgcatgctgtgtgttgtaccagtgccagtgggagctgcctatccaagccttggtattaacagcatgtgactctggcagattcacaatgtcctcattggctttgtcagtatgacaagctttgactgagtccctatccaactgaggggccaccatccccgtcaccctcctttctgatgccttttctcctgatcatcccttcttcttccttcttctttgtctggcttcttttgttcttcctttttctgtccctcactcctccttacattatattcccagcttcctttgggatttttgttttaacataaggagaaccttaccatcgatgtcaagctcagcatgatataaccaattaccctaaaaccacagccatctagccttatcttgtattaaaaaaaaaaaaaagaaaaaaaaacagatgttgcctataattgtatatctgctcaggtttaaacataaattgcagtgagaattcttaaggcaagaataccattgaaccaaaatacgttataacagaaaggggtctcagatgcttattacctcctcccaactgtatttcattttacaacaaagcaaatcacagcttggaaaagttaaatgagttcctaaggttccacaataaataagggcgaaggggccactacttaggacccagatctcctgatccctatctagtgattttttttacttcatgaattttaatgtaaaaaaagaaaaagaagccacagatcctctagacccttatgcaatatagggaaatattccttaaccccaatcgtgctttaatccttcttctactgaaacaaatacagctaatgaattagagatgctcttttgttctcctgttaactatctgaccttaaggaagtcactcaaccaattggttctcagtattctctttccacactgagggaagtggacagataatctatggttgcttccagctccaaaattcagtgaccctttaagcttaacttctttcaccagaatacctgtcatttctaggtaaatagtgttctcagtcctttctgttaaaagaggttaagtaaataaaaaggaaagatcaggctatgcttttggcctagattataactttgtgaccaaggatgaaggaatttaatagcaataagaaagcttccagggtctaccatttacaatttaaatactttacttgggaggttaaaagttcaaagttgagtcacagtctgaggtggctctgctcttcctttttaattatctgaggtcaggaagttaataatacgagaaatccccagcggagacctcttgtgcactgtgtgaactttaaacttgctcatttttttcttaagggtaaaaagttcagcagaaacacagtggacttttcctcttagcctccacccattcatcccccaaggtcaaaagttgaactgtaaaacagaaacccttgttctctgatccacatttaaacagatcacttattaaaaggtaaacattccacatgcaagccaaagttccaagtgaatctgctcaataaaaataaaaaaactgtaataaagtctttgatcttttccacttgtcttagaattgaacaacagaatttattttctcgttttttgaatctcagagaaggggcagtcatataagctctttcctcacctacctctgccctgagattggcatatctaaaagagataaacctaagatattttaaaatagtcagatttggagccttaccttaaggcaatttcttcaactaattctacgccatttatgtttgtttatttgttttgctcaaacaggaattcaagaacagcaaatgtgatttaaatcagagatataaagtactacagaataaaaaggagtttgctgaaaatggtagaggatgctgtattagtccgttttgctgctgataaagacatatctgagactgggcaatttacaaaagaaagaggtttagtggacttacagttccacttggctggggaagcctcacaatcatggtggaaggtgataggcatgtctcatatggatggcacaggcaaaaaaaaaaaaatgcttgggcagggaaacttcctcttataaaaccatcggatctcgtgagacttatttactatcatgagaacagcatgggaaagacctcccaccaggtccccccgacccaccacaacacgtgggaatttaatatgagatttgggtggggacaaaaccaaaccatatcagatgcagagaaaataaagaaatggatgaatatatccaatgaacctcatatgaataatgaatggaaaatatctgagatcttcacagtgttaaagctcaaacaagaagtgaaataaatagctacagagctccaaataagtatttaatgatagtgacaagactcactttcttgaagtaatgatggcaaactttaaaagtatggaaaagccattgaccgaatactaacccaatccaatcagcatgcttaggaaaactccctgagatgatcacatgaagctgttatttcatgcaacccatgtgtccgtttttttcaatgtgtacttattggaaatgctttcacttgtttaaacaagtcctacctgtgactcaatatttgtttaaaaactttttaagaaagcatctttgtcaccgtttatctatctaaatgcgaataataccacttgcttcccaccttaataatttttgtaaagattctcattagagaatacttaagcacagaaaacggtaagagccttgaaattaagatatacaatgaacacgtttataataaatacttttcactgatgtcagtttcgacagtgtcatttaagtttaaacgactttgtgatcacttctaacacaaatcaaaactagaagatatggctctaagtaagttgtgttctagatccatttacactgtgagtaacattcacgacaccctctgggactcctggatgcagctggtgacccagacccaggaatgacacagccaggaaggaagtgaggaaggtgcacagagctacttcctcttgttagaactcccctctcaacagctgtaaggaagaatggaaattccctatgaatcaaagtgtgacttcgaagtatgggatacaatttgagagacctgatcatattgattaggatgttgaccaaaaggaagtcactgcatttcatttggacactactcagacatttaagctggtatgacattcatgagaaacttctggtttcaattcatctttttcccatgaatatttatgttccttttttttaatctttaagtcagttcatgatattcaagctagttatttccaaccttctgtctgactgaattctgtattaaatctttctttgtttcccccctgcaaaacaggttaattcatgagaggctattatatagcaaggaccatgctgccatgctgtctgtgttctgggcatatgtaccctcaaagtcctcataggatagaaatagtactaaatctgtatacaatgaactggacacaacaatgtggggactatactacaaatactatgaacaaagtgccgggagaaccctgagtctttgccatgttctttgatgcctttgtgccttacacattctgatcccgccacctaaaataatcctcttgtccttcatccctgggaccctgtactctgcctcagtgcttctcttcctacacacttcacctccccttgcctctctgaatgtaagtgtctcttccacagcaatctgtgcaaagactaacaccagagtaactatcttacagtattgtaacacttagctaatttttctgcctccaacaataaattctgatctatttgaggaagtgaactccaataccattctcaaggaagtccttttttagaaatatagactgaaacctgacagaaaagggattcagtgtatatcctaaaggatggcataggagagctgagacttagcagggtatacactagagtggtctcatgctcttcttgccagcacaccactaggttagcagttctcaactttggctgtagttggtataacctggaagctttaagatatttttgatgtctaggtctcagttctagaaattttgaattcactggaatggagtagatttgggtcattaaggtttttaactgttcccaggtgatactggggatgatgagaacttaaggatgagaatcaatgcacagcaagacactgtgaaatgggaatagatgttagaagccaccattggcactaggggtcacaaatggattgccaatttaagaataccttatttttcataattctcttaaggaataagttttcttccacctgaactgtttcagcacttctattatcctcatgataatatgagctttcttagcatattacaccaacgtctctgtaaaatcaaccaatctttttctttatcttcattaatatcttg

SEQ ID NO: 69128 - DNA, 2399 bp, Homo sapiens
ctcactagcatataaactgctggaagctaatgtaggaggtcaggaaggaatgataaggttagaggaaccaaagcccagagagggtttttgtttggttctttggcagcacttaactctaggaagtgatggggaaattctaatttctgagaatgtttttcaaaaggatgacagagattagagcttccagtgaagaaaatattgctgcaatcaaagaaagcaaagtgcaataaagccctcaggccagacggaatttatctaagtattctggagaaaataaggtgtgaaacagcagagactgatgaggacatatactatgaccattaaaataacagctgttcctgaagactgtccaatttttaacacagtatctatggttttttttgtttttgttttgttttgttttgtttaaaggaaaccaagagaaatcccaagaattcagacaaatgaactttgtcttggtgctcggatactggttgggggaaaaagtccgatgattgtgccaagtagaatctgagaattgaaacttgacaggcccccatcaactctgcaggaatagagatttttacctctccaagcttaaaattgataataagtaatacagagatacaccatgcacttgcccttttaaaaagtttgaaaatgaagaaacaaatgctttcttggatctgaaactagctagagaaattagaatcatgtatagtgtatgcttaggccaaagagaagagattagctatagcactcctggaatctgatgttggaatgaaatgtaatttcacctgcattttttaaataattagggagtatgtgtgagtcacaagcaattgactctcacatgattgacactctgtgggagcaagcagtgaaaaagaaatggtgagcacctgatcctatgataatcatcactagcatttattgaatggttactacgtggcaggcacactgcttagtgtttgacatccattatctcaattattctcagtctgtgagtgatggtataaactacttcagaaacatctgctgtttcagaaagaaaatgctctaaggtgtagggcagattatcagccagggtcacagttcagatgagttccaaagaaagcttatctaaaatattctgatgaaaatgtggcttccatttaaaaccgaatgggggccaagagaattgtaaaggaaactcgaggatgcaatctattctctgcccctcaatccctgagccagccagggatacttattttctcctaaacctaaaaatagtcacgctaacattggtttcagactctcagaatcaccagctctgagactacagagatcttctcactctttcctatctcctggtccttaaacccgcttccttaccttgcttctgtgccttgctaattataactgctttttgtttgtttgtttcctgattcctgtggctcaatctgtgttcctagggccttcatctgtggtacccacctgggattttagactcatgtggggggtctaaagctttggcttaagtttagtctgaaactctcctaggctttggtccacaacctcctgccacccaacatggtgctgacagggaggacaatctgtagcccatgaagattagagctatgctattaatcaatgatctttcccaactaaaatacttagttcagggctcttcgcacaatgctcaaagtactttctgttcaataaaggcttgttgactgtatttacaacacatgctgtactatgaactgcataccaaagtccaaattacaacatataacctctatgacaagaacgagtaaaaaaataaaaccacagccttggagggatgccagatgatgctggacccatgaaaaactccagagaggaaacaaaaggtactgaacagaaatggagtgcacacaccgtaaccttgttctctcatcttttgtgaactatgacgggtcacctttgcaaaattataagccttttgagagtagggtacaatacagcttcaacggcagggtgcctacagtccccatcactcctcctgccaccagggaacttgcaggaagggagctttcctgttagctttcctccctggtaaagcactgaccacagccttgaatgccacaaagccacattgggaaaaatatgaagttttgtcctacccacattatatctggacagatagttatttagaaaagaatcattctgcattttatgtattataacattggctatacaggatctctctctctcatcacccaagtctggttccttcctagtctacatctgcctcttgctcctcaaagagcttacttttcctctcggtttctttaagcaatagctctccttactatgtggtgtgatggttaattttatgtgtcagattggctagcctgtagtaactagttattcaaatatgaatctaggtatggcca

SEQ ID NO: 69129 - DNA, 1765 bp, Homo sapiens
acatgtttccaaacatattttcttgatgtcctccatgtcattgtgtattctctccttcccttaatttgtttcttttccagtgtataaatctattgctctattatagattattataatataaactcataaattcaggaatttaaaaaaaatctttaaaagcatgcttctcagaaatcattacactctgttaaacacttgctatctctcaacttctagatagattcctcaagagagaagtccttttttcattctgaacttctaattctcaaattttgattgtgtcctgttagttaccaaacacaccattatactactactctcatttcaatattgtacataaacgattccccatcttactaatgaaatgcttttttaaagcagtaacatatttaacatgtgcacatgttatgaagagtataggcaaactcaactattaaaaacatgtaactataaggaaagccatcttagacactatatgtgactacagctaagcttttctcttaagtatctaaagcaaatcaccagacttttacatagtaccctcacatagctagataagaaagtaaaagtaaaataatgaaagcagactctaaacagcagaagctccaaactccttagtttctctgttgtgctcaatcctttagcaaattacaggcctgaaaacaaggagtagctctatcacttaacaagtgactaaggaatgactttgttaattagaagtccaagggtgagaggctcctttccaccaaagctctgaataaacatcaacatcaggtcaaccagagttgtcttggtcccaggagtagcttaagcggatgactcaaattcccagcagaattctagtttaatatttattggaactccgagcttagtcacacagtgacttggaatttaagacacatggggtctcttctttccatccttaaagatatttttgctaagtgacacaaagttaaagaggcaagatgggttttaatttagagtttttattccctgaggtgtaagaaattaaaattttattttctggggagagtgaaccatactagctctgaatttcaaacacaactattaaccctgtcagataattctattatcaagttttacaaaactgtttactattattatttttttttgctaccccagccctatgtattgaaagtggaaagaaggaagggagggaaggagggaaggagagagggagaatggatgaatggatgtatgtcacaatcacctttctagccaaaactgcaacatatgctggagttcttgaaattatttcaaccaaaaaaagaatcacaggactcataatttgtttagcaggtaattatttgccccattatcttcaagaacaatctatcttaaaactgtgtatagctttttaagaaatcttaatactaagaggatcctttttttcataaccccaaagagtgttttcttcctctatttttgaattgccagccttctcaattctttaaatctgattcacattatactacttttagagttctaggctaaatgtttatccatagcatgattcaaggtattaatttcaacaaaatactaatataatgataaaatgtatcacatttattttcaactctttcctattcttctgatttaagaacttaaagaaaaatattttatgtttcgggtgcattttgataagctaaaataccacaacttttgtaattcttcatttgtaatatttgcaagatagtgtagggatcaatttgaatttcaaggttcatgatatagagtatgtacc

SEQ ID NO: 69130 - DNA, 6309 bp, Homo sapiens
gagaatagaatccattaccatcagcaattcatgtctctgcttcagcatcagatgcaaacaggatacagaaactagatctctctcctccatttactttttgttcattccaacctctcgacataatcttcagttccattccaatggcctgtttcaccatctgacactcctggtttttaccttctcaagtcttagtggccatagtggtgttacatttctctaattgttgtgttatctaaatactacaggatgagcctgctcattccccctcccccaaaagtccctgaaaaaactacaacttaaggaaatgcaacttgaacctttttagttcacagattcaaactcatatcctgcaagaccctagcatatcttgttgaaaattttctttgacttttcaacagtagtcaagattattttaatgaaaatatttctccagttggaagacatgggtatacaggactttgctagaacggcaaatgctttttcccagtcttcatccgtgtaacagtaaatcgttattaaacaaacacacagaacaaaacccactctgattgtgtatcaatcacctgaaggggcagaagggaaaagtacaagagtgaagaaacttctccccacccacagccaagaaggaacgctgcaactaaggcagtttttcatggaagaaaatatccaaagatctagacagtgtttattttagaaaaggggaagagagcaagggagggagggaaatggtagggaagggactaccatttcctcttactaacctacattaaaaactaattgtatcaagcaatctcaaatgcgaaaagcaaaactgaccctagcacaatttaaagtgaataatgttttccttgacaaaaattcggtattttaaactcattctgagcaaaattatcttttaacctgatacaccaaactattactgcttttcccaaacaacagttagaacatgagcttttgagtttcttacattctttacgttttaaaattaaaagccaaattcctttaacctcatatatcctaagccactctgatttaaaattacttctatgtcattgtcttctagcattggtctgcaatagaatctgtgcaattaacaataatcttcttccctctgatctttctagagtcaaggatggcatatctccttatcttatttgttccattagattggcatattttgcctcatctgtcaccttctatcaaactctgctttcagatatgcgttaattcatttttagttgtcctcaatgttctaaaatagtgatgtttgacagaattaatacagtgctctagttctttctgttcaactggtatttaattaaagatcttggaggccatctttctctcaggctacaccacttaaaggaggaacattacttcctccatggacaatgtgataagccacatggcaacaaagctgcctccctaaggtctctcatttaatagactgctttaccacatataaactaccagcaaaacagattatcactttaattcacattgattttactcttcatatctctgaatcacaactctgtcatgggctgcgttctctcttaacttctgaatttccagaatttctgtagttgtaatgctctcctgtatttttgcttttgtttcatctggacttcaaaaagttctaatggcatctgattgggaagatttcttgaatctctgataacaacgcagaagtctttaagcaatcagaactgccttggcgcacaaactgaaaactccgttttaaaatcttctgaattaacatcttttggagaatagcccactcaacttgatatgtcataattttcaattctaaaggtggcacggataatttaaagtggcacttgctatttattacttaaataattgttctcttggacgggcttttgaaagctagtacttcttaatcattttcgactatatcagaactgtaacagacatgtcaatttaagcaaacttcatgagcaataaactaacaaacagactctaggtggtggtataggttattttttatcatgatgttttgcacttataactgcaagagtcagaaaagcctttagtctcttcacacacttctttagtgcaaagttaacaatattttagggtgttaaaattagcaaaatccaagttctgcagagtttagaaatgcatgtaaaagaggcattaaacctggttttcaactaacttcccacaggcattaaacctggtttttcaactaactcatttgaataaaatcaacaacgaacagtccttttttttttctgttatgttctgatgtatattttactcacactcctagggcacttttaaaggtaagtttggaaagaggtctttctccaccagagtatgaaacagactagaacaaccaatcctacaacctgcagggcagtagccgctccactaattgattctccttctttgtctctaggaactatgcccaggcagaaaaaaagttactgtaggtgatgaagccagtgctccctgaaccaaataaaccctatcgacgttaccgaactgccgggcaaaaccagagcaactcacttacttggaaggtgaaaaacacttcaacatactccaggcggcaaccgacacttaggggccaggcagatgaaacaccatttgtttaaaaagtctattatttcactgtctcttcaacaaaggtggaaaactgatgattaaacactgaataatgccacccacttactaaacctatgattcactaataagcaggttcaatgcaattcataactttaaagaatgaattaccgaagccccttgcttcacaaattcccccaagaaacagaaagagcattcatcacatataacccgacaaccatttttactatggacacctacagatggcttctcttcctctaaggacacaatttccttcacaatcccacatgtaatcatttacaataccagaaacaaactccaactcagttccaccaactgggtttttaaaaatccttgtgcctaagaacgtcttttttccccaaagtaaaatgtgccattaaaaaatatttttaaaacgcaaaagtgcttatcattccgtacttcttttactaccttcagcagccaattattgacgtgataaaaggtagaaactcctggaatgcttcagagatcaacatgtgtcacagactcccagcctgtccgcctctaagacacagttggttcctttgttccttctgactgaacaccaactcctgatcaaaattgggaaactactttggaagggatgggagggtctgcagaatacatccacggaaaccttcataaaacaatattcaatcgtaataaggtggacacagaagaagggagaaaaggcagcctcccggacttccaccgggctcaccctaaatgggggccggcccctggctcctggtaaaatgatggctgaggcctcgggtccgtgagcctcgccatcgggaggggaccgcgagtgcgggcagagcggcccggggtcgggtgggggccgggcgagctgtcccttttcctattcactttcccagccgggtatccagcgagcaaggagcagggaggcacccaggcgaaaggcgccgcccaggatccggctggacagcaggacggagagcggcgaggcgagcggtgcccggggttcgggaccgagagggcaagcgagcgggggcaaccccgacccggccccccgagtccggccccgctcaggggccacgcgacggccgcccccttgcccagaactggcacggacgggcgggccgacccggggccactccacaacttgccggcccgccgccccggccccccgcgagaacccggagactcgaaccaggcagcagaggcaggatttccccggaaacgcgccctccccgccgccccgacgcccccgcggccctgccagccaagcgagagccgacgcgggccgcgctcccgggccgtttccggcggcgccggcggccgctactcctggcgccctggccgcggccgtcactcaccccaggccgccgcggctcccagcctccggctccgtcaggctcggtccgcgaaggcgcctgccgccccgtcctggcccggcgccccggcgagctcttccctccgaccagcggcgctcacggcgcagcggcggacgcgaggccacgggcggacgggcgcgcgcgggtggcgggcgggcgtggggccgggtcgtccctgcgcctcgccgccgcctcctccgccgccgcctcccgagttcggggctctgctgcaatgtctgcgaggctgactttgagcgcctcgctcaccgcccgcccgcagccgcgctcctccctccgccgccgagtccgccgcggcccagtccctcccctcgccgccccacgccattcagctcttcagccaagtttcttaacccttttctccccctccctcccattgtcacccggtcaggaggaagccgcgcggatccgggcggctcacaggagctgcggaaccccctctgtttcgtggatttccttctcgcctgctctccgggtgtcccagacggggctgcaagacccggaggcagcgagaggaccgcgtccccgagagaggggctgcacggcgcgcccgggccgtcccccgggctcccagctctgtccagccgcccgcgaccgctgcaggcgcctggacagctcctcctggggaccggggaaagcgctcttgggacccaggccgaatgctcccgtttgggcacagcctgggggccggggcgccccagacgctccagggtccccgcctgccttaagcgtctacctcctccccttcaccccacaacacgcgctctctgggccccctttcacccacccacccccaatttctatctccttgtaatctgtgtgtcctgctttaatgttggggggcacgggcgcgaactctgggtcactttgaccccacgcccagcacgtagtaggcgcccagcactcgtgtggagcgactctgggaggaaaactaggaaggagacctgaggagcgccccgctcagctccctggacagacgtaggacccaggagcagggttaatcctcggctgctttgtcactgcgaagtctccagcggagtctgtcagccaatctgcatcatccccgggaaggatctgacccaacaagacaagggaaaaggagcagggctgctacttcttcagcagctctcctcggttcggtctccgaataagaaataacaattacatcacgaggccggggcggcagcgcggtggagcctctcggtttcctgcagcctaatctcactgaacccgcctctaaattgggggggccacagattggtgaaacgagaaagtggaaggaggagagagtcatacgaaaccataatttccccttatccttgtatttgctgtttgaaaaatcgtatcctcaacgctccccagacatctcactagaactattaacaccccctcaacacctccccagatgtcaggtttctttttgacttgagcatctagcatttagtaattcgccatgaaaaaaattaccaggggaagcgagtgttgttgctgaaattgtttttgcttgacacaaaaaagctaaagtacagcttagtctcacccgaaattctgaaacggcatgcccgtgttaaaacacttattacataagacaaatgagccgatgaggcactccattcttatatgtaggttttcatatcctgaagaatttgatagcatttggaaatgaagttgctaatgcgcttaaaaaacaaaaactatccaagtcatgaaactgtattctgtgcctgttatgtaatggctgtattgtgtattgcaaatttcacttaacctttaaacaatatgaatgagagttttagaatactgtcacagtcttgaaagtgaaagcaatttttcaaattaatgcttaataaattcagcacccagcacagtgccgggcacatagtgccaatgttttccttagtggcaatggcacattttaaaacaattatttttcatcaccctagtgattgaactatgcaatctgttgccattttatatagttaaacctcatataatataataccatattatttgcatataccacaattcaaaatctgctctaggcaaaataaagtctgctgttttttagtgcatcatttattcagaattgatacaaagcaaaccgtttcaattcaatgatgaccagcataattggagcttggcccttagtggggggtcaaactttttttatgaaaattatttttaaccattatacagatttttctacaatgtattgcaaatgtttctcttaagcagtttgttgaacgtcatttagcattttcttgataattcaatgttaattttattaaaagtaattatt

SEQ ID NO: 69131 - DNA, 1660 bp, Homo sapiens
tttatgtgttctttgccgacatgtagaatttggaggtggtaaaagttaaagacagaggaaaaatttctgtgtaataggagttggtcatgcaacttgtctcacagccagatgcaagtgcaggtctgaggtgaatagagaaattgacctatgggatatgtgcattcattcaactttttttttgagtccatgctattttgcaaacactctctaggcaatggggttctaacatgagtgaagcatggcctctgcagtcagtgaggcagccatgcagtaaacagctaagtggcaaggcaatgggggtagccccatggaaagcggaagcccaatggaatgaggggtggaagggcctcgaaagcacatgagatgagaggcagagactaaatgaggaaagaggctcagaagccaagaagagagagttgtataattggttatcagccgtgtcaaattctgtacataggtcaaggagcatcaagatggagaagtgccattgcgttttggcagtgagtatgttactggagaccttggcaaggctggcttctgggaagtggcgtgggttagagcaggactggatcaggttcaggagcgttttcactgaggaactgaatgcatctggtgcactctaggagttgggagaggaatggtggggaaacagttgttagagggtgtagggatttcttgagacccagggatatctgagactcagcaggatccaaatacagactttttagctctattttgtgaaaaacagagcttttcccagcagcaaggaaacagcatttacatcttgaagcaggctttgttgagcttgtttgttctatctggcaatgagtcactgtaacactgaccctgccattgaagtcagcagattctatttggagagctttgtgattgtggggggaagttgtttaaaaagttaacaaaaacatctactctccctgatctgctaaacacctgtgtgcattagttttgatgactattagctcaagagcatgggaatgctatttttgagtaaaaaaagggaagcctcatcagaagaagttaaatgtacatgacacaggaaaaagttataatattttctattttggtttctactcatttgaaaagagttttaaagagaaaagtgtaatagttctgccgaccgccaacctcaattaaaatgctaagtacaagttgcagtttccctacctctgccagagggaatatgtccaaagtgaccagccacctgtttccttttgtaagagctcaagactgcggccccgtccagcatactcctcactgacactaaatatcagtgtgatgatgaatcaaaagtcaacagcagcagagctttatttaccaagaaatgacacttagtaaggtcatctcttttggagaggacattgcaatcatttaagttgataaagatattggtgatttatcaacctcaaataaggcatgaggaacatgcctgttaaggggtacccaacttggctgtttccaacttgcttaaatatatatgcccacaggctggctgatgtttgagatgtttgagggatagtaatagcacatggtctgtgatggcttagctaggcacagtgaaggtcatagaactagaaacttaagaatcaattatgaaacaggttaaagttgcagtctataagagagtggctttggaggcagt

SEQ ID NO: 69132 - DNA, 2350 bp, Homo sapiens
accaaagactacttattgatcagtattgaacaaaatttggcaattgaaatagtagcaatatattatctggttttggggagggggatggaagtctgagtattttcactaggactagtatggattttgcaggtggtccctaatgcttagctcactaacaatctcactctcccttttctagagctcagaccctctctttaaatagctaacccttcaggcttactgagtatcagttactgatttgttgaagttaactacagtgtgtttatttgggaaggaggttacttgaacgtgcccttaaattgctttgacttccaactgcaacaaaacacgtcttggcttctttggctgaggggatgatgtgtgtgacagggggcaccatcagttaactccagtgccactgtgaggctgaacgtgcagaaaaaaaataaggagagaaggaaaaaaatggtaaaggaaaagcagtaagtgaaaaggaagataaaaaatagaagagttgacatggtggggagaggtgaagtgacaccagtcgctgcctggtgtgacatttaatggcatcaggatcacggttaccttctctgagggtaaaccagagagcactgtgccacctctggagtcacaattacaaagtgacatctctgcaagggccaattttgaacaggagaaagccctcccccagggacgatgagcccatggtagcggcagatagtgcaaacaagcacaaatgcccatccccatggcaggcataagggggagagggatcatattttaaagctccattaacaaagaactttactcaaggaggaactgttaataagtaatgaaacaaagtgcctgttatggagattaaatgctcctgtgtcgaggtacaaagttcaggctgcaaagtgcagctgtcaccctgtctataaccccacggcagccttagaacccctggttcaaagtgtgtcttgctgccttcctgttactaggctgcctagtgcaaggtccagccagggttcacagttcagcgtctgaggctctgctgactgccttctttgtttaacttgggcaagcttttgataagccagggactgcttatttaaggcgattattacaaacaactgacagattattttcccagattcttgcacttattcttcatatgcaagtttaaacgagtcccaaactataatttcttgaggatttgtgtgtgtacaaaagtaatcgagataaggatgtgtgaaagactaggtaaaaaaatctatttctaaggaataactatgctccaagcagacatagaaaaccaaggtcctttgaagtaaggactcgtgagggcaatttcaagacaggtcaaagaattctcgtctctaatgatcaaagatcaaataaataccagatttaccctttaaaatcaagcgaaccctttccttgtttaacagtagatcagtgttaattcatttctgaatagagtctccctctgtaattgttctttttatttgtctactaaaaattcagagggaaactcacttttttcaaatagtttgctttgctcgacctaatcctagcaaaagccacaggaaggtggaaaaccgataattagtattcccattatgcagatgaggaaacagactcaaagagagtggcaatttgcccagggtcttcgagttagttaatcttacaaaaccaagaccacaatccatctcttcagcctttcctctcagcacttgtttcagaagcccactgcttcctcttaagtcctgacaccaattctatttgaatggcagtagttctttttcatttctcacttttatggaagtgaacggagtctaagtaaaacactagaggcaggcagtttgggaaatgtgatatgaaaaagcactccaggtaaggtttagggaaacagggcttgactttgtgatggcctcgtgccaggcacctgttattcatgctgcttctcctggccacaagtgccaagggggcaggattttcagctagttgcccagtgggtcgttcagggtgctgctccttctggagatagcatagattaatattttacctcagaaaggagtatagctcattggtgatacatgagtgccctacgggcttagaatttagaataatacttgcttatgacgcataaaagcaaactaagatttccttgtctcatattttctctacattggcatagagttgaaaaatcatcagcagttttttttttttttgttgctgttgttgtttcgtttttgagacagggtcacgctatgttgcccaggctggaatgtactggtgtgatgatggttcactgcaaccaacctcaacctcccaggttcaagctgggctcaatcgagcctcccacctcagccttctgagt

SEQ ID NO: 69133 - DNA, 891 bp, Homo sapiens
cctccccttcttccctgccccggcaaccactgttttattcgctgtgtatgtgacctcttttcttccttagataccacatgtaaatgatatcatgcaatatttttatttttgtgtctgccttatttcacttagcataatgtcctccaggtcaatctgtgttgtaggaaatggcaggatcccattctttttaaaacctgaataatattccagtgttgatactaagctcttaatcggcatgttatactctccagagaacttaggttctaatgacattcaaaaatagtgtgcttagttatcacgaagcaaacttagagtaagataatattcagtcttaaaaagtctgttgaaaggactatgaataggtttcctactctcattcctacgatgactcatccagggtcaagaactagagtttcacaagacagggacagagaccagaggtcaagtccaaggatgttgtaaaggcagggaggagcaggtgagtcctacatgtccaaacaggcccacaggtgcacagtccagggagtttaatttcaaaaatatgggtgaggacttacaggagaaatcacaagccagtctgagctacaatatttatgcatctaggcagagtccctgagcaacaaatgtggggtatcaaggttaataatgagcatgatggtgagccagagctctgcaatgtgatatgagccctcagaattccttcccaaatcctgtgatgacactaagacaagtcacatttaaagggagcagactacctgattgcagtggggaagtgaagggagcaagtatttctaccaagatgtgtatctgctaccatttaataatatagcctccaatgaagaataacctatatctaaaatcagtgaattagattcctctaaatgccccctt

SEQ ID NO: 69134 - DNA, 751 bp, Homo sapiens
tccaaaagaaagagagaacagttttactcccagttccaatatatggaattgcatgagtgcaattgtctaattgtcactgctagggttgtgcatgtgctctgtaaaccatgtgaattagagaagggtattccacgattaatcaagccacacaatgtttccctattgggtagagacaagtcatgattggcactctcaccacaaccacgtagaaagaggagaaatattcccccagtggcaagagaaaagctatatttaaaaccagttttggaagagggcattgcattgggtctcctttaaactgctactggctgagtttatgaggttccactgagagacatagtccatccagtttgtatgtggcctttatcaggcatgcgggagagcacaaaagactcacaacaaacctttgacctcatgtccataggtttggactgggtttggagagttcacctgcagactagcttgataaaaagtgctgtcacagatgtaaattggaatgtcaggaatagctttattgacttttgtgccagagcataggatctgaaaagtcatttgttctgcaatcttttagaaagacaggggccatgcaatatgatcttcttctactgtgatattactggaaaaaggactggacatttgtgctggctccattttctgctgatatatagttgtgacccaggacaatttatttaacctctttggaacttggttttctaatgtattaagggaggtggttatgccagttgatctc

SEQ ID NO: 69135 - DNA, 1938 bp, Homo sapiens
agggtggtttagctctaattaaattattttctcttgtacaaactaacaggctcgtcattagcttccagttagaaagatcctatcatcctcttaaccatctctataagagctggaatgccttgactttcccaagagaggagacagggagaacaggaacctccatcaccctagggctatttggcaatcttccctcttcttccttcaacacccctttttgaggttagagtcatcctattccttccttctaggttccactggagtcagagggattaggcaatggggcatggactgcaatgctccagccccacccaggggtcagggctcacagccaggttactcaaacagaggtcactgtggctctctcctgctgctcaacccaggctggagccgctagccacagatcttagacacacaccacgggcaaggacacaggggtctggctttattggctgtagggccagtttggctgggcgactaggtggacattctaatgactaagcacctttccttagccactcccagggtcagttaagagacatagattttaaaaccaagagaaacaaaacctagcaaacaagagagatccagagagaaaaatactgtaaaatttacagattagaatagacagttttacctgtacaagaatctgtttttgatttctgctaaaaatattgcatattcattatattaccaaaccaaatattaacctgaccatggctttcaataatggtgttaggataaacctgtaattcctatatcaaggaataaagtcaaatgaaattaaatataaatgaaaccagcatcttggaccttaaggtcttcctagatgtttagggttcactttagaatttcaagagtagcctatctccttatcctcctctcaatagagcctgctttatttccctcaagtgttagtaatcataatgcgatcctaatgtattagatttggttccctactttatttctaggcttttcagttttgtctagttgatcatattttttgttttgttttgtttttgtttttttagctaaaaatggcctgtggatctatcctgtgtgatatttgacataccctatttatatttaaatagatgctttgagaaatgtaaggtttcctttacaatattctaagtttgggcaaagttcaccattgcattagggttgaagtataactgattatctaacttccatcgcttcttcacttccttaaaattctttgattcagtatgtggggggagggcgagaagttgtttctgatcaaaacactttttctgaagaatattctttggtactgatatacttcgtcaatatgatttatagcaagatgtgcgctacaccagtattgtgttaaatgtgcttccagatgacctagcctctgatcattttattcttttttgatttttcaattgctcatataattcatttcaaacaaaaggaagaaagtgatcatagaaataggctaggtagcgggaaaggaagacagaaatgcttaacaagttgcaaacaggaaaaagaaattaggacaaacgggcttcagaaaagccgcaagcacgctggtaaacaaacttaggctgccctggagcaaccccctgtttgtctttgctttatggtgcaatgtagtctagtggtctgatcaactgggaatctcagttttgcctcagactccctgttctgtactgaatggccttggacagggatctctgatgtgagataggcaggttttcaaactgtgagggtcaatgtttataagtggaaatgttgcaaaggggtgaagggcattattacaactaaaggaagcactattatatagaaacaatcaaatcaaggatttttttttctgcacatttagagccaaacactcaattttcctgccctgacaatttgtttatttgttcgtgtttggattttattgaggtccctgataacacaggcattttg

SEQ ID NO: 69136 - DNA, 3328 bp, Homo sapiens
gtatcgttcaaggttctttcattgcacagaataaggatgaaatgctgtttaggaactcaatgaaaatgttacaaaatatcctcttaatctataatgtacacattgtgtatatgacatccttgggactatgcaatggaaatagtgacaagtaaacaatgaaacaaaaggaaatcaatttaccaaacccagaaaggtgaaagcatttggtgaaacacaactccacaaagaaatgtgaagtgctgacagaactgttacataaccttcaatttattttaataacactggaagggcagatgtcatagtggttcctggaaatctttttgaggtttccaggatgtgttcccattaattttttttaaagcacctactacattgtgcaacctataaccagcattgactaatttatatcatgttccctcttgaggctgactcaggtctagttctcctaaaagagaactgagcaggatgtaggagtcatatgcaaagaggcttctccatgcaggacagaacacagcctcaggaaggtcacaggggtcaagctgattacctcctccagctctggcaagcagagggctcagctgggttacccaagttcacaagagctattgacattcagctgtagctcccactcattatgggatcagcaggggactgtctgggcctcctgttaactcttctgtgccctgttttaagattgcagtgaggtcaaaaaggaagccatcaggtagctttgcctcaacttcttaatagttatgattcaagaaatgaatcttttaaaccagtgtctaataaaccttttacaagtggatgcctgcaaccaatcatttcaaaagctctggataaaacgcaagtaaatatgtttgttcatgatgcagtaaatgtttatttcctagactgaaatggaaatggggaggatatgttttctcttcccaccaagaataattcccactttgtctttaataaggaaggccacacatgatttttaaagagataatagcagcactattgtcacttaaaagtgcatgttttccctgagttgctcgtgtaaaactaacctcagagagaactttaacaactcatcatctaagaagtgaagtcacagttttacagaagttcagaagctctctattaggttacagacatggagctctaagtggtaagcctgttccttcaggctttgatctcctgctgacacattatgatcttctagaagtgacttaacctctttgcctctatgaactcatttgtaaatggagaataatagttaattaatccacgaagcatgtctctgtggtagcaatgggaagactgactctctgttacacccaagggcctctaagtcatctatctttcctagttcttccttttttagcgttatactggccctagaacacacattatgctgaatccttggttctcctcttttattcctaattgctcccgcaaatggttgagtatctgtacacagttggggttagttttcattcaactactatatttaaaaagtattaagcttcttttaagggccaagagcttgtaagacaaaagctgtaccctaaaggaggttagagtttagccagaagacatggaattataagcaatgtggtcaattccaggaatccacctaaataattcagagtccaggtggatttggggagttaggagttatctagtttgatttctggctttgtcagatgatctagctgactgccaaatctacacttgacccaaagacacaaaagactatctacatagactcgttcaatcttgactttaatcacaaatgcaaacagaaattccttgatctacctctttctgtaacatttgacactgttggccattctctctattatgagtgttctagaagctgtctcggtaaattgggcaatgctagctctgcatgattcttagctctccacctttctcttgccatactctttcacttgatgatttctatcgccctcgcccccaactcccactttatggatttagccatttcccaaatctttagcactaactcccagccctcttcgaagcaagaggtccatttttgtacttgcctgctctgcatttccactggtttatcccactggcatttttaactcgagtctatagtgacatctttccccagatgagctccgtcctccgacttcccttttgcgtgtgaggattcattatccacccagttaatcaggctctcaactccagagtcatctttgatttcctcctctgctttgacccacctaacttgtctcccatcaataacccatcaattctattttcaccctttcctttatttattttgtacacagccttcatcttcttaaggcaaaactgttaattttctcatttctccgtcataccctaatacatcacaggctaagttccaaaatattggatgtaccgtttaaacttctataacctggcatcaacttacattttgtcagccttctgattgatgatatattgtttcatattgctttacagccaccccaaaagttatacacccttcctgaatatgctgcatatgattctgcctccttgtgtctgcatttgccgtccctgcagtcaatatcctacagttcttcacaaactagttcagacatccatgaatccctcactgatttatcttacagtcagtcttctgatgtgtagcttttaagtcctacttttcctaaggaactcaacattgactatcagtgtcatgggcatttatggctttacctgacttctcagtgctctgaagatggagaggctgcgtcatgtgggtgtggatccctctgcatcactaagcacaattcttggcagagagtagagggttagtaatatatattgcaaaaccgatgtattagtcagggttctctagagggacagacctaataggatagttgtatatataaaggagactttattaaggagtactgactcacaagatcacaaggtgaagtcccacaataggctgtctgcaagctgatgagcaaggaaaccagtctgagtcccaaaacctcaataacagggaagcccacagtacagccttcagtctgtggtggaaggcctgagagcccctggtaaaccattggtgtaagtccaatagtccaaaagctgaagaacttcgagtcccatattcaagggcagaaagcaaccagcacaggagaaagacgtaggctggaagcctcaatcagtctagcccgtccacgtacctctgcctgcttttatcctagctgccctggcagctgattagatggtgcccacccagattgaggggtgggtcttcttctcccagttcacagactgaaatgttattctcctttggcaacaccctcaaaga

SEQ ID NO: 69137 - DNA, 597 bp, Homo sapiens
catctaccctggcttctgtaactttcatcattggaaatgtgtggtataaactgtcaattccgcagtcactactaaactggcatggtttgtaataatactatttaaggtgctcatcaagggagtaaatgtagcctgttttgaattaggaaatgttagaaaagaaggtgttaacattttcagagatcagccttcaactttgaaaatactcttggcaaaatactgactgagttcattggtccattaagctgtatctttctgtctgaatcagctttccatttgaatattgacaaaaaggatgaccttgtgttctgaccttttaaccccacgaagctaatcctgcttttattccaaaagggaggatgggacagtggatgtcctaatgctcccattgtattccaaatttataaacaggtcctttgccgttttaataaaaattattaacacaataacaacttagaattccacatgtcctaatttgcagttccaccatatttagcatgaaatgttgtgctgcacaatatgttattaaaatcaattgtcatagaagtaaaagatgcacatgaacatcattgcccatcaaatcaataagcaataaaa

SEQ ID NO: 69138 - DNA, 735 bp, Homo sapiens
caagctgtcatttccaggagagggatgtggttttctacccaagggtgcagcatatgatcatattaaaaaattccaaagatagcagaattcaaatgtgtcatttttgtcattaagctgcctgcaggtgttccatttagatcagatgacacatttgcaaaaaccagaaggaaaagagtgggcttttgcttaattcattgaatcccagaagaaaatgaacactttttttttcccatgacaaactggaatttgcctcagatgagcttgacatattgccagcctgcggtctgactttgtctgagaacatcactgcactcctccaaagttgccaggatcagaggccaaaaggaaaaagaatggggcttttctaaggctgctggatgatatcttccccacaatccatcttgatgtgtcactgcaagtgtccaggggacaagggtcagagagaaaaacaaaaagggaggcattcttgggcccagaaatgacttctgataagaggaaataagcaagggacatgatagattcaggacacctataaccaacctgaggtggaccagaatttctaagtttttaaccaagaaatattgatttatgtatattatgctttatggcactttagagcaatttataacacttacattaaggaatggatgggccgggagaaaagccaatatgggcatgaaaaaagatgaagtgctgtcaggaatagtgactttcaagtatcaggtgcaatttctt

SEQ ID NO: 69139 - DNA, 1165 bp, Homo sapiens
agttaccattactagatggaaaattatattcagaaatgcagacatgtccttggtaggaaaaagatagaaacgcacaacgagcttcactcactaaaccaaatttcttaaatttcaaaaagacccattattcacaggtcaaatttgtcccttgatcagtatacagaaaacaataaggtttagtcataaacagtaaagcagcatgtctggaaggaaagagactagaaatgaaacaaaatgagatatgggccgtctaaggctaccccagtcctcactttcaccccccttcacctagacgagtacatgctgaacaagcaccaaaaacaaccaataaatgaaaggaaactcaaaggtcacttggggtcattattttcacatacctttgaataatgagagcatcacatgtcagccagaggagaacaaaatgtcacattctccagctaaaggttggccttggtcaaaggtcacagaagggaggccaggaaataacctaagaggttaggctgggtgcacaaagaaaggtcaccaaatgtcaatgaaagcatgcagctgtttggagatgaaacaactgaggcacccttttgtgctgacatcggctagaaaaaatgtctctgctgacattttttttagctggcagttttataggacattgacattaatgtacccaaccccgaattagccttttaaaaagcaacagtttggaagttaagtgcagcagtttccaaaaaatcataactgtgacatttttattccagatgattaatacagcaatggacttctaacacaaaatttagatttgatctgagctctttcatcacgacaatgtgttagcaactaggcctcgggacacaggtaacaatcagtaactagtatttttatgtttttaagaattattattattcctttaactaaaaggtattcagaaacctcaccttattacaaggtaggaagacatgagtgatttccacatttcactgggcctagctgttggcagctcttgatctagtaataaaatccattcaaaggaaagagaaaagactgaaaaatttgcaaccccattttaaaggaattcatgcaaaatacttgcagactaaatcttaatctatctgagtatttccatcttaaacatcagccctaaaagtaacaattcttagagaagtggtggtag

SEQ ID NO: 69140 - DNA, 3199 bp, Homo sapiens
aatcccagctattcaggaggctgaggcagaagaattgcttgaactcgggaggcagaggttgcagtgagccaagattgcaccactgcactccagcctgggcaacaagagtaaaattccacctcaaaaaaaaaaagtttacacagaaacaaaactctaaagtttatttcacaaacaggggccatctctccctaaaacctctattccgggtgagtctcttttttgtttgttcctccgtaaacttccagggagactgccaaacagtaatgctcaccccggggtgactgcaggactcacccagagacaaaactaccttcctacctaatgggccctagacatatgaagcctgtcaggagaacatcataaatcatggagatgggaagagagggggcaggaggagccacacaaaccctttgcacttaggagaaagagttatttaacacgtcagggaagtgcatttaataaatgaagtcagtgacttgaacatgtcatattcgatctatatggaggttactgaactttctttaaaaagtcatttttatgctggttgcttttcttatgaaattttctacacctctagtgtataaaatggatgtgtaagcagctgattgagaaatagctaaggtcaaagttaataaggaaagcagaaggtctaaaagcaggctgccttttttttcccctttgagttcaagagactccatatgatttgggcatgacatactaatgtttctgacatcaggcctttttttaaatctgccttcaaataactgatacttgggtggtaatgaatgtggaagatgtctcgttgctggaattacaaaaatgaactttcctcttctgatttcattcatgggctagtttttatgagtaaaatgatatcaaagacttggagggatggaatattgcctcaaaatgtcaagacaatataagttacagaatgtacaagttggagaagaaagaaaagggtgggaacatagaattaggtgtccctttaaaaacaaagaagaaagcaaaatactcagcaagtatataaacaagtacaaactgcacatctattttggaaaatgtttttgtatctccaggctttctggatcccttacatttaagtcatgagaatctctgggttattttgtcacataaaagagtataaaacccccatcaaatcaacaaataggtttgctccctcagatgagatttaactgaaacttggaacaaaaacagtgaggttcatcagataaacatatgccaaatttaagacttctatctgttcttaaatggatgctatagattgtctgcaagaactactcccttcaacttcagatgtgataaagcttgatatgatgctcttagaccttgaaacagaaaccatatgtggcaataaacaaacaaacaaaatccctggatactgcaaaggaaaaaaaaacagaaaacttactcgattttagaagacttgaaaaagttgtaattatcttccttgatgtacacggtgttcactgacaggaaaaaaaaaagaaatctcagcacctaaaaacttatatatttgcacatttatgttcaaattattctctaaatggcttgaaataattgcctcttctgctttgtattaactaaacttttttttttttttttttgtcaagtcatggttctttttctagtatctgaaaatgtgccaaactaaatgtcagtgccttcataaggaagatttagagttccttttggagcagatagaagcctcaaatgacaaacacgcttatcctgaatgcccctcctgctggtgtgacttacctcagaacaaggtcaaagaagccgccagagaagatctacgatttgtttgacttgacattccctggtatttccctttgttatccctgtgtcatcgttctgtggcagagggagagcaaggcaagcgcttgctttcaggtatatctggctagtagccctacataccacagagagctactgtggatttcactgtatgaaaagcctccatttgacttgaatgctgttaaagcattgcaggggtaagttttgaaatccttccttaggtcaaactctagctggaaagttcgccccatcctcctcttggaaggactcttatatggccttgtagctaaacttgagcaaccacacactgcagcagagcagctggcatggcccaagccaggtgggtggtccaggcaaggcccagtccccttgtgtccattattgctaaggtgcatctaggagcacaaggacaggaggagtcagacatgtgagtgtttttgcaatcagtcaacaaacatccactgtttaccgattacaggacatttcttctgggcattgggaataccaagtgacaaagtcatgcttttaattttcaaggtgtttaatagagaataagccagggttggaacactctaccccggaagtccctgctattaaatctggctttgcttttcagtaatcacctccttaaagacccaggggacaaaaaacttagaaacaatttcctccctccctgacttactttgtctctgacttcggcctttcacagtggcacacatggttgggacatctaaaataccactggaaaatttaaggatataatctacctatattatatgaatagcacaaatttattttcaatgaattagcagaagttcagagccattctttcttaggcactttcctatactcttggtgaattcgtctagtatgtgaaaaaagagtttctctcagattgttagtcccagctacaaggcctgccaccatagaaaagttccttctctgtcctttttctcctctcttcagatcccctttcttgacctttctatcacagcatctgaacctgcctgcacctgctcattgtccatttgaattgcttctctgctggaggtattcctggggcccactctggcctactgcctttgggcttcacctgacctagctctgcatttacaaagcaagcccaacagatttccaccatacatttcaaacaccgagaatgacactgattttgaaactcagctacactgcatagaggaactccctgaatacacccaatcacccaatttagggaagtacgaattttctgacaatgtgaaagggaaatgacctattttaaactaaagtattgaaaatttctaattattctcattccaagggaaaaaaatgaaaaaaaaaaaaatcctaaagaaaaagaacaattccctcctataaccta

SEQ ID NO: 69141 - DNA, 1168 bp, Homo sapiens
agagttttcaggattttttttgttgatttttttctcatcttcacgagtttagctttaatctttgaggctgctgacctttggatggattttttatgaggacattttgttgatactgttattattgctttctgtttgtttttcttttaacagccaggcactcttctgtcatgctgctgccatttgctgggggtccattccataccctattcgcttggctccctcccatcattcctggagatgtcaccagtggaggcagaatagcaaagatggctgcctgctccttcatctgggagctctgtcccagaggggcaccaagctgatgccagcgagaacactcctgtataaggtgtctggtgactccttttgggggatctcgcccagtcaggaggcatgggatcagggacccacttaacgaagcagtttggctgcctcttggtggaggaggtgcgctgcactggggggatctccctctcgtccagactgcctggattcctcagagtcagcaggggaaaagaataagttcactgatccgcagagactgtggccacccctcccgcaggggctctgtgccagggagatcagagttctgtccataaacccctggctggagtttttgaaattctcacagggaggccctgcctgatgacgagggatggttcaaggtccagcctaaagaggccgtgttgccacaatctgccacaacaactgtgctgcactgtggggaattcctcctgggtccaaaccccaccccagcaggggaaaatggcagactggagctgcagtgatggcagccaccccaccccctcatagctcagtcgtcttaggcaccaggcagcggcagtgatggtgaccacacccccgcccccaaccctggggagctcagtagtcttaggcagcaggcagccgaagtgatggcgaccgcctatgcccctgggagctcagtcatcttaggtagtctccagccaagcaaccattgagaatctgaacagctctgtttttgggacgcaaggtcctggtggcgtgggctcatgatgggatctcctgatccgtgggttgcacagatccatggaaaaagtgtggtttcccaggcagggtagcacaatcactcactgtctgccttagctgggggtgagagctctccttgctccatgtggccgggtgggccgtc

SEQ ID NO: 69142 - DNA, 710 bp, Homo sapiens
caagtcctcatcatctctcgcctggttgactgccacagacttctgtcttccctgactctgatgttatctgaaccatctgcagaataaagatctctgcctgccccgcctccatcattctcatttcctcctaccttacgcttgaaactctagcaacactcaactgcttgtttctttttcagcagtgcatgtatttcctgttcttcatgctattgctcctgtggttatcaccacttcaaacatgctatggccttcctttgcatttatgacattgtattgtaattatctgtttgtgtgaatattttcctccctggactgcaatggactttatttacattagcaggatcagggtccactcttctgtcaacacgtaaggctgctcaacacgtattgatcaacactgggaaagacagcgtcctccacctaactctctgagatcttatgaaaggcattttagctgctatttccctatttcataaatgtaaacagcacaatataccaaaataattcatctcttgtgagattatccactagttaatgtttccattctatctagaacccaaatgtgctagtatccatatcatcaccgttgacttcctcacatttttattatggaatttgtccaacctactcaaaagtagagacaataagtaatgagccccatgtgccaatatcttgacagtttcatttcatgtattccccaaacaccgatg

SEQ ID NO: 69143 - DNA, 1013 bp, Homo sapiens
aaaaatagttagattaagtaaaatatttcatattaactaaaataggtacttaccaaataatgcaactgtatattacaatgtgcagttcatagtttttcactgttttaatatttaaatacaagtaaaactgtaagttgtcacaaagaatgatagaattgaagtaagtcaagttctgtttcttcgtgtttacaatgtgctgccattatttattttgatccactgtttaaatagaagaatatgtgttaccatggtagttagagagagaactgcacccaccagtgtgtgtgtgtgtgtgtgtgtgtgtgtgtgtgtgtgtgtgtttagggagaggcaaatctatccaaagaatattccaaagtaactttcatatagaatataacattcatcaaaggttaagtaataaaacattgccaatgggaagctcacatccatgttattaaaacccaacagttactacaacgatcttttagaatttagagatctttttctggcaggagtattttaccatggtattgcttagagtctgctgatgcctggtgataataaaaagcagactgactttagtgagttttattgctgttttcaaatctttccatacagggaatttcttgatcccagccccacccacactattccactgcctgaaacctgccatccttaactgagatcaggaatgttcaaagacctagcaacaggcctcatcaagttattttatggcagtgatcacagtggtgactgttaatcattggcagagttaccctttgcaaagtacacagaggcttctttttaaaccactttccagtttagcacactaaatgaggatgtttgtttggaatgttaccacaaacagatttaaatggttttcctatgatactatgaattttcttttaatgctcaaatgcatacaagttcttagctgtcaaattaacaagataattccttctcttttcacttgctgtagtaatagcagtataattaggagtgcagctccagaagagactgtttaactcctc

SEQ ID NO: 69144 - DNA, 718 bp, Homo sapiens
tggcttatttattcttaatcttaaatttattgagtatataatcattcaaacaattttaaaatcatattcactcttgaatttttaaaacatctgccacaggtgggagaaatgtaatccagcttctcattttccaaacccattgtaatttagcctctaaaataaaacccttaaaaatctgaacaagtaatcagtattgcttaactgaaaaatgattgtcatgattagttattgaataagtttcatttgtatttgtttggtattggtttcgctcactggatgagattatttagtaagcaaataaaactttgaaatttttacaactgttggtgaaatctctttatagattgtgaaacatctgtttaattctcatttggtggtataaggtactcaaagatgaatcagtaacaaggaattctttactcatgttttaacttctaacaaaacaaaattgtgtaaccatccaagaggaatctagaaatacttgttgaattaatatgtctatagatcaccaacattaatgatttctgtatagtctggttatgaggctaccctatgttttcatcatctggattttttctttctaacttcaaatattatttttgaaataaacctcagatgctaaagtgaataaaataaataaaataaaagtgaaaccctgtacatttgaagtacagaactttatcttaaatacatagaaatgatacctttgttttaatgc

SEQ ID NO: 69145 - DNA, 2124 bp, Homo sapiens
gagaaaagtacttcccagcataaagatttctggcaaccctttgcttatttgacttttcccttcaggcaagttcaaggcttgtgaaattcctagaaaggcgaggggagagaacgcgtgacacagaaaggggccggagttcgggaccctacgcagttttgggacgttatgggcatggagggaaatgtttgctttggaggctttgggtaagctagggatccgacaagccctgggcgcagggaggaacgctgccctccggcctccagtcgcgctccccgaagcccagcgccagcgtcgcgcaacctgccgcaggggcggctcccgggccaggcagccaggcgcgccctcgccccacccgggaacgccaggcccgcgcagggaggggcggggctccatggcggccccgccccgccgcccggagggtcacaatgtagggttagggcggccggcgggcggggctctgcgggggaggagccgccgggcgggggcggggatggcgcgtgggggaggggagggaggaggactcgcggagggaggaggacaacgccattccgggcggccgctccctccgtcccctctctcccttccccaaagcagcccgcggaccggcagcaaaggaacgtgcgaacgcgtgacgccgcccgactggctcgcgctctcccgtgccccggcgtcctccgcccgctcatggcccgggccgccgcggacgagcggcgctgaggcgggccgcgtggagacgtgaggcggccgccgtggccctcacagtcggcgtttcgccgcctgcccgcggtgcccgcgcacgccggccgccatcgccttcgcgcctggctggcgggggcgctgtcctcccaggccgtccgcgccgctccctggagctcggcggagcgcggcagccagggccggcggaggcgcgaggagccgggcgccaccgccgccgccgccgccgccgccgcgggggccatgaccgtggagcagaacgtgctgcagcagagcgcggcgcagaaggtgaggcgagtccgccagccggcgggccccacttctccttccgacgggctgtcctctcccgctgcggccgggcgccccggcctcgccgccgccgccttcccgggcttcctccccggtcacccccggcccctgcccatcgcctcgggggcgtcgcgcccagagcccagctgcgtgtgggaagcagagtgtagtttgcgggcttcaatccacttccttctgccgattgttttcccgtagcagacggtgccaggtattgagagcgaccctcacattcctacagtgctctgtgtggcatcttaatgaaactttattctctccccttaaatgagaaagaatagctagttgtcatcctttctgaaccgattttgtctttcaaaggtagtagtgtaccaggcctgctattttgcaaaacggtctccaccaaaatcgaattacctgcctcgcggggcaggcgtgttgaccaggtggactctagaagtaggtggtttgcttggtttcttttccttttaaggtttccctttcttcttcttcttttctgtttttttttttttttttttttttttcaatatagaaactgtccctaagagaggaaacctttctggccatgttattccaggaatcttttgtcccctaagtttgaccttgttctttcgttcaccctttactcttgcatcagtcacacattcaaatggtcactcactaaagaaaacaattaaaaaactgtttgtgaaactttatatctttaaagtgaatagagatcattctgctattttagattttgctttcagaatcttaagtgcactatcatggcttgcaccatgttctgaagagtagttggccatgatttaacttctttttttaatttttaatttgcgtgaaaagcattttgggcaaaagagtaaaccgtgccttagttgtgttggtattacggggacagttagggtttactgtgatcaaccaccagagttatgtttggtttatctgggtgagtaatgaatgccccaccctgttgtagatttggtgtagattgcaatattctacctgtgcttgactttagaataagacctgttctaaaatgggctgtctacatacagcctgctaaatttttgctttgagattatt

SEQ ID NO: 69146 - DNA, 894 bp, Homo sapiens
aattgtatatttccctaatgactaatgattttggatgtctttcaagtgcttgttggccagtttgaggatgattttttttaacattgcttctcatacattatccagttttaacactcctacacgataggaatcacagtagctgcattcttccaagtcttaaaatggcaaaaatgtcagagatgtagctaaaggtagaacactccaggaccaagtgctaatatgttcacaaaacaaattgagattgcacaattttttttgtttgcttgtttaaactaacacctgataaaaaggtacattgctgaaaaatgggaactcatttcttcatcatgcctcaaagtaaatattaaatttatctctttaacaattaattgcacacatacatgagaaatctttatgatacatattttattacaccgtgtacaaaaataatttcacattttagttgggttggaagtttgaaaagaacatagtgcagttgcaggggtgggatgaactgtggtgaggtaagtaaattggacagaaattgggcagaaagatacttcctttttttttttttttaacagttttttatctgtctgaagacagggaagaagaggaatctgaattggaaaacccccactatatctgttgggtttttgttgttgctgttcagtctggaaatgggtggtgtgtggtgagaggtcattaggtcatcagggcagaattgtttgcagagctgggagctacatcctcacggaagtgggatagatgtgctggggaggggtgtgcagagaggagccaggaatgatgtaccattagtggccagggcttgttatggtaacaccaatgttgaaaccaactgtgcattcacatatacaaaagttttgtgtcttaattcatgccagaatacatgca

SEQ ID NO: 69147 - DNA, 603 bp, Homo sapiens
ctgaaactggtgattagcaacttcctgataagattccaggatttgagtgaatgggctcaagcatatatgcactaagaggcaaaacggtggagtttaactgacatatgacctttgtttaggaacacccaactggtaagggaaaaacgccttaagtgagcacatgcacaatttcagtaaacacactgtgcgtgcagcccctccccagtgctggcaggccactgcacctgtggacagccatcctgtaggaggaatcaggggagaagaaatgcaaaccctggaagcatgccagtgtataaaaccccaagtcaaaggtcagctgttcacttgatctttcaagttgcccgcttggcccccttccaagtgtactttacttcctttcattcctgctctaaagctttttaataaactttcactcctgctctaaaaacttgccttgatgtctctctctgccctatgcgccttggtcaaattccttctgaggaagcaggaagtgagcttgctgtagacctgtacgggttcgccactgttaacacaataaagttattctttctccctttataatttgtggaagagaatttaaaatgatgtaaatattctgttcct

SEQ ID NO: 69148 - DNA, 1122 bp, Homo sapiens
agaaattatgtggccattctataatataaagttaatttctgaatgttttggtaaagattatatttttggatatgcaaatctgttgtcatcatgaaagtatttgtactttgcagattgtgtaacatgagtttaggttttgcaaatgtggtcactacagtaatagataattttgttgatatgtgttagacatgcaatgagtaattgttgatctaaactcactcatttgagcatcagatttcattagtactctagtctagactaacagcaggaagaagtccagcatgtcaattcatttaacaaatattggttgagcactatgtgccaatcattgctataagcactgagggacacagcagtaaagcaaatagacaaagtccgctgtgctcataaagcttgtgttctgaggtcctttatagggtaataatatatatttattaagttataccaatgacattttgctctcttatacaaattgctttgacaaaaggaaggtttcatttaaaatccagcctgtttttattcagactgctccatgatgtaggctaactttataccatgaattcctactgggtacgtttttctttctctcactcagtagcttacctgacatcttaggccctcctggagttgatggtgccagctgcccatgatttttatgttttatttagtcaagaagcagctcagaaatcctaataacttgagatcttcttatgttctagctaacacacaaaggtacatggaaaatgtactaccttatttgtttttggaaacttttcttttctccctgagaacaggttattgtcatttttgcctatatatataaaattcatgtttttaaatgtatcctcgagcttttcaagtgatttctctcctgtggaagcaccttctcttgttatttggctttttataaagcccacgaatattttaaaattttaaatgacttatgtgcataaaaaaataagcaatttatatattaagaatacatatttaagcaatttatctgttaagagtacatatttaaaatgagaacaattatatcataaaaccagaactgtttggagtttgacatagacttgagacaattgtttaattcctttattttttaaatgtgcccagaaaatg

SEQ ID NO: 69149 - DNA, 3805 bp, Homo sapiens
agtagttctactctgcagttaggtgtaataaaccagcattctttacaaaactcaaatgagaccttggaacctgagctatatgagtaacacatatatgatcctgtgatctatatgatatattatttgtcatttctctattcccagcttgaaatttaatataaaaaaaagtttcactgcttcattctaaatcctgtttgatccaacatggaaaacattgttttagatttcttaatgtaaaaaaaaaaaaaatatatttgactggattagatagtagttactgcaaaaagttactgcaaaaaaaaaaaaaaaaactcggagtttacctttagtcacatcttcagtacattttctattaaagtatttctagattttagtgtctgcttggttttggttatctaagctgtaataagtagccttgggacccctgaaggcacgccccacacacttatgctgtgtgacctaaggtcacaagtaatggctgcaagctaattgattgagaaagggttgtctggcggggcctctttgcgtcctccctttacattcctaagttctgtgaaagaggcactagtagctcaggctagcaaggaaggaaaaaagaggaagtttctctctgcgttctgattacactctgaattcccttgtagtgagcttacttctctccacccacttcttaccaagaactccttaacttgagggtgaacaacttaaagcttgatcctacagttacctgaaaagtgatttgagtattcattgaactgaaagaacaaatcgcctacttcaggcggtggcaagcgtatggaaattatattagaacttcagcaaagtgcacagctgcataatagagaagccggcactcagattgacaggcaaataagccagcttgtggaaggggcctctgggtggcagctctgggcttttgggtgttggacaaccataggcaaaactgaaatggaacaggggcagaaaatagcacacttttactctacgcaactgttgctttttcatggtgagtgcagatttaagatattatatttaaaatatactttctatgttgtaaaacaagttaagaaatctgttgtgctttgagggaaattatagcaaaagcatttcttagaagttcttagacgatgtggttttgtttctgcttgatttcacactaaccttggtgatgcaaacagaaaaatacaatatttgtattgtctcgtgtgtcctttttctgaaaattgtcctttggtttaaatcatgcttctcttcaacttgaatcagcattgttttaggcaaatcatgtgtgggatagatgatgaaggaacaacggtgtgacagaatatatgtaaacatttcatttagttcgactttgtgtcacttctccacggcttcatgttttgccgccttatcttaggaatatatagcgcagtctgcatgaaaagagctttgtgtgagaattcctggccagttgaagggtcagggcctgtgcgttatctgactgccagcaagatcactggtgtgtcctcttatttttaacttaaaataggaaaaaaaaaagtgcatctttacatattaaaaagtaagtgtgtttgatttcaacagttcccttcttgtagtatgtggatgttattcctggcaaagaattgtttaaatttcttttaggaagcggcatgcaaacttcttttgtttctttttgtcttgtttgctcatatttcattgaaactttacacactttaaaaaaatttgaaatggtaccaagtagtttttattttggtgcaaatattttgaaagttgctaggcttatgttttctggagaacaatgtctcagagtgtaaattttgtttaactccccgtgtagtcatacttataactctactttaaatgtgcttcttattttaaaaatatcagagcctatagagactattcctagaaatgttaatagaaatgtttttctttggcaaaaattgcagattcagttttacaatttattaagtgccaagatatcattgctgttgttgactttgctaaaaaagcaattttattaacaaggtgactgcattagatgttaccaactgagacgaagtgaaacatgtgctttcaccctgttgatctgatgaaatatagaggtctgtgtggttacttcgtgcgtcacattcatttaaactttttaaagagcagctgcgtaatacaaattttgtatactcacttaaaaaataaaatttactagagtaggctcttgtttttggagacttatacattctgtttgctaaagtaaactaagaaactgaaaaaatatattggagttagaagctccaaaactcttcaaagggaagaaagcttttaagaaaaaaatgaatgtgctttcagttataaggcaattttgaagcattacttagctctcttttgcaaagatttaaggaaaaatcaactgttgtggaactaagtaataggcttgcctttatacaaaaattatgtataaaaagaataattattttccgaactgtttctatgatttgatacaagcttccttcaacaattgcaaaatgtgactgacaaatccttttctaagagaacaagttcattatgctctcgtcacctgttacattcattctcccttgcccacatacacagttcctagctgtttattagtgctgcaggaaagtgaaaatattttttttgaaagaaaatgtcaaagattttatttgcatgaatcttttgagctttaaaaaattgtggtcttatcataattgcccaaagtgttttgttaataaggtcttttgttattatcttaatatgaatagtcaggaaaggacatataaatcattttggattttctttcactatatctcaagtaaagttaaggtgtggctgagggtttttaaaaggccaagagattagacctttgaaagtttatcctttttgtataaagatgttttaaaaaatgtttaccacttacctattccctccaaatgaatgtaaagaccaaaaattaaagggaactttattattttacttggttataaagtctaaccacaaggcaggaagttactaggctttggagagacgctacaaaagaatgagcttccctctaatgaaagtacataaatcgtgaaaaactaaagacctacttcttagttctcctaacatttaatcttaaactagtaacgcctgtcttttctttgtatatttacttattgatttgctgctgagacagaggcatcttttaaaaactgaagtcaaccacataattttaataccatgattttaagaaggtgtatattttcttatgtaaagctagtcttccatagatgtttagattacgtatttgattactaggaaacagtggctatatggtcacagattaatatatgctgatctctcttatctatatataaaacatatattcacatacaaacataaacacatatcttgtgcttaggcctctaacatcttaaggcaatgtcttttcctcctagttatgcacttagttttgaagacatgtgtagatgaaataaaacgaaagagtcttctgacaagtgttctgaataaaacaagaaaaaaaaatgcttcaccaatggtgtgaagcgtaacaccaagcgcttgttacagaatatatcactagtgggtttgttgcttttcttatgtatttattaccatattgatgattacttctcctttgcctatagaccaggttggtggtgtgtgtgtgtgtgtgtgtgtgtgtgtgtgtgcacttatgagctcacatagggatgagagagtagcctggacatgtgccagggttatgacactctttgatttacttcttcagttctcttgg

SEQ ID NO: 69150 - DNA, 944 bp, Homo sapiens
tagtagttacggaacagaactttccgtaagtcagtgttaatgcaaggctggatttattagcttatacagtagagggataaagactttctcataaggagaaactttttgcaaggggcagtattggaacagagcttgaagcataggcagggactcgtcatcagcagagatagaggctacagcatgaaaagtgacatgacaacaggaaactataaaatggccagagatgagattctatgataggggcagagataaagatatctgaaagatatttgtggactatcacatgacaggccttaagcaccctatttatagttcaggagtcacttcaaaatcttcagcaaatgcttgagaaagaaagcagtgttcagaacaagtagaatggaaagaaattaggaatgggagtagtgcagagcagcttgaactaatgcactgggaatggaaatgagagaacaggcaaaacatttgagaaagtcgatttgaaaaggcagattgtttatgttggtgagtaatccagagattttgtatttcactgacagagtgttctcaatcgttaatccttgggaattatttgatgagttccaaagggcactaacagctaacagtcgatctcattaactaaggatctgttaaaacctgccaaggcaagaattttttctgggtttgacaatgacgtctctgaaagccttgaacttgaagagaagcacagtaaaaatatcttctgttatagccacaagttaccacattttgcaaaacaaaactgaataataaattatataggatagaccatgcccccacctttttaaaaactcattaaaaagtcttttttatctttgtttttccttaaccaaaattatatggctctaatcttctttctacattctcttctagagttatggtcagggtatagatattttttgaaatgatactgaaaggtaacatttcag

SEQ ID NO: 69151 - DNA, 941 bp, Homo sapiens
gtggtatcaaagtaaacagtgtgaaagcatccaacctgaatttcatagctgcagtgtgatggcatttttattcagctatttctaggcatattttaaggtctgagactcaccatatgcactatcatgtaaatttatttttataggtaaaaactgtaaagtaataaaacagtctcagtttccagagcaaatcatatccatctgtactgctgggtaaatgtagttctgattcaaccacatgaataagattacacgtgtttttgaaaatcactatttgctgaagatcataagcaattcacatgctttgtctatggttaattttggtaataagatgcaagacagctcacagatctttaagctatatctagaaatagtgctgattgaatttaagctgattatgcagcttattttggtcgtttgccctcttcctaaattctaaagttcaaagtttaacgtgaaatagttttctcaagtttagctctagccaaagtccatgaaatggcttatgtctgtcaatagttgacctaatagatttgtcctatgttgacactttgttcttttcatactagactgtgcgtatcatgtaggtatgttattttcagtgtgctgtgctttaaaatgggattagaaagtcatggagaattttttgaaaatgttttgatgtgttagtgttttttggtagggttttgggatacatcatttatttattaattaattcattattctgtatttattctagaatgtcatcagtaatgtattgaactaccaatcatgttagtggagataacaaggcaagaccagtatagtgacattagaggcataaaatcaatgggttctataaaatatttgagttgctttataagaactgtgtatcaacaggagtaaagtcatcaagaagaacctcttctaccagtgccatcaagaaagggttcatttatatgggg

SEQ ID NO: 69152 - DNA, 468 bp, Homo sapiens
ctggcgaaggatgaaaaagatgaagaaatcttgtttttctgaacgagaggattctctgcatgacttccccactgttggggtgatgagctttcaggctgagattttattaacaattcatatggagattgagggcagtggaggagcagattctcacataaacttgatctgtccatgaatgcagttctctgtttgccctgaccctgcatggcttaagacactgcctgtgaggccagtgtgccagacacaaagaaagaaatgaaaagcaagcacattccaggagtctgcacaaaggagcccggccgtttctagtcgtctccccagagaggatcttatctctgcacagccaaaaacctctaaaatgtttatttgtgtacttaaagttttaaaatccatgtggctgttcattaagcaacagtcaatagagaggttttgtgaggttttaaaatgttgttttctgaacttgttgaa

SEQ ID NO: 69153 - DNA, 1546 bp, Homo sapiens
taaaaatagttttaaacactttctttaaaaaaaacattaactcaagctcattacttttaccaaaatgtagtatagctaatggaaaagtaatacaaaattatgttaattagattgttttaaaaatcccttcaacatggaaaagtatcatgttttatgatttgatatatgaaactgagcatctgtgaacaaatttaattttaaaaagaaaagtaaatcatatttagccctctttttttcaaatgttagagaaaaataaaaaagctgaggaaatacagctagtgatttctgatcttcctttaggaaatcctgacattccagagaaacttggatagactctgaaggattaacccatttctgacttttcaggaagtttatctttcatttaaaaggatatctgatggggtgggatacaaaacttaaaataaagaatatgttaaatgccatctcagggatgcaagtttaacagcggtggtattgggctttagaaacatataaaaacatgacattaacataaaaaaattacaaaaaaatattaaaatgagcatataagtgttttttgtttgtttgtttgcttgcctgtgtataaacacgaaagtggtacatctctcatttaagttatggcccatgtacttgaaacaatttttttgctttctaagtgattgtataatgaatggcctaagctaacatttactttagcattcactctgtcctagtctatccgtgtgtcagctgagttactgtcagaggcttgcttggcttgtctatctctgacctctgcattctgaatttgctctgatgaagttttgtggcctagagcatgatttctgcaagtcatctgtgagtgtggcgcctgctcagtctaaggactagagtctgatagatcagagagaggcaagaatagactcagatgccgtcagttttggaggccaatgaaaagaaggaaacaaaactgaacagcagctgtgttgaaggctgtgcaaggccatcagaaattgggttcttgaggtggattggaggagaacagcctctggatgtctgctgggcagtgacgatgtgtctggaggctttgacattggattcattaggcattgctaatgtacacaaaaaatgtagcaaaaatgatgcctgtttctgggtgagaacatctggagcaccatagaagatgtgggagtaccttcacgtctcaggcattatccataggcttcgcttgaaaaaagttcagtttacttcttatcactagaaagagagtttcactaataatagttattataataaacagattattaaaagatgacagagaaatgtgacattataaggttttgcagaaagaataaaatattaaagcaaaatttgaaattgtttttctaagtggataaaacttttccaaactccaaaatttcaggatcatatgatttgcattaaatgacatagatttttttaataaaaccaccaaattatttaatttaaatttgaattattcctcatctatggaaggagcatactgcattttaaataaggaatatatttcaatattataactcagaga

SEQ ID NO: 69154 - DNA, 678 bp, Homo sapiens
caattcaatacatctcctatgcatattctacaaattagattgtcaaatattcagcttctctcagaaatttaggctattagccatttacaacttactttgaattaatttaatcagattatcagattaggattttgcttagtgactgccaaaatcagccaccctgaggaaattggagttttgattgaaaagtggaactgacaggaagtttggtttgaaagcacagggctcttgctggaggaggagggattgtgggtgttcagtgagttagaagagcctgagatagccagagggaagcatgagggtactggatgcctgggcaaagattaagagaatttgccaagaggtgggacatttccaagacaaacagcatactttacactttggctaaagtccctcatggcagtactcatttttgatatgtgctctcactacatttaatcgcagtgacagttgtgagattagaggtaccgctttcttcaaaaggatcattgaaagttgtgggtttatccttgtgtttctgtttagttttttatcatactagttttatttgtaaaccaaaatgcattatattttagacctttgctccaaaaggctaatgtaataatttttttaatggacttaagattttaactctaaaacctcatcaacattccatatattatgattcacatgggactt

SEQ ID NO: 69155 - DNA, 6046 bp, Homo sapiens
taggtacggtaaattaggtcacttggtaccttttcgtacaaggaaagcaaacttcttgtgtgcctaggtgttgcttttggagaaactttcctgagcattgaggagtcagtgctaactcctgcaagcatgtgagtctctccgactctgtgatgccaacttaccatcttgctgtagtcgaagagctttaggttggagtgaatgggtaccatctttgttcttagaggtggactctaaggaccttgtttttgtaggaacacacaagggctattttagtgttaatttgaacacatcagaagagtttacatcagaatttcaaagaaacgtaggaatccttgttacctttaaatctcaaattttctccatgatataaaatatcagtcttcttttaaaagatcagaaattaccccaatgaccagatccaaatgctgaacaacaaacagtccagatttaccatgaggaatagggttaatatttgctccccaatgacaaatcccaacccggaacagatttcagccaggcagctagcaaagctcgcgggtgaactgcacaggccatggtgggtgcagagctcagagccggaaagcaaacagctgctgtagcctgatttgagttaaaatagtgtgagtgtttagtctggcgcacggcttcaggggagattggcagctgggtcaaacaaagtccttccattggctcccttcccaggcagcttctgctagtgtttaggtactagtgcagtgtagaacccttttctcaggcaaaacctaacatctgaccgcaccctttttgctattaaaaaaaaaaaaaagcttctatttttttcctgctgtcgataagataaattctccagtagacaacctctcccactaattgtgtattagcaacgtattttatcttgagagcttgtacactgggctctcaacgtggtgtggaaggtagcctgttacagtgctggattcataaaagggcctttatggtttgtgaaagaatatctgtgtgcttagggaggaaactttttgatctgcagaaaagccagaagacatctaggtaaggctacgatatcaaatctacttttttgggggaaagttgggcagtgagactgcttaatcgcaaccaatgtgagtttagagggtgcatgttcacttttgtagaagttcaaaatgtactgacgattgtttgcttattttttgtttgtttgtttaaatcttaaaggaatactgtcgtctgcgtttttacgattttgttttcttctattgaacccattacagtggatatagagttttattatatagcgaaatctttgtaaactgccacagaaagaaagtgttatttagaagggaaattgacaagttttaaagagtaattgtacaatcatttgaggacagaggaacactgcattatactaataagggtttaattaccaaaaaaagtttaatgttgctttggaaggaatattaagtaagttgtctttgtctcttactttttaattttagtcgctgatttagcctgttgggtcacattttttgttagtgctgaaggctgccatgaatccgtaatgaggcccctttgcacatgattttggcacttggccaaaatcaacttcccagcggcaagctttctctaaagaacctggagcaatttctttctttttttttttttttttaaatcaggaatcatgtctgaaagctgccacaaccagttgtataggcatgtcaaaatgactttatacagtcaatatgaaacaagcattaaatattttttctcatgttgttgcttttatcattatgaattccttgcttgttgccacctaagatacgatggagcaagcacagtcttaaagaagatttgctgattttttgtttttctcagcagaccagagtaggtatgatcatcttattgagaagtatacagtgcaaaaaaggtttttcaaaacactacaggataaataacaaatgaattcttaaaactgttaatctctgtaagtaatactcagtgaacagtaagtaatggagttttctagaagtttcatcgtgcgcgcaattaagcttaacatttttatagtgtttttgtctatgttaaaaggtagcatttgggatttttaaaaatgtcagcatttgctatataattttaaaaacgtattaacaccttgatattatttctaacaaatgttttaatagaaatgcttggtatataaacatggctgaataacttttaagtaattgtgtttaattgctgttttgcaataaaaggataatttttcatgaaataaattttgaagctcaaaggtacttaacatccaatttctggaactgttattaattttgatattactataactgaattttgttctgtaagccaattttatactctagtgttttaagagttaaattcacgagtggcaatgaaatactatagcaatcaaatattaacacctcaaattttctatagccattttcaataatatctttagacattaaacataggtactctacagaataattagaagtagaaaagtgtaatatcagttgctctattttgtttttttaaaagaaattttattatcactatcgtaaatactattatgccttgtgtgttaatctgtagtaatccagagtgcaactttattttactagaaacagtcatatttctctttaaaatattgatgagaatcagatacattattttttaagagtgacctaattaagagatttcttaataggcatgtttattctgtatttgtcttccctttacagtatagaatattgcaaattttggtgatagaaaaaatcatattaattttaggtaaattttaggattagaaattgcctcctgatttccttcaggtcattttttgtaaatatacaatttatatttgttttgctgtggaccaaattatgatactgtaaaaaccttgctattagtttaaccgaggaatggagtgtttggaattttcatactagtcaacattaaaagccatagaagttataaattgttattaatagaaatttacctagataaggtctctttgtatgtgagtttacagctgaattcttatttaatgtaatctttgtaatttatataaaagcagttaataaaggtaaatatttcaaaacttggattaaaaaccaaacattttcacatttattatcatgaaacaggtgcaggaaaaataagatagcttctcttgttgagcatgattctcacttaaaaattaattttgaattcaattttaattttaattttagctcttacacacatcttctgtttttattttttgattattttgaatcagttgttgtacttagcatttgaaattgatagattatttttctaatatttactaagaaatgttttaactgaaaattatagggtattctttgttaatcagagcccatagcaaagtaaatgccatcaaatatagaacttttggagtacacagaagtgttagtttgcgagttcagaagaaacttacttgtacacgattactgacaaatgttttttagttgaggtagaaacaagtaagtattaaggacaatttaaattatcttccttactgaaatagctaaaaaaattgctttcttttgctatggcaatgcgttgtaattatttccataatctaggctttttagcagaattattagctagttttccttaggaccaaaaatgcaaaacactgattacatttccttcattgagttaacattttaaaaatactatatggaaatgtaattacttttaaaaagaaaaatattttaatatttttgttgaatttcttcaatttataaagaatagctcgaacaagtttttcgttcatcttttcccccatacttatattggaaatattaaaatctatgaaattttacaatgtggaatctcttttactcttcagaaaaagttaaattcatttatagttgtcaattcaaattatggacttttaccattttaaatgtgacagggttttttgtttgtttattttaattatgcaacaggcacttaaaatactttctttccctccaattaaaagagacattaaataattaaacatcaacttttattctgtattgaaaagaaagctttaccattgcagtattttatccacaattgtttaaatgtgagaaatgtttacaacagggtattttaggtgagcatttatcatttaaatgaagtgctttgttctgaggagtctaaaattcagcaataagataaatgcattgctacattagattgaacatcattgttgaatttttggcacaacttcagtgacctcggccataaaaactagtatagtcaggatgatttggaatttgcagtaacaaaactagatatagaagcacgtgaagacaccaacctttgttgttttggagaaagtatgcactaaaataaaagatgatacctttcatataaactgctaataataatactttgttatttcattaatacaataaaagtgaaatattaaaacagtaattataatctgtaatgcatttgtaaggcttttctcataaaattaactgccatattttactcttttattagatgaacaaatgtcatatttccaagcagccaacatagaactatagcttatataaccaaataattttttaatgttactttgatttatatacaattgatattgtatagaaagaatcacgttagctgattttaagtcttgttcaaataaaagaagcattgatttgcacttgttgcaatttttttactttatattggtttaattttaaaattatcacaaagtaaatattactgtttgatatcattcttaaacattcattttacaagccacctgacctattagctgtttaaacaatgatgatttatatcttgctataaattcttctctcaaagtcaagacaaatagatcagtaaaagaacctcttttttaatgctcaaaattttttcttaaaaaacaaagaatttttttagttttcttttgtttatgtgttcatgtgtatttgccaacctgtgtttttgcctacatcctgaaatatatgtcttttgaactcgaggttggaaagtctgatagcaggctcttaagtttattcttattccatattattttttataaacaaatttattgagtttcttactgagagtaagtcgatatatgaatcaatattaatgatcacatcaaatctgaggatttgcttcctttaaagcgctgaatattcagcataaatttgtgctaatttacgtgtttatagagtgattctaaatatttgattagtattcgttttaaagatttactaattctttgaaaatctggagaactatcgtttgcttaaaaaactaatatctactaaagttgtaattgtctctgctttgctattattgaaatattacataatctcttgtttaaaaatatcatgagactaagctatcgtgcctttctttccatttctcccactaacatctgaggtcaacgtctgtaagaggaaatatctgaaaatatttcaaaaacattttctttcctgtgataatcaactgctttatcatttgcagagattttgaaaggagtaactgttttatttgaatgcttagataaatgtgaggaatatatgggctttctgtggacttcagttttaaaactaaaatagaaagtaagatggagagtaataaaatgatatattttatagcaactaattacaacttgctgttcatacataaacaacacgctggaaaggtagacagtgggctttgagagcagctttcatttactcagtctgtaagaactcgtgaaaatggtgtcaaagggatggtggtgatccattctgtatggtccatggtgctttaagcttatacagtcatttaccatatttaaatccccgagtcttgcctcagagccccaatcaccaatctgagatatttttacaaggagagaggagttacacactcattcttgttcactggaggatctgtgatagcgtttccttggcagaagcagggttcttctctgtatagtgattttttttaaatccctgtttaggtagttcagctcgttcagttggacaaatcagcattataaccaagctga

SEQ ID NO: 69156 - DNA, 1020 bp, Homo sapiens
catcaaagcggtcttgtcaaaaggaaacattatttttttactaaaattatgaagaaattgaagcaaatgtgatttcaaagacctaactttatccaattttctacttttttccaagctctacattttcacagtaaaacttctgttttatcttttaacaacatgataaagaaaaacacagatggaagaacattgagggggaattcctaaatgggagcagttagcagctatgaaaatgtagatattcaagaagaaaagaaaaagtaagcaaaactgaatcatgagaccatagaagagtcaaaaaaatgtcaatttatctcagctttctgcaaactacaacccatgggccaaattcaaggtctgtttttgtacaatctacacattaagaatggtttttacaatgatacgtgttagaaaaatgtttagaaagtcatattttatgatgtgaaaattgataaaatgttgttgtccataaataaagttttattggaacaccatcacactttcatttatgtattttctatgactgtttttatgctgtaacagcagaattaagcagttgcgacagagatcatatgacatgcagcatgtaaaacatgtattatctagcccttcatagagaagtttgctgtctccagatttagaacattcccctaagttaattttcccagctgattacatcactgtttattgagtatcagctctggaatttcaagttcaaataaaccaaggagtaccttcagattttttcattagagtttttctttacagtaacacaaggtgggagcaaataaccagtaagagcagttaccttcgtgtatctgtcattttacaaaaaattaactgttcattttgggataactgtagacttatgcagttgtaagaaataaaacagagttaggttaatctttatccagtttctccagtgctaaaatcttgaaaactgtagtacaattggaaaacaacgaaacagttgtacaaaacagtacaactgaaaacaatattatagcccagatgttaaca

SEQ ID NO: 69157 - DNA, 6206 bp, Homo sapiens
tacagctggacagtttcaaatgttctcaatctccaccaaacctcctctcatactacctcagtggagagggagatggatacctcattattgttgagtttggggtggaagtctagactgcccatttagtcaacatagacactgcatgtagggtaagagaagaatcttgctaacccccggcagggatgaaactcctagattcctgctcagacttcttttacactactctgggtgctggaaggagagggtgttggaataccctggcaaggatcagcgtctgggcttgccactttgcctttgcaggtgtacatggggatgggaccataattctttttgtggtgttcaacgagagcaaaatgatattgctttctgtctttctaggctgcccctttcttgttcctttgactagagagaacagcctttcgttggaacttggtttttttgtctgaaccagttggcatttctgggttgcaggcttcttcagctctgaggttttgatgtataaggtaaaaattttaaatccatgtcattccttgagtccttcagtctctagctagtttttcatcttctctcagcttttcagagtctctttaaatttctttgatatgtaatgtggagagattttagttgtacctagaaggggaattagaaaaaactacgtctactccatctttctacaagtgaaagtctcccattactttgcttctttttaaaaattgtttttaattgggaagacagcatacaattttcacatcagattctttcaggaagttcaacagaattatacaaaactaaccatgaatttagtattaaaaaggaaaccttcagacagagaaaacatctctaatttattttttaatatccattttacttccactttgcaatttccatcggtttgtttcttgacaagtttgtctcttttaggacctgcaacatctctgtttagtagtgagcttttctcatttaaaagtacttactgaaagactcccacatgggagtcacatcagtttctttcactgatgttctcctatgcctatcagaaggcctggcacatactaggacttaataaataatctgctgaataagtgaatgagaactggaaatttaaatttttatgtcaatgaatgtgtcatctgctttcttgttttgctgaatcatggggcttaagtttctgccaagcactctttaaatatgtgcttaggacactagcagatttgtccagaattttgcaatctagaaaaaaagcaattttaattttagcccgtgtgtaaatttttagtttatggtttagaattgcattattttgaattacaaatggggaggacgacatgatggttctcacgtgtgtgtatgtgtgtgtacacattcactcctatcgttgctaaagaaagtcacctgaaggacatggcacaaaaacaaccacaaaccatttttagttatgtttcctagatgcctgaatcatttttcagatttttttctattagacaagtcacagtttgattatctttgaaagtcattgttatgtattgtgcagtgtatgtgtttacacatggaaaaggggcaacattaatccatcatttggggaagacactgaatataatgttaaattttttgcaaacaatcatactttagataaagattctccaattattgcaacatttttaaaaaataaagttaaaggacatggttctttttagtgccgctcagtatgtttggtttctgtactaataatgcttgctttcctgtttggctttaaattctgcttaaggaaattgtgaaaaatttaattcactctacttttgttagaaagtatagaaatgttcgtgcatgggattcattgcctgctagaatggaaattcattggggaggggaaccatttcattttactacctaagagctgttgacacagtccctgcatctttcaaaggcatctttcatgccacgcgggcaaactgtagccagcgaagaaacagaaagagcccttctcacatatgtcagtctcagaaaacttgcatagcagctgtgctaggtaccgatgaggattactatagacccagttgcagggttttatgtggataaagagacaactggctttctcaggggagcactttgttggagattgcagcaatagtgcatccctgctgttgctagaagacattgtgaccatgtagtacaaaatcagtgccagataaaatcagaaagtaacaaaaagcaagaagaaaactcggagtttttttaaatcttaaagtgagagacgaaaacaaatgttctgggcttgtttcattcacttgtaaggaaaaggagacagatgaagggatgcctttaactcagaaaacttgaagggctttcagtcttttcatttgagaaccatttgggtgtgttgagaaaaaaagttgccagagtaggcatgttcagacctttatttgctacatttggtaggaaagattttttttttcccctcttaactacaagaagccagagttttctgtgcaaacgaaacaggcgttgcaagaatcagattcactttggacgactcttcacattccaagtcatcattgcgttaggcagcacaattccatctctggttgatgggcagaaaaagtgggcagcttgccaggtagacgtttccatgactcccagcccccaaaggtgatgcgtttttcagctaattcaatgaagagtgggctgaactttgggtctaaacgagacaatagctgccttcgcagtatcagcagaatggttgatgggagtgcactctacatttggcagagaatcatgtgaccttacgactgagattttgtgatggtgccaacggagacttggaaagcagcaaccgtcctgacttttttcttcttttctaacatggctcagaaaatggtggatcttaatacttgactttagccagactcagcaagcgactgagctttgaagcacaacttcgcctttattctgggtttttggcaggccaccaggaggctgtccctttcacgcctgataaattctgctgcttatctctaaatagaaaaaaaaaaaaaggaaaataataatagaatattgaggcataacaagtgaattctaaaattgtatgtgctttttgttttttttttttgttttttttgccttttctgactggtgatttgtatttttgttttatttatttatttattttttaggttactacctttctgcttgtagaagaatccaagtagttgggtctttttttttttggtttataatgaacaggcatttgaactgggcaaacaggacgacagcagcagtgagcatgagatcattgcattgcagcactgtagcaaactggcaccctgcctttgcacccctttggttcaggagacaaacgtgtgtaatcctcatttctaaagtcagcacagcctggaaggattcctggtctctcccaccttctaccattctgctgccagtgacggcaaggattggtgtagcttctgcgcagtgctttgtgcctggaataccgagaaggaagaaaaagaagacaagcaccctggtccttttctaagaaattacaggcgcccttgaagaaaaaatctgagtgtgtcctactacatgcaagagtgctggaaaaaaaaaaaaaaaaaaaaaaaaaaagagacgctcctgctcaaaaacaaaaacaaaagcaaacaaacaaaaatccaaaccaaaacaaaccaaaaaaagcaaacattggctgtataactacagagacatcgggctttgtaaatcagctttttaaggcaacataaccaaatgagccttctttatttttattatttcaaaccatatggcataattagcaatatattgcacttggtgaaatcgcacctttcatatcaggtataactttttttgttgtttttcttttaaaggctactgttatataaaagggaatccttgaacttttaatttacttttatttaactcattgcccactttactcttattaactttttccttttcctctcttgctctaatcttgattaaaatagaaacttaaggaaagatagaaaaatctctatgaaaaagacaatacatgtttttatgtggggtatacacagaagttttggaaagatattaatatatctgtgctttttgtgtccagtattagtttttgctatctaagaaaagtgaatgtttagacctagtgggtaaaaaaagtaaatctttcatgtgacttataatttgaaatgtgaaagaagaaactttttaaacttgtagaaaagggttatattagaatatgcgttgaatgactgataaataagattgcttttggggaagttatattcaaattatttacaaagatttcagtagaacaaaaataggaatgagaagagcatgttctcagttgctaggtagaaaagaagcttctttcataataatatgctcttttaaaatacattttaaaagaagtacttgtcctagagcagttgcaaaaagcattggaaatatcaagtgtattagaaaaagtacatgcaaacttgttttaagttcagagcaatgtattggctcagcagataactgcattgcattataattattttgtctgtttgtagaagtaaattgctaagcaatttaagcattttattaaaaaaacagttttgcctggttcagtgtgaaaggattagcagatgcattccagctattttagttttgataaaaaatgtttctaaacaagtgtaaaaataatttttaaaagagaatgcttttgaaaaattcagcaagtatcaatgaaaactataatttgcatactaagaattgacgttataatatttcggtaaaaatatactttggtaatctgttatgcttttaaaatcatattttcttatattacaaatatgtagggtaaacaatgaaaaatgtagaactgattaattctgcctttgtgtttgctattctatgaacaattacaggaaattgcaaaatccctatatactgataacattcaaataaaacgttctgttggttattgttcactaattatttacaaaatagctcttgtacctccatgctgcctcagctaatggtacaccaactttcactggcttaattaatattgataaacctgtttccatgtttcaagatccgtttaaaaacattattttaaatgttatttttagcagccattaatctctacactcttaattatcttattaagctccatgccaaatccaaatctcttttcagctttcgctacttcattgtgcaaaacctagtcgcttctttaacagccatcgtcctttcactttcaaaactgttactgtgaaaacaacacgaaccaaaatgaacgcataaatgcaaactatgaaaccactttatatgtcatatgagtagcctgggtggggccctgtgagtcttccaaggctttaaaaaaaaaatactttaaaaggttttgcccattttgatatcgtgttttcttctcgatcgtctaccctcattcccacgatccactcagatgctcctcctagacagcagttgtctgatatttctccttttgtggttgttttagggaaaaacttaaaatggatatgaaaagtgaagaaagtgatcataggagaaaaccatttcaggtaaaaataaaaaacaaagagcaaataagatttactgtttttaaagaaaaacaacattcttttgactgtgttttgttataagaattaatttcatattctttatgagtgtaactgttgaaattttattgatggttttcatttgaaaatgtgtgctatgacctacctttgtgaaaaatttcttgtggtcaattgggcagtttgtgtcccattgaatatatgtctgtgtatccatacgcttaagataggtgcaatacggtttactagaaagctttataggaaaagaaaaaaattatattttcttatttgttgtaccatataaaaggaagtgaaatcaggaggaggggaataaggtcatgctttttcatcttttttacatgacctgataagacaatgaaaccaaaacatgctttcttatagttatggtaaaactaaacccaatgctgcctcttatttcacatttgcatttataaatatatgttgaaatatttttactacaactgaatgtatgattgttgattatttactatagtttttaataattatgaggacaatttaagaataaataatggtttaaaattatgtagaacacatgatctatataaaggctataaaacgtatttatttcaaaat

SEQ ID NO: 69158 - DNA, 1765 bp, Homo sapiens
ttatggcatttaataatggtaattcaaaatattttatcaaatgaatttaaaaaaaagtaaatgtcaataggcaacatcagtttatttccatttcttaataatcaccaagctattcaaaccgagagcaatgagaagctcataaaaaacaagccatgaacctaccaggaaattcgagggaggggatctccctttatcaatctgtgtatctccagtgctaagcacgatggcttatctcatatgtggttgaaaggcttcaaccacaacaagaagactcccaactgaagacttttttttttttttttttttttttttgggatggagtctctgtcgcctgggctggagtgcagtggcatgatctcggctcactgtaacctccagctcccaggttcatgcgattctcctgcctcagcctcccgagtagctgggattaccatgcccagctaatttttgtattttcaatagagaccgggtttggccatgctggccagactggtctctaactcctgacctcaagtgatccacccccctcggcctcccaaagtgctgggattataggcatgagccaacacgcccggcctaaaacttcgttctttaaaaataagtaaacaaaccaaaaattgaatagacataaaccaaataaggataaaagaaaactctgctttaaaagcctaattccaaaaacctatgagctgcaagtcatcagtgattaaaagctaggaggcacactggatgtttaaaagtagtacctgtgcccttctaaagcagccaaaccagtgaaaatgggtagaagccaataagggggcattcacccctttcaagcatctaaggaatgcacattcaacacattccaagcacacctcccccgctgcaggctgctcaggccagtggccttccacctctagccacattgcacaaaaattaataggaaaacaaaagagatgcctttctggatttgtcacattgcttcacactggtgcccctttctcttgtaatcaggataaagaaagtctctgccgggcggggtggctcgcgcctgtaatcccagcacttgggaggccaaggccggtggatcaccggaggccaggagttcaagaccagcctgaccaacatggcgaaaccctgtctctactgaaaacacaaaattaactgggcgtggtggtgcatgcctgtaatcccagctactcaggaggctggggcaggagaatcacatgaacctgggagctggaggttgcagtgagcagagatcacaccactgtactccagcttgggcaacaagagcaaaactccgtctcaaaaaacaaacaaacaaacaaacaaaacattgcagccccattgtgaaaagcaggaatgtgtgaacccaaaagttctgacaaaggaagtggacggggcagcaggcatagatgaggtagcccgtgtagaaaaactccagaatttgctaggtattttttttcttctggtcactatttagaattctttgcttaaactcccacttccaacttattgtatatatattgtcagctcaagaatggagaagaaggtgtttaactctagattagactacccaacctgtggtttagtagggtaaatagagttcataaacaaaaagccctgtccttaccagtgttcatcaaccacctgcttggactaattgtactatgtcactcgtttttactatacagatatctgtggatatctctccagaacttcatgtatatgtaagtgacttgctcccaattctttcacattttatcaatatcagctgtgt

SEQ ID NO: 69159 - DNA, 408 bp, Homo sapiens
agttttttgaagctcagatttcaggctttgttcagttctacttacagtatttattacgattaatcattattccacctgcctctgagcaccttttacctagtagtagcagaggtgagtccagtctcgtgcaggaagaacaaggatgtgtttggcaggtaagctgattagtgagtctacatcaagtgattgagtcaacagttcataccaacatagctagagcaatgctttttgaactatgggcagctgtccttcctcttgatgcatgcctctttaatcatttccagcattttcttttccatttgttattttcaccagggaagagagagccttataatattagtctgttatgttagctttccatagatgtacacattatttaaatcatatgtaaattagatccatccttca

SEQ ID NO: 69160 - DNA, 3425 bp, Homo sapiens
ttttagaaagttaacagaacaaatctccaaaatcacaaaaatagttgatctagcaaggcaatacttgcattatactacttaaattaaatgtaaaacagcatcaaaattttactttgtaaatattttagccatagtcaaagtataaactctgatttagggatgcttttgtattgatgataagatgttaagaattagaagagaccttaaacctgtatatatgacagtggtaattggactaattgattgcaacatcttctttcaaataaatattgatttaatcaagtctgcattcccattggccttaacggaagtcctaccagaagcctgtgcactcggatctggctaacctctatctggatataaatattttaaatgcatggccattcagttctaagtatgaattttttggcgagtatttattcctcttgattttctaaattcctcagttaacattgttatgccttctgtaaagttaaggcctgtgtgtgtgtatatctctgtatgtaatagagagatagcatggattaggggaaaaaaaagttgtatttgcatttgttgtttctgattcacagagctaggagtgcagtgttcatgtggagtccacagagctggaatatcagtaggcagttgctgtaagcacatgttcaattattaaaatagtcaacattttatgtctgatagccatagcgaggtcatgacattaatttatccaaagtattgtgggcaactgtctagaaaaataaatagcataaaggacacagatgccagagaactaaaaaagaaaaaaaaaaaaaggtgggtctgagcaaagagagattaagagatgaccaatttatttaatccacatagaacaggaagaagtcagcaggtgtctcaacgttaatgacaagtattttaagctatgctgcacatgagttaatttttgctttagtttttcattagattctaagcttgttgaatactactcctattcttccatgtcagaaacttaatttcatattttattgttgcttcaatgcttagggattctttgctacctgtttctttctctcctttttcattcttcccttccctcttcccatttctgtgtttccctttcttcttccctgttattattttccttcttgcttttctctctcatgagagtatattcttaattctgtttccttctggtgccaacttctttttctatttttattcttgcgtttgagaggtttctttttccttttgctttcaaatcaggagcctgtaggaactgatcttagagatacataccctactaccgatgcttctatctctttataggttgtgtgatgttttctttggaacctctgcgaatggttgtccttcttgtttgttgccacagatctgttgccaatctgctaccttagttgagcctgcagtgccgcactgcatgctgggatctgtctgtgtgagtaaactgaaatttctacagcaccagacagcattagagttggcttgagaattgccgtactttgcttccctttgtatgtatttcttgtatgctgccgagtcactgatggctagctctgtctggcaagtaattcaaaaatgctgtttatgtagaaaggaaaggtagggactttaccacactctgtcattaaagggagcaattgaagaacaaaggaactgagtaaatacctatatattgccttttgtgttgcgaaacactgtagcacaaacacatttgtgttcagccaaatgttttacttccttttgtaataacgcatatagtaggttgtctccacatatgtacaagaatccatattttatttaaacgtatatagtcaattgttcatatttataggctgcaaacatttctcaatctcaaagacttttacatatccactcccacacagctatttgttattattttaaaagttcttaaattaaaaaaaaaaataaaatatactaatatctctgttggttgattttattaagcaacttaggatttcaacacagtttaaatcatattgatgactcagatcctggcaggtcttacaattcctgtgaaatgagagcacagctaataaaaatattaagcaattacttttattaaaatcatagggtttttttcattatcacatagaaatgattgatctatacagattggtctcactcatgtgtcttttgggctgcttgggagcttcatgtagaagtggaaagtcccctttgctcttccttcgaccaaggtggggaaaatgaaggcatagaatacaatctagggctattaaagaattgctggcattacttctctctatcacgtgtgagcctggctgcctgcttcctgaggtaggggatccaggatgagactgtgccggagcctgtttccacaactgcatttggagatccgtcttattgattagcgggggaaaggggtggggatcaggagtgtgaggtgaggggaggaccaactgacgactggctcaatgaagcacaagacattttcttccggaaagatgtcaaacaactgagaaacagccagagaggaagtagaaaggtggaaaaatgaggagaccctggaagaaatgaaggcatttcctatgagacagccttggggcttttttcttttctttctttttttttgcttccatcatctgacctgcaaaggctagagtgacagcgtcatgcaaatgctgcagtccagcaggtctgggagagggtggatgctagactgtgagttaatgttaatgatgagcgcagtgaaaataccagccgctgccaccccctgctcacagaagcgctctgagtcagcatcagatgctttgcctcgcctctcgctgtgtatctgtatgcctgtgtgcgcgcgcgtgctcgctcgggcatccgtgtctagccgaggggagggggtggcgtgtgagtgcgtggagggtaaaagccagtcagtcagtgagaagcaaaggtacgttggagagcaactaaaatctgactgatttccatctttggagcatcagatgtattccctaaggaggatgggtctccgtgatgggggtggtataattatgttaatgtcatttttatggaggggtgagatttttcattctgataattggttgaatgctatggtcaaaaattgtaaagccatattcagttttagggaaaagcatggacttagatctaagggctgttttattttttcgctttttgtgagtgctgcttttttgtttttttggtttttgttttttaactatttattttaagccataagtgattcagtatgggaaatcaaatgataaacagaaagagatcttatataatgatgcattacatcatggagcagaatatttaaagtcttacaaggcagagtaaagatctggacagggggtggggggtggtggttggaaaggggtgtggtactagggtggaggaggggggccaattaccaaatattttgtgcagtatag

SEQ ID NO: 69161 - DNA, 1116 bp, Homo sapiens
atatttctgaagatcatcatgaaaatgtctagcatattttgtaaacaacaatttcttggattattagatactttgctgtttgcttttcagtaggcacaaacatattgtgagatgttctgtatttatgaagttacaataaactgtgaaaataacagaatgcattctgggtaagctaaagcagtagtccagatatttcattaaaattcagatccatactttgggttgtattcttattcaaaaatatttttaaaaatattattgtaagtatgtttcttatcgccaatttttaattttcatttgtaggttgtggaaaatgcactagaatcaacaaacatggggactaattcaactcggatatcatgtcttcagagaagtttctcctgccctcctctccctgtagaattaagtattcttccactgtgccaccctctaacttgtgctcatatcttcctctattgtagttatgtgttcacatccctgttgtttttgtaccggcttctcccaaagggagacatttagtcttattcttcttggtaactttagcacagacctggcagattgttgacactcaacaaatgtttattgactcaaatgcattcagttgaacattgacctttgatcaactctgggaaaagtctgcaaagctagttaggacattcagaaattcatttcatttcaatcctaactaaataaattattgaagtctcagaacttctcagtacttgatttagacacatagaaacttgggtaaataacacctatattgttatattcctcaagaaaaagtttatcttttcatgaaatgaatctactgaggatatttatagaaactgaatgtaagtgagcagaataaagtggtgtgtgtgtgtgtgtgtgtgtgtgtgtatgtaatttgaagagtaggtgggagaaggttgtgataggatagcagatcttgtttatgatagtcaccagctataacagacactgcctgatgcctttccaatatccacttcccttttcttttttttctttttggaacagagtctcactctgtcccccaggctggagtgcaacagcacgatctcggcttactgcatcctctgcctcctgggttcaagcaattctcatgcctca

SEQ ID NO: 69162 - DNA, 671 bp, Homo sapiens
tttgttatctattacttcctaacaaatcgacaataattaagtgtcttaagacaacacatatttattacctcatagtttctgtgggtcagaaatctgggcatggtttatgtgagttctttgatttaaagttgttggcaaatctgtaaacaaggaagcagtcaggaccgaggtctcatctgaaagtcaacttgggatgggtctgcttccagcctcacttaacataacagctggcaggattcagttgctcttgggtagttggattgatggcctcagataactaggtagctattagctagatttcaccctcagtttgttgccgtgtgggcctccctaaggtggcaatttacttcatcaaaaccagcaagggagagagttggctacaatctctagtaatgtagctacagaaatgacatccccttagcaatgagatattttattaattagaaagaaattactcaacaggaggggattacacaatgtagtgaataccaggaggctgagatcagaaggagctagtgtagaagctgcctaccacagtgagtagtattctattacatgaatataccagaatgtctgaatccacccaactgggcatagacgtttgtgttcattcaagatacagactattattattttaaaaataaaagttactatgaacatttaagtataag

SEQ ID NO: 69163 - DNA, 882 bp, Homo sapiens
taaaaatgaaatttcatattaagaatattcatgtgtttttctgaacactgctagaaccagtgattatttttgaataggtaatataaattataatgttgcctaatagctgagaggcttttgggccaaatactcccaccgcatatatttcctaagagcatggaagtcccacaagcctatgtgtacctaacaatggcatgtgtacgtgacatcataatttcacttatcaagggaggaaatgagtcacacctgaagttgtgtcatgtcattgaagccaaacaatctgtcaatttcaaaattggggatgcagtttatttcacaaagagtgtgtaggctaaaaatgtacgtcctcttctagtctactgaagcaagagaagacagataccttctgctggtccacctccaaatctagttcttcatcttgagggatttgtgttacttcaaaacagcagaacaattctttctgccagaatgttctcttcagccatgggtatgcttctaggatttcatttcctgatattgtccttctcctcttttcgggcaggtgcacctgagtttcaaatatttcacatgtctaagttggtgcaggtaaactacattcttttccttttgctttctgatccagttatttcatttcctagcacattcttctatatttggccttatggagcatctgccaatgagaaacaaatgtctgccaaaagcatctgtgctccgaacaacctttgtccattcttatttcctctatttggataattccacctacgtttaatcctctcatcagcctaccgttcatctcaaacctgatttctatttatttttgtcctggctagctcctctttagtgcgtattatcctaccttttccgggggtctgcaaactttct

SEQ ID NO: 69164 - DNA, 1584 bp, Homo sapiens
aatctgggcaacacagggagatccccgtctctacaaaaatttttttaaaaaaagagaataagggaatcataaagttggaaaggtaggtgaaaatcattcttcctgtggttcctaactctggctgagcttttaataaaatgccaacaacgcccaggtcttatgctaagaaaatttgattacacttgtcttatgtggtgaaggagtagctgtgtatgtgcgggtgtgtgcatgtgtgcgcgtgtgtgtgcgtgtgtgcatgtgtgtagagacaggggctcattatgttgctcaggctggtgtcaaactcctgagctcaagcaatccacctgcctcagcctcccacggtgctgggattacaggcataagccagcaggcccgggtaagcagtatttttttaaagttccccaaatacttctaatatgcacccagaattgaggacaccccatctaatcctactccatgttgcctaatcattttcctgatgaggcaacatgagaggtgacgtcacttaggagagtgagtaagggacacactaaaaataactaaagttactcatcagatcatagattcattatggaaggaatgatcagaaaatcaagagattgggaagaattggcttgtttagatgaccagtacgggtgagattaactagatggaaagtaaagcaaccgcaagctgtatgtggtggcacttcaaataggagtagtgggaactaacatgaaaagaaaaaaatgattacagttggcaggcaaaggagggatctgtgcaggaaataacttggctgaataaatagaatgagctaagactagattatccaaacacgagattcatttctaaatcagacagagctgaacttaacaacaactctatctacttgtagtttcctctgtataaattttacactgctagtgagcatggatttacagttatctgcaaatcttactcctgaaaaatgagaatatagacagctccctgatttggaggaactgagaatggaaattacattgttgcatgaggtcaaatatttctcaggtttatcttacacatttagaatattaaaaaaaataaattggggatagcaatgagggagatcaatgcaggaggtcaaccgatatttattggcagaagagcaagggaaaaaatgtgatggtgttttgttttccatcaacagctccaatctcttcatcctccctccaagccaactctattcccagatggtctttaaattctaatatttaaagaaatatagtctttccaggagcagtagctcgcgcctgtaggaaggttgcttgaggccaggagtttgaaaccagcctaggcaacatggtgagactcaaatcttttttttttttctgagacagagtctccctctgtcacccatgctggagtgcaggggtgcgatcacggctgactataacctccgtctcctgggttcaagcgattctcctgcctcagcttcccgagtagctagaattacaggcgtacgccgccacacctagctaatttttatatttttaatagagacggggtttcaccatgttggtgaggctggtctggaactcctgacctcaggtgatctgccgg

SEQ ID NO: 69165 - DNA, 3481 bp, Homo sapiens
ttagctaccactttttagcacctaggtattaaaatacataataattaggagctaagtgtatcccataatctgtcatcattcgctcacttcaagaggcccatcattaacctttccattaattctacgtcttttagatcttcctaaatcaacacctactctaaatgattcctcaaattaaaccctagttttgcatctgcactttctccgttctagcctgaaaagcctacaatcttttctgtctagtccccatttctgcctcactccagaatctggcttgaagccctggactttctcgaactcgattgctggcaagcaagtcctccatcaaacagatccctcacatgtctgtgcattaaaaatagctaatatgactcactggcacttcttacttactcaaactaaaggacagcatctgtgcttcagggataggagagtgaagagagcagaatgtgaagagggaaactaccaacattcaaaaatcattttctggacttgacattgatgttagctttgtccctggtatttctatcaggaaacatatctgcaagtgattgtatgtagaattattctttcttagctgatctatctggggaggcacattttcaaggatgtctgctatggtgaatatagcattgccatgcttattcatgggtcccactgtttagactaatattataataaaggtcctagtttcaaaaatgccttttgtcaaacttttgtctgcctttgtgtccaaagatgaaccttttaattcattcattccttcaatcaagaaatcattattggctggcgtggtgactcatgcttgtaatcccagcactttgggaggccaagggggaagattgctcaagcgtaggagtttgagaccagcctgggcaacacagggagactctgtctctacaaattgaaaaaaaaaaaaaaaaaaaaaaaaaacttatgctgaggtaggaggatcacttgggcccggaatgtcaaggctacagtaagccatgatcgtgtcactgtactccagcctaggtgacagagcaagatcctatctcaaaaataaaaaaaagaaagtattattgaatgccttctagggctgccatgttctccaacttgtaagggcaccattctcagtatagtctctggagttgagctctagcgggggcattcccttccggggtatattgactgagggacatacaatggtatgtatgacatagtcacctatctatagccctccaggggggattaagaaacatttttccattttcaagtagattactgtatgtttatttgtttgtttgtttgtttgtgtgtttctttgttttgagatggagtctcgctctgtcacccaggctagagtgcagtggcatgatctcggttcactgcaacctccgccttccaggttcaatcaattatcctgcctcagcctcccaagtagctgtgactgcaggcacacgccaccatgtccagctaattttttttgtatttttactagagagggtttcaccatgttggccaggctggtcttgaactcctgactcgagtgatctgctagcctcagcctcccaaagtgctggaattacaaacatgagccaccgcgcccagccagattactgctcatttgttactcattcatacctactggttattcattaaaaatagcccaggtttatgtttttattggccttgtctagtggcttcctccatgtccggagactctctctgtccctgatatgaaagcacacttagtaatcaaacataagcacggtacaggcagagattcgaaaccaactatgaaccaggaaatacaaataatgactttcatataaggtttctgtcttgtaaatgttgataatgcttatcagctaaaggaataaagtccagccctgcacccaacacagctgacaacatgatctttgtaatccacaaaatgtcaagtataattaccctgaccgttccttcacttaaaaaaaaaaaatcaaactggccgggcgcggtggctcacgcctgtagtcccagcactttgggacgtggaggcgggtggatcacgaggtcagaagatcaagaccatcctggctaacacagtgaaaccccgtctctactaaaagtacaaaaaattagccgggcgtggtggcgggtgcctgtagtcccagctactcaggagactgaggcaggagaatggcgtgaacccaggagatggagcttgcagtgagctgagaacacgccactgcattccagcctgggtgacaaagcgagactctgtctcaaaaaaaaaaaaaaaaaaaaatcaaactatgacaagagaaaatttgtgtttctttaacagaacccagccaggaaggtcataaaatctagtcatgacaggttctcctctcagtagaaaaactttttttcctaatagtaactgacctttctcataatttttttcaccccgtcaaacatttcgaagacttaacgcaactacttttgttagttggatggaaaacaccttgtgattcaggtagaaataattcttcaagcagaggaatttatataactgtgccttttactatccattaagcagtttttttatgttggcctacttgtaatgtgtatcaatgtcagtttaaaagaggaaacaacattcagccttttcactggtttataataagaaatcactatttcaaatgaccttccctgaataccactctctactgagtgctggaaggagcgtggacaaagatgagtaagacactgcccacgctctctgtatgcatgcaatctggtgcctgcgatgacatctactcaaagaactcagtcaactggcaagctaacaaggtctatagccatgggtgaaacagactgccttgagaatatgggaagattaattccaactgggggatttgctagggtgtgtagtgaccacgtggggatgtcagaggaatgggaaaacaagaagattaagggatgaaaagagacttgaaacatttaagaatggaagtctggttgaggaattcagacttaaccatgtaagtcctgggactggaaataacaatgctcagacgtgtgtttccttagcaagattttatgtgttcttcatttcatacaatgaacaacataaaatatattatttaaggtctacaaaaatctccaaccctaccttctgttgctgatcctcttggccattttgttcctgcaaaagagcactcctttcccaccaaatgcactttctctctgaccccccggcatgtcttgagttcggtcacctctgtttccctccagctctgctaccagcctgaaatctttgtccagtcttctctagctattcaatttatacactcagcatgctttttttgtttttgttttgtttttttttttttgagacagagtcttgctctgtcacccaggctggagtgcagtggcaaaatcttggctcattgcaaactccacctccggggctcaagcgattctcgtgcctcagcctcccaagtagctgggattataggcgcccacc

SEQ ID NO: 69166 - DNA, 1665 bp, Homo sapiens
cggctcactgcaacctctgcctcccaagttcaagcgattctcctgcctcagcctcccgagtagctgggattacaggcgcccaccactacatccggctaatttttgtatttttagtagagacggggttttaccatcttggccaggctggcctcgaactcctgatcttatgatccacctgtctcggcctcccaaagtgctgggattacaggcatgagccactgcacccggatggttctcaactttcaacccaggagaattccctgggaattattagaaattactgatgaccagaccacaccccaaattaattacatcaactctctggggtaggaacgaacatcaatatttttcttttctcttggtgattctaacgtgccagggttaagaaccactgaattagagttataatcaagtttgatatgaattggccaatgaaatagtataatttaatattaaatgttaattaattaaaactattaaatgttctcaaaagttacagaagaataaaaactaaatatttaagaagttcttttaccttaagtattgaaaataaatggtttttctcttcacgggttgtttttatttccttataaagcctagctgtcatgtgatcctcctgactctgcggaagtaagtcagagaaataaagactaactcactcattaagagaccttttacataaaacactttcttatctgttagaatttgagctttctcagactctcagcttgttttcccaagtttacacaataataaaatacacacagtgaccttcttactcttcttttgccagcggattatttaatactgattagctttgaaatgcaaatagccctatcaaatagcaagctacttgccttcaaccggactaaggctgcattagagtgaaagtcaaaactgttttatgcaaagaaaaaaaatagtctgtcaaaggcccctaggtcttcaattttttcaggattatattcaggatatgaaattctttgtactgactaacggattaccttttcttctaaattcttttgtttccaaactcccaatcctatgttgacttacaattaaccctttgctgaccattagttgaactttcaaaccaaacataacgctttcagcatttgtatttatatcacaacatgacaaatactagtaagagagggaatttttacagaaaaagcttatctagcctcttacatgaggaccactatttgtttttcttaaacagagagtaacaacttcagggctgcaaaatacctttgagattacctaattcaccctcttcattttacagatatgcacccaaggtctggtacgcttttactaggtcagtgtttgggctgaagaaaacagggttgggttgctgaatagtaaattcctggtggaatggaaactgagctgacattggcagatgggtattaaacccgctggagtcctccgcctgaaattcaaggcttgaaagagtcagaggctgacaagataccaaggctgagactgatttactctttctttttctttttctttactttcttttttttttttttttttgagacagggtctcactatgcccccccaggcaatgatcatagctcactgcagcctcaaactcctaggctcaagctatcctcccacctcagccgccccagtagctggggctacaggtgcacacca

SEQ ID NO: 69167 - DNA, 1460 bp, Homo sapiens
tgttggcatgcaaatgtatttcttccatcaggctatgtaataattataaataatggggctggtatagacgtaaggtactgacactgaataattccccaaagaaccttgaagtaaactgcttttacatagtgggaaagagtcctcataaagcactcagccctggaacattctttcaaaagcaagacataaaaaaaaatcaaaagtaaaaattctctatcaccgaaaaggaaaagacattttgttgagtgcaaaagaagaatcctgccaagcagagagagtgaactgtagcaaatagacacagatatatctggataattaggcatgatatagtgagtgtttcactgaaacttgaacagctgtagacagaaactgagaattctataaagtttctatatttactcccatatcaggaaattaccaacctggcttgaagctatatggctcagcctgggataaaaactggtgtgagagttccaaaggatcagcaggtgaatcagagccaggacaataaagagaacaagtacagagctgtttatcttatttcagctacaagtttttccaatacctgactgagaaagtgttgagagtcaacacccttgtagtcacgtatggtctatgtgtcttggttttcacatgcatcaggagctgtacatgtgtacatatgcacacttaggaaagccaggccttgggcaaaactatggacaaacacagccacaaatttatataaccccagatctgttccttctatcctctgggaactccggttttcccatagccttccagaattgttctaggagggactagagcctatttttcatgagcaactgggtctagttcttgttattagatatgactcagatcacttccaatctgcaaagcagaagctgtgatgccagtgtttgctgaaaatgctgccactgctattgaacatgcagaggtgtgccgttttggggccaatgtctaatgtagaagaaaacatgtcctttgtccgatctatgaagtcagacggccagggttcaaattccagctttgccattcactaggtatattagcagtgacaaaggtttgtgtatttagcaaatgggattttcatagccctacctcataggatggtggtaatggcagatgatataatgcatataaaatgcctagttaacagtgattgaatgcttattataagctaagcaaagtactaatactgctattatctgtaagaagcaagcagaagatgccactctcagcagtgttccatgcagcaaattgctctgccagtttttactcagtctttaattgcaggccctcgctttaggatctagactgctcctgagtaacatgaatggcagaacctgtgctatgctaaaaaacatcttctggctgggcacggtggctgacacctgtaatcagagcactttgggaggccaaggcgggcagatcacgaggtcaggagttcgagaccagcc

SEQ ID NO: 69168 - DNA, 964 bp, Homo sapiens
tccaggcatctagattttatagataaactaccaccaaagggagaaaactttggccgaatctccgtggcaatactcaatgccagaaggaaaaaagggcaatggtagccaatctctaaaatgaccttcaacgattcctgcctcctggtgtttatatccttgtgtagtcaccttcctcattttaacagggttggtctgtgtgaccaataggatcccgtggaagtgatggtatgtcacacccaagactacattataaaagacactgtaggccaggcgcggtggctcacgcctgtaaccccagcactttgggaggccgaggcgggcagatcacctgaggtcaggatttcgaggccagcctgaccaacatggagaaaccccatctgtactaaaaaaatacaaaaaattagcagggcgtggtggcacatgtctataatcccagctactcaggaggctgagacaggagaatcacttgaacctgggaggcagaggttgcggtgagccgagatggcaccattgccctccagcctgggcaacaagagtgaaacaaaaaaaaaaaaagagaaagagagacactgtagcctctgtcctggttcacttttctcccctggaccagtcaccctggtgtaagccagctgctctgccaaggtcaacctgataaggaactgaaatctttcacaaacagccaatgaaaaactaacttgcaacaaccaccacatgagtgagccgtcttggaagtggaagttctagttctggtcagcctttgacatgactacggccctagcccacagcttgaatgcagtatcatgagagatcctgagccagaccttgaagctgagctgctcccagatttctgaccctcagaaactatgtatcataataaagatttgttgtgttaagaggctaaaatttccagtaatttgtttcacagcaatagataattaaaacaatcctctaaaagggaaatagc

SEQ ID NO: 69169 - DNA, 449 bp, Homo sapiens
cttctcttcttcattactgattagtagaatgtgtggctgctatcttcccaaactcaataataaggtcaccaaagctgccagggatctgtggttcccaggcatcctattcttgctgaattaccactcctgctactcactccttcaaccctaatcagggtccttcactccaactttccactccattactatcagcctctgcctaagctagatacttatcctttcctgaaacatctgccaattctctctctcactttgtaacatgaaaatgtaaccctgtctccctaaaactacaagcagtattagttcaacaccaaagaatctgcactttgcccttaaaccatctatgctcctttgttaggaaggagaataaggtttgactcctaattctgtgtctgagcaagaaaaggtgctttttttttatttcatattttcttttatttattattatt

SEQ ID NO: 69170 - DNA, 4287 bp, Homo sapiens
tccttcttggatcaaggctctctgcaacctctgcctcctgggctcactttattagctccacttactgagatcctgcttaccgggttcctgcacatagtaagtggaagataacaaaactaatattggataatatttgtcctcctacctcagcctccggagtagctgggactacaggcactgcgcgccatcacatccggctcattttttatttttagtagatatggggggtcttgccatgttgcccaggctggtctcgaacgcctgggctcaggcgatcgtccacctctgcctcccaacatgctgggagttcgagaccagcctggcccatatggtgaaaccccgtctctactaaaaatacaaaaattagccgggcgtggtggcgcgcgcctgtagtcccaggtactcgggaagctgaagcagaagaatcgcttgaaccttggaggcggaggttgcagtgagccgagatggggtcactgaactccagcctgggcgacagagcgagtatagaaaagttctcgtagaacactgttaaacagatgaacaacttcaatacttgctcttctctgcttgatttcatttagtgtggtgagtaaaaatttaaattccaaatattatttacacgcaattatatccagtagaattcctgtttgctcaaatgggaagtccctagccgttactcatgttgtcttacgtctgtattgaactcttattagtttgtaaaagctttggcagaactttacaatcagatggtatgattttgcaaagccacttcctcttactaccactggtcatctgtcatttattgggctgccgtaaagcaggattccccttaaatcaaattaaattggaatcacttgagtaaggctcaggtactagtatatatatacatatatagatagatagatagatagatatattttttttttttttgagacggagtctcgctgtgtcgcccaggctggagtgcagtggcgcaatctcggctcactgcaagctccccctcccggggttcacgccattctcctgcctcagcctcccgagtcgctgggactacaggcgcctgcaaccacgcctggctaattttttgtatttttagtagagacagggtttcaccgtgttagccaggatggtctcgatctcctgacctcatgatccgcccgcctgggcccccaaagtgctgggattacaggcgtgagtcaccgcgcccagccaggcactagtatttttaaaacattctccaagtaattttcatgtgcagccagaattgcaactcaccaggctaaactgcagttgcgcaattctggtcttcttgatacctgatttctttgccccttctcttttctggttcaatgcataataagaattttccaatattagttttattagcttccacttactgaattctgcttacgggggttcctgcttagtctagatagtaagcaggaacttacaaactatgtaagcttatagactacataagcaggaaccctgtaagcaagaactcagtaagtggaagctaattaaaactacgtgccaggcagggtgccaagcattttttgtgcattatctcatttaactttcatagcaaccccgaagtaggtgccatttctatgaaacctgcccagttactgccccactccgcggaataagctcttacccaccgctcctcttcttcaattcatttctgttatggaactgtcgcggcactacaaagtctctatgtagttataaataaacgttatctggaagagcagccgacaacaactttcaagatctccaattccccgaccccacactccaactgacgccttcaaccacaactactgagccccactttcaaagctcactcactaatattggataatagttgtctgcctacctcagcctccggagtagctgggactatagcgtcttactagccagcttcagggctagaatagcctttctgtgcaagtggaaaaaacctcaggtatttcccaaatcggtagctgcagaggggctctatccctaccagagatggagaaaagccctctcgcgctttttatgtcagccagagcggctcgttaagagagcgaaggccaggggctgcacaggtcgcatcccgtgagcatgaggtcagagaacctgcccctggggcaaaccgcgaggggtgggacgggtgggtgcaggcggggcggagggtaggagccgccctagtggcggcccctgggagtgtcccgtgcctcgccttaaaggagggcgccaacgcaatttcagtatgtgggagacgggctgccccacccccgcgcgcaaaaccctggtttagcttaagggatggaggcggggacccctgcgcaggcttgcggcgtgggaggcggccgcccgcgacctacgacgccgcgcgccgggaggctgagagttcggcgccgggagggtcccggggacagaagagcgcctcgcccggttgccaaggcaaccccacgcggctggagaagccggcgctcgcagcccggcccgggccgctgccggaagtgacgcgagttcacctgccgagcgggggctgggaggaggggcggagggtgcagaggtgccgccgccgccgcgagccagtcgggagcgcgcgaggcgcggggagcctgggaccaggagcgagagccgcctacctgcagccgccgcccacggcacggcagccaccatggcgctcctgctgtgcttcgtgctcctgtgcggagtagtgggtgagtaggggccatggggtcctcagcacccgcccagcccgggggcgctcgctgcccgcggccacccaggaacaatggggcgtgggggagggggcgggcgcgatttgggggcgctgctgcaggggcggcggggcgggcagaattgcacaggggcgcttttgctgggccgggcgctcctggagccgtcccgtagggagccgcgcagggcgcgcggagtgcccggggacggagccctcggcggggggtggaggcggaggggctcgggcgcggcgtgtcgggtgcgcctcgcagctctcccatagcattctctgccccggtgcgggcttgcctttctttgctctcgccgtctcccttgtcagccttcgtgtcggttctctccagcgttacccgatttcaaaaaccttgggcggcgagttttcaggtgtcgagtcgcccaggcggggaggctgaattgcaaacgccattattcaatggacatggagctgcccggtgcctcggatcggccaggctacctctaggaaagaggcgctgagcgaacgccagcctggacggtgttagtctcctggaagcagctcgcccaggcaggagctgctaaccagacgcgcattgtgaaggagaccgtggaaaatcaaaagtgggttcctgcaaaaatgtagcattggtttctgcagtccttgggcgaagtgcaaaggagaattcagtgacctcgtttttgagtttgtaatgagtcgttcattttggagataagacgggctgagttgtacagggtaattgctagaggatttgccaagtgcgtttgtcgactgctcctttctctgggaggggaaaaaaggcatgtgaaaaatgcgtggaccattaggaggcgtaatcattttgacactttaaaaaacggattttccatgtcggtgttttaaccaactgatcttgtttgtcaaactaagcacttgctgcgttttataaccaaataattcatttttaaaaatccgtaggtgggatcctaggaggcgcacttagtatagcctctggaagggtaattttttgttgttaggtgctctgaagcaggatctagtggccctttctgttgggatggctctctgcttcctgttgaaatgttaattccattgttggatgccacagctgtgagcattactcatgggatcaacattctattagcaagtctaatcttcgatctgagcctatagcactacctccacctttttgatatatatcatttagacttggcgggctgaaatgtccaaagtaagccttccggagaagatgaagggtcatagaaccagtttacaggtacattcccacctttctttcttttttttcttttttttgtctaggccgaacctgaagatgaagttgagaacacagtgtgttctctgggaaaaaaaaaaaaaatagttttagaccacatctaaagcagaaaagtggaagaacataaattatgtggaggaacttttttttttttttaaatggagtttcgctcttgttgcacaggctggagtgcaatggcgtgatcttggctcaccacaacctccgccccccgcgtttaagcgattct

SEQ ID NO: 69171 - DNA, 786 bp, Homo sapiens
gcctacagtctccagtacatttctagtctcccttctccaactttacccacatcaaaaccatccacttaatgtctctacacacacttcccacaggcatctccagctgattctgtttcacactcttctctctcatattaattggcattttcagacaccaaaatgcccaggcaaaaatatgaatatcttacttggcctttcctattttcccatctgctcatatccaatttcgaagtcattgtgtccctccagccactacctgtaatctaggttataccattctctcttcagcttgttgagatgctttcataattggcctcctgttgagtgaactttaccctgtcctccaggcacatcctgttacttactgcagcatgttctaacctttatcaagcatgccgatactgtcattgttttctcttgccagaatgtacatttcataggtcaggcactgtttacattgtattcccagtatatggcacagggcatgttcattgcataaatggggaaagttatgctagacaggaattcatgtttgtaggcttgggaaggacctagaagagaaagagcatttgaagatcaagaataggtacctcatggaagaggtgagcagggctgggctctgtgtcctgcacaggtcagctttgtgtcagctttgccaggtgttcaggagtggagtttatatcaccactcacatttagttctcctacttgcagccagttctctccccttcccttatttccacctttcatctgtcatagaagtcatcatcagatgagagttgatgct

SEQ ID NO: 69172 - DNA, 733 bp, Homo sapiens
atttcatgagcactttctaatgtttatgactttaagattgccagaaggaaaagatcactgaagaccacctaggttaacaaacagcttaaatttgaaaaaacaagtgaaagaagccaacgcatgttatcagttcataacattacctcccttctagaagaatagcttcttccattctctccagtttgcttccaatcttatagtggaaccagatcttctaaggccttagtaggaggtgacatcaagggctaaaaaaatactctttgatgaactcatgtcactttgatgctcagatataagtcagactgtgcagaagagaagctttaaagatccaagtgatttagaaactggagataagaaaagcaagcagaaaactgggaaatgttatttcagtcactgccaatatgggatgtggttccgtctgtttatttacataatatgatctagtgctgtgcacttattaactagactgcaaatacttgcagcttaataatgtgccgcatattttatcacatcctgaattataaatttgaataaaattgtaagaagatctgatatttgatttaccttttaaaccgtgtttcaacctgcaagtagtttgcaagttaaattgttaatctacttgctgcataaataaaattgggcagtattaggaaagatgcccagggccgctgtctgagaccaagtgtctgtcttttgtcttatgtaatttgtgtctgttgcgtacttcagcact

SEQ ID NO: 69173 - DNA, 2592 bp, Homo sapiens
tcattcatctggctgctgtaacctggagttattaagatgctgcctttagtaagcaacatcacctttttgggagccaattacgtattaaaaacatacagcctctgctatgtttagcataaaaacaactaacctagcagtagtttgtgttcccacatttccaaaaaaataaagctgattgttagctttcttttctcaaactgctctttcagtctctcttcagaatatgactcctttattccaagtgcaaattcaaacaaggaacctcactgtgaaataaattctacacagttatctgagaggtgtgctggcagccgcagatagcctgatggaggggaaggcacacaaatcttcctcccagaaccctagaatgagaaattcaccttctacagccagctagcaggcaccgggcatgggtccacacacgagtgtacacgtatacataaccccagcccaccacgactgctgtgcagcctcctcctgaaaaatgtaagccatttccactttgtaaagctacgtttatattccaccacgatacgatggaaaagaaaacccaaggcaatttaatatacgggttgggaagaaagttttgctgatggaactacattagcctccactccagcaaagcaaacaaggaaccacactaaagaaatgtactgaatcttttaactagatctttctcctcattcattacatttgccaactatgtgccacatatctgagttctggatttgtttctgtttgctctgcttcatataaaaaaatagaaaagaaggaaagaaccacttagtggttgcttttggttgtaacacaagatgactcatttggacttttgttttccccgtttgaagaaatgatagctcgaacagctgaaaaataagcccactcccaccagtattctaggagtaccaaaaggtgaaagagggagagttacagtcagggcaagaaccaccagaggcaagcagggccaagaagacctcaggcgtcttgagtaagtaggcgtcctccacccacactcagagcaaaaggctcccattttaaatatcgcacggtgacgtcatcctgggacctcgtcaccgcggcggctgctcctcaagttctactttgttccacaaggctcctctgctcacggctgcgtggataaaacccaaagggaatccagaatcaagctcggcctcgcaggagtttataacttttgtacttttccctcccttgtaacgaaaagctaatcgcaaacgtttctaggaacacatttttctcctgatagacgttcccaaggtggagggcgcgagaagactggcccgtggggtgaggagccccggcccgacctcagcggcgccacaaagccatgaagaggggaaataattttccaaggggctaagagttggactttctgaagccatcgaaacctgctgctaggctctcccgctggggttttgagagaggtaggtgaggagggatcaaacatctccacccgctcttgaaagaaccgccttgagctgcgcccaacttctgcaatcccggttttccccaagttcaaggggaagggccctggcgcccaatgcccagcctccccgacaacatcctcgccagggtgcgcctgccccgcgggtccgctgtccccggcgggcggccctgggttcgaggacccggcttcccggaggcgcgactctccagcaaacaagcggagctccagaaaaaacaccgacgcgaagggggtggacagagggtgggaagccgcggggttgtcgcccacccggaggcggaatgtaacgcgctgtgggaaacgtggcaggagccctgaggcggcgtctttttcctcaggcgcccgccgagggtcccgcggaaagcctcgcgggccgccctcgcggcccgcagccccgctctggcgccgagccggagcccatgcaacctggttccatcccctgcccctcccctgtccccggtgcgccgcccgccagcgagccttcgacgtggccgcaggggcgacgggaccaccctcccccgatacccacagccccgccatgtctgcctttccccggcccggtctcctcaccgccgctgccgccgccgctcttcggccggagattcggcggcccagaccgtgtcctggccgggaactgagggctccgcctcaacgggcccgcgctgggcaacagggagcgcagcgagcctcgtccggcgcgtgcggctcccgcgtcgtcgggcggccaagcgcgcgttgagaggactggcgggcggacgagcgcgcacacgagtgagcgcagccccaaagcggcgcgcagggggctcgcggcccggaagaggggaggggcgatgacccgggaaagggttggcgcgcgcgggatcggctcgcgcgcctgaggggcggtgccgggggcggggcttcgccgcgaggccacccccgagccccgggcctagccgcacgggaggcgacacaccctcgccctaccctgagcctggcgcagaccctcgaccgcgacggcgcggtccgcagaaccgcgggcttccctccccggcaaaaagcggcgctgaaggcctgtgggacccccgcccggccgccctacgtgcgtcagcgccttcgggggtcgcgcg

SEQ ID NO: 69174 - DNA, 668 bp, Homo sapiens
taaaagatttaaaaactttcatttttagtatgcagaaagccggtgctatgatttatatttcaagaactctaactgaaatctatgcattgggcaaagtgtcacaatgaaactgatttgataccaaggaaacagttctgttctctacaaagcatatcagttctgatcatcctaggcatctgtatactttacatagccaaatggaatttggctcttctccatcaagtgactacagagatacacagcaaaaatggtggttgctactgtagctgagctacttttctcaattagaatctataaacagattcaattagtacataatgtgatttatggacaagaagtgcctgttagtattcaggtctggaaccccctctaagaggctttggaatcagactactaagagttttgaatccttgttcctactcttacgtgcctcaggcaagcaacttttggtttcaatttccttttctgtgtaacattaataatgatagtaagcacttcaccaggctactgtaaaaattaaatgagatcatatttgtaaagtactcataaatttctactacaactattattgtgattatttttattattctgagaggctgtgtggttaagctttggagtttaaatccttgatctgctactgattggatgcatgatctctgtaagcaact

SEQ ID NO: 69175 - DNA, 2084 bp, Homo sapiens
tttagttttaccttacaatcagtacaaagcagctgtgttaaattcattccataagatcaaaactatactgtgtccttaccctcaatatttagctcaaaacaaatgtggcagaaggagagtgtttctttgtctgttcccagtttacaaacactgcaaatgttgtcatcattcaaatcaatgtttacaaactgctcctcttcgttcatagtgcccctattaagaaacagaaaaggaaagttacacaatttcatgaacctgcctttggggtagttccctttactgggaacttctaggaaataaggatgctgttcagctcatttaaagcaaaagctccatcaaacaagcatcgccatacttgcactccaacattgcacttttcctgtggaaagacacaaagctagtaaaacttaaagccaggccataggtgacactatgtccgtgtcttttttgtcctatagttgattgggttagtggcacctgaaggaaagagatttgccggcattctagtcctcctccttcgtcccccaacctcgaataatcagagggcttagcagcgaggccttttcagctaccaggttctgtcaacctagttaacgctgtgagaaacaggaaaaacgacctgcacgggacactgctttgctaacttcattgggggaacctcagatgcgcctcgcgaactcggagttgcgaagcttcgcatcgaacggagatcggcggcagcaaaatgcacgtgggtaccgaatacccggggagggcgtcccgccgtgtccggggcaactacaccgaaggccgagcggcggcttcacggtaccggccgggcaccgccggaggggcccaagccggagctgggagagccgcggcatcctggagcccggcgggcgggagagcctcgtcccatcgctccgggattcctcccagagggaagaaagcgtccgagggccacggcggccggtccgcccagcctcagcgtctcggggagccgggtcctggcccggccttcggcgttgggggcgcgcggccgcccccagggagtcgcggacccaagtccgtctttccgtcggtctgtccgtcggggcgcctggcgcgcagcagcgcgaggggccacggggctcggaactcgaaggaggcggaacgatgggactgggggtcggggctcaggtgggatgggagcagggctgcggggtctttaccgtccggctccgcgggccaccaccgccgttccgtgcggctcgggttcctccactattgtttccggccgcagcagaggcggccgccgcgcgcctggccccgccctctcccgccggctccatcccgtaaaggctgcggggagggtggcgcggccgcgggcacacctgcgcgctcgccgggctgctgtgggtccgcccctccgctcctgcaccgacgccgcaccttcgcctcgagttctcctgtgatcccgtgtttcctggccggagtttcttaccgttctctggaacgtagctcctcacacacccctcctcgaggtgcgtagatagacgaatccgttccacctctcccttcagcctagtgcaaactactgccccggggcgggggccgcaggcggcgggggtaggaaagccgcgggtggatggcagaacgggagaggtgcgtgggtggcactttgacttcaggagaaagaagcagaatactgtcactgaacttatagttaagtgccagttgaagtatctaacgaaggaaaagttcatattcaggtgtcatgatagaggcataatttcaaatacagaatcttttcaaatacattatttgttgtggggcgcccctgcccccaatatggtacatccctcaacgcccacgggaaaaatcccgaagccccacctcttatttttaggtcctgcttggttctcaaattctttgcttgacttttgtttaagctattctgttttttttagggtatggttcttgcagtactttcacttacattttccattgtagtcctcacagtaacctacagaggagaaacaggaactgttctctcatgttgcagcctacgagtaattgacccaggttatcacagttggttagaaaaaggctgggacttgaaccga

SEQ ID NO: 69176 - DNA, 527 bp, Homo sapiens
gagaagatgcagaagtggtttgccgagttagcagttcacctgcacctgctgtcagctggttgtatcataatgaggaagtcaccactatttccgacagttagtattttggtaactccctaagttatatgttctaatactattgcagtttttaaaaatctgaatctatgtgtctagttgtagaaatttgaatttttgaccccaaatattcaacaactattttgagaacctgtaagctctacattaggattttgcaatctagggatctcagggcaaattcactgccctttacccctatgttgtaatcaaaacacagttatgcccgttcaccacatactgtctgtggcagctttggaggcatagttgagaagctgtggctaaaaaaaatatacaatcattagcctaaaaaaatgtacaatcgttagcctaaaaaaaatacaatcattagtacctggagatttacagaaaaggtttgcagacctttgctctagtgtcaagaaaagatgaatacattataagcagtactaagt

SEQ ID NO: 69177 - DNA, 3708 bp, Homo sapiens
ttcgaaggaataaattctagtgttcaatggcacagtagggtgactatagttaacaataatttattttgttttatttatttatttttctttaacttttaagttcaggggtatccacgtaggttgtgcagttttgctatataagtaaacatgtgccatggtggtttgctgcacagatcaaaatagctggagcaggaaatttgaaacgctcccaacagaaagaaaagataaacgcttgcggtgatgaatttgctaaataccctgaattgatcattatacatcgtatacatatattagattatcacatgtaccacataaatatgtataactattatgtatcatccaacatgaaaaaaagaagatacgatgtcacaaaacatattatgaatgcgccttatttacccaaatataactatattattttaaatgtgaataacagaaaaaaaaaagcaaacttgcaacccaaatctacttttgttatctttcacagtaagctctaacagaattttaataccttcatatgaataaggaaaaagaaatatagacttgggaaattgataaatggattattaatttagaatgaaaacaacaaatctgcttggatgatgaagcaaaagatgcttatgaagtattgggataatgtgtaatattctcattttagttagactgttcctgataccagttcaattgaacttaaaatccagttcacatctctttatccttcctatcagtacactacaggtagcttagctcagaaatactagacattttaacaaataccagacagttaattttagttgctgattactgaaaactgttctagaaaactgcatatcattcaaccttttgaactaggttactacagcacaggaattaaccacaaaatattgttgaagttttacaaaaataaactgcaaagtctagtactatatacaccgactattttaagttttcatgctatttaaaggccaagaaggagctaaaagtcactttttgttactgatgttccacaatgtggcaaaagccatgaatcagaacagggagcaaaaattcagctaaatattaggaagaagagtttctcctacctcttttttgggtcattatcctttctttactttcatgatataatgcattcttgattttcctctgaattctctggcggataattctttcatgtcgacactttcttctatatgtcacatctgaatattggaattccttctgagcttcttttctctttccctttagtaattaatacatttccatgcctttaaattatatgtaaatactggatatttacatattgacatttggacatcttacagctatcttaaatttagcactctcaaatcaaactctcaaaccagttccaaaactggtcctgtctaagcctccaaaaatgaaaccacattccccctgttagagatcaaacagcatctttacatatcttcttaattttattcctggtccttcatatctgttgtatatgtcatgtatagatatccttaaaacattaactgggccatgccactatggtaaagaaaaatctttaaactttccattgatttcaaataaactccaacctcctcactatgatctagaagctatgtttgatctgagccctttgtaccttttcaaacatgcattgctccactgtctcttggtctcatgacattttaagcccagcagccttctttgactttctaaaacactgacagctatcctggtcagagttgttacctatgccttttcttctgcctggaaaatttccacaggtcttggcaatgctgatttgtttaccctttgggttcacagttaaatgttaccatgtcagagaaatttccttttaaattgcaccaattcaaaagccaccattatactttacctttgtaatctacttgtattctattaaggaacttattacattttattgtctgccttcctaattctaagctccatgaggattagcagaactgctgactccctagtaaaattccagtacttagaacagtttctcatgcactgttatggacataacaaatgtctgtaaaattctcacaattattgtggacatttgttaatttttaacttttgttattgtggacatttgttaatttttaacttttgttcaacattatccaaccccaaatctttaacaatatattcatttcttatttgtattttcttttctttcctttcttttcttttttttctttctttccttttttttttagaaactacctctgttctattagatagtgtctcaagggactgtaaatcagaagatctttactccttgtagccaaggggtagacacataatagaagttagggcaatcaaatgctccctttctggcgtttatatcttcagcaaaatcacaaacagaaaataatatattcactttccttggtaacattcttatgaaattgcttagtacttcctccttcacaggttactgtaattaccctggtttctcttcacatcctggtggttttatcctttgaatttttttgatcgttgcaatgtcctgcacttaccttcctttgtggattttattaatctgatcagttgatatttttttacttataacagaaaacccaatgaaagtggctttaccagaaagaaacatttattctctcactttaaatatggttctaagataatgaagctccagatttaatttagtggctcagtgctaccatcaaagaccaaagtaatttctgtttctcttctgccgtcatcatgttatttagctctccttgaggttacaagatatatgcagcaacaacagatattatatcttcatgcacaaaattacaaaaatatatgaaatttatattttatatttcaagagcaaggaaacctttctccaaattcccatgactacagtaattgaatttctctcacattttatcagccaatattgggtcacccattcttttcttagtctgttttctcactaagaacccactctaacaataacagcattaacccatttacaaggatggagtcctcatgacctaattactggttaaaggttctgctttttaatattgttacaatggcaattcaatttcaatatgaatattggaacagacattcaaaccatagcagtttctaagtctgtcaattcacgagaaaataactaatttgatttacttaaaataacccaactgtagttcaacaaaattgttcattagggttcaggaagaatgtgaagagattaaaaataaactttttggaaaaaaaaaatctccccatagattttaaaacacagctcctttccaaggttttgtaactcagtcaacataaatggaacttctcagtttaccggggttgacagcattgaatcgtggtacataatactgaaataccatggataaatcaggtgatataattactagttccaattttttaaatcaaatgcatgacatttgatgagttatttaatcctttggttgtttcagtgttctgatttggaaaataagatggcactagaaattttgtcagtatccgttcacttacaaaattatctaaatatagagctcaatcctgtactaaactatgtactggtccttgtactggtccatttgtaatttttaattgattttctcatttattctgtcttggctctcaacattaaattcaattaaaatctaaaatccttgtgtccattcatagccatggattacatggtgacttattccagct

SEQ ID NO: 69178 - DNA, 636 bp, Homo sapiens
actagatcaaatgtgtctcatctaaggagaaaattattgtacttacatcattagaggcatttatggaatgtttaatattacatgatccaagaaacaaacaaggacatcagaaaatttaggaagtttggtgaatgcctgcatatgaggttttgtgatcttctgggattaagggtggagaatcttctcttagtttaatgtgggcactttgacctgagtactggactaaaaattctgatcacagtcattctctaaatattagtctgtgtcaaagagttcaaatgtgtgacttccagactcttaaatgttatttcaccatctgtgtcctttcaagcgattcaacaaagaattaagcaacagaaagaatgagaaaacaggccactaacagagagaatgtaacaccaccaatggcacattaatacacagcttcaacagctcaactcactaccccctatggcccggtttattatacaaggagaggattgaggagagagaccacctgaatctgcataacttagctatttgcactaagatatttttgtctaggaagtcaagataacagaagaataaataatttcacattgctttagaaaatccttggaaccaatttttctgagtaaaaggttttctcatttgggc

SEQ ID NO: 69179 - DNA, 899 bp, Homo sapiens
gtttaagaaatgtgtagatcatttatatgttatgaaacaactttgaaatatttttgatgttttattttgcggcaataattgtcacaaaataggaccaaatgtgtctgtttaagaaaaaaaaaaaatcaaggaccaatgtagaagggaaaccgtgctcaggcatagaacgacaatatccaggagactcaggttattgaaggagaaaacgttaaagagaaatttgggcttcagagactgtaaatgccacatgctattaaactataaagattgctttctgaaactgtttattcctgaaagtgagtggggaaatcttatggctaaaagaaacagaatagaatgagtttccagtgtgtcttgggattcagtgtttacttttcaccttatttgctcagagtagaagatgaaaatagggagagaaaatacaagtttggctcagagatccaaaactgaaaagaggaggtggcaagtttagctagaaaggtcaaagtcctgccggaagtttgctttcatgttcactggagccgagttggttctttttacatgagaaatcccttcaagccacaaaattgtgagatactggaaggaaagtgtatttattagtccattctcatgctgctatgaagaaatacccaagactgggtaatttttaaaggaaagagaaatcaaattcatatgtttcatgatcaaactcataatcacagtgcaccatcaatcacttaataataaaaatgtagattgtctttccttaattgagtagaaggcaattagaacttagcacaaaccactatccctcccacccattccccaaaacacagaatggtgaaaaagcatgaaattatttctccctgatgaagacaactgccttctccattctgaaaataatttcaagtacctcaact

SEQ ID NO: 69180 - DNA, 1141 bp, Homo sapiens
cttgtggctttctacagaaaaccatgaagtacaaaaatttgcttttaagctactgtactcatttattcaacaaatatttgtcaggcgttgctatgtgccaggaactgaggtgcagggaacacagccagagcaagcgtgacccctgccctaagaaaatttgcagtttgaataaatgttctcagacctgcagtcattctgggactttccacaccttccttcctttcttttcttctttctttctttctttagtgttaccatcaaattgctactacagtgtgatacttaagagaacaaattctagaattaaaatgctagggttcataacctagttccaccaagaaaaacaattttttaaagagtcataaataataaataaataaataaataaatgccagaagaaatcaatacttgataattgaataattataagtataataattattacttcatcaatgctcttatgtgaagcaaaactctgacagtagacactctaaagttccagagaaactctcaaagagcattttttttgttttgatcccaactacattgcttttccttaagaaatggtttttacagtattctcagaccacaatccttcaatattttaaaaatcattccattaaactctgcttttccatctcccttgtgaactcttggccagtgagacacagtttcattttcactttttcaaaatgatagtatgaaaaaacagaagtgaaagtatgaatcataatataatcaggagttcatactgagatacccatttataactcagaaaaccacggggtatttccaaactgatgtcattcatagaaagaataccatgtgttgtggaagaataagaaaaattacctaaaccaactgggggatttagaatacatgtgggatattcccagctaattattttcattaaaaaatttttttacaaagatcaactgtgtttcaaatacttacagtgatagtcatcttggaaattacaaactggattctgggttatactttttaattatgatcagtgagacaatggacattgagattttgctttagagcacataatgccattataactgtatataactcaaagttatttatataactcaaggttttatatatataactaaagttttattttccttaaaga

SEQ ID NO: 69181 - DNA, 2242 bp, Homo sapiens
cattccgcatttctgtcaattctgtcggtgacagctgagaagctgacgatgttgctataaatcctgtggagaagttacaataaatatgaagactgaaaaaatgattaacgtactgccaaaagtgcgctcagaggtaaaattaaaccaatttgtaatattaacaaacaccagcggaagaaacagagctggcccagatacgtgcctctacttttaaatttggctctttcacatcagatcgctatttcccaccaatttcctgtgtcgtgtttccaatcagtgctttacaataaggggcaaaaagtaaccaggaaacggagtcaaaactggactagagtcattgggaaggtgaacaaagtggtcggtttgacagggtctgaagaaaaacaagaaaatttcaggaaaccaaaggtcccacaccgaaactatcaatatccagaatgagaaatgctgagtttatatcccaaaggccaaatcagggaacctgccaaggcaagtacgagtattccttgggaagacatggacagatgtgcacggaacgtgcgctgcttcccagaggcgggcccaagctcctcccgcggcctggctccgacccctggccccgacccctgcccttgcccctgccctccgccagaccctcgttcccataaattagtcctcccaagctgtgcaagagcgaccgccgcggagggactaagaaaccctcctccttcctctgccccgcgggacctccccggccccgcctcagacccaatctagacagacaccactatctaggcctcgctccctgtccctacggcctctgaaactcactccatttgatcccgccaccgggtgcgaccagccagagccgcagcgcccgggaacccatggccagcgcctccatagcagcggtgagaaccgtcgcgcgcaagtccttctccgccctcctcccccggaaaccgaacgcgcactcggagttccgcaggacaggtctgttccggacccagcactcagactgctcgcctccaccggggggcgtcaggcctcgctggggattcagtggctgagaccccgagactcggagccggggcgcgttacctgtgctcgatacctgggcgcggtcacctacccagaggtgcagggcccccagggcggtcggcctgccgcccaccacgtaggctctgcagggaaacagagttccacaggcgtcgttgccctccgccttcagccctccgcgggttcgatcccggccacccaggtgaagcgcttgcttccctaaaagaatatatggttttcttggcgggggcgggggtgggggggaatggggaaggcgtcttctattttgtcagcgatgacatcctctagcgcgtggcttaactttcaattgtgccgggtaggttcttagttcggctggagtgggtctgcaccccggttctccccttagctgtggtaatagaggcctcggaacacgtccccttgactttggagaggacgttgtaattcctaagagctctttacaaattttctagtttagtttatatagtataggatgtataggagaaggcatcccggggcagaatttttgtctctagttcactgatgtatcccaagcgcccagaacagagcacagcgcagtcagcgctcaacagatgtttcttgaatgaatgaatgaatgaatgcccttgcaggcaaacttcagctcattgtctaatttttctgtcctaccaggacgtgagtgttatttgaagtaagcactctgtaggtacaggatggaaatattttcatttacagtagtttaattctgtggctttacttaagggtgtcgaattcagcctttcccccactctgtcctttgccttgcaattggaatgcgccgccaccaggtggaagtgccgcctaaggtacaaatatgaccctgcgccacgatagatcgaccgtctccttggcccaaatgttacactcacaaccactgcgccaggaaagtgtaagtatcttcactttttaaaatgggaaatgtaagtgacggagcttggatttacatccagtctacattttaccaggctacatttcatttaagatcctaattcaaaccacgaaatgtacatatatacatatagtgttggagggcgggtgtatcttttgcttcctcaaatttgcatacagttcccatgaaagctgtctgtttcatcggccttttagagcctgtacccatttaaccttacctagaaacactctagtgcccttagaacatcttagagccaca

SEQ ID NO: 69182 - DNA, 3415 bp, Homo sapiens
aaaaatacaaaaaattagccaggcgtggtggcgggcacctgtagtcccagctactccggaggctgaggcagaagggcgtaaacctggaaagtggagcttggagtgagcagagatcgtgccactgcaatccagcctgggcgacagagcgagactctgtctcaaaaaaaaagtatctggtcaaagttacacagcaaaatctaacttaacacatatatgcaaaaaaaaaaattgtgcaattcaatgccactttcccttctggcaaactaaggacatgcttaacattcagcaataggttcacccgacatttgcttagccctagatactgtgcaaagtacttccatatatatcctttccttgtacccttacagcaatactctcaaagagttaaagtgttcttatccctgctttacagatgataaaactgtatctaagaaagattaagctgcacgtattctcacagttaatttgctctaagtctgactgcatagatgttactccttctgcaacacgggtaaaatccactttcattgtttcaattatccaccatgtaagtgcctatgattccccaatcgcatttctaattttagtattcatcctgagccccaaatctatccacagcattcaacagttctcatctcccttataagtcctacgaactcatccaaaaaacgaacacataatcccatatcaaaacttgttccttctcctttaatccctttcattttttttcactgattagtgaatgcatattgtccactaaaacgcagaagatagtcattacacaaatagctgtgaaataccacctgacataaattctctattccagtaccatcgggtgccacgagagcatatgatagcgtctgacatgatcagaaagactggggaaggcaacagtaagaaaacactagtctgagcagaggccttgttctgggtgggagcatggttctatttatagtgatgactgaccggccaaaggttagtaggttcgctgcctcttcagtgcatattcctatgaacaatccataaagtcgcctaatgaagtgttagcaccatcgtttttaggtgggatgcaaactttcaatattatgactaattttttccctcttaatggtacacgttctgcctaagtagcctagacgctcccgtgcgcccggggcgggtaggcctggccgaaaatctctcccgcgcgcctgaccttgggttgccccagccaggctgcgggcccgagacccccgggcctccctgccccccgcgccgccccgatttgccctcagagagggtatcgatcttatttctgggtctacggcaaactccaaggtctacaaacgtagaggtcagctgtgaccccgggccaggccgtgaaggtccccaggacacagagctgctctctcctcctagtaaaggtgagaggcagcccaggcctcgtgaaaaaacccagaactggagtcccaaaaggccacgctgatctagctaccctcccagtcaccttgcactcagtcccgagctgccaaagcctccgccgccaccacctccgctctacttccggccctggctccgcccccacacgcctacccgccatcgcaatgcattatgggccgccgtttcagtcggtcgacgctcaccggacaggaagcgtctcggagacagtctgcgaccggacgggtctaggtgagacagaagccaaacaggaggaggaagtggagggtaagtgcttccgggtcccctggcacagcctccgccatcttttcttcgcctaatttgacccgttctttttcccctccttgaaaccttgctctgtacgcatgcgctctttgagtggcctttcccctagttcaagctcccctccgagtcagcgtcctgttcgttagggttatcgaagtgtataaaggtgcagggaaagtgagactgtgtaaaacaaagcggattggggcgttgtgcttccttgtacctcgtgagcctccgttgccttgggcggtcgttttgcgcaccctgccgggagttgtagtcctggacccgaaggtgcctgggaggcgggaggggggttggggcttctcagcgccgattccgcgggaagggccctgggacctcacacttctagtcgcgggagctgcaggtcttacccggagagacgctgcacgtggagccctcgccgctgccgttctcagccggctctggagtgcgggcgggggcgacagggccgattccggagtgggtgagtgcggccgccggggaggaggggagcgcgggccctcgcgggccggcctcgttccggggccttttcccccacaagggcccccccgcggccgcctctgtgttttgtttccgctggtccccggcgctgtgactcccatttccgttcgtggagacttgagggagccgggtggggaggggcgggagagctgtgcggggagcgaaggggaggggcggggggcgagcggcctggagcccggggggaccgggcaccgccgggacccgtgccggacgggtcgcctgtcgccgctccctcctttccgcgtcccctcctcgcccgtccgcactcctcagcagtctcagcctgctcagctgggatgtggtcctgacgcccccgagattttaagagcaaaatgcagaccctgtctcatcgcgggactcagcgattcactcatttcaaatccgctctctttatagaacaacacacaccagaatcatttatcagcgtatatggtagccatctgggtttgtttttttgtttttaagcaaggaagtaaaccaaggagataacaatgggttgtctacttggaaatttttttgtgtactagaagacacgctgtatgtgcgtgtttggatttagggaccccagtttgatcaggttagcggaccgagaggacaatgcctaatattgcattgcaagatgattagaaatttagaaataaaattcatttcataagtagtttccactaatagcagtaggtctgactcgtgagaagagcaaagatttagcaggattcacttgagcgaattgtagaacgaggcggtgataacattcttcggtagtgttatcttgaacttcagaagaaaccgctcaactctttagcaactgcttgagggactagcctgtctctcagggttccatccaggctttccaagcttctttatttttagacatacagtgacgctgagtggacttcaagtcaattttacctgaattgtgtatacaagagcatctgtcatgaggcatgtatagtaatgaagtaattaaatcatgagctagatgttaggttgaagcaaatcatcagaccgagtactaaattaaaactgttgactttagccttccctcaactctttatatataaaactccaaacctacagaagaattggggaaaaaatcatgcagtgaacacgcagatacccttcacctgagggtcccaactgttaa

SEQ ID NO: 69183 - DNA, 618 bp, Homo sapiens
taacatgtacatatcttcatacagcagtcatgtctaactgtccctaacagggcaagggagatgaccggtcattttttctcatgaaaacaagatacactcaggtgagttttgagtttgttcaccatgcagaatgtgacgagataagtttaattttctagcttagtgtttttagcttaaaatgttgcaatctaaagctaaaatgttcacctgaggccaaggacaacacagcaaaaacaacagggccaatgtgtcctcagacctttggaatcgcagtcagatatcactatgaactgagtgtttgtgtttcccccaaatccctatgttgaaaccctaatccccaataatgggatgtggaggtgggacctttgggaggcagttaggattagattaggtcatgagggcagagcctcacgatgggactagtgttgaagggaaatgaagagaccatcttattcttcaccatgtgaggatgtgaccaagtatcctcatttttctaagaaaaagagaatgagttactatttttttctcttcttttctccattttccagtttcccatgtcctacttagccctttagaaatgcaattataattgtttacctctccttcacgagacactcc

SEQ ID NO: 69184 - DNA, 582 bp, Homo sapiens
ctgcctcagtcccgagtactgtgattacaggcacacactaccatgaccggatagtttttatgtttttagtagagacagagtttctccatgttggccaggctggtctcaaactcctgacctcaggcgatctgcctgccttggcctcccaaagtgctgggatgaggcgggagccactgcgcctggccgtcagtgtagttttaagagaaaaaaagaggtagacatgatggattaccattatcagaagtggaattcaatttcgtcatcataaaatgtctaaggcagccagctacctgtagacatgactaagggctcaggattttaccagtggcttacacactggcactgggcaattgagcctatgacaaaatacccagagacaaatatgattctttcattgttcattctgagtgggactttctttgacttccatggtgagactaatcacaccgaaaccacacttccactacattagtggccctgatggattatccttttatctgaattaatttaatacttaattacaacactctgatggcctgcaatggggattttcagaacttttaagcatctatatttgccaac

SEQ ID NO: 69185 - DNA, 348 bp, Homo sapiens
aattctcaaaaacaaagcaaacaaagcaaggcatgagatgagtgtgagccaagaaacaatactgccaggggaatattgccaaaacaccagagtcatgccttgaagtttcttatcatcagggtcacatttctgaaccagaaagccacaggaaaggaaagactggtcacagacttccttcttccctggaccatttgttacgggaagttctcaggaaacaggtcagtaagtgtagagggcatcacaggacaaacttcattgctgggtttcccagaaaagagcagctctcccctactgaagacacttttagcagacgggccttcactagtgagtaaatatactaaagaagca

SEQ ID NO: 69186 - DNA, 1135 bp, Homo sapiens
catgcggtttgtggtaactggttccagcagccctaggaatctaatacactgcccatgtaagtgaatattagctatttgctgataagacaagaatttctggttataataaatatactggaatagaatgtggtttctttttttttgagatggagtctcgctccagtcaccaggctggaatgcagtagcgtgatctcggctcactgtaacctcttcctcccaggttcaagcaattctcctgcctcagcctcccgagtagctgagactacaggcgcccgcaaccatccccgactaatttttgtatttttagttgagacggggtttcaccatattggccaggctggtcttgaactcctgaccttgtgatccatctgcctcggtctcccaaagtgttgggattacaggcgtgagccacaacacccggccgaatgtggtttcttagtgagtcctttactcaaggctggaattaaacaaaggagatgaatcacgagctctatgataatagtctaatagtctaatctagccctcttaagtgcagagatgttttccctctgaacacccgtgtgtttcagctctgttcctcttccaatgcccttccacagggaacaaatcctttcttgaccaccaatggctgcatgacttatcctgagaagatcatggggattttggatgccaggtcaacccttacactcagcaaggaagtggaagggcctcagtttcaaacactttgtaaacacagaggttaggtcatttcctctccaataagccagaagctgagctgtccctggcagcaaactgtgtgtcaaatgcctggcgggtttcaggttttactaactccagagtgacgaaacatcaccacctctaatgccagaaagaagtcagctgttgtacctgtgtcacaactaaatttactgaagtcagggcagctgaagtaatctataaaacttagcatgtcaatttcaatttagcgttcacattcaacaaattgtgtatttaaaaaaaaatctccagtagtctaaaagttttcattttattcttgtgtaaaatctggaagactggaatagaatgttttatggtatgagtgtttagtagcaacattaggttaactgtgaccttttggctcaagacatgagaaaat

SEQ ID NO: 69187 - DNA, 645 bp, Homo sapiens
ctgaagacataggtccacacctcagtatctgccctcaggggatgggcagacaaatttcaatgcccccccccaaccaaaagcaaagacacaaaaggcatgtacaagacaatacaagttgttgccaagcactgtttcaaagaaataagatttaactcatgcttttaggagcatatgtaaatacataataattatcaaaagacaaacacattaaacaggcttttttaaacgcactatctgaagtcaatgaatccatcaacaggagctgaaattaagtaacgccctggccttgaccctctgaccccgtttcatgctcgaagtccaaagcctcttcacaaatagtgtttaggtgcacaccaagtcaacattcctttggacacgtctcataacttggaaccggttaatagatggatccactatttttgatgagatattataactaaccttctatgatttactttctaaagcagcccatagtgcatacggcaggaaaactgttaactaataatggcacttactcagaaaatacatgcaaaatttgtttctgagttgaacaccaacaagcaaattaacatgtcttccaaactccgtctcacatgaaacaaactcatgtcattcccagttagtgtttgtggaaacatatttcaa

SEQ ID NO: 69188 - DNA, 990 bp, Homo sapiens
ttagaggatgctgtggcctaggaaagaaatttgttttgtgtggtgcttacgctagatgtcaaggaaggagttttggtcaggtctttagggttacggaggagcccacttcatcagtccaagttaaggagcatctgcctttttatcctggggactggcttcaaccttatatttataattactaatatctaaaaagtaccagggtccttgctggatcttgaggaggcaaggatgaccaacatatatctggaagagttcacaggatggagggttagtagagatataaacaaataatttactccaagttagagtatggtattggaggtggatacccagtgctttcacattgaggttaagtaggggaaaattccacttcagagaggaaaataggcagcagaaagaacacagattttggacttctggcaggtcttggcttccaccccactttcatcactttactatctgggctgggcaagttggcaaactctcttaggttcaaagttcaatttcttcaactgtaaactggggatgctatcactgaatttccgagtatcttcactagcccatatgctgcctttgtgtgaaatgcaagaacagcccacttccagtgggtgtgcacaatgccagagggcttggctccttgagtgggatgtagaataaaattatcagtctccactcttaccctaaaccacctgccactgccacatctctatatggcggtcctgtacctcaacggggaacattcataaagaaagaatgtgaccatcagcattatcacaaagaggcactcattagttggttacatggttgtcactcaaatgccagctcttttctccgttctctatgcaaattagaaagggtttataggacttgggcattttacttgaatcttgaaaggtgcaacttttcaagcaaggaaaaaccacaagcagctttttttttttctttttttttttttttggagacggagttttgctcttgacgcccaggctg

SEQ ID NO: 69189 - DNA, 1131 bp, Homo sapiens
tgctgggattctaggcatgggccactgaacttggcccacttttcttctttaaattcaatcttctccagtttccaccaatctatctcaagccaatcattctttccctctcattggctcctcttttcataattctgattataaagtaaggctctgtcttctactcttcttgctttctcactcagacatatcatccatgcctaagggtcaacagcctcctccactctttcaattctgacctttcacttagcattcccagtcgcttgctgcatgcttccaattgcagggtattaattacttttagcaaatgtactagaatcaagtgcccaactgattatcaaattccggaagtgtacccaaaggacaatgactaattcctcattgggtcaaagtctttcctatgtggaagcaagagaaaggaacagaactaacactgaacattgtgaggagcccaaaacatgactcctgctgaacacattctatttggttgtagaacccaaccaatataggccccgttgatcgatttccccacaacaagaggaggtcataaaaatcatgcttccactttctcaatagatacttatcgctcatgaatgtctgtgaatcagaagaccatgggactataactctactccactcaaactctccatactcccaaagctggacctcatggtcctcagatcatgtaatactcagacacagcactccagtaaaccactttctggccagaaactcatccttcccatagttcctctcccttccatccactacagcttgttcatcatgatcctgaggtcctggatgctgcagcactctctgcagttatcaggggaggcttcactgccttcagttcatttccctgccagcctggtctaggaccctcagcacacacactcatcactgcacatatcaccaacgaccacccacatgcttttgatgcccaggctcatttggtccagcctatttctctcctaagtgtgagactcaataaatacacaaccaccccactgtgctcttcaagagcttattaactgcctcttttagattctcctgggtatagtccagacttaaaatgcctcactttgggagacaatgtaatttaaccattggaggaacaaatgttggtctatatat

SEQ ID NO: 69190 - DNA, 476 bp, Homo sapiens
cggacttcaggctcctcctagaaaacaagaaggcttaaaaagcaagacaacctattagctatgttgctcaataaatttcaatgttaatttcctaattctttgataacacattcctgaactcctttgtaattcaggcaacattttaaaaatcagatgatctaactggactccaagaattacataaacagtgtgagcagtgagacttcgaatgtgcaatcaactatttttttaatcctgctgctaaaagccttcagtagcacagaactggttgtcagagatttcagtgtaacctaacacctaacgtgaatgactgctgtacaaaaatacagctgaaaatactatgaggaagagatagaaacggattgttgatggctaagcaaaacagcaaatgctgatggttatcaaacacatgccgttcccactctacacagataagatttcaaagctgtttgagtcctaggttaagttttgggcaa

SEQ ID NO: 69191 - DNA, 496 bp, Homo sapiens
ttgatgccttatattcagataaacattttccaggcagtgaacatattcaaagttggggacagtggggtaacccgaaaacattcctgaccttgatggacagataatccaatggtggagacacaaataaggccaaattggctaaccaaaggtgctggagtgttaatgcagaggtctggcaagggtacaccgaagagctctcaggaaagagtgactggtttgacttggagaaggagaaggaaggcagaccaaagatcagagcagaaaacatgcccaggctgagtatgggtcggacaggaagcatgaaaggtagcacaaggctagcgtccaaatgaccttgaatttgtaataaacgtgtgaagtcactgggagctgctgccacattccaaagcaagcaagagcagcatcccaccagtgtatgaggaggatgcgggggccccaggacaactttcgtgggcctctttctctcttaaaaaaacattaaaagctatattttagg

SEQ ID NO: 69192 - DNA, 685 bp, Homo sapiens
acttcatccctactttggtcacaataagtaacattgtacttttgaaagatattactgtctgagaacagagtttcatcttacccaaatacagactaaaaacaatgccaacttcacagtactcacttacatagttgataaacagaaccaacaagtcctctaattggtccatttgaatctggggaagagctggctccaatcattgtcaattacatcagcaactgtggaatactccctgagatcaacaaactgttaactgcagtgaccacaacttgacccaggccagagcttccatcctcgggagggtgagtcaacagcatgtcaacactaacccaacttctaccacgcacagcaaggctgtgctatttaggcgtggatcacacgcacactgcgccaacttctaagctaacaatggacaaccaaagcctccggaactctgtcttgggtagagtaaatcaatttccttttgtaggattttcttggcacaaagccaagtgtcaggggctgtggagaaggaactgctggcccaaattccatccaaggttgaccagtggtttaatcccttctctaaatcaggcctctggcaaaacagctagaatcaggaagccaattcatatttaacaaattcaaagtctatcacaacacaggaacttgttaggcaagaagataactgaatgaacacctttaa

SEQ ID NO: 69193 - DNA, 608 bp, Homo sapiens
gaagaaaggaactaccaagaaacaaggaaagtcagcctccaattttgttcatttaagtataccctctctgccaccacaacattcattatgtttgtcctggacagctctaatggccatgctgattgatactcagtgttaaggccacctctgtccaacagacagaggtggcttctactctgtttcagccaaatactcacatggctactctatcatcacctggaaatctcccagcttccctcaggaattcccccctctcctatttcactgaacaagcaggaataagtgattccaaaattgcaattttgtctcaaatgtactcttaaaagtgaaaccctccacaattcaactagcagcagttctgtaagctgcctttacattcaaacaccctatgggttagccaagaacgcccctccacaacaaccatagaatttttatattcgttttacttctgttgcatttaaattttctggattctgtggtataagaggatttaacacttgacacaaaacattcaaaataagattgagaaaatactagcaagatacaaggctaatcataatgacctcaattagattttcaattcctgtcaagttaatggtatatagtag

SEQ ID NO: 69194 - DNA, 2958 bp, Homo sapiens
tgattcctgagccacttgtgggtaaaaatcagaagagaaaaaagttcaatgaccttgcaaattagaaactaaaaaactaatggtgtgatagtctgtacagcctcagtggaattacaggaaaacatctgcccggaaattgctttttttcttttggaaaattactaggaggctgggggaaaagaggggaaaaacgggtaaggaaggttgcaaatgttaagatgccaaacaggaacccaaccgaagtccgaagtgaaatacagcctcctctggcccaactgtcatgcaaacaacttctaagcatcttcagatgtaaagaaaaacagtcattgtgcacaggcgttagctgaatgttcgagagttggatgaatggggaagacttgttatacacctagtggtgggtggatttcactaggctgcagcctccacacagcttttctttgctgcactgcagaggcgccatcttctccgtcttaatcttcactcaattcgatccttttatctgcaccctaaaaaaaagacccttcggaccctccccagcatcctgtgcccccaggggaactaaaccagagtccccagagctgccagggaagaggccgcgccttaatcagacaaacgcctccttggatgcacaggacagagcccgtgcctccccaccatccgccactgccctttccagacgcacatcccactctccgccttatttcctccccgccaaggactttacagcccagcacagaattaagcctcggaggtgatccgagggtgggaagcagaggggccccgaggctccgccagaagccccggcagcgtctctgccccctcccaggcggacgcgcagccccgggaagggagccgggcgggagcctcggtggcgcactgagactaacgcggctcggcccacggcgagggcggggtgtcgcggcttttgttcccgcggaccttctgcctctcagacagagcttagggtgcgagcgaactcccgggacgtccagacttggggaaggcgcggggtggctatgggtctccgacccctcccatttctcgcaagttacacaaaagggagacgcggacatgcacaaagtttgcctgtggaaggcggtgcgcgaccccgacgccggctcgggctagggtcgcacccaggctgccgccgccagcagccgcgaaaagaggttggagcaaggaagggggatgggggtgagagaggaaggtgaaacgaggcggagaacgcagggaaaagcgaggggctcctagcttcctgggctgtcccgactcctcctcctcctccccagggcccaagagaaaggaaagggcaacgattcaagagcgaaggactggctttagggacgctgcgttttcggttttccccacgtgctccttcccccttcccccctgtctgaatgtctctcgcctcccccgacccccgcttccaaggcagggactaagtcggggtctgggctcagggtcgccccctacccttctcgccccgggctggcgcggaaccagggagaccagcgcctcgcccgctccctctcagcgggccggagcgcgactccctggggcagggctgggccgaaagcggggatgcgctggacgtccgcaagcgggggcggagaggagaggggtcccattgacggacccccggcttctctgcattaaagacttgggttaaggtcttggggggtatcgcgtccccaccgtgcagcctccccccgccttccgaggcgcggcacccacctccagcgcccgagccgtccaggcggccagcaggagcagtgccaaaccgggcagcatcgcgaccctgcgcggggcaccgagtgcgctgctgtgcgagtgggatccgccgcgtccttgctctgcccgcgccgccaccgccgccgtctcccggggcccccgcgcacgctcctccgcgtgctctcgcctaccgctgccgaggaaactgacggagcccgagcgcggcggcggggctcagagccaggcgagtcagctgatccggcccaccccgctcggcacccgagagagacccctagcggcgccgccggggaactgcgcccgctcgcgccgggaggggccctcgcgccccgcgcccacaggtgcacgcgcccttggcgccgcctgcaccccacgcgccccctccgctccccggccgacggcccacctgggcttcgtgaacagtgggagggagagtctggggccaggagagggacggtgcaggatcagggaaaggtgagtcctaggacgctgaggctctagaaaagtcgagagcgctcctgctcgtccccgtgagcttgaatcatccgaccccgcaggcctcccgggggtgtcgtataaaggactgctgctagggtgcgtttttatccgcatttcgttttttctctcggtttggagaggtggggcaggcgtttctggaagagaatgagaacgagtgaagcttaaaggaaataggattttctttgcttgttgagacagcaaaacctcattttttaacccccaacgtcaaaagcaggcacgagcaacctggaatttctatctttagaacgaaccaaaggagcaaggcgcaggacctggcaaagaagcggccaacccatttacttcttcttgaaagcagggttctgggcttgggttttgtttctttcttatatttttgtttgtttttggttttgttttgttaaagggggtggtcagtgtggattttgcggggcggggggtctttttttgttgttaagcagggatgtaacatccatctgagttggggaagaaggaaaaattaggagagatcattcgtattcgacccccgtaaatgaggacttctgacctcaaacgctgcccttgttcttcattgtgtctgtcctgaattatagaaatgaaccttctgccatgccactttctcctggattaaacacaaaccgtccactgtccagttagtgtccagatagtttagaatgctctagaactgcccag

SEQ ID NO: 69195 - DNA, 2052 bp, Homo sapiens
taactgaattacgaatgctggggtgtttgtacaatctggctgccaccgaaaacaacgtgagaaggtaatgctttagaccactgccgtggaattctgccatcgactggtctgccacaagcatggtttccacatagcggtgactggacacaaatcgcttctttcttatgcttccagttcctgtaaagaaaaaaaaaagtttgcttatggtcaggctgtccaagaatagttaccttcctagcatatattaggaaagcctaaccagtcaaagcaaacaaagcaaaaatatacccagaacaacaataacaaaaatatttgcatatcttcactccaagtgttatttttaaagttctctcctctcctttaaataaaaagaccacgcgctcctttgcatggtcaggatctttctgtgtgtgagcaggatttcttctgttctctttgaaatcccacagtctgaacaaggcaatttcgcacataatcctacccaattgtagtaaaatcttggagcaagagcggcaggcagaggccctgagtcactctttcacaggcgagggctcaaatcctgaatgagatcatcaggctccacgtggaaggcctcgggtagggcctgggctgctgccaaggggccgggccttaaggaatctcagactgcacagctctgctgtctcattccaggggtccctggggtgctccgctcttgccaattccgggcacaaggaccacccactctgcccagcagcctctggccccactcccactgccccagcgaaataagttccagcttccaggcatgattgattatttggaacagagccttccactccggactgagacccaacccctgcagaaagtcctaaactgggctgcgaccactttgctcccaggagcagaggagcaggggaaaaggggagaattctttaaaaaatgacacgcgagagagttaaagaaggaaaaaggcaccaaagtgatgaaacaaaaagaactggagaataagcactgcacagagagaaggccgtagcaggaaggaccggcagtgactttcaacagtgcttgagagcagaattatggccgcgagagggagtgcaaactgggaggcggggcaaacccgggaaagacctcccaagcaggttctgcgaaggggccccaccgccttcagcccgcctgggtcagccttataagggggaaaggggacagaagtctgcagaacagagatcctagcgtagccgctcagggtaccttcccaggtcaccattgctcctctgccctctccacatccgccctcccgtgagcgcaggatgcacgcacaggcagcggttacaaaactcagcgcaacgttgcaacccgcacaaaaggcgcacacaaaatcattaaaaagaaatacacagagtggaaagaactcgcacaagctccaactcgctaaaggtggaaggagtcaggttacaaactctccctccccggcctaaatgctttgctttagtttgcagaaaatcgtttgtcagtttttttcttggttattcattattcgggcaaatgcaagtatgttttctagctgagttcaccaatccaaacctcaaaccacattcctccactccaggcctccgttctgtccgcggacttatgatcctgcctgccagcaggagtctaccctgaagtcgcgtgggatagataaagtgaggagaggaggatgaatggacagacaaacgagagcaattcttctacctgtgggctgtcctacgccttgcagtgccgggtcctgcggcgaccactgagccccttcgtcctcgccctcagtcccttcgtcctcgtcttcggtctccgctttcccagtcggccggggctcgtcgtccacgaccccgcacgtgccgccgacgtcgccctgccgattccgccgcaggaggtggaactgtagtggtgccggcggcttctcccctggggcggcggtggcgaggcgctcgctggcggcgggcagcggctggatgaaatacgcctcccccagcaggtagaaggcgccgcgcacgccctcgcagaggctgagggcggcagccgagctgggat

SEQ ID NO: 69196 - DNA, 620 bp, Homo sapiens
agccgaagctcccggagtcactaaaaggaggcgctgcagttctgccggcgcgcgggaagtttttcttccagcgcaaagttggagacactgagaggcaggcgcaggcagagtggctctgctgggacaagaagcgctctggggcgcctccggggctgaggcaacgcggagattggtgcctggcgcccctcttcggcctccgccttggctgcgatgttgctcactctgctcagggctctcccctctccgtccggtagcgcaccctggctttgcaatagcccctggctcggagccgctttccagcgagtgcaagaaccgggcagccgagcggtccttttatagtggaccagtgaaacccccacccccaccccactcctcccctttggcccttttccatcccaaagacgccgcccccggctccgttggtgctaaaccgcgctccgcgctgcgggctcgggagggggagggggcagcctccgcgctggctccacgccactgctcgtcaatctaggggcggaaggggcgctgtgaccagcactttgtactgctggggccgctccagggagaagactctcccttccaccgcttttctccctcgccggtttcctggaccacccttcctc

SEQ ID NO: 69197 - DNA, 1140 bp, Homo sapiens
tctatctgtttgataacctaaaactatagattgttggcaaatgagaaaaataatagggaaaacatacaagttccttttctgtgtgtctaaatgatacattgtcttgaatttggttctattaaagctttaaatgaccatttctgtacacatggctatttcatttatttagtagttttgaaatgttagcaaatataaggtatttgtaaagcatctttcattataaagagattagtaatattcaccaatcatgccaatgagattatacactctgccaaagactactagaaaaatttgatcattattaaattcaatgttatttgacagtgtgaactctatgtaacagcacaaattctggactttgaatctggctgctgtcctcacctgaaccattaaaatgaccttgttaacaaggaaggaatcaatggggaaatatcacaaccagagattggctgtgtgtccaagggtgctttgtcttgttgccaggatcagactgtgaaatcacagaggcaagctgatgtcatcagaggtgactctgcctatttcaagtcctataatcaccccatgggattcaacagcagtaggaaaacatcacattctcttaatggacaccccatatttgtagaaacagttatgactattagcatttgttatacaaacccaatctatttgtgctcatctgtagaatcctacagacactagagactaaatgatattaattttaggaggtgtttctaaaggagaaacagacaacatttggttttattatcgtttgtatccctcagaagttgtgtgtagacaactttcatctaatacatcaatatcgacttgtccaagtttctcgatgaagtgaaaggatctgattattggctgtgtcttagcgtctgtaggaagcttctaggctatttgtgtacccaaatttaaaacttgcaccttgtttcattgaataagtgtttttcttatttgtgacttggaaaaaatagtgttaatgtgatgtaaaaaacctattatcataggcacaagtaatgaacactattggtcatgacagattaaaatttccttggaaagaaaaatgatagtatcagaataagaatacatgaggaatatatacatatacacctgcttcacacagaaagctttctg

SEQ ID NO: 69198 - DNA, 2531 bp, Homo sapiens
aaaatgtatgtgtcaaggtgagacaaatagaggcaaggtatcagggctgcttaacacctaacatgacacttagattgtttctttaatgtaagatataagcagacctttcacataatgtggtaacagcagaattagcttagtagtaatcaccattcctggaaagataactcagaacaaataactgaaaaattcatcatcttttatgagagaggacatcattttagagctaggataaatatggatattgactagagaaaagataaaacaagtgtggtaactttgtgcagaacctattcatatcaggaagagagtggatatttttgtgagcctaaacatatttttggacccaaaagcagaattcatctaaacaaaaaccattgtcatggctggttccatataacaagtgtaatatgtcctggaaagtagcctatggtaagagtggttgcctgatccagttactgtgaacattattcggtgaaaagttctgcctaacaaatgcattcaccagtcctgctatggaggaacaggtctctaaaacaaagacattgtttcatattatcattcttggattggtgtatctgaatataatataagctattcttaaacaggcttttaaaaaatattgagttgagatttggggagttgaggtttgaagagaatgaaggtctaaggcactcataacagtggaaataacttcctttagggactaaaagtctaatgtttgtaacaaaaaagatatttggtggtaaaactagaataataaagatataatataatataatataatataatataatataatataatataatataatataaaactgaaactgcacattttagcaatcctaaacaaatttttaaaaccatatgggtctatatgaaatgtttaatgtaggtccttactaaaattatatttatatgtgaggaagtaattttgatgctttcatcaaattcgaagctgcccgtatacacagagctcttattagcaatgcaaagagtatgaagacatgtaaagaaacatgcactttcagtaatacaggatggaaaccgagaagcactgttaataatgagtatgagggaggaagttgatccaaatttcagaggctttggaactgcataggaatgagttttcaggttattagtttcattgctcactaactagacagccttgagagcttaataattaaccagagtctatttatagtatttttaaaacatggtcattcctaggagttctgggctgtttatcatactgctctgagttgacaaggtcatgcagaattttcgtgtgaagagagactgtaacctcaaggtccaaattccctaggctgtgttggaggtacactggtatgagaaagtgataacagagcaggctgggctttttatcttccccagatcctctggaacatctctttgaaggcctttttacctaggtgcaattttgtcccccttccattaaagattactcaattatctcaatagcttctactagggataagtgaatttacctcagccttctaaaaggaaaccagactcctacaagttgctaaaatacacttgctaacccatgaccaggtcacaaataaacttgcttataaaatttatgtggattcttcgcttcacgtgtcgctcctctactccactttgagccttcttctactaacgtgttttctttttttaataatgaacatctgtgacagcatctttgccaaaataaataaaattaagaagatgattctgtgggttatgctaaacaattttttaaacaggttcagatttcttctgaacggagtacgaaataaatgtctccatatgctggttcctgtttattattgtgtgtgagagagagaaaggcaaagctaagagagagagttagaaagacagaccataattatagagtcattaaaagttacttaacacagttttataagtgacttcttaattaagaaatgttttcaatacaaagcagtcctgctttctcattcaataagttttgatgtatattttccaaaatgtttttatttctgtcattaagaggaaagccagtccattttggtgttggacttgctggaagtgttgtggccatcaatgttatcagttttgctcctggctaaagtaaaatcctgttcttcctctgctgtgcttcttttctggctttacatgcacaaaacagactgtacaaacacgtcaggaaaggacaacaaaaggctaactctttccattgcatcacagatttgagacaatgaagacaaatgttgattaatccacgatgcttcagaactattttgtctgataataatatttacaccagccttcttcgcttcctttttttcaagatgtatcttttctttctttctttaccttcaaactatctacttcctttggttttagatttgtttgtcattagcaggacaaagttacagttttattctatttgctagcctaatctgcaaatctttgtctctaacaggagcatttattaaattttcctttaatgttaatactcctttatctaggcctgagtccctg

SEQ ID NO: 69199 - DNA, 2528 bp, Homo sapiens
attcagttagctaatattttgttgaggttgtttgcctctatgttcaccacagaaattggtctgtagttttctttattttattttttgtgtcattcctggttttagtatcagagtgacattagcttcataaaatggtttagggatgatgtcttctttctcaatcttttggaatagtttcagtaggattgctactaattctttaaatgtctggtagaattcacctgtgaatttatctggtcctgggcttttattaatcggcaatttttaaattactggctcaagcttgctgcctcttattgatctgttcaaagtttctgtttattcctgatttaatctgagagggttgtatatttccaggaatttgtccatttactctaggttttctagtttgtatgaaaaaaggtgttccatagtggtctcaaatgatcttttgtatttctgtggtgttgattgtaatgtctccagtttcacttccaattgagtttatttggatcttctctgttcttttcattgttaatttagctaattgtctatcacatttgtttattttttcaaaaaaacagttttttctttcatggcttttttgggtttttttttaattgttgtttgaatttcatttagttctgctgtgatccttgttatttcttttcttcttctagttttgttttcatttgtttttgtttctccagttccttgaggatgacattaggttgccaatttgtgttctttcagactttttgatgtaggcatttagcactataaactttcctcttggcagtgcttttgctgtatcccaaaggttttgatgcctatgatggtggacaaggtgggaaagacttcctcttcttaagacccttcacatgcaccagggctttctaactgttggggtagagctgaagacttttcctgctcaacccagcactttaactgtgccactgctgaaagaagctttccaccagcagaaagacctagtgctcaaggcctgccactcagattattttgtcccacatggtgttcccttcatgtggtgcactcctccctcctctagagtactgtgagtgttgttgctcctctgggtctagctacccagtgaagctgcaacactccaggctggtgctggggaatgtttgcaaggggtccagtgatgtgacctgtctgaggcaatatcttttgtgtatgtggggtttctggtgttttgaaatagttctacaatgaacacttgttagttttgtcatcagaaataaattctttcagtgtagtgcaagtaagttctatgttttcaggcatttcctcagcctctgtctgcaagttaatctaaaaatgtgaaggatgtttgtattggcagattgagatgtgaattgtgcatacaaaggtaggaaaaggtagaaattatgttaatccaaatgtctttgtggaaaagtaataacctgtggcatgagacatgccttcaaagttaattaggtaattattagcctaaagaagcaaaaggtcaaagttgaatagttttagcgataaagcttaaaagattcattaacagaaaatgaacacaggaagttccagaactaactatgaatccctggttcttataactaaaaaggtcatcttctgatcgttttaactaatgttcctccatccaaaataatgaggaagacaattttgctctgctccccaacgcatgtaaataacataatgtcagagtgaagaggttaaaaattaacattttctagttgcatttagtgaaaatgtttaattttcaaaatcagtgaaacaaaggtagaatgcataagaatttgaaaccaattggaaaggagagttctgtcaaagtcaatactgaatcctctggttgactgaagaatggtagtgccgataacaaaaattcataatagcatttcagagacagaaagagagagagaagtgccacaaggcagagaccgtttcaagagaagaaacgctgacttttgtttggtttgtgttaagaatgcccacatagaaatacacaaaaggtggccaggttcggtggctcacccctgtaatcccagtgaggcatgagaatagggtttggagacagggaacataaggacttcctagaactaaatcacatggaaacattacagctatgacaggaaatatcctctccatttatgtagggaataggccaaatacatgactttgtaactttacttcatcctcttcatttacatagggtgtacaccaagtaaccaatggaaacatctagagggtatttaaacccccaaaaaaaatctgtaacagggcccttgagcccgtattctgaggcctgctcccacactgtggagtgtactttcattttcaataaatctctgcttttgttgcttcattctttgcttgctttgtttgtgcgttttgtccaattctttgttcaagacaccaagaacctggacaccctccagtggttaacagcagcactttgggagaccgaggaaggcagatcacttgaagccagaagtttaagaccagcctggtcaacatagcgaaaccctgtttctacc

SEQ ID NO: 69200 - DNA, 1994 bp, Homo sapiens
ctactccaaaatgtccacagtgctgtgatccaaacaccacctctaggggtttggtttagttgccatattttcctctcccctacccattcttctctttggattttaattctctgtgtccattttaacagtcttgttttaggttaatcttttactatgactttccaaggtccttttaggaagcaaggggagtgtgactgaaggaaaaactgacattcaaaaaatctcctgagaaatagcaccctgcttggaacaaaatcctctgtgaacactattttgggaacagtgaccaaacaagccagtcgtctgccacttacacatccaatcctgcttactaccactgcttcctggaatcctgtcccaagaaaggggctaggggtgaggagagtggttaccctggaacataccatttctatgagaaatcttaaaagaaaaaaaaaaatgaagacaacaaacctgtaacttgatgccagcctgaaatcctcttcactaatcataagtcagagaaagtgaaattatttccatcacactcatacagcatgttctctggggtttgcaggaacagaagagacaatgtggagaaaatgcatcgtctgtggttctgaaatcaaagcctaattagtcagaagacaaatcccatgggcttcagtactaaaacctatgtttcaaccatgcctatgttgggaaagtcctaaaagtcaaagaatgataaggcaactttagtggagaacatctttgtttacattacaggactcacatgtaaactttgaaagcatgcaatcaagtgaacaaaatattttaattggcctttaaaatattattataagagcaagaccaacttgtttaaagtattgcctggctggtctctggttttggcagctcattatactgtcttaatgccgtaagatttattaatggtcacatgcatttctctgaaaagcattccacattttatccaattctgggtaaaggttatttataccttagaatgctcttaattgcttcacattaaagaaaaatatggaataagttataagtattgcctcatttaatgtattttcaaattatagcgttttggcaagttttgctcattgacttctttaagcttgggatatcttttatcccttttacattctctcaaaattttccttatcactcaaaagctaattcagataccaattcctccattaatctgttcctgactcccacatcagcattaaccaaatgtgcttctctgctcccaaccatattgcttctgtattcactaggcatatgtaacaatcattttgctctacattatatttgtctctgtctttcttctttaattaaagtaattaaagtaccttcagtgggaaagacagcatgttattcattttgcatctgaggaaactgatagggtgtctggaattagcatccaataacgattgattaaattacatgtaatcatatgagttttatcaaataaaaattgcttcaagtttgttcttttggtttgtttgaagcggtttgctcattttaataattacatgagacccaagcctcaatctcttagaacaggtagctctagtgcctctcctgctctagacttaattttgtttccattggtgccaggatatgaacaaaacattttctgatgcaaatatagtctcagattgggaccacaccaaataccacagtccaagtaggtgaataatgcactgaatatttggcctggtttggctgattgcaggcaagctagctaataattaattaaagtaggatcttctgtatttacttcatttcaaaactccttgacactctctcactcggcaactctcattatcaactaatgacatttaaacacctaatacatactaggcatctttaacaactagaaatacagagctcagtaaagacacagaactgacttcatatgaacaaatgtagaaacatattaatagaagattctctcttttaatatctaaaagattgaaaagattgtttaacagaaaatattg

SEQ ID NO: 69201 - DNA, 673 bp, Homo sapiens
gcacgtttgattttgttgactcctcgcttctagaagcacatcttcagaataaagactacatcctttcccataatttgtgagcactgaatgctgtttcctgctctatcctagactcctctttgactagtcctccacctgaaccctggacctagccagactgagctacttgcaactccctgaatatgctggactctgactctgaagtctctaggcctttccatgcactcttccctctgctgaatgccctctcacctcttttgcacttgcctgaatcccattctcctttctagactcaatttagccattatcaattctaggatgtattatatacttcacagtctccaaaactctctgtgcgttcctctatcatcaaactgtagccacatatccccactgtttcaggcttccaaaattctaaagttgcccttttcttttcttttttgaaacacggtctcactctgtcacccgggctagacagcagtgacacaatcaaagttcactgtccttttattggccaataagaatagtataagttttggcaggcacagtgactcatgcctgtacttccagcactttgggaggctaaggcaggggtggatcacttgagtccaggaattggagaccagcctgggcaacatggtatggcaaaagcctgtctctacagaaaaaacaa

SEQ ID NO: 69202 - DNA, 1277 bp, Homo sapiens
tctttgaaacctgaaagctgtttgttccatcctgagaaaacccagttcatcttatcttcaaacaaatctaacaacccaaattccttacatttaaaaatcacaatgtcagtattcattccttctgctattaatttaaaattgatggcgatcacttcaataaatccatttaaataaagtgctagggtagactattgtctgctagctgcatgtaacttttttttggtaacaattaaatgaaaaattcagttcctcaatagcactagccacatttcaagcgctctgtagccacatgtgaggactggctggtgctagagtatgctattcagtgggtttaaaaatatttccccactccagtaacacaactttctttcatgtttgttaagggtgctttctatgtgctgagtaaatcaaataataccatgcaattttaatatgtaatactttaaaaatattaataagcaatgtttccggaatattttgtttccaaacgtgttatactatcgcttctctcagggacatgtgttcttcagattaacaggcgacaggaaaagatacgcctttgcatggtaagcagtcagggagctcatgagacagagcagccccctggcaaaggagatgcgtccccggcacactcattacttgtagctacaggaaaattctcaattacggcgtcctggctgtcaatcatctgcaagtggaccccgcctgctccggctcagggcggtgatagtcaccgttccggccctcctccaccgcacttcttcagaaagccgcaaccctttcccgtcagagcccctcccctcctcgcaccctgccagttcggcagccgctgcctccagcgcgttcaaaagcagaaacgtgtcctccgcgggctcgtacacgtcgctgaaggcgccgcggcccacgtgcccgtggaacggcgtagcgaagttctcccctgccatagtccttcgctgcgttccatgcgcgtgcgcagggcgtgcgcatgcgcatgcgcatgccctcaccctcatgcgcaggcctaggagtggggctggcgtcccgggcgaccagtgtgttgttgttgggtcttaattctaaatttgtcagtggctctccttgaaattgctaagtagacagttgtataatccgtgactattgacatttgctttcttctttggaacatttaaattttattctgtgaactagaacctgatagtgggcattctgagttgtttttgactaaggtgaatgttctttcttcattctaatgatatttggaaattctgttttattcc

SEQ ID NO: 69203 - DNA, 456 bp, Homo sapiens
tcactatgaaggtcagagccggagattcccaacaaaacatttgagcagtaggctattacctggcaaatgtgttttttctttgctctgagcacataactgaaagagagttaataataaatcttcagatgatggcattagcaagcatcctttcgctgagctgaaatagttataggccacatcacagataaaagacactgatgagtcactgctttcagcttctgataatttctttgttttgaataaagtttcatgaagtctaacaatgattctttcaacatatacgtctccaatcaagtaatctggagaaaaaaaggttcaaacagacaaaaaataaaaatattaacgtgtatttttaaatatcttactttggattaataattctatgggtctttcctggattttaaaatgtattagacaaaattttatcaacaaatcaacacattctctcacacataa

SEQ ID NO: 69204 - DNA, 1488 bp, Homo sapiens
tagttttacacgaatccactttaaggtcgtccttaagcaagtacttagtgagcgtctattaggtgccagtctgttctaggttccgaggataaaaacatttgctttcaaaatacttacgtcctagtgaaccaagacaataaatgtcataaatacaatggagtaaaataaagtaggaagaacatgggagtggggaagggctaccaagagggtgatcatgggagacctcactgaggtgtcgagagcaaagtttggagccacctaactgaagagcgttgggagccggccaggtagtcaaggcacagtgaagagatcagtgtggctggatgaagtaagccaagaggagggagctgaagatgggactgcagatggaaaggggtaacaggcagtccagaaaccaaatataccatcctaagagctttagcttaggagaagccactgtaggtagcaaaggagaggcacaatctgcggtaacctccacagtggattcactttaacattctcccaactctccttcttcccagcgccgccctcccccaaccaacccgctacctcggccagatcaccttccagtgaacctgacacattatcatttcttcatgaatattatgggtgtgtgctcggatgaggacagctctggcatggtacatcttttctctcacgattccccaatctgctcagagataacacaaaccgctctcagggacgcacacacaacagagaggtcacactcgacagggaaacacacgcctccctacagccgcgctccacacaccctccagcaacgcgctgggcggagccagccgcctcgaagcgaggctcccgggtcggccgagccagcccccgctcaccctcaggttccctttagttcgctgcttgttcttcccgcccatggtcgcggttgcagctgtactctgagcactcagaccccggttgacacgtccgggacacaacttccggcttctggcggcggaagaggacaccctgtaataacttcccccgggcccttttccgccacccaccctgtccatttgctgccccacttccgctcccgcctcccgctgtgtccctgaccatccgccaccggagacgtcacagctaaagccacgcctgtctgagtgatgtcattcctggccaataggaagccaagcattggacccgtggcgccaaatcctgtcctccccgctttcagaagctaggtttgttccttgcttagagggtaggaaactggcgtgaatcatcagaggggcagtttcacataagggtagcattagaatgttatggtagaggctgtgggaagatgggagtgttttagacttccaacatgatgcaatcatcagtatcacctgggcgttttttagaaaaggccaactcgggcccctcagaactcctgaatcagatcctgcattttgacagtattcccaagtcttgttaaaatttgattactgctgtaggcactattctctctaaatctcccctccccgtcccctt

SEQ ID NO: 69205 - DNA, 1664 bp, Homo sapiens
acagacagggtttcaccatgttggccaggctggtctcgaactcctgacctcaggtgatccacccaccttggcctcccaaagtggtgagattacaggcgtgagccgccgcacccggcctaatttgttttttttttttttaaagaaaaccccgcatatacacacatgcaaaaataagatactagaaaataaaatgtaaaaccaaaatttaatattgtctttttggacacaggattgtgggtgactttaaaatccagttatttctactcttcctataatgatacatattatgtgtaatcatatatataatacatatatgtaatacgttatatataacatataaataatatatataatttgttggtgggaggaacaagggaaagcaggtttacaaaatctgaaaagccaaatgccccagtggggaaaaaaccctccatttcggtaattccctggttaaaatcgaggaacaccctggacttcgaaggcaccacctgggtcccagggtgcaccattcctctaatcccccagttgcagcaacatctgggaagtcccgagaatggggatctatgcctgtttttccaaaagataataagcgtcaacaacaacaaaaaaataaaaagtccaactccgccccaaagcagcatctggctggcctgcgagatgcccactggggaggcgagtccgcagcttaggactcaagcccggggtcggaagctattgccgaaatccgaaacgcagcgctcgcagctgcagtgacgcgacctgctcataagtccccgtgctcacagcatcccggcaacttacgagctagtgcttccgggtcaccccggcccaggaaggcgcacgcgcgaagcatagcgagcttcactccgcactcttaggctgcgtgtgaggcctgcgagtgctcgggagctgccgcggtcacaagagaaagcctagctgtcaatgacagccccagagcatctgggcgccttgcgatacccgggtgtctgtaggcagccaggagacacttccaagctgatctggaatctttcctcgcccagctctgtccctcgcagggatggcaaaggacattacgacctacatcccttcccggatctgatggcttcagattggcagattgtgttaaagtggaaggctcgtggtgcccctttgctgagtttttatggacttagttttcccaagtagttctaattatcgctgggggggtggggtggggcgggaacgtaatttctgcgtctgcccttaaatacctttaaaccttggctgcattgccgcttttatggaatttcacccatagtctgtcttttttagtttccctgatacgcatctttcttaataataataataataaataaataaatagcactttgggaggccgaggcgggcggattacctgaggtcgggagttcaagagcagccaggctaacatggtgaaacctacctctctactaaaaatacaaaaattagcggggtgcagtggcgcgcgcctgcaatcccagctactccggaggctgaggaagaattgcttgaacctgggaggcagaggttgtggtgagcctagatcacgccaccgcactcgcactccagcctgggctacagagcgagacttcgtcttaaaaaaaaaaaaaaaaaaaaaaaaaaaaaaaaaaaacaaggcatgtggc

SEQ ID NO: 69206 - DNA, 1383 bp, Homo sapiens
tagatatataatcttgggagtcaacacttatttggaactatatatttgtttaaagtctcccagggagtgagtaaagttgggagagggtgctattgaattggaggtatcgaagatgaaatgggattagcaaagaagaacgggacggagggactcttgaacggacaactacgggagtgatgtcacaggtcatttatctgccaaattattttcgcttaagagatttcagtccttccaaaaaaccctcaagataattttatgattcaagatttcagcgaatgctgtaagataatagactgtggccgggcgcgattgctcacgcctgtaatcccagcactttgggaggcagaggaagggggactgcttgagcccaggagttcaagatcagcctgggtaacatagtaagagctcgcctttattatttttttaaaaaataaaatatatttaagagaacgcagactgaaacttgagatttctgagtggaataatatcttttccttgcagatttttttttgaagaacagagcagggtaccccgcgacccaagccaagacgctctcaggaagaaagcccagcacgcagccgccctcgcaccctgattgcccccggggcgaggtccccggctggagcagggctgcagaagccgggaagcaacgccgaggaccgagccgaccgatgggcgcatgcagtgaggggaaccggggccgccatgccgggcacgttcccaaagggttgcactgggcgctgcagcgtgggaaacccccgtggcggtcaccactggcgctagctgaggcgagactcaccttgagccgtggccccctcactgctgtaacccgggttccatggctgcatggacagctcaattttcatcagaagggagcctcaaaattctagcatactgcgacccaaaacttacaaaccgcctcagctggcgacctaccggaaaaaaaaaaaaaaagcatgcggcgcatgcgcgtccaaggccgcggaccggaagctggggctcgcctgttgggagccgcgtccgccggtgttggtgtctgcacttggaaggacgtagggaatgcgttgtccctgctaggtacttttcagtcgcagagttctcttcttcttctttctttcttccttttttttttttttgagacggagtctcgctgtgtctctcaagctggagtgcagtggcgcgatctcggctcactgcagcctccgcctcctgggttcaagcgattctcctgcctcagcctcccgagtagctgggattacaggcgcccaccaccatgcccagataatttttgtatttttcagtagaaatggggtttcaccatgttggccaggctggtctcgaactcctgacctcaggtgatccaccggcctcggcctcccacag

SEQ ID NO: 69207 - DNA, 2123 bp, Homo sapiens
agtgttgggattacaggggtgagccaccgcgccagggctcgcacttacaaattttcaaagaatggacagtaaatatttgaaaatcccctcctcccccgcaatttatctgacaccgtctttcggttttgctttaaaaattcactctcgcggccgggcgcggtggctcacgcctgtaatcccagcacgttgggaggccgaggcgggcgcatcacaaggtcaggagttggagaccagcctggccaattggtgaaaccccgtctctactaaaaatacaaaaattttagctgggcgtggtgccgtgcgcctgtagtcccagctactcgggaggctgaggcagaagaatgcactccagcctgggcgacagagggatattccgtctcaaacaaacaaaaaatcactcgctgcgttttttattctgacatggtgcaggaaggtaaattcaagacaacttaggtactcagttttagaagtcgacaggacagaattacggaaacaaatttaagcgttcccccttttagctccaaatataatgtgttccagaaaggtaaccatctaggaaactccaaggctcagaccaccaccggatgcccacacttcaggagcatttatataacttcgtggttatgtcagagacgagaaaacccattgacaaccaaacccctaaacccgaacatccggcgcaagccgcacgcaggcgcagatttactagcgtcagagccgatggtcccgggaggtgggggtggggtggtggtggcctagccacttcccataatgccgcgttccggaagttattgctttccaggggtcactctggcttcgactccgtcgctctcaattcgtcaccaggaggaagacggagctggctgcccagcccaaaggcccatgaggggatgcagttatgggctctgtcgccgtgggtgagttctggtcccactgcctggcagtcgtcgctcgcctggctttctgcgctgggagagctcctgttttccgccccaacttcgttctcttcttgaaggccgctctccttaagcacgtaacccggctactttccggtactgcgatctcattggctgcatgttctgtcagttccagaagctggccaatgagatgccgctgctggcggccttctcgaccccgtggacccagaggttcccccgtgggatcggagcagttagaaggggaggagagggaaggtgtggcaggcgccgagcaaatgggtgggtggcgcgtggcagggacttccctatgggttggagctggatttgcagccgtgttcatacggctggtaggaaaagcaggatctgtcacttatccaattgactatatctaggaggggattgatatacgcaaaacttgaaagccacgttaacacctgctgacaaagttttccacacgcttacatttttaatggaaccgagtaggcaggggaagactgggagggcagagagtgaagagacttggaataatatgagaaccggcaagactatctttgatttagattttgtatggagtcctgcgaagagtcatttcactaagacgttaatgctcatccgatgacactacttgaaaagtgtattaagtttattgatgttttatagctgatggaagtcacaatatgctctcctcatgactcattagttgcctttatagttgtcagaactttactgaggctctttccgcagcactggagtgacccctctgtcctctgcctgcagtaattaacaattcgtctttcaagttttcctatggagtctaagctgctgcaatcctcaaaccagatttactagtgctgtcttcactactgcagacttctgacttctcatttttcacccttttctttttcaccagaacttgtttgcttcattcttatgtacctacctttgcaccttgtaatcatcctttatgcctcaggtactattctatttttctatttcaatgcaagaagtatttcttcaggacctgctatgtactaacattatgctagatattataggcagttccaaaactgtgcttgaaaccatttatttttctaagaactttagattctgcttacagaaataacataaacccagattaaagatttaagaaattcactagaatatgggataaggggacaagatgac

SEQ ID NO: 69208 - DNA, 2051 bp, Homo sapiens
atatcattttcaaaagattattccaccaacatttaccttgaaccctgacatttacttactataccgacattatttgaaaagtgcatcctacaaacatgaacctagttctattaaactgttaatgctccccgtacctcgcataaaaccttaaattcaaccacactgatctatttcttgaattaacaaaatctggaggacacacagaggaatgcaatttgaatagcacaagagacaaatttatcaatagtgcagtaagatattttttaaaactatgctaccgaactaacgttcaagaaaaggccattaaacaaaagtgttatctgcacccctctatcacttatcctgcagattacacagaactcaaagacaccacctcttggtccaatctccataatttaaagacgaaggaaacaaaacccaagaaagttacattttagattaagccagctaacataagttgggaccggaactcatttggctacaacgcatggcttctgtcaactaagctgaaagccgtatgtttctcactgggaagcaagcaaccaagacccggccctttttcccactctcttctctggatcggctagttctcgttcttccccatcctacaactcgcgagctatgtgataatcgacgtcgcagttctcaagacaatttcatctacgttattcaatttcaccctcacaacctcctttaagggtgacgggccttagccccatttacggatggaggcaaaacgcacgcgcggcttcacatccgtccaccttcaaggtgtacaatgtcgatcgtgccgccgatccctcggccttctcccggtcgcggaagaagagaagtgcccgcaggctccggtggccgagcccttccaaaatcacctccctttctggaatcttctcttcccccggccgctgagccagggcagcacgctcagcccgttagtaggccctcctacttcgccgcggccgccgcagccctatgctgacgctcccacctcattcctttccttcagcccttactttcgctccctccttgagcatctgggcaaagcccggagccttgggaacgtgaagcgccatggccagcctgcaggaagcagttcacgcgaccgctcggaagaccgcggaggaagcgaggagcacgcacagccttctgggaaagcagcgtggggccgcctcacgctcttcctggctctccaattagcccaccctttccctgccgccaggtctgaagcatcgcgagaagagcaacctctgtggccagaaccaagctgacgatccccgatcgggtcgatcgatagggcgggcccagggagcccctcgggtttctggctcacgcacgcgcagacagcccaggccgtgagaggttgctccagtctgtgctctctgaccgtagtcagtagtcacggcgttagatttttgcggtttttgatctggaagccacacatccttagcttaatttccacgtatcttccagacccagccaccaacgtcagggcaggtgtgctttttttttcccgaggcagagcatctgccccatcccccaaaattgtctctaggcgtccgctctgtgttgggcaccataggaagcgctgggaatgcgcacgataattaaagtcgtcactaagagtaatgtagtacacatcaagtgctcaagtgtgccatattctgtgtgatctgctttacatgcagtatctctgttaatggtcagtcttaaaaattaatgaattgtcggttaaaataccatttagttttccttccataaaatggagacgataccattaaaaattaaaaattaaatggtactgtctctattttgtagaagggaaactgaagttcacaaactgtaaataattttcccaagatcacagagctagtaaatattaaagctagaattcctatctagatcagacttattgcaaaatgccggttcttaaccactatctatattcctcttttctacttcttcctgggaatataaatcccttttactcttttaagatcagatataaatacatatttatttatctgatttatatatataatatacacatttta

SEQ ID NO: 69209 - DNA, 3662 bp, Homo sapiens
aagggagtaaggagaataagaaagaaggaggaaagacaggaaggagggagagaaggcaggagggaaggaaaaaagaaagaattgatataacctaataattttgatactattcgacccatttccttgcctttattttcaccattattgaatcagtgatgacagcagtagatgcagtaatgtgaaatgttaactcatccattcatttattcattctgcagtattttttacagaactttgctgtttagtatttctgtattgctaagtagcctgcagagggtgcactttccttatttttatgtctttccatccacttatgaccaaaagaggacacaatgttttataagattaaaagagattattcaatgaaagaagtgaggaaggcacaacttctcttttctttcttctaccaaatgttacaaaatgaaatacgtaaaaggcgtagggaatgcaatctctattagcttctttgttttgttttgttgttttttttttgagacagaggctcactctgtcgcccaggctggagtgcagtggtgcaatctcagctcactgcaagctccgcctcctgggttcacgccattctcctgcctcagcctcccgagtagctgggactacaggcacccctaccatgcccggctaattttttgtatttttagtagagacagggtttcactgtgttagccaggatggtcttgatctcctgacctcgtgatccgcctgccttggcctcccaaagtgctgggattacaggtgtgagccaccgcgcccggcagcttctttgttaatagaaaaatcaattttagtgactttttttgcatggagccaggatcatcaagcctgtggccttcctcactttttttttttttaaaattgctgcatccccgggacttcgttttttttcttgctctttgtgtatgtgtgttcttatttttcctctctatactgcattggtcaatagaaatataatgcaagccatatatgtaatttaaaattgcttaatagtcacattaaaaaactaaaaaggaggtaaaattcattttaaaatattttatttactccaacttaccaattttatcatttcaacattttgtcaatataaacattttattgaatattttactttttttggtaccaaatctttgaaatctgctgtgaattttgcatttacagcacctctcctcttgaactggtcacattttaagctgtgaatagccacatggtaccagtggcaactgtactggacaacacatctatatacattcctttttcattcacaatttctccatccctaaccaaaccagcagaaaacagtgtattaccaaatggtgctgtttactcagaaaatctttatgactaattatccaccaatttgaatcatgcaggaaacatgagatggcctgtgttccctctaagagactgtcgtttacagttttgagattttaaaaaatagaatgtttttagccagttgatttttaagtcactctagttccctccatcacaaaatgaggtatagctcttaataaaagtccttcaattttattttcctgagtgtacattttcttttctttttttcttttttattttttcaatacagccccttgctctgtcacgcaggctggaatgcagtggtggaatcatggctcactacagccctgacctcctgggcccaggtaattgtcccacctcagcccctcaagtaactgggaccacaggcgtgcaccaccacatccagctaagtttttctttctttttttttcatagagatggagtctcgctattttgcccaggttggtcttgaacacctggcttcaagcagtcctcctgcttttggcttcttgaagtgcttggattacaggtatgaactactgcacctggcctgtccattctcaaatacatgatagtaactcccatctgctgagtgcttcctatgtaccaggtactatgtattaattgtttatacatataattccatttaatattcacaaaagtccttttgagttggatactgttgttatcacctttgttttaaagatgaagaaactgagcatggggagggctaggggagttgtctaacataatccagctagaatactgcagagctgggattgcaagctgggcctgcatgactccaaatcctgccttctgtaattttatgcatggtgtctcccaagtggggagtatattaaatgcaaatttaagatgttggtaaagggtagaattctagaagtggtagaaatcctagagttcttataatcagctctctttgtttttataagaaaaatctgaggcagagcgaggctgagtggtttctctgttgaacatccaggactggaatccaggattctgagtccaagcccagtgctctttcccctgatgagaaacctttccagatttaaaccattaacaaccctctctaaagaggaggcaagaggtttcaatttcttctcagggaaaaaaagaactgacatcaaaaggtctgtgcggggtcatttgtctcatcatgactttgatttggccttgatctttatttagtatttcagttttatgctctgcaacaagtttggccatgttggaggacaatccaaaggtcagcaagttggctactggcgattggatgctcactctgaagccaaagtctattactgtgcccgtggaaatccccagctcccctctgggtgagtattccgtccactttctggaagtctcaggttctgaaggctttttacacactgcaccatgggagcctaaggctggttgggcagcacctcattctgcagggatctgggtcagagcaggacaatggctctacgacgtgctgggtgttcttctatctccttcagtcaatgtgctaggattgtgatttcactttctcaccaggcaggggctgcagtttacaggagaaagactattcctgagtttgttcgactgtgctgtttttttactcctcttaactgattacaaatctctccaacgtctctgactcaggctcactatgacttttttgtttttgtttttgagaaggagtctctctctgtcacccaggctggagtgcagtggcacgatctcagctcactgccacctccacctcctgggttcaagcgattctcctgcttcagcctcctgagtagctgggattacaggcatgtaccactatgcccagctaagttttgtatttttagtagagatggggtttcaccatgttggccaggctagactcaaactcctgacttcaagtgatccgcccgcctcgtcctcccaaagtgctgggattacaggcgtaagcccctgcacccagctgactatcataagacttctatttccaaataatagctcatataataacttgtgtaaatatctacagataggcttcccttattatggatgcacaatccatttttcatactgaataatctgttaagagtatctctacaactattatttctcagctaatactgaattttttaccaagagcaataatattgttaaagactagaaataacccctccatagctcatttaataaggtaattctctttatttatgaaaaagaaagacctaggtttttttgtttgtttgtttgtttgtttttgttttgagatggagtctcgctctgtcacccaggctggagtgcagtggcgtgatctcggctcactgcaagctccg

SEQ ID NO: 69210 - DNA, 1050 bp, Homo sapiens
taaatacatgtatgtatacgtatgcatatatgtgtgtcatcatgctccacattgccctaaacacttcagtaagtatagtctaaaacaataacattctctcatttaaccatggtataataattaaaatcaagaaatttagcattgatatattattattatttaattcacagtccatattcaaattgcatcaatttcccaataatgttcttcaaaactatttttttttcagttcagaatagcacattgcctgtgttgtcattttcttttttttttttttttttttggtttctttaaatacggaggagttcttaacatttttaaagatacaggttaacaattttgtagaatttccctgaatttgatttggtctgtatgattagatatagagtgtacatttttggcaggaataccacagaaatgatgtgtgtttcacagtgcatgtgatgtctatttatctcatgactagcagtgtcaactttggtcatttggtgaaagtggccttccagttttcatcacacatttcccttttcaattaagtaatttgtaggagacactgaggttatgtaaatattttgttccttatcagactttcaccccccaggtttagcatccggtcttatcctgttacatatccatatttgggtatgctttataatgtatgtaatatattggcaggtatataatttatgaatgaatatgcagacatacgtagaagtagtttgggtttgtgttcaattttttttaaccaatagtattatataataaaacatgtttggagacctaattgaatgagatggtcaggctgttttctagctctggattattgaaacattacaggttgtgttttgatgagcaacccccccctccccccgccccttgttcccagtggccacaggcttatttccaatataaacttgaatattattgcttttcaggaatatatgtattttcctttcttcttttcatattatgtagtgtcagatcagtatctgatcagtggaagaaggaagaggagaggcttttagaaatgtagccaactgtagtgatgaa

SEQ ID NO: 69211 - DNA, 1918 bp, Homo sapiens
ttctggagtcacgtcagcatcaaatgtggacacagttttgttaatttgggctgcaatatatatgtaaggattagggaaagacataggaggtaatatctacaaggacagagttgggattctgtagttcaaagaagtctattggagatttgttcaactcagatgtaggaaacaaaggaagataacaactgaatttgggggacaaagactcagccaagagaaaactatagttgtcctctctacaagacaataggcagcatcttaaattatgaaaaattttacacagatatttttctaaattatttttacaattttctgtatttttaaaatgatcatgtttttgactactaaagaacctatgggacttttggtgtatggttagtattttggaagtgtctagtcgaggtgctagaataaagggatataaaatttgcaaagctggacaaataaaagtcattggaggcaagtagagatgggaaaaaattcagaacagcagaatgaatcattctacttccatcatgctattactgaataatttaatttgcttgcattgaattctgtgcttcttcctgccctttaccccgaatcttcaggaaggagctcattgccaagttagatcaggcagaaaaggagaaggtggatgctgctgagctggttcgggaattcgaggctctgacggaggagaatcggacgttgaggttggcccagtctcaatgtgtggaacaactggagaaacttcgaatacagtatcagaagaggcagggctcgtcctaactttaaatttttcagtgtgagcatacgaggctgatgactgccctgtgctggccaaaagatttttattttaaatgaatagtgagtcagatctattgcttctctgtattacccacatgacaactgtctataatgagtttactgcttgccagcttctagcttgagagaagggatattttaaatgagatcattaacgtgaaactattactagtatatgtttttggagatcagaattcttttccaaagatatatgtttttttcttttttaggaagatatgatcatgctgtacaacagggtagaaaatgataaaaatagactattgactgacccagctaagaatcgtgggctgagcagagttaaaccatgggacaaacccataacatgttcaccatagtttcacgtatgtgtatttttaaatttcatgcctttaatatttcaaatatgctcaaatttaaactgtcagaaacttctgtgcatgtatttatatttgccagagtataaacttttatactctgatttttatccttcaatgattgattatactaagaataaatggtcacatatcctaaaagcttcttcatgaaattattagcagaaaccatgtttgtaaccaaagcacatttgccaatgctaactggctgttgtaataataaacagataaggctgcatttgcttcatgccatgtgacctcacagtaaacatctctgcctttgcctgtgtgtgttctgggggaggggggacatggaaaaatattgtttggacattacttgggtgagtgcccatgaaaacatcagtgaacttgtaactattgttttgttttggatttaaggagatgttttagatcagtaacagctaataggaatatgcgagtaaattcagaattgaaacaatttctccttgttctacctatcaccacattttctcaaattgaactctttgttatatgtccatttctattcatgtaacttctttttcattaaacatggatcaaaactgacagtttctagtttgctcctttcttaacctcctttgtgctagatgttgcgatgacctagccctagtcggaaactgattcttagctgtatttgcatgtgccaaaaaaaaagaagtgaagtcccctttctttctttttctctttctttctttctt

SEQ ID NO: 69212 - DNA, 2464 bp, Homo sapiens
gctggattgcactggtgcgttctcagctcactgcaacctccccctcccgggttcaagcaattctcctgtctcagcctcctgagtagctgggattacagacatataccaccatgcccagttagttttttgtatttttagtagagacggggtttctccatgttggtcaggctggtctcgaactcccgacctcaggtgatccgcctgcctcggcctcccaaagtgctgggattacaggtgtgagccactgtgcccagcccctcttatttttaaagaatgagaataatctgagctgggaatgcagctcacatcaaacatgaacatagaaagggaaatgcacaaagtgagagatgaaatcactcacaaagctgatagcatgaacttctagattccctgaatacccttccagttttaatttcctatgttttaattcactgggaatatattccttaatttctcataattacaaacaaatgctccctagaagaaaaatttatgcttaagagagtattcggttccagtgttaaaatcatatcctttcatttttctctgaaactttgaaaatgtctctgttcagtcctttgtgtgtacttctcaggcagtactgaagacagagagataaaaggggcggtgctgacacacgtagatgactggggctctgacaatgaccgtgagctgatgacctgagtcacacaaactggaaaacaaagtttttccctaaggagttggacttttaaaaactttttattggctgcttttggattaaggtgtttaggaccagcattatgagcagaaggactcagtgtgtatgaagaagaaaccaagtttttctacagcagaagaggaggaatttgcctttgcaaaatgttatactgttttatctgtcgctgaacgtgtctgggcagtggctgttctcccaggtctgagtcctgaaaagggaaagagaaagagattgtaggacacggtgaaatgatacacgaaacagcgtttccccagcttcttatttgcctgtacatttctcataaatggagtaaatgctgaacaagctgactttctcccatcattcctgtaaataaggatatgactcacagaccttgcaatctctaaaatgccatagctactacagtgatttgattatttaaaaatagctggggaaaaaaacagcaagaaattggtcctgggtaagttaggatgaattcttttctgtttgtttttgtttatcatttaaattgttattgtatctcaccctaagtattctgacaacatctagtttgccaaacaaatcttagggatttatgagttctggaaactaacaatatgaacgtgctggtcagatctcagatcccaggcaaataaacccaaaaaacaaaaaacaaaagacaacaagacacaaggttcaccatggagtcactgtgatctgcgggcaactatggatttggttatatgatctccttttctataaagtggagagagataagtgttgacatcacttaaatacgctgagccccacccccaaataacacaaatgctggtaacaacaataatttatattaagcctactgaacggcttttgttgatctttaactagcctatctagaaatgggaaacgagtgacctctattattactcaagtactaaaactccccaagtaggactgtttgtcaaaactaggagtgagtttgagattcaggattaaggttcaagtagggaatctccatttaccctgcatctcagtcttacactgtattatcagggtcttgggaggaaagagaagcacacttaagaaggcatgataaaaagagaaagtaatgaagggattattataaagttagaggaagagttaagggaaataagaagggttgatgaggtccttggggtggctgcttcagggaagtcttctctaggctttcaagggcaagcaaaggaccactgacattcctcacaaacttgcactttggtgagggagccgggccacagctgacctagggcttagcagaaaatctctctctccttctgtccttccatcctctcctggtggctgccactggccaagcccaactacaaacgacagaacaagggagcttggttgctggggtccatcatacagccagtctttcagggtgcagagcagggtgaatgggtgaagagtggatctgcaggggaacatggatagtgtcgggcacagaccactgacaaacgaaagagatggaaatgcttcagaaaagaaagcaggatggccaggtcggtggtttttttttttgtgtgtgtgtggagatggagtcttgctctgtcacccaggcttgaatgcaatggcgcagtgttggctcactgcaacctccgcctcctgggttcaagcaattctcctgcctcagcctctctagtagctgggattacaggcgtgcaccatcacgcccagctaattttttgtatttttttctagcagagacagggtttcaccatgttggcc

SEQ ID NO: 69213 - DNA, 4852 bp, Homo sapiens
gtgagccacctcacccggccaggcctgtgattttaatcatgggatcttgcctagtggtaaagccccattaaatgtctgaaaatctgaatcagaaggatcagcaactgttcttccctaggaatggatcaaaggtaggtcctatggatacggcttgtctgtccccaccaaaactcatgttgaaatttgatcacgaatatggtggtgttgagaggtggggtctagtgggaggtgtttgggccaggagcatggccttatgaataatgcagttttccaggtagtgagttcttgctttcatgagactgcattagttcttgtgggaatggattagttccctaaagtgtgagttattataaagcaaagttcctgttcctgtttgatcctctctcttctcacttgtctgcttcccctttgacctactctgccctgcaatgttatgacacagaagaatgccctcaccagaagccatggccatacttttgaacttctcaccctgcagaaccgtggactagatacacttctttcctttgtaaattacccagtctcatgtattctgttatagcaagacaaaatggactaagacagtagggttgccagggaaaagacaggcatccagttaaaattgaatttcagaaattagataaactttttttttcagtataagtatatcccaaatattgcatgggaggtacttaaagagttgttgttcatttgaaattcaattttaactgggcatcccgtatttttataaatatggtaattctaagggcacttccttctcactaaagatactagaattagaatttgaatatggtatagcattcctgaaaccttgttctttcaacaccaatttttgaaatgttaagtatttccaaacaaatgaacaaaaaaacaagctaaacactgtttcatagtcaaagaagttaaaaaaacagtggattaaaataaagttaaatagttctcacagctttaggatttctcctgggacttaatgctaacatgcattgtgacaacaatgatagtgtttttccttgctttatttgaaaaccatcacaacaaagaaacagcccaatattcttctgtttcagtgtgaccataggtttccattgaaatgcagtttaaattttaaaaagtcattttggtgtctattatgttaaagtaaaattttactattaccaaagtaaaattttactattacctcaatcttgctttaagactaaatttatatttataaagatgttttaaagctctctataaatgtttgcaaagtaatagcattgtatttaataagctattaaattgttcacttgatactggttttgctaagcttaatatgaagaatcaattaaaactaaattatcatctaagcagggacaatcctagattattcagagagaaaaatgaggataaaaacattagctctgtctgcttctcaaggttatttttggaaagaaatgaagtaatgttgtgaaaggctgtgcaaatattactgcaaggatacaaattaccctccctgtagagtggatgggattttcacaattttctccctttctggtcataggtattttatctaatttgttgtccagtctgtaattctaccctgttgtgtgcagtgggagtgaaagggaggtacatgaattaggattagaattgcttgtgaaggacagaaacctgccaaataacggtgccttaaacaaggtggaagtttccttttctctcatgcaaaagactgggatgtgtagtcctgggctgaaatagaggctcttctccatcaaatctccaaggcttcaaacttctttgccattattgagcaatgtttctcaatctcatggtccaagatggcggtatatatattccaggcaaccagagaaggaaggaacaaagaagtggctgaggcagtggggtggctggctgtcctggaagctggcacaagatgctttcagttacatgcttgaaatggttaattttatgtatcaagttgactgggccacaggatgcccagatatttggtcaaccagtattctgcatatgtctgtgagagtatttttggatgcggataacgattgaatcggcagactgaaaaaagcatattttccatcctaatgtgggtgggcctcatccaatctactaaagacctgaagagaacaaaaggttgaccctcctacaagtaagagagaactcctcctgcctgactgccttgaccctgagacatgggctcttttttgccttcagtctcaaactaaaatattggtctcttcctggatcttgagcctgccagcctttggattggaactacaccatggctcttctgggcctcctgcttgctggctgcagattttggtacctgtcagccttcataatctcatgagtcaattccttattgtatattgatatctatctatctatctatctatctatctatctatctatctatcattgataacctctctatctattggttctgtttctctggacaatgctgactaatacaatcctattgtctggaacttagtatgcaagaaagagagtgagtatatggggtgaaatgtataggagtggagctaaaagactttgctgcaggagaggagttcaagtcattgagggcagttatgagtcagcaataatgttggtgcagtattttatttcaggagtcaattaaaagtattgtcattttagcagtttatgtcttccatttatcaaattgagtatagtgccttcctctgtcctaccagatgaaagtttatgaaagatactaatcatttccaaattccttcatttttactatctatccagattattttaaatacagtatctctataaatagcactttgtccattgatatatgtttgtgtttacatgattgtgtgtgtgtgtgtgtgtgtgtgcacgtgcaaaacatggaaataggatatttggtctaccttaatccctggaatggaagtaatggtgattacttttgtatagcaagtaataaactcccaaatggttggcatttcctttttcttatactagacagagtcaaaggtgaaggatgataaagaaaagttttgacaatagtgccaaattaccttcctcagttcctagattggggattttcaatctaggggcagatgtcactataatataagaggtctagtccttgatttcagaagcagctatccaagctcttataagaactgatgataggaacttgtctctcttctcaagttctgtacaacaaccacttatccatagctcttgatggttactgctcagccatttcttgccagctgttctttccatgtgcagggagagcatgggagtatggagcctcagtttggtttgctattgtcaggacatcaaactaatcattaggtagaaagttgaataaacatttacttttgacttttaaatggttacttcagaaagttttacttagcggcaagaccaactacataatttgcggggcccagtgcagtgtgaaaatttggggtccatttttgcaaaaaatattaagaatctcaagatagtgacagagctttaaggccaattcaggctcctcctgcgtgcaggactctgtgtaactacacaggtagcacagctaggatgcagacgctgctcaatgttatacatttagtactttgatgtccctgaattccttacaaaactcttacttcctcccctccccacccaagtccccagctcttctgtttttttccaaaactttacttgtgtacaacactatgaaacatgacagggtctgatgagaaagtattaattggctttaacctagttttttttcatttttatttctgaatatcagcactcatagcccttttccctattttctgacttaccctaatacaactccatatcgtacaaagcttcatagtcctgtatatgcatgtggtgaacatttgtgtggctatttgcagctgatggattagtatccataagttgagaggattcttcaaaggtcctgagattgaatatgaaaaaatgacctgtaagaattaagtcatccacatgtagcacagatggacgaattaccaagggagatggcatatatctggatcacaaaagacttataaggcaaattaaaggcatgtattctcatcaaagtaacctctgattgctttatttcctggaatactctattatcggtgtcagggttctccagagaaacaaaatcaataggatgtatataaatttcctgtatggaatatggtttggttatgtaggaagtgcagaaggatgagtgagtggaattacatgtgaggaattggctcccatgattatgaaagtgggcaagttcaaagatctggaggtgagtcagcaagcttggctagagacccagttggcaggctcaagactgaggaggagctgatgtcccagtttgaaggtagccaggcagcaagaattctctcttacttaggggacagtagtctttttgttttattcaggccttcaaatgattggatgaggcctgcgcacactggaaaggccaatctgttttatttggtctgcctgtttaaatgccagtctcactcaacaacactcccaagaaacacccacaataatgtttgaccgaatacctggagaccccatggcccagtcaagttgacacatgaaattaaggtaccacagatatcctattgtcacaaactctgtatagcacttaaaattcctggtttcatgcttggtacagaaagttagctactgttcatcatttgtttaattctacacgtggccataacttaagattaattataacaaagtttaattagaacgaaagatgtaattagatgtaaattcttgcatcaagtggttgctttgtgctaggcacaggttaggactgcaaagatgactacaaatg

SEQ ID NO: 69214 - DNA, 1966 bp, Homo sapiens
ataaataaataataaaataaaaaagaaatcgctttctgacatgtctattttcctgaatgagctgggagctcctcaatgacaatagctatttcttgtttaaagtcgtatccccagaaactataagcttagtagatatttgctatgtgaaagaaggaatgaaagaatgaatgaggacttgattcctgtactcccaacaacatttaagacactgtgctgagtattcagtaaggaggcatcaggaagggtgaggtagaggtggtagtgaaaccaaaaaattgaacactgttcctggcttcagagaacatgtagtctattaacaattgtgaataatggtgtaatacaagacacatgacataatacagtactacaacacaagacaagagaataggattgccatatttagcaaataaaaatacaggatgcccagttaaatttgaatttcaggtaagcaacaaatagtatgtatatatctcatggactatttgggagatactaatactaaaaattattcattgcttattaaaattcaaatttgattggatagcctatattttagcaaccctcagtgagaagaactggagctgtaagagattgcttttgtttttgttttttcattttttcagggatggaatggaggtcttggagaaaggtaaatgatttgggaaatgttttccggaaaagataggaacagagttgagttgcaaagatcacaagacaaaatgtgagggggtgcagttctggtagaagaaacctcagatgaaaaggtgatactgtggcaggatcagagactggctgacatctggtttggccagagtgtgaaagggtggtgagaaacccaactacagggttgggcagggcctggtgactccatatgttccaaagcctcagtctcctgggcaccctgcccccttcgccttggccacgttttgtgaacaagcagaactagatcttgctgcctgggcaaatgtttcatccttacctagttaattaggcttgaacattagtttctctctggaaatagtgaagaagaaacaccaggagcattttgcaagggtcatacattgctcaatgtttgcattttttcaaaaacactggtgtcaaaacagcatgtccagcaaagttgagggaaaagtgaaaactaatgatgacttatcaaaacaagatgtgatggtgtgggaaatgctactaacttctacagcatttgtaattttcgtctttctcttctgttataacatatgtttagcattatatagtaaatatagaataaaacagatacaaatagcttatttgtaatctaagaagagggggaaatgtttagataataaagttgggcacctactgtgttccaggtggcaacatatgttatttctcttaatcttcataacaatactataatactatggtatatattatgatgattttaatgtgcatcttgctgaatttcacaatgtttatttgctcatctatgatcactcaactagcaattggttattttgaaattcaaatctggtttgacttcaacatctatattgtttccatttaccacacctatagataggtactcacagataaacaataattatggtgcagttatggcagatacactgtgggaacagacaagagggagcatttaattctgtcttgaggacatcaagggtggctttggaaggagatgatgcttgagtggtgattgatgacaatgatctcattttctaataagtttaataacaggcaatgcatgaaacatattcacaagtaagataaatattaatagttttaaaaacacatgtatttcatcctaataagctctcattaggtttctgtaaccttttattaaatgttccacactgatcacattgatgacaaacacaaattctttttttttttttttttttttgagatggagttttgctcttgttgcccagactggagtgcaatggcaccatcttggctcaccgcaacctcc

SEQ ID NO: 69215 - DNA, 3597 bp, Homo sapiens
tggtcttgaactcttgaggtgaagcaatccgcccacctcagcctcccaaagtgctgagattacagacgtgagccatcgcgcctagccttgcaagttgttttttgttgaacagaagaagctattcaaaaatgtccaggactctgttatttattcagcaagcttacaaagccatctttgattgactgattctttgacaatgactatctggatgacacaggaaggatgcaattctggccttggagagaaaacttgcaaggaaaggaacatgtttgaatttcagatgtgttcctcaatgaatcacgtaagtttgctgtttatattcattaaagaatacgttttaaatgaggataaaattacaactttcatacaatataaaataaatgtgtcggatttaactcaggaattaataaggtgataaatagatgttgcaaggagttcaaaagagaaccacacatttatggttaaataaggaatgtgaaatgaatttacaaacaaatgcaaaactggcaaaactggtcaatatccacacaaacccagtttgcattttcatggacagagattatttgcattccaatcaattttctccaaggtaacttctgtgtctaaagagttgtgaaatagcccaatcagaggcaaacaaaggcacagataacccagacggatgagctagacaaagcatttcaccttttttctctacgtattctttctttaccagggtgattttggtgcatctgacaccttttcaatgattaataaatcaagatccagaaattagtgaataaaattaagtattggggactgtagggggaaaacatttctctctactctgcatatcttttagctggggcagaccgccgcaacaaaagactgattaacgagggaaaaaaggacgtttcataacgtgtatcttctgtatacctgggagaaacttagagaaatgagcaaatctcaaagacatggctttgaattcaggcttaaatcctatcttccactgaaacaaagacagaagggtgaggggaaggccagttatggtgagacgcccaggaaaacacagtaagcaaaggtcaagtttgttatgcagatctaagttggtgccttctccactgagtctctaatgatttagtcatccttctcatcctggtacagagaggaagacacttacaaatggagatttcctttacagatatacatttttcttacaaaagggtaacttttactctgttttcagagcttctcctgtgtctgcaatttctcaaaatacctcaaaataatccttatgccaaacaggcatattttcatctcctacaggtcaaagatattcacattcaagagtttgggaatgaaattcattttggataataatataaaaatcaaggtttcttttgagggcatggcgttaactaattacaatttgacacaaaaatggaactgtcattctattttctgtacatggtccatgaaatacaacatgagaatttggaatgatttgggtcagttatccaactaccagcaatctccttgtaactcacagatccccctctataataatcacaatgataataacagcaataataataaaaactgtgacacctgagtcttattgatcccttaacaggtgccagacgccgtgctaggtgttttagctataatttcttaaattgaatttccataatagcatatacagtggatgtaattatgctaatttgtgaaatagcagttcatgccttccttcctctcagcccctcttttcaataaagtaaaaaaaatttaagcaaacaagtttcattgaatgatctcgattatagtatttcaaaagcgtggttcagggaactaaacagccatccttctttggctatggtttcctcaacaacttggcttctttcccctcagtttgagaagttatatataactttatgtaatcactgatgtttaatttctgtgaaatgctttaaaaagctcacaagatataaaactctcatttattcccctttttataagtggaaagacttgaagaggacttgagtcctttgcttttacagagttagggtctagagctgttgacttctagccattcagagagaaaacatctgaaagagttatgcagtgaaatcacaaagcaaacattgtttggggaactaagatagtatctagactacacacactgaaaagcgaatttatgtccacacttattttcttctttgcactcctctctctcctttcttcttcgtctctgttctctttatccacttcatatgctgcaagagacatttagtacctgactacacaaaaagaaatgtgctgagtttgactttcttttttgcatacactagggaactaattttagcgtatgttgcattcttttataaatgacttttttttggctgtcttagagttctaaactctcgctatcgtgctgtgcatttttatttccctgctttgcactgtggcagaaagaaagcaaaaagccatcactacactaggggcgccctctaaataaagacggctttccccaggtctgactgtgactttcccccaccccactaatggaaagggttagaaaaaggaagtagcatgagtcactgctattgccacaccctcaggaaaacccctgctccatcttcctcttgtgctacgatgactctttctagccaaggtcctgggtcacaggagcaaagttttcaaaacatactcatgagtttctggaggaatgcagtgtcgaactgattgacaacaacaagaatcaaaacaaggttagataccaaaaaataaaaataaaaaattatttgactgaaaaatagaagaatgggtctgatccaaacattcatttatgagctggttgtttgaaagtgaaaacgtagtttccattttttacatatacatcctcgatgattgttaggactgctagactatccactcaaggctatcctacacccaaatggctgaggtgcgtgtaatattgtttctgtggggaaggttcagttggctttcctgtttggttaccagggacatattttcccatccttcaccacggttctaacagctggtggggtgatgttcctttagccatttggctgggcaatgagaataggacttctggagacaaaaatacttgccacagagataaatctgggaaggaagaggggaaaaccctgatttctgttgtggaggagagaaggtaattttgatatggacagaagacagggaaatattgggtagaagagggtggttccccagcaaagtcccaaccctcaagccttgagacccgtggccgtaagtgggaacaggcattatgtgccccaaaagttgccttttggctcgccatgcccctccatcctgtacccatataaaccctgaaccccaggctccagaagcagatgagcagatgaggagacaagcagacaaacagcgcagcagagaaagagagaagagaaggaacatctgaacgctgagaggagctcagctgggggtggttggaggggagtttgactgctggatggccaaactccaggggaagatcatcttcccactccatcctcctcccagctccccatccatcctgctgagagccacctccatcactcagtaaaaccccacatt

SEQ ID NO: 69216 - DNA, 576 bp, Homo sapiens
tcacaagagaaatccattaaatgttagtccttctttgcctattgcagccacaattattttactaaccctgagacattcaagtgaggctgagtatgaatcacacaggaaaaatgctaagagctagtcctgttttgaggtaatttgatcagttatacataaagtgatgctgtgcaatggtactcacaaacatgggacaccccaaatcaatatgtttagtgaatatttaaaatacaattccaaaagtttaggagagaaggggcaagaagatacatagatgatagagaatgggagaaacctaggacttgttatcgattgcaggaattgtgatttctttctgttggaatgagccaagggaaggggaagaaaattcatggaacaggagattggaatttgggtgcagcctcctggcacgtgctcatcctgttcttccaatttctggaggctgtgcctacgtgccttttgcctgttgcatacctcgcatcagtcagctctctttgttttattatagaaaattgtgcaatcctttctggtttgtttttgttaggatttccttccctttatctctagcaggaaaat

SEQ ID NO: 69217 - DNA, 2740 bp, Homo sapiens
aggtccgtgtcatctccgcaggaaccctcgtggggttggcgtgcccagtcccctccgctgcgcgtgcatcccgctccgctgacagccagtgctttggttctccagaggtgttaaatggcttgggaacataatttcaaaacggacagttggataaacaccagaataagcaccagaagatgacagcggaaccaaggctcgagatgggccggctgacaccactgggcgctgaacctggctggaagcttcctggcagcgacagcgaaaagggaacacctgtcgtgggcgcccttgtttcactgtcagtaagaagtagagcaactgctagacgcgctccacaaaaccctggacgcacttcatacacacccccaccccagcaagctcaagtaccctgtgaacctggacgcccaccacccccagggcaggcagcgaggagctcttcaaggggtaaagcgacccctgtggggccagcgcccgtcctctctcctgctgttcgcgggcacccgggcacgcggcgactcggctgaattagggcgtcctgcagctcccgaggcgaggaggcgcttggcctttccgttccgccctcagaagggagaggagaggtggtcctcgagtgggagtcagttcaggatgcgggctgtgccacgcgcggaggtccggggaccccaccgccgcctcctcgaggcccgccccgccccttacgacccgtccctgcaaccccccgcgtgggcttccggccgcggcgacccctgccccgcgctattgcgcgcgctcgttcgctgacagaggcttcgagggcggcagggcggggcttcggcgccgggggcggggccttcagcgggcgggcggggttttggcgccgcgaggtggcggcagcagagcggcgcagaagggagggggcggctggccgcgcggaaggagtgagtcacctgaccgctgccctcgccgcccgccgggcgctctcgcttcagtcagtcgggccgcgccgcgcctcagctctggtgagtggctcggccgtcccgccggcccttctccgggagggttggcgcggtcagggccgcgggcctgtgaggggaggccggcggacaggtccagtgaaggcgcgggcgggccgggggcggctctttctgggctgggcggggcgcggggggcacgtatcggggcccgcggggggcgccggcggccgggatcctggaagtggccgcgacgccggaaggggcgtcccgtcggcggccgaaccccctgcactgccggagctgttgtttacccgcgcgcgccgtactttacccggggcgggcgggggctgggggccgcggggtccctgccccacccccctccctgccctcgggcgccagcccggcccctcgcccgcggcccgcccgggctgtgacacatcagcaccgccctcgcggctggggccccgtattgtcctccgccgcctcccaccgcatgcccagcctcgcgtctactcagcccggtggctgtcgcgcgtggaatcgcgtaagaaaagccgagtttgtggctggggagagaaggccaccgtgctgagctggatttagcgaagactggttttggggaccggagagcccaggactccctttgttggagttttgcccacgcgttgtaattaagcctcgcacaatatggtgagagtgggcgttgattctggagacaccagctttgtgctcgtgtaatgtaacacgagtgccgttgctttctcattcttacacggcagtttcatgtcattgagtagaattgtgcggaatgcttttatggagtgaggcttctgcgttaaacttgtgctgattccaggtaaagtgtagtagtaattgtgaaagaacgtgtatgaggaaaacgagctacaatgtcatgcttggaggaacaaagaatgttttgtaggatgctttgctttttggagaattgtgtaggggtagggactgttacccatggatgatgctatgggaatttgatcatgtatttgaacaccctttacatcagagggtctgcattgaatgcagttcagaaggataaagggtggaaatcccagatgtgttagtggcagagcacttgagcgcttcacatagtcaagcagagaaatgggaagaggtcggcttgcttcttcctggtctttgggtagtggtgcaagggctgggctgggcttgaaggcacttgccacttctgcctttggacatcttgaagaagcttagggaagaaaggctcccggtgagtcagcttggagtagggtgactttggcgtagtgattcttgtattgttgtttaacctatgtttctgtcaagtggtttactgttgttcggtatgttggttggttaacaaggtaggatgactctctaaaaagttgggttgctgagtcattcgccccagcttgagaggtaattagaaacagctggtgcaaatactctcatcacatgcctccactataaaaggccaaagagcgctctagagaggttgcttcagaaggctgaaggggacccagctggggttgttttgatacaggttatcagtgggtgaagtggaagagcactcttaggcagtggccaatagcactgaggcgggtttaaagacggagcctcgtgacctgctgtctgagaataaatttgcgctggagagagctaaaactggggaagaaatttgcagctaggggtaacccaataaaaaatattgtaacaaaaatatttactactcttactggacttagtttcctttttgtggtttctgttacgtg

SEQ ID NO: 69218 - DNA, 995 bp, Homo sapiens
gagtgttcaccagtgggtgtcccagcatcttgccctacccagattgacttaagttatcgaaggtctgaggttagactgtaagggctttaagagcaacagaagtataggtagtaggtattgagggtttagaggaaggccaaaaatagcaccctttccctggccagagttttgaaccatttgagaaataaaaagtaggtgaagtccatatcgctgatggaacccagcttggaaccatggctttctagctgtttagcccagtgaacctgctaaaagtgcattctggaattaggcagacttaatccatccaccggtcaccttggacgaccccaaaaggggcagagctcttagaggagcagaaaaatgtaaacagggagcaaattccacaagtaaggggtgggccgagccaagtagacttaatgacgctaaaaatttactcattagaatcagggactactacatcagggccaggacaaagtacaaagtggaagtacaaaggccagagggtgtttcttgccctggagatttaaactagggaagtcttagggaagagtgttcccctttcatgctccccagtttaagttctcttgaaacattggcccattgctcaaccagggctgtgactgatggcctggaggaggagagcatctgttccagagggcagacctcctctcacctttgaggccacttcccaacaccagcctttgcaggtgtgactggcttgggctgtcagtgaacatttggtctcagaaggctctggatccagcagtgtactagtaagtaaatgaattcaaaggctactctgtaccaaagactgaacatttttctcatccctaattctctcctacctcatcgtcccgtgtagcatgtagcatatcagatgttctgcattgagattagatcccaacataacattcccataagaaaatgcatgaaagtccaggaataaaatgctagcaacataatgatatccaaatttgaatggaagtttaactttt

SEQ ID NO: 69219 - DNA, 609 bp, Homo sapiens
ttttgttgaaggcaaagggttaaattaaagccatagctgctgagatagagggggaaaaagctagttagttctattttatcttcatctagttttctttaagctactttctccttatttctgtcttcctgcagcttcttttaggctaagaataaaaaactttgagccctgcactatatctccaactctgtggggtcttgccttttctcctacaataaagatgaagcccagattcgaaatctgaaaggagaataaatcttaactgtgaacatcatctttcaaaacagctgacctccatttgtttccctgaatatctcacctgggcaatctttttcttttagcactaagaaattgctgaaggaagaaatgttaaatctagtttttaattaacttcgccattgatttctacataactctgtatgagtcactgttctttagtgaaagggatgaaaatctccaaggttaatggttgttaccaggaatttttctggactgggttccagatactctacactttcttctctcctctgaactcattagcttactctcttcttcaccctaaaacacaaagatgcacacagaaacgtaggtacatttgtatgtgtcaaatgt

SEQ ID NO: 69220 - DNA, 738 bp, Homo sapiens
ttggagtttcttccttttcttggaggtcatttaacgtgggaatttgacactcagtcgtgcttaatttcactttcatatttttatcattgactttagtcgaattccttcagaaagctactgaaaccttggtccctttgccacctaaaaaaaaaaaaaaaaaaagaaactctactgccacatgggatgtttaaaattattaattacaccttttctgagagtccactcagtcaacgctccctccagctggagaagtgtgttctcattgaatgctcaactgcaagcgattgcgaacaaggtcaccatcttcaacagcatttcagtaagaaataaccaaaaccatagtaaatataaatgccgtgagaaatgacccttggcacatgctaacagatcattgctagtaagtaaacattggagagtaagcaacaacctgccaattcttatcttcctcgttggggaaaaggacaagtgactcactgtgttttatgtttttaaactttcaggtgtcttccttggcaaaaagaatataaaatcactaggatgatctttctctttgatggctttgtggctcagtgagggaacaagcatatacattatttaaatacaaatggattgataaatccacatatcgtgctagagctcagtgtgaggcaagcagctgtttgaaatcccaccctcctcttcccaatagttcatggtagaaaatccaagagactgcatacgaccaggtgtagccataat

SEQ ID NO: 69221 - DNA, 839 bp, Homo sapiens
cgctgttcaaatgaatcctgccaacatatttctcattaatcctgggaacatgacaggtgcatttattaatacagaggacttagtgttagaatgccatgtcctttctgacatactaagccatttttaatttgctcttatcatttaaagtctctccttttcaaagatattagataactctacagtgttaaacatcatggagtgatttgggggctcaagggagagcatcttatataaatgttttcctaattttcaaaggatccaggcaccacccaaaatggtaagattcatagactatctggaggagagggagaggggaagataattttgtttatttaattgattctctgtaacttttctcttggcaagtatagctcactaatggactttgcacagcacaatcattattagaaatgccactgtgacatttgattaatccagtctatttagatttcgaagacaaatcatatatttatcctaatataattaattactatttcctccttttggattttccaacgaacagtatttagagatatccttgacattttcatctttagcctatagacgcaccacgattcttcataggttaggtccattccagtgtgatgcaacagacattttttggtagaacgccaggaacatttatcaatcttgctagtgacttcatttaaattttaataagttatgcatttctttggtaatttctagtgctggaaattgacaacagggttttatggcttcctattttagtgtccctcattttgttcctcgtttatcctgatctcccaagagaaataacttcttaggcacggtcgaagaatctttgtacgaagtttctc

SEQ ID NO: 69222 - DNA, 868 bp, Homo sapiens
aagacttcaatagctccttctgggattcaattaaaaataaatgcccctcccctatgcctttcgcagccctcctttttaagttgtaaacctggccatgctaccacgtcaccaccttctcccttccatgacatttctgagaaggcattaactgctgacactggcccaggcttcagtggagaaaacactaaacctatcaactgttatttcttgttgggacttgcactgtttgttacgtatgttcaatttataatggagtttgtcagcttattttgtttgaacttgacacaatgggaaaagcccttacgggttaattattaatcttgaaatctgaaacagataatgaacaggtcttgagcaactgtgaaagagacccaacagcattagtcaaaatagggactgttcctagacgacagcagtctcaagccccaaggcacgacgttacccattatgtggtagggagtaagggattcatgcttggggaatgggcttcagagccagacagaatcggcggggattttgcctctgctgcttgaggcccaaatgacagtggaaagtcatttcacatcaccaagcctcggtttcctcactggtaaaatgggaataataagagtacatggaacaatctgttggaaatcacagtccgctgcctgagccacagaagtgatcaataaatggcagcctggaaaaaccaaaggtcggatctttccttacgtctgcatgttgattggtcatcataatctccagtctcctgagctgacagagcttggatgttgtccttgcccaaatctcatattgaaatgtcattcccagtgttggaggtggggcctggtgaaggtgactggatcacgggggaggatttctcatgaat

SEQ ID NO: 69223 - DNA, 2078 bp, Homo sapiens
gcatttgggctacaatcttgtcattaacaaccttgacatccttacatttgatttatttgtttttatttatttatttatttatctttttttttttttttttttttgagacagagtctcactctgttgcccaggctggagtgcagtggagtgatttcagctcactgcaacctctgcctcctgggttcaagcgattctgtgtctcagactcccaagtagctggaattacaggtgcccgccaacaagcccagctaatttgtgtatttttagtagagatgggatttcaccatgttggccaggctggtctcgaacacccgacctcacacaatctgcccacctcggcctcccaaagtgctggattataggtgtgagccaccatgcccggccttattattactaatattaccctttgtatcatgaatctcagtttctgggttcacaaagtcagagggctgagtgtgattcccaaagcctacacttactcatggagaacctcatgccctcttaaggacaaatgtggcaggcaagcaacatattttagggtttgtcatgaagctcctggaagttaattgtcactccgtctgagaaaggtgagtgaacaaggtatctaacgtgagccagctcaattgcacaagaggcaaataatatgcataatgcatgtgtgggagattcctaaatgtattcctggggccctttcacagaaccaaggaccccccctccacacccccaccacacgaagaggcaagttcaaactctggactgagataattaacggctggtggatattttacactgacctatttataatacctccctgaagtactaatgttggttcacaatcaaaagaaatacatactgaacagaatcttgctcgcagctgaaccacccaacttcccggtaaaacatgcatgacaggtgactcacaaggatgacacagttcctggcacaggcaccaagagttactaccggtgtggaggaggctcagccagcaagttgacaaacacttcaccacatcacctaaaacaccaaagttcaaccctatgctctcagatgcctggtttctgagaaagggaatttctcagaatgggaccacaacgctgacaacctgcccagctgacaatccttgctgtgggctggcagacgccaagataagtcatctctgacttttatttttctcagcctcaacaacttcacacaccttgcttaggctcaggcttatgattcagacttctcacccctcccaaagccctgtaccctgggagcctttgttctttttctggccacagatgaactcagcccattaaagaagagctgtaatcccttacacatataactttccattggcaaaaattagtcaggtcggctgggtctgaggtcagcagtctcctgcagaaacacccaccagacactgttcccccaccaccaaaaaaaaaaaaaaaaggtagcggctaatgaactgcccattaaccgtctggtagaaacacacacacagatactactgactcattccatttcaataaccaaaaacaatattcttggcctttggcatgaatatgggtttttgttttcttaaggatagtggccaccttggtctatttgctcccgtgcaaacttgttcatcttccgcttatgaaggtaaccttagacttgaggtctttgttcaacatcaccttctcaatgaaggtgtcctcctggccagtggccccaccccaccacctccacccctcatccctggcacatttcctttcttacttccctgatttatttttctctcctttattatttatttatttatttatttatttatttatttatttattgagaaagagtctcgccctgttgctcaggctggagtgcagtgatgtgatctcggctcactgcaacctccacatcccaggttcaagcaatgctcttgcctccgcctcctgagtagctgggactacaggcgcgtgccaccacactgggctaatttttgtatttttagtagagacagggttttgtcatgttggccaggctggtctcaaactgctggactcaagtgatctgcccgcctcggcttcccaaagtgctgggattcaggc

SEQ ID NO: 69224 - DNA, 510 bp, Homo sapiens
tttccccctgagtccccagaatccattatatcactcttatgcctttgcatcctcatagcctagtgcccacttataagtgagaacatacaatatttggttttccattcctgagttacttcacctagaataatggcctccagctccatccaagttgcgcaacagacatgatttcattcctttttgtggctgttccaaggcaaatatatgccacattttctttatctactcattggctaatgtgcacacaaagtgaagtttaatatccagataaaagtgatcacttgctcagcgctctcaaccactttgcttacatgacacatattaagggggactccttaaactatgttgggacatcatgtagtgggccctaaagtgaatcaaattaacatctgatatgatccaagcaaagatcttggtgtgggaccgaatcaacaagtcaaaggaatgtctttaatggggatgctgcctgtattcatctgttttgacgctgctgataaagacatatccaag

SEQ ID NO: 69225 - DNA, 969 bp, Homo sapiens
tagtagtagagcatgcttccacaggaagaggtttaatttataggaggctgtttattggtcctttaaaatgctattgatggccgggcacggtggctcccaaagtaatcccagcactttgggagcctgaggcaggcggatcacaaggtctggagttcgagaccagttcggtcaatatagtgaaaccccgtctctattaaaaatgcaaaaattagctgggtgtggtggcacgtgcctgtagtcccagctacttgggaggctgaggcaggagaatcacttgaacctggaggtgaggaggttgcagcgatctgagattgcgccactgcactccagcccgggctacaatgcgagactctgtctcaaaaaaaaaaaaaagttattgacattccttgatctttggaaacaacggcaaagggcaaatcaaacctaatattgaataagggagaaggagtgccaactggatgccaatgtcctttccatgcactgtcagggtgatagtgccagatgccaacgtcctttccatgcaccatcagggagacagtgccatttacacatttgggctgtgtactcgggagtactcgggagctttgagaacctgctgaggccgcagcagcacgtgacaccagagatgactggggtgggattcatggacttgaggctttacaccacttaggagtgccctcccctcagcatggacctctgaaccagcctgacctgacctgcaggctccaacacaccagcgggccctgccagaaccttggcaaggacaggatgcatgaattccagagccaggacagcccgtcaatagggccttattatttccccttcccagggccacaactgcacagaataatgatttttgacagtgaagccaaatgaatactacgggaagtgaccactagtactcaggagtacttatgagaaaaagaataagaacaaaaatgtttaagttacctctctattgtataatat

SEQ ID NO: 69226 - DNA, 3260 bp, Homo sapiens
gcagggagggacagggtattactggcatctagtgagtaggggctagggattctactgaacatcctacagtgtacaggacagcctccacagcaaagaactgtctggcccaaaatgtccatagtgcccacattcgatgccctgcattaggaagatataaatactcttaaatatcacagagttaaattccttacccctgttctagcagagatgatattcttgcggggggagcatcttcttggcttcaacacattcttttctccatgggagatgatgccagaagagggacagaacagggcccagtaaagcatggggcctggggccagggacccccttgttcaggtgtgacgaccatcctacgaaggcaccacccaggcatcattagaccgtctcaaaagaagagtaattcactgtcccaaagcagctctctcgtgtctgtgggcggatcccttggcaagtttacaatgaactgaaatctgccgaacttcctggaacccaaagaaactttagccttgggcaaaggccctttggccagcatttgcactgtttatgcaaccgtttagaatatacgaattatctggagactactaccaaatacaacaggcaaaactgcaaatatgtatacttcctagaggatgataaaaaaatgtgaattgtatttctctgatagaggatgcattagagtctgagggtctaaatagcgtaaataataaataagtaaataaatcgatagtagtgtactccaaacgaggctggaatagcttctattgttgtttcacactggacttcaattaagtctcagtattttgccatactcaatattaagtactaggctggacgtggtggctcatgtctgtaatcccagcactttgggaggccgaggtgggtagatggctggcttgagctcaggagtttgaaaccagcctgggcaacatggtaaaaccccatctgtacccaaaatacaaaaatcagccaggtgtggtggcacatgcctgtggtcccaggtacttgggaggctgaggcaggaggatggcttgaacccaggaggtggaggctgcagtgagctatgatggcgccactgcactccagcctgggtgacagagcgagaccctgtctcaaaaatcaaacaaacaaccccctcgccccggacaaaagtagtttgcactattttctcatttcacaatatgtttttgaaatatttcccttgaaaggtaagtcatatttatcattcctgttgtatggaggcatcataaattatttcaccattctaccctccttgagtgttgtggcctttaggccagacaaaaacgcaggtgatgcctagaagccaactagttgccgtttggttatctgtagggttgtggccttgccaaacaggaaaaatataaaaagaataccgaattctgccaaccaaataagaaactctatactaaggactaagaaaattgcaggggaagaaaaggtaagtcccgggattgaggtgtagcgactttctataccctcagaaaactaaaaaacaagacaaaaaaatgaaaactacaaaagcatccatcttggggcgtcccaattgctgagtaacaaatgagacgctgtggccaaactcagtcataactaatgacatttctagacaaagtgacttcagattttcaaagcgtaccctgtttacatcattttgccaatttcgcgtactgcaaccggcgggccacgcccccgtgaaaagaaggttgttttctccacatttcggggttctggacgtttcccggctgcggggcggggggagtctccggcgcacgcggccccttggccccgcccccagtcattcccggccactcgcgacccgaggctgccgcagggggcgggctgagcgcgtgcgaggcgattggtttggggccagagtgggcgaggcgcggaggtctggcctataaagtagtcgcggagacggggtgctggtttgcgtcgtagtctcctgcagcgtctggggtttccgttgcagtcctcggaaccaggacctcggcgtggcctagcgagttatggcgacgaaggccgtgtgcgtgctgaagggcgacggcccagtgcagggcatcatcaatttcgagcagaaggcaagggctgggacggaggcttgtttgcgaggccgctcccacccgctcgtccccccgcgcacctttgctaggagcgggtcgcccgccaggcctcggggccgccctggtccagcgcccggtcccggcccgtgccgcccggtcggtgccttcgcccccagcggtgcggtgcccaagtgctgagtcaccgggcgggcccgggcgcggggcgtgggaccgaggccgccgcggggctgggcctgcgcgtggcgggagcgcggggagggattgccgcgggccggggaggggcgggggcgggcgtgctgccctctgtggtccttgggccgccgccgcgggtctgtcgtggtgcctggagcggctgtgctcgtcccttgcttggccgtgttctcgttcctgagggtcccgcggacaccgagtggcgcagtgccaggcccagcccggggatggcgactgcgcctgggcccgcctggtgtcttcgcatccctctccgctttccggcttcagcgctctaggtcagggagtcttcgcttttgtacagctctaaggctaggaatggtttttatatttttaaaaggctttggaaaacaaaaatacgcaacagagaccgtttgtgtgacactttgcagggaagtttgctggcctctgttctaggtcatgattgggctgcaagggcagagaaggtagccttgaacagaggtccttttcctcctcctaagctccgggagccagaggtttaactgacccttttggggatttttgagggcagtgatcttaactttgggtgcacagttagcttatttgaagatcttactaaaaatacaccagagcccaacctccgaccaattacatcaaaacctgtcctagtgcagggtgagtattgctgttttttgaaagtttccaaaagtgattttgatgtgcacctacgattgagaactgtcgtttgaggacagtgggtggagtttcgtatttggaaattagaagacctggagtttccattacaccgaattggcacttaataactgttgtcggagcatttcttaagccacattttcgtaaagtggctttaaaattgctctgccagtaggcaggttgctaagatggtcagagacaaacttctgaacgactcttgtaaaatatacagaaatattttcagaacttttatca

SEQ ID NO: 69227 - DNA, 680 bp, Homo sapiens
gcagtgagccgagatggtgccactacactccagcctgggatacagaccgagactccgtctccaaaaacaaaaaacaaacaaacaaaaaaaccacaaaacagaagaacaacatacataccaaaaatttcaatgtagcagagaaaaaacctgcaaaaatgagcaccaggacaaagtagaatcccagaaattagagacatctggcatagccaaatgctacaagaggttaatcaggatgcaaaacaaatcttgtttatttagtttggcaattaggtgaatgcaagtgacatcagtttttgaaagtgattccaaattccaactggttaaggaatgagtggcaggcaaggaaacagaaatgcatttttggctcatttttcattaattcaacaaatatctgagagcttagtaagtggcaagctgagtgtttcgtatataaaaaggagacaggaccatgtttcaaagcttttttataaatgaccacccttacttatatcttatttgttagcattataaagtttccatcacatcactttctttctttttttaaactcctgagttcaagtgatcctcccatctcagcttccccagcagctggaactataggcatgtgccaccccaccagagaagtttcttttgggatgacttttattctcctttaccaacatttttcttaaaatttcaag

SEQ ID NO: 69228 - DNA, 2849 bp, Homo sapiens
gtaaacctacaaaatctgtgagatgcagcacgtttttaacgccacatccacacatctcgaactacaacatttgatttttcaatgttgctttatctttggtatttggaaagggaagacaatacaactcaacccatgacaatagttcccattctgtaactgcattttaaatcatcaatggtcaagtctcctcctcccaaatcgattctgacaaataggatgtatggactctacactccaaaagcaacacctggaatgatcagagaaacaactagagaactttaaggccgcaggcagctttgttcccagtttggagaggttttcacatgtaaatgtcctcgtagaagggagccgaggattaactacctcgggagggggtgcgagggtagggaactggaggacaacgccagctttctagcggactaaggcggagcgaatactcttctctcccattcaactttttaggcgtcacgttggggccatagagcctataagagggttatgttcacgactttaaattataacgagccaccccctctccgtttattagccctatttcccaagtgcgtgaatcccggagaagggggatgaacaccctcttcaactcctcccagacccgggatcagagtccagccgtcgacgcgccgcggcctgagcaacaggagagctgaagccacctctccgccagccccacgaccggcagatgctcccgctcccccgcccccaaccccacacgcccgcccgcgcttctttcttagccctttgcgggctcccggcactgcgaacccgacaacggggctcgcggagcagagagcgagggcgcccagacccgaaaaagggccaagttagaggaacaggcacagacttgggctatgggaggccgcaagggggcgaggggagaagcccgaggtcgcggtccgggggtgggcagtggggggaggggtgcggggtcagttcccgtggtcgccgcgacctctcccgggccacaggccccgctccgcgcaggccccgccgccccggaaccggggcaggaagcgtccccacccggaccaaagctttaaacctccggcggcgggagaaacgagccccggctcccgcagcaggcccggcacccccctgccccaaacaccccttacctcctggttgaaggcgttgacggcgtccatgttcgcgctgcggcggcggctgctccgggcccgccggtcacatagacctcgcgccgcggcggagcggggctgggaaaccagccgggcctggtggccggggggaggcgacgagcggcggagtccgaggcccgggcaggaagaggctgcgcccgaagcggcgaggcgggcggccgaggcagaggcggagaggtggcgggccccctctcagtcccgttcgcaggatgaggaaaaggaggcggcggcagcgctggtcttcaacatgtccgtttggtggtggcggctgcgctctgcgtctcgctgacacggccccccgcgccctcacgcactggctcacactggcccggccggcgagcgggcgggcctctctctccctctctccagcgggatggcggcagcggcccgagtccacgccgcgcggggcaccctgggacggctcaggcctcccggcgcttcctgtgcccggcgttcgccccgccccgtcgcgctggccccgccccctccccgcctcgtcccgccctgcgccgccctgcaccgccccgcgtgcagggctgctggcgcgtgacgccgggacgctgggcgctttcccgccggcggcggcggcggccgcggccgcgggccggggagacggccttgcagagcgcgggatcccagggctgcgagggtgacccagagcaagccctggcgcacgcgcgctccgctcgacgcggtgctcccggggtgcgtctctgcgaaacgctcggccctaaccggccctgcacccggcgggggcggcgggcactgagccgctggctctcggctgccgcgaacaaagggcgcaggatttaacctcggctctctgggcgtgcctttgcaggccctcgtgcgctctgctggggaaaagaaaaaaagcttctgccaatgccagtgcagctgtgtgtccgctgtagttgtgcaggttaattctgcgcgagcgaaaacaccgagaaagacgttcaggcactggatatccacgcaggccttaaggaacccctgtgcagccttgtgccacgagaggagtggattcactaactttcacgctgattcctcaaaccaagttgtttcatttttggccaaaactctttatgttgatcactttccttgagtacctactgtctgcctagtgttggagacatggaaataaacgataattgttttgcctgaaaacagcacagtttagtggagaggacagacaactgagcagatacttaccaaagcatgcttagtgttagggcacaggccctgggaaacgagaaagatgcgcctccgacaggaagtccaggctacatctggagggaggagaggcctgcagagcctgatgaggactgccaccatcacctcccccgaaggaggaccagctggagctgaggagcaaggtggactgagagaggagagtgagaccataaagaggctttgctcttccagagtttggattttgcccccataaggcagaggggagcccttgaaaggggaaggtggagtgatggatgcagtgttctctcagaaggatggtgcaaagtagtaagaggagacagggaaagaatgaccccagccccctgggaaaatgagggctgaaggtggtggcgatagagaaggaagaacagatgtttaggaagtggagtggaagggctgaggcagagtaactgtgaggttaataaagggggtgtcaag

SEQ ID NO: 69229 - DNA, 1139 bp, Homo sapiens
cctcaagtgatccaccctccttgggctcccaaagtgctgggattacaggcatgagccactgctcccagcctctggctgctttttgatttttatctcctactgagtccctttgacacagtctagtttaatcctcgttcattctccccatcccctgttcctcgcagcataatccatcctaattgcctagaaatgaactctaatgagtccacaaactctccaggcccaccctcctagctccttccagccccactgaaatgccacgttagttcttcctggagcctgccctcctctgcccagctggaggtagtttctccccgctctttgttctgtctccatgtcacctctcttactccatgcaacatcttgagcacaagcaagcgtgtggtagctgcctcccaggttgcaggattatttaggctagaaccaggtcttagttactgaaacacacacacacacacacacacacacacacacaaactctactgtgctcgtcatgatttttcacgaatagtgggtactttgacagactcggtagaatgcaggtctccatgtggaagctctggctacaattctgaggttttgtcatggtccaaaggtctcctcttcgagtctggctctcttaacaacagcactctactacagagccctgcgcgtgcagtgatacctgagttaatcagtactctggaagtaagcctttatccagagtcagccttgggtttatcgtgtttattgtttaactttctgatggactggacacggagtggttgggaagaatttcccagggtagtttcagtatggatcagatgcctgtagcccttgagtactgcattcgtttcctggggctgccatgacaaagtgtccacagaccttagaacaacggaaactgtctcacggtaacccagaaggagctggaagttcaaaatcaagttgcaccctctgagggctttggggaagggtctcttccaggcccctctcccagcttctggcacttccgtggctactggcagcacgactccagccttcccatggcattctctgtgtgtctctgtgtccaaatttctcctttttataaggacgccagtcatattggattagggtacacacaaataatgtcgtcttaattaattacatctgcaatg

SEQ ID NO: 69230 - DNA, 1008 bp, Homo sapiens
gctatttttgtatttttactagagacagggtttcgccacgttggccaggctggtctcgaactcctgacctcaggtgatccacccgcctcggcctcccaaagtggtgggattacaggtatgagccactgcacccagccgtgtgctgttttaaaataaagcaaacaagcaagatctatgttctatgcagtggttcaataaaataagttattctttccagctcattttcttggtttctctgttcgtgtttttgagtagtcttactgcacagataaaagaactgaggccctgcagggggcagtgatctactcagggtcacctggccctttactggcagcgatagtaacacaaagtaggtgacctgactctgcgcccagggctctccccacactgcaacctgcctgcaggccttcctggggtgagacttgatgttgcaatttactggactgccaaacatttccagcattctctcagccaagcgctggtttaaaaattaatgactgcttaatgggcatttctatttctgagagttgagctgtgctttttcttttctcctctggtagaaatctgacatccaggacagcctctgctacaagacccggctctaccagatagaaaagtacagggcccccaaggagtcctatgaggtgagtgacccctgaagcaaacctcagggtctcttaggaagggtggatttccatttgcagtaattggaaaagaaaccaattactgtgggacactgaagtagcaaaagacacatacttacgctcataactgagcccttgagaaatggtttacagcggaaccagctttgcggtgtctaaaccatggttctcagctgtggctgcatgttaaagtcacggggagcgtttaaacatctggatgcccaggccgcacctgggacccattccattgaatcttgggaggtgagactcgggtatcaggagtttttaaagctccctggatgttccaatgagcagccaaagttgaaaaccactgtcaggatctccc

SEQ ID NO: 69231 - DNA, 1418 bp, Homo sapiens
cggcctctcctccgcagccgccgcctcctcctccagctgcgccctctccatgtcggccaccgacgcgtcttcgctcatggagctccacatgctcgcccacttctgcaacagctggtggcggctcgagtcttcggagagtctcttgcccaacagcgaggagtcgctgcatttgcccttgtcgccgcactcacagccgccagcgcatcctctgctacacctcagtgaccgaacgcctgccattacctacaaatcgcccgcgccccagagcgccatgggaaaaaaaaccgccgctgctcatgcgcggggcggggagcggtggcggaggccgagaaggggcaaaagcctgaagggggcgggacggcgggcggcctctagtgcgcatgcgcgccgtgcggccttggccaagcgtgatagtcactgcgcctgcgtcaggttttccagcctgaagaaattgatgatgcagacctgtttgcttgtcttcctaaggattattcacccctttccgtgggaggggcagcgtcactgagaaagttacgggttgcaagcttgagtgtctaagaaccgcctggcgagcttcttaagcagatcgccaggttccatcttcgcagactctggttcagcaggtagcaggttagcccgagaatctgcatttctaacaagctcctaggcgtgcccacgctgtcagtattggcagcccaaccttttttggggggtgggggggggagtttttctatgttgccggtctcgaactcctagccttaagcgatcttccctactcggcctcccaaaatgccaggatcgcaagcgtaagccactgtgccagaccaccaccctttttcttcttttttgtaagtggactaattatagttgtatataagcagctccacttttgatgaccactgctctattttgtcggctcctggggacctcctttccatgaagtggagaaggaaggggatagaggagtccctcatcacagggtccttttgcgcactgctatccctggaatgagaccctgggaagggccccggatcactcaggctgtcactgcaaggaaaaagttgaggaagcagcagtgcccctggaaagcctggaagtgtccctgctgcttggatcaaggaacaattcgtccttgcaaggaagaagcatcccttgttgatgataaggacagatttcctcagctgccccagaaagccagcctctgcctaaaacaccgtaggtcaggagggaaagctggcggggaaccagccagctgcaccacagacagtctggtggtatacctgggaagaaagctacctgcaaggacctactctgttcctactacgctctgggtgtcccccaagtcactgcctattttgcttggttgcataaactatttatgtaaatgtacttccaattttagtgcttacagccactag

SEQ ID NO: 69232 - DNA, 589 bp, Homo sapiens
gccaagagctgagtggactctatttcccaagagcttggaccacatggggttgtgtcagagataaacagccttttgagtctgaacaaatgcagccggctggttggttcttggggggcttagatataagtggagaggtgcactctgttggggcagggggctctcttttggttttaattaactggctatgagtacatgacagaggtttacaagttcacggctggcatcactcgatttctgccctcagatattgaatctaagccagcagtttggtggttgctcaatagcatccagaattgcttaaatgtaagtcaagggcactgtcgggcttacattttggttcttttaacttttcaagtatttaagacaaaaagcgattgtctttccagccctattgggcatcttctaaggggccctgggcgactatttcccgcccagctccctgtcctcacacagagagggatcctagggctgccctggaaagccgttctcctgcctctctgctctgtgtgctttggagttttatcaagaaggggcagatgggaagctctgctggatgctggcgttgtgagacacacccccctgacctttc

SEQ ID NO: 69233 - DNA, 575 bp, Homo sapiens
ccagcctaggtgacagagcaagactctgtctcaggaaaaaaaaaaaaaaagaaagaaagaaaccctaagccctaaaaagacagtatttggagatatagtcttttaggagataactcaggttaagtgagttcatgagggtgaggtcctgatctaacaggactggtgtccttagaggagaaggagacatcagagagctccctctctgcatgtggatagaggaaaggccatgtgaggacacagcaagagggcagttgtctgcaagccaggacgtgcccttaccaggatgtgactatgccaatgccttgatcgcggacgtggccttcagaactgtgaggaaataaattcctcttgtttaagccacccagtctatggtattttgttatggctgccctagtagattaatccacaaggacattatgaacacacttagaaaccatgaaggcaataaggaatgagacaaactgagtgccaatgtgactcccaggtttgactactgagtctggcaatgactcgtctggatccccatagagcttttgttccctcaactgtagaatgggtataacaagaaaaaccat

SEQ ID NO: 69234 - DNA, 1845 bp, Homo sapiens
tactttccaaacgattacaagtagtcgcgaagggtggtcacactttacaaaaagtgtaattaaattatagagtcggctacatctcagtcactggcccattcctggtcaactgacaagtagctgtggtggcttctagtagcttgttacaagtcatcaagtcagtatgagtgttgggggatggaagctattgaaaacggtgctgacggcccaaggagtagcaaactgtctcatgaaccgtcctgagccgactcagtaaggactcaatagagaaggacacttcatttacttccctgacaactgcaataaagaggttttagagctcgctgagggatgctgcctgggcaagggaaataaatgtgttgtaacatgaaacggtcccaatcaagcaagtcggggccctctcgctgtcgccgacagtccagagcaaggaagtacacagcagtcctgaacctcagttttctgcaaaccagaggcttgccactgagcctatgtgacccgaaagctgcagaaaggagaggctgtgcccggcacacggaggccgcctcgccagcctgtgctcccgaccctgcgcctgccgccccggactcacctggcccggggccctgcgggtccttcagctgagccttgaaccgcacgcccgtgagctcttctttgcgggcgcgcttggctgcacccgcggaggaagccgcgccgtcctggccgcccgaggccttcctcttggggacccccatggccgagagggcggaagcgcgacggaaacgacacacctgaggggacccggcaggagcactggcacagacagcagacacgcgcttcaggcccacatggcgcaggaagaggcggggctggcggaagaggcggggctggcggaagaggcggggctcggggaaaggccggcggaaggggccgacccgcgcgaggctgggaccggcggaaggggcgtggcctgcagaaggggcggggcgatagggatccagagtcttggggatccagagtcttggggctccatgtgagtttgctgtaccggttgtcccggtcacggcatggggcgagcggacactccacgacaccccccgcccccggctgcagggtttggggtccaccggggcgcatttctgatcccagtggctcttcgggtgctcttggccggaagaactcccagacctttcactcctggcctggccgatccacgaagactcgggccccggcgcgtccaagcagcacaatgagtagttcttgacccgaggtcgccctgaaggtgtcgcatgaagagcttgcttcacacacaacaggattcgatactttgccaattcaaggccctggtggctggccgggaaggtggattcgccttggctaggtgccaggcaggtccgcctgtgcgggtgcccctgacttcgacccctagcttatgtcacagcccgaaccagatcgactggtctggtagcagcctgtcactccagactgtcctccaccccagacttccgcaaactgatgggctctttgcgccgtgcagggtgggaggagaagaccaaacgaagtaacgtctgtaaaaccccttcctggacagcgtaaggcctccacatctaagttcctgtcattaaaatggagacagcaaagccgaccctatccagtccttgggactgttatgaacagaaaatgatgcaatgtatgaaaaactgctttgaggagaaaaacaacacagtgtgtttttggaagatgtgattgatttgtaaaccgcattaaatgctctgaaataaaatgaaagtaaaaataagtaaaaacaggctggtacatattttaatacgacttcatcgatacttaggtatgtgtccaaataaatcatga

SEQ ID NO: 69235 - DNA, 1204 bp, Homo sapiens
ggggacctcagccgcattttctttctgcaggcctccctgcacactctggggcgttcgcagctctggagcccgcggggcagtgcgtccggccccgccctgggcctcattatctacgtttccgcgtcacgcccgccgcgaacttggcaggccctcccgccgggttcgggaacactgtgtgcctagcgcccgccctcctcccttccgccggccccgcgcgatccatagggtttgggtcgctgggcgccaggtacccgcacccggcaagcagccacggagcccctcgcgcacttgtcctcgatacccttgagttggggctacgcaggccactcctaggccactggctgggcgtccgaacgtgggtcaccccgcgcacagtctagaggttcagaaagatgctgtggcccactttaaaacaaagcccaattattagcgctcggcggctgtttgcgccggtgcagtgtcagatcccccagcgctgcggacaaccagcacccaaaggaagccgagctggagctaaagatcccggctccggagccatctgaccggttttgagacctccagctcgtcgccgtcctggctgcgagagcttgggcacggcgccggggctcagtctcctcttctgtggaatggcgataactgtatgtgccgggtgactgcacgtggcgcgcggcgggtggcggggatggcagcggtgcgatcccacgcctccaggaccccaccttcctgcggcccccgatcggccccgccccgggggcgccccagctgcacgcgcggcgctggctccaaagtgcgtcacgggcaccggccgcgctccttctgccgccagggcgaggctggcacccggccagcgcgggcagggccacgggtgcccggctgtttcccgggtgtggaaggcgctcaaggtgcgcggcccggggcgcgctactgggggcgccctccgcggtgggcagcgcgccagggatcggcctgggcagccgcggggcgcgcgaaggctgcgctttccctacggcccccctcgcttcctccggcacggcggcaacggagatttcctctcggggaaactacgcggatccttttcggggatcctcgccccgccccagttctccgccccctcccctttgctggggcgcctgggctggcccgcgcaggggaggaggctctggcagcctgggcagggaggcggcggggggccgcggagccgctg

SEQ ID NO: 69236 - DNA, 1061 bp, Homo sapiens
tcgatctcctgacctcgtgatctgcctgcctcggcctcccaaagtgctgggattacaggcgtgagccattgcgcccagcctcgggcaagcctattaaaaacttcctagtgtgcctcctcatttgcacaaggatgtgtggtaaagggttaactcagcaggcttggggtgtccaaaccctgcacattcagagaaaggtctggccctgtccttcttcccagaggataccctttgagcccttggattatcttgcttgataagagtgtttacgtttacctgcggcctccagccatggccaagagttcatggagttcatgttaacagtgatttatgtggaccctagagccacactacatcaatttgacctctgggatagctggactgggtgactaggattagccagcggaatgattcaggcctatgtgaccggctcccaggagaagccctggaccctaaggctcgggggcttccctggcaggtggtgttatgtgcacactggcacagttgttgccgacagaattaagtgcactggtgtctccttcaggtcaggacggcgggcagctcacagctggcctctcctggactgtgtcccaagcacctttttcctttgcttattttaatctgtgtccttttgctataataaacagtaacgttctgtgaatccttctagtgaatcattgaccctgagggttgttgggggcgtcagacacaaaggggataaggacacctgccttgactgcctcagaggggtcacagggagctgagatccagctgtcacagtgaggccatgcaagtctgggggttcttatgacacagaattctagtgaggcaaacagtactttcagactgaataaaggaggggtgttattcacttccagcgtctgtcatctgccgaaagctacgtgccctctccacggaagatacaggggcaggatctcccatccacagcaggcacacagactcccaaaggccctgtgcacagagctctggattaggaacagattccccccccaccgccccccgccgccggggagagccccacactgccttttcctctcaggatg

SEQ ID NO: 69237 - DNA, 2079 bp, Homo sapiens
gttctgcggcaaagcgggtgccctggaacctgcgcggggtagggagacggcgccgcaacgcaacaggccgtttccagggcggggaaagatcaccaaggcttcctcaactgtaaggggccgtcccaaagccaggtggctcgctgctttacattgggcgactaaaaatagtaaattcagcttttaaaagcccacctagttctcatctcacccctcacacgtgattaattgcactaagtctgctgttcagcccggcctttcggctccctcctccctccccagcccatttccacttattcgcagcaccccaaatcctggctccgagaggcacctgggcccacctcccagcccggggtgtcagacaggccggatcttctccggttccttattcatctccggttaaccctagtgtcccgtttcaaccccggctgctgcaaatctcttcaataatcttcacaaacctgacccctcggcccaccctgcccctctttctccatcccacgccggtctctcgatctgtccgggatgggcccacccgcgagccgcacctgagcagaggcgctgcaccttgagccgcccattatagacccgggccacctgcaccgtgagctcctccagctcggtactcccaggcgcctgcagcaggaactggctctcgtcgccccgcttcacgtgcagcagaaccatggcggtcccgccgaggtactgaggcgttgagaaggccccggctgcgtggcccgcgggtcctgccggccgagggtcgccggatcgccagcagctgcgacgcactaacagccgctcacagtccggaatcccacgctccctagcccgcggtgagcgggggaaacggcactcgctcccggaagtggatgttgccaagagcaacagtgaagcagagttaaagagccgccagctcaagctcagaacccgagtgggggaggctggggtgcaccgaggcccagcaatccaagcccgtacggagctgcggccggggaaaccacccacacagtctgagaggacagctgattctgagcggaccgacggaaggagattcgcagagccccttcccggaagtgactgttgtcgcggcaactgccaaaacacagaccaagtcgctgaaggggagggcggacctcccaatcgactggtctggggcccgagatttccactcagggagatacgtgggctgagatgggagttactagatggggaacgggaaatacggcgggaaccacaatcgcgcagttccgcagctgccgccccacaaccgctccacattccagcgtcccttccgccgctttcagtctccacttccggcaacgtttccacgctgtttccggcctgggaaagttcggcggcagcgacccagaactgagtcttgctgttcgctgctgtttgcgcgggtcagcttttcaggacggaggggccagggcgagtgtccgcacttcttcgttcaggttgatttggatggcgttgctggggtagctccagcggcccctgccagagcgaccctcccagaaatatccagccatcctccagcggactcttgctgaaggcagtcggcgtcagtcgctgtttattccgggccccacagatccagagtcactgctctcatggagcttatattttagtgtgacaaaaagaaaacaaaaataaatggacaggccaggagcggtggctcacgcgtgtaatcccaacacttagggaggccgaggagggcggatcacctgaggtcaggagttcgaaagcagcctggccaacatggtgaaaccccttctctactaaaaatacaaaaattagccgaacgtagtggcgcgtgccagtaattccagctactagggagcctgaggtgggagaattgcttgaacccgggaggcggaggttgcagtgagcctagatcgcgccactaccctccagccttggcgacagagtgagactgtgtctcaaaaataataaataaacaaacggacaacacaaattcaaatacagatctaaagaaaactaaacaggttgatggacttcttatgtttgatggtcagggaatgtacaccttctgcgatattgggagtaatattatcgtct

SEQ ID NO: 69238 - DNA, 2180 bp, Homo sapiens
agccccagactcgaacatgagacattcttccttatgcctagtttccactatgaggctgaaaggtgggggatccaatttgtgatagatccggaatcctttactgaacgccattctcctttcttcggaggcagccctgcgaaaaccaagcaaagcaaagcaaatgaagctgatgtttccttctgcagcaaggactgcaaagcatccaaaagtccctccccgccaggttttgatggggggttggggtgggaaaaaacagacagctctgggagaaaatggctttttccaaaagataagtcgtcacttaattttaccaaaaagcaagaggaaaagctatcaattctcataccaaggcaagacaaggttttagcactgtaagtcaatcaacggtctggttgagtttcccgtttaatttatgcttactgaaaggaaaaattttgagcgtatttcgtccggagctgtttatcagcttcctgcttcaagatctgtcactacgttgaaagggaacctatttggaaacttcaagcagttccttcgaggtgaaaggagcggaggtgggagggaagggtgacaaggctggttcaaagctccttagggggcaggagaaggaaaaggattatcccacgcgacaggctctcccgggggtggcgatgaagggcaagggaaaaggcacaggttaccgccgcctctcctgccccgggctaccgccggctggggggacggcaggcggggccgataaatacgaatggccacccgggaagagtcacgactcggggcaccgacccgactggggctcctcgggggtcccgggcagtcgactgcccgggaaagcggctccttctcggagagacggaagagccgagcagcccaaaccctccatttatgcgccagaagagataccccggcgcccaggcggattcggttcgttcccgcgggcgggctgacagccgctgtcaccacagcccccagcctgacgcggcaccccgcacaaccagtggtctgctcacaaccccgcccgtcctcccgcaccccggctgctcgcggtcgcccctcaccgctcccgctgacgctgcggaggcagagactggtcttggaggcgtccgcccgcccggctgcccgtgggtctggccgcagcagctccccgccccccgccggcttgctcacctcttcctccggctcctcctcctccttctcccgcagccgccgccacagccgccgggagcgtcacttccgctccagcaggcccatctcttccgcattgcgccgcggccgggggcggaagatccgccccgcgcgagggaaggggcggggcatcaggagggagaccacgcccactctgcgccgaccggctgggcctggcacccgcgggcggccccagcctcagtctccagctacctttgcctcctgcggccgcccccaggcagagctgcgatcccaccgccgggggtgcagggagagggaagatctggcctccttggtccttttgcgtgggctcttcagagcgtgagcgccggggagggactccggagaaaagcttggggggctgcgtattgctgctccccaagctgggcgtcaggaccaaccccgccgcccccacgggcctgacgggagaggaggaagggctcgggacggtcggctcgccgagccaaccaggtggcgcctgaagagctgtccatggtgtcgacagcccagcaaacggcaccgagttcctagtctgagtgtctggataggtagcagaagaaaaactaatgcctgctctgggacagttctgttcggtgccttttcttgtgtgttctggagctcacagggttctatcgaagagtgcttaggtgtatacgatggagagtgggacgtcacaaaccaggatctcaaggctgagtccaacaaaacatggccgtagggaggccacgacagctgtggttgtcaccgacggatgaatagcttttgccaaccgtggaatttagtaactaaaggcacctaacccttttatctcatcctcatttttcaacaaatggtgcttcctggctaatatcagcgtgtcccatagatttctgcttccattgaatagacctaataagaaagagaatgaagtcaaagccaacagggcagaaagaaattgaaaacctgaagaacccagcactcaaactgtctccacttgcgtttgctttttctttacctcttct

SEQ ID NO: 69239 - DNA, 2184 bp, Homo sapiens
tcagcaatctaaaaccactgcagcctggcctcccacaggaattggagaaactaccttgcttttactatttttacaccgtctcgcttcactgttcccaaagtcagtgcgaagaaggctgggtatctgctacccctaattacttttatgggtaaactgaggctcagcgactgcaagggactggcccaaggtcactcagaaccagagctgcaactccaggcttctgttccctctcctagtattcctttttacaaactcggccttcatggtcgaggatgcctggacagagcatccaagaagtgtgggcgcagtgacctgcagagggctcggaaagcatgccaagagcagccaggggacccacaccaagttggccctgaaacacgccaggcagaaaagaggcaggacagggaacaccgaatttcccctgaaacactctgaatgcctgatctgagctccggccccgtggcagaggaggtggttaagaaaaggctgggggcagcgcgggaacgcgtcccttgcccgagcagaaggccggaggctggggaagattcgcagccggtcggacggcaggggactccgttccagggctccggggctgggcgtccagagaatacgggggcgggggacgggggcctgcgtcggggatgcggccgtctaagggcgtccgaagcgcgcactttaccttcctcctcgtcctggaagctgagcaggctggcccggggcacctctttgttctcgcgaggcctcttgcgcggcttcagcccgttgccgggctccgcgccgccggggaagccgcccccggcctcagccccgaggcccggggtcagcgcggaaggcggcgacggccccgggcccagcagcgactccccgccaggggccctgtcgccgccaccggggcccgcctcttcgcccgtgcccggcggcggcaacaacggcggcggctcctgctcctcatcgcgttcccgctcttcctcttcggagtcgttccgcttgcgcacgttcacccgccgggcctttcggaacatccccgcggcccgcacggcggtcgaatactcgcttccacaccgcggccccggcagcgccgagctcgtgacggcgcacgcgcgctctccggagctccagccgggtcgagtcctctgttgctaccgcgcaccccacgagcgcgcatgcgcctatgctcccacgcgctctcaatacttggagaaagagagagagtgagagagagagagagagagagagagagagagagagagagagagagagagagagagagagagagagagagagagagagagagagagagagcgagagagagagagagagagagagcgagagagagagagagagccccacacctctcgcgagagcgtcggctctttgcatcgctctctgtcggagtggagtactattagcatggaactctggtgttgtttgacaggtcacaaagaggatcatagagatgagaagaaagagtaggctctgttgtccctcagacggcgctgctgcagtgcgtcttcgcacttacgcggagcggtaatgtgaggaagcctcccgccaaacagatgagggaggaggaggaggggagaggccagagagagaagcggctttcgggaaggaaagtgtgatctagtaggtggaatagtcctctccaaactttgacctgaggtgtgactattggtaattactagttattcttgagtaatactttgtatttctacagctttatagctacagagctcttagaaagacattgaattttatttatgatacaatgttacttcaaagacattgaatttcatttatggtacaatgttacttcaaagacattgaatttcagttatgatacaatgttacctggcttgatgtcccccgttccccagtctttcaggaacaaggaaagcaaaagtgtttccgtgttttctaaagaatgccaagtttgcaagcaattctatgactaaatactttccaaagcttagtgagtttcagaaacaagtggaaggaaaatagagcagggggtggggaaggttgtgacagttctcagacttgcgtgacaaagccctcgctggccacaccttcacagggtgattgcgcctaaggttgaactcaccggctttccctatctcatcaccgaactagaagtttttccttcgggcatgcacctgtgcatgcgaattcattttgatgttt

SEQ ID NO: 69240 - DNA, 1008 bp, Homo sapiens
gctagggctgccatgacaaagtagcacagaccgggtggcttaaacagcagaaatgtattgtctcacaattctggaggctggaagcctgagatgaaggtgtcagcagggttggtttcttctgaggcctctctccttggcttgtggatggccgtcttctccatgtgtcttcacatggtctcccctctgtgtgtgtctgtgtcctaatctcttcctcttataaggacactagtcatattaagggcccaccccaatgacctcattttaatttaattacatctttaaagacctatgtccaaatacagtcacattcttaggtactaggagttaggacttaaacataccaatttgggtcagggaaacacagctcaatccataacagggtccttatcatctctcaccttgactaccatgaaaccttgtatttactaagctttctacaatgatcagatcctgtattttccatatttcctaccaaggaccatgtatgacttctattaccagaaaaatactcatcaatgaaatattttgaagaaaatggtggtgttctccttccaattcagagacttctccttggccactgtctgttctgctttaagcttctcctttgtcgtgtttctccatgttccatcccctggcctcaaatctgggttctcctcttctgtttccttttctcaggctggtgagtcagctggacagtcatctgagtctggagttggggccaacttctttggcatcacattccagacaacagaaacactgatgagcacagggcatctgaatggggccgtgagtcattgtttgtagtttgtcaggtgatatggtttgtatatttgctcccaccaaacctcatgttgcaatttgatcctcagtgttggaggtggagcctggtgggaggtgttcagatcatgggtcatgggggcagatccctcattgaatgtcttggtaccatcttctcggtaatgaatgagttctcactctattggttcctatgataaccaattgttaaaa

SEQ ID NO: 69241 - DNA, 1260 bp, Homo sapiens
acttaattcattgacaatatcaccaggttagttatcaatgattcattcagttttcttttaagcattattaattgcttgataccatttaggatcaggaaacccttagtgcagtgaaaattgtaaaagtttatgacctgggaggcccgtgtctagccatgcctctgtcaggaatctgtggtgtgacttctgacaagagttttatccctctggatctgtttccttggctggaaagtgaggaaatcgatccaaagattacctcgcagattctctccaactctgacattctatcatttcacactcactttaaaatagactgtcggcgaccctacgccagttttccttgagaaacagcgccaccttcaggtcataataaccataagagagctgaccgtgaaggtgcttctccggcaggagcgatttgccctgatccacagaaacccttcccccgcagtcctctgggatgcggtcacacacttgtgagtctgccgctgggttaagatcaatgcgtatggacatggagccaagctgagctaactggcccacaagggacagatgcatgaccttggcctaattatcacagctccagctaacagttcgcccacagcaaagctccttgtggaaccctataaagaaggaaaggaagcgagggatatgctggatgaactaaactctacaaaacaatgaaaatggacacacctcttcttcaggcaattccacttaagatagtttccagctgttcttattttagcaagatatctacttggatatactttcattaagaaaaatgacatagtgaactctgaagtaaatatcagatttttttcacccagcaaatatttattgagcaaccaaccacttgaatgccagcaccgtgctaaaagctctcacaaaattacttttattgaatttccacaacagcccttgtgagagaggaattcatatcttcatttttcaacacaaggaagttgagaatgagagaggcccagaaacagcagatctggcaacaagcttgaatatgcagacacaaacattccacacagtcctcctctgaggacacgacgcaactgctccttttcaagagcttatcacttggcacagtgtggcaccaactgcaatcagcagtgcagaggcaaaggccgctagggaactcagtttatttctctgcagtgtgatctgtatgcagaaaatggccctatctttgccagccatcctctgccatacctccctaacccactgatggatgctgggcaggataagggg

SEQ ID NO: 69242 - DNA, 3800 bp, Homo sapiens
ttttaaatttttttgtagagacccccaggggtctccctatgttgcccaggctggcctcaaactcttgggctcaagccatcctcccgcctcagcctccctaagtgctgggattacaggcgtgagccacaactcctggccaatgcaaagctttccacacccctctgggttgggggataggggcaggtctaatgaaacagcaggtagttctgaattaacactgaatctctcagccattgattcgagactgcagaagtcagcaggggcctttccctttggagatggaagtgccattggctcagcccctttaatatacgacccaagatgtcaactcatggaccctgcatcctgtctttggatctccccatttacactattgtaacctcaggacttcttcaagtctgccagaggaatccactcacacaaaagaagcactgtgggctccttggaaagtatggtagagaggcagggtggggtgtggctcagtaattacggcacatactccacagcaaatgacctcacaatagtgctttggcatttctgttccccacacccctttcccgatgccctccctcagggggcagaagtttgtgctctctctgtctctctccctctctcctttgccacccagtgcccaccctcactgcagccctctcctaacccctcaatcccacaccccacgctgcctctaacccactcagtgccatggtgggcatctatctgtagggaactccagctccctccagcccctatgccacctgtcatttccaatcctttctagcagctcccctgaaccctctctttaataagatctaccctttttaaaaatcatattttaattgtaattttaagtttcaaaatgtccattctcttaacaatcttaaccaattctcattgaatgccttctgcattgtggtcacaaaaggggctctggaaccagacgttggggttagaatcctggattcgccacttactgtgtgactttgggcaagttatttaacctctctgggcctctattttcttgtccacaatatagggaaggtgataatagtagctgactcttagggttggtgtgagagaatgagtcactgaattcgtggctggaaggcacgaacagcggtgcccagcatggagcgagttcagtaatgttagatgccaccgtgtggaggcaccagagggacccaataaacacacacagagggacaagcaaacccgcagtaccgggtcgcaatgtcacgatggtggaaatgcagggtactgtgggctttattggagggtcacctaacccacactggggtgtgagatcgcatcaccaaccccaacagactcggggctgtgttggggtggggggtgccgaagttctagcctcggggtcaagccacttctgatcacaatccaattcacccacatcacacacaccatggcacacacatcatacacacacatacacaccatgcaaacatcacatacacacataacacacaaataccacatccaccacccacacagcacacacacataccacataccccacagccccccgacaataacaccatatgcacaccacacacatacacacacacacacacacacacacacaaaacaggtcactacttccctcctatgtactatgtgccctgctattttctattctgttccatttcatgccatttcttcttagtaggactcactgaattgatttcaggacccactaataggcctgagcaggggttcagaaaacactgacttggagggaggcaaaggaaacccttaaacgtctgtgaaatggagctttgacctgtggtctgcccttgacctctaagtggggtaagcctcacactaggggtgccctgtcctgagacatagccatagcagtaggccaccttactattgggctgccctggccaagaatgggagaagcagagcctcgtcaccagctgggacaagggcagcccgaggagagaccctttcacagtgtcggcacagctccgtttgacctaagaagtaacctcactggtttttgtttctaatcaccccttcatttcacaatggcctgcaggtttcttttgccgccttctaaaatcaatgttttccaaagtacagctgagtcatgacacatcaaattagtgagtctcagacaacattttttaaaaaagaaaaagaaaggcatgggataggataggataggataaagtagagcatgtggcacaaggataagtgctgatgtgggtgtgggtgtgtgtgtgtgtgtgtgtgtgtctgtgtgttgggcttcaactttcttcaactgtcaaccctgctattaataggtgaagctataaacacagggcaaaatccatcatatctggtgattcatacacagaagtacagagtggagcaacttgagacattacaggctgaaaaatacacacttgaagtccacagcccatgactgaatctgctagatgatgactcggtggttgctgaggaatttaatcatctggaccatgtccttccctagttaattttcaacccagatgatcatatctcctgttccgggcagacacatttctggcgctaagaccagggcccctattcagccttagtggataattcaacctcctgagaggcactgcagaagcacctgggccaagattgctttcctcttctacgcctatcccaggaatgtggccactgctcaaaatgtgggaattcccttccagaattccccttgaagctgctgcacgcttcttagaccacgtctgagcaatgcctgcatcactagaatatttggcctcagttgggtttgtttctttaaaaaaaaaaaaaaaaaaaaaaaaaaaaaaaaaaaggttttttcctcaactaagacttaagacaagggggtcttaatttgattatttttttctgttttatatgatttctatgaaaactacaacaaaataaagttaattctatttaagtgactttttaatgaattgcctttgttagaaaaaaaattaagtgtttttgtctcactctgtcacccaggctggagcacagtggtgtgatcatggcttactgcagccatgacctcccgggctcaggtgatcctcccacctcagcttcccaaatagatgggactacagttgtgtgccacaacgcctggctaatttttgtatttttttgtagagacagggtctcaccaggttgcccaggctgatcttgaactccttggctcaagcgatccacccacctcagcctccctgagtgctgggattacaggcatgagccagcgcacccagccagaattacatttttttaaatggtactgtcctagaaaatccaggatgtgcagtgatcacgtatgaatgcatggacctgcacacacaggagtgaacaaaagacccacccctgccaggtcaccactcatatctcaccccagcccacgctagctcacactcctccccacacaccactgacctcatcattgctaggtacccacttgacttctcaacaggttcaagacaattggccttcctcgtctcttctagaaacaccctcttttctgggctttgtgtaacacctggtctttctcccctctctggccacttctcagcttttctttttctttctttcttttttttttttttttttttgccacttcctcttcctctacatcaagcttgtccaacccacagcccaggacagctttgaatgcagcctaacacaaattcgtaagctttcttaaaacattatgagatgtgtgtgtgtgtgtgtgtgtgtgtgtgtgtgtgtgtgtgtgtgtgtgtttagctcatcagctatcgttattgttagtgtat

SEQ ID NO: 69243 - DNA, 1104 bp, Homo sapiens
gagaggttcctccccacctgcccttccctcccatggccgatgcctaacactcttccatcgctcttccaacactcttccccatcggttcaacactgcttcttccaggaagcctccccaggcccctggataaatccctgtgcattctcaaagtgcttagactgtctcttttctagaactgaccacaaatgtcatgaattacctagttgcaaaagtatttaatgtccatcttcactgctctgtaagcagccctgtggacaaggaatgagccagcctcattgactatgggtgctgcggctcccagcacagtgtcttgcaaacggacattcagtaaatatctagtgccaattcccctaagataaaccttggaggaactataaagagagaactgacaaaattttgagaaaatccatgggatgtgtcaggagggaaacagctgggaaagggccaggggactttggccaggagcaggatcagtgggtggctgtggaaagggtaaaacagaaaaggaactatgggtgtctgcccttgccccttccctcaccaatgctagggacaaacagtgcctgcccctaccctgatgatgacttagacctgtgtccagatgtcccaggagtaaaattcaggcatctcacaagtcctgtgcctgtgaggagctggaaaaaacaggtgggaagaaaaaccctaggcagttgcttccttctctaacaccaccccttccaaaccctcaggccaggggaactgagaaccaaaaagtgcccctttctaaaccactcctccctggggaccaaagatggagcactgacctgaaacattgttttgctgggtgtggagtaactgagggtggcgcagttgtctgggactgatctgtccccaccccatctctccatagatattgcctaacagagaagccaactgacctcgccactgccatggagaatgaggtcaagatagcaagatagttgagaagtaaaccatttaaaaaaaattgaattatagattccatcagaagaggaaatgttggaaaagtccaagaagttaaaattagcctaataagcttaataggaaataaagagaaatgaaacaatactaagacaacattaaaaa

SEQ ID NO: 69244 - DNA, 1840 bp, Homo sapiens
gttcagtaaatattgtttgcaaacaaatgtcatcctcacttttcctggctacacctgcctgagggatgaacaggaagaggtctgaacagcaacaaaatgattctggaaacattacttggttcttctctcacacccagagaaattattgaaatttcaagtgcaagttcgctccctgccagcatcatagatcattcgagtccccaaagtgtggtttggagctctccagaattgcacttttggcaggattccctacagcattcttctgtgagtttcctacagctctccctgtggggacactgattgcattctccctggggtgagtttggggaccatcgaagggtcctatacccaaaacctaagattgagtctaggcaccttcattagcccttaccagcctcatttgagcagcgtgcccactggggctactcccatagaagagcaggatctcctacaaatccatcaggtcctcatgcacagagatctcccagcagatggccatgggtcattgggagacccaagaaacttgagaaacagttgatgagacttgggttgttgttgtttttttatgaatctacatttctgtagtaactcactgaatgatattcaataatgtctatgcaaaattaactcattgccacaatctaaagcaagcttgagaaatggtctggacaccacaggactgtggcagccacagagccctggcaccttccctgtgagaaggctggtggggtgaggctgtgggcagaaccaagcccaagttagtgaccctagcttaaaaagagagtgaaagaggaagccaatgagcaattctgagaatcagaggtggagaaaccaggtcacgtgcatgtggttaagtcactgggtcaaagttgggtgtgctggaagctgttgcgtctttctcaatcttacaaagccaggagtttgccaaggctgcaatgccctattagtaaaggttgagcatccaaatcccaaatccaatatgctccataatctgaaactttttgagcactcagtggaactcctggagcattttggatttgagatgtttacattagagtcgctcaacctgtagcaacatgtagcagctgagcaggaagaagcagtccctccccactcatttccttccacctgcctggggtggctaaggagggcagctggagaaagacagaggctacatgtggtcaaactttagtctgcagtttctcagtcagagactcagtgagggaaccggcccccactgtcctcatatgtgcaaatttgaagttgacctcatagcttctcatgaacaatgccatctggaacctcagccagggcctcccaagaggaagccagagttgaatatttggcctcacaagcaaatgtgaccaatgagatgttcatgccagagtcagggctagattcggttcccctaatttggcactccttcccctgaccccctgggagactagaaagttgtaggggtatggattttgtgaagagaaggatcaaacccacattagtagtctctccagcccagagaaatgctttcactgagtcaccttccatcaggcagtctttgatacacaagagtattccatgtttaaaatgttctttctccacaaacctccttcgtgatcctctctccgcagataatattgccacatatttcctgttaagagcatgtaagcccaaaatatctgagacaggtctcggtaaatttcaaaagtttattttgccaaggttaaggacacacccatgacaaatccatgacacagcctcaggaggttctgacaacatgtgcccaaggtggtcagggcacagtttggatttatacattttagggagacatgagacatcaatc

SEQ ID NO: 69245 - DNA, 2903 bp, Homo sapiens
acaggtgtgagccaccatgcccagcccttctctggttttaattgaatattttatatgattccattctcccctcacttagcacattaattgtattagtcaggattctctagagggacagaactaataggacagatgtatatatgaaagggagtttattgggagaattgattcacatgatcacaaggtgaagtcccacgatcagccatctgcaagttgaggagccggaaagccagtccaagtcccaaaagctcaaagtagggaagccaacagtgcagccttcagtctgtggccaaaggcctgagagcccctggcagatcactggagtgaagtccaagagtctaaaagccgaagaacttggaatttgatgtttgagggcaggaaacatccagcatgggagaaagatggaggccagaagacttagccagtctagcctttcccccttcttctgcctgtttttatcctggccatgctggcagctgattagatggtgcccacccagattgagggtgggtctgcctttcccagtccactgactcaaatgttaatctcctttgacaacaccctcacagacacacccaggaacaatactttgcatctttcaattcaatcaagttgaaactcactattaaccatcacattaattatacttctttttaacaaatctttagtgactgccctagagtttgcaatatacattataactaatctaagtccattttcaaataacaatacactaattcatgggtagtacacaagtatcttagaaaagagtatccccaatttctccctctcaacccttataacattgttattatacatttcacttattcataagctataatcaaccaatatgttgctgctattattatttggacaattattctcaacctgataaagaacatctacagaatccctacagctactcacagaactcaggaaagcactttacttactattaccggtttatataaaagatacaattcaggaacagccaagtggaagagatacctaggacaaggtatgggagaaaggggcactgagcttccatgccgtctctaagtgtaccaacctcccagaactttaatgtgttaaccaacccagaaactcttcaaactctgttggttgttcaggggttatttatggaggttacatcatgtaggcatgattgatcattaactcagtctctagtccctctctccttcctggaggttggggtggagggggtagggccaaaagttccaggctttattgattattgggcttggtctttttggtgaccagcctccatctaaaagctatccaggggctcaccaagagtagcctcattgctgggcgcggtggctcacgcctgtaatcccagcactttgggaggccgaggcgggcagatcatgaggtcaggagattgagaccatcctggctaacatggtgaaaccccgtctctacaaaaatacaaaaaaaaaaaaaaaaaattagctgggtgtggtggcgggtgcctgtagtcccagctacttgggaggctgaggcaggagaatggtgtgaacccgggaggtggagcttgcagtgagccgagatcgcgcagctgcacttcagcctgggaaaaagagcgagactcggtctcaaaacaaaaacaaaaacaaaaacagtagcctcgttataacgcctatcacccctattactcaggaaattgcaggggatttaggagctctaggcaggaaccagaccatatatttttctatgaaaaaacaaaacccttagcatagcgatcatcatgattttaaattcctagtctgatttgcaaattctctgccatctccgagtcttatttctaagcttgctttgtctcttccaattgtgcttggtgttgtctgcctttcagcatgccttgtaattcgttgttaaaaactagatataacatatcaggtcatgggagctgagataaatggccctttaggataaggtgttaggtttatctggctaagagttaggctgtgttaaatgtttgctgtagttgtaggtgtcagaggcttcagttttatttagtgtcctcatttttgtctcctccattgtctttgggttttcctagaaatgccttcttaaatggagttgtaatccaccgttattatactacagagtcctgttgatgtggtggtaagatactgtggaggcaaaacattctacaatcttatgattaattcccagagttttctttaatgggcctgagtctctgggctatgaccctccgagaagtttcttaacttttgcttttttcctccagtcatgatagacaggaaggctagagggggctgagttgtctaattgcccttctgctaggtcagtttaggctccagtaatgtaattgccctgaggacaggtttttgttacagaacactctgggcatatctcaaaatgtttacttttcccctcccaccggccagtcaggaatttttctgtggtctttaccatgagaacttggtagagcttcttggagtaaacctttaacaatttggggagcatccctctaagactgagtacccaacagtgtttaattctcaagctagtccacactcagtctccagcaattagtcaattacaatttaagttttgctatgatttcagaggcttctggtccctgtaaactgtgattctttgcatttgtctgtctttcagtttttgcagtttgccctgtgactcaattcactgatactgaaacaagaagagttgttaatcttcaatttgttcagcttttctcttgttgtggggagtggagtgacagctttcaagctcttcacaccttggcatagactgcatttgcttttgttttgttttgttttttgtttgtttgcttgttttgagacggagtctcgctctgtcgcccaggctggagtgcggtagcgcaatcttgg

SEQ ID NO: 69246 - DNA, 2288 bp, Homo sapiens
agtgggggagccaggagagaacccattcactctttagttcattcattcattcagtcagtcaacacatctttgggtgtcttctaaatgccaggcactattctaacccctaaggatacttcagtaaacaaaacagtcccaaattcttcccctatggagctttctcggcgaaggcgggattggttaggagctgacaatcggcagcagacgattgtaaatgaccggaccttttttctattctcctgcccagcccccggcccggcctccgcctccggccctgctccagccccgccagcggcccaggacccgcccctggctccggccccgcccctggctccgcccccgcccccgcgccggcggcggcgcggcgcccgcgcttccgtatcgctcctcgtaggccggggctcggcgcgcgcacccgcactaaagacgcttcttcccggcgggtaggaatcccgccggcgagccgaacagttccccgagcgcagcccgcggaccaccacccggccgcacgggccgcttttgtcccccgcccgccgcttctgtccgagaggccgcccgcgaggcgcatcctgaccgcgagcgtcgggtcccagagccgggcgcggctggggcccgaggctagcatctctcgggagccgcaaggcgagagctgcaaaggtaacgcagcgtggcggggtcgcgggagcggagcgcgtggccagctgactggagggaaaacgccgcctccctgcagcggttcccggaatcccctccggttccctctcgctctccccgactcctcctcctcctcctgccctccctctgcgtcttgagtatgcggctagtgcgcccttcctctctcccggggccgcacctgcgaccccaggacccctcccgggccctgtcctgcgccctccacgcgtcgcccctgctgggagtccgctttcgttgcacccctccgcgtcccaccccaccccaccaaggatgcccaggataccgggcatttgccactgcaagatgtgagtcgttgctaagtttgagggtcacattcctccaggtccaccccgccttgcaaaaccggctcaccagctgggtgctcaggttcgggatctccagcccgcccccttgaggtcccctgggattagcccccctcgacctgcgtcagggtcacagactgcagccggggctggagcggcctacacccctccggatccgctgcgtggaggcaggagggggaaggggcgaggggacgtggccgcggagacagaagggtgcaccctcccagggtcggagaggggagatactgggaagatactccgcgaatatggagaggcgatcggcacttgcatttcaaccctgagcaaatcaatccgttacacgcagtagcgagttgactccatcagcccgtttatttggttagcgatggttatattgactctgagtattcccacctcctttcttttaacatttttttttttatttccttgttttgtttagcaagaagtcttagaaacgaatatagcatgcttgggcgttgattcagtggtgagaagtgccggagctggctcagggagaggtggagtttcccatgtgtgctcactggcccaggggctaagtcccactgcttgccaaggtttctcagtatcctgtccacccaccccctatccacctgtgcaggcttgagggggtgagggggtagcagatactctatcaaaatctaccctaaggaaaatattcgataaacactcctagcaattagggcatagctgataaggcttgatctgtttgtcgcagaaaatgacttgaacttgtaagttctattgttcataaagttgttttccacaattttagataatcaaaaatgtacatgactcatttttcttacctattatttcctctaaagtttctcatgtatttattgaaaagttaaagaaaatctgattttggttcacataatttgacaatggtgatttgtctaaaagtcatttcaaaaagtagtatgaaaaggatcataaccctagaggtactgtcatagacgtgaaacatttattaaaatatatattccatggctcacacttgcacactcaaagccacattggactcattttttctgctacctttataaaccttcaaactgttcaagagtcaatggtatgtatcatcttccgttatcaatcatcatgttttgttttgtttggtttggtttggtttggtttggtttttgacaaagtctcgctctgtcgcgcaggctggagtgcagtggcactgtcttggctcactgcaacctccccctcctgggttcaagcgat

SEQ ID NO: 69247 - DNA, 1496 bp, Homo sapiens
gctgaagtgcttttaactcacctgtgcggagagcggacttcaagagagggcgtgccggtgctccggacaaaacctggggaatactgaaagccaccaccaccaccgtcattccagcatgcagatctcagtcctgggttggtgttgtagggcatttatttatttgacttgacggcgcctttcaaagcttgcgaggatcccttcctcttcctcgtgtgcatctgccaagcctgtgccccgcgcctcgcgggtggacccgggctggtgggcggggcctgcagcggggtgggagcccggtcgcccggcccctccccaccccgccccgcccatctccgctggttcccggaagccgccgcggacaagctctcccgggcgcgggcgggggtcgtgtgcttggaggaagccgcggaacccccagcgtccgtccatggcgtggagccttgggagctggctgggtggctgcctgctggtgtcaggtgaggggtccgcggggagggggcgcgcttgggaaccgggaggccccgcgagatgccgcccctgatcccatccctgggcgccctgcaagtgacttaagagccttcggggcctcgggagagaagatgcaaacgccacggccggctgctgagacgcaactaggctgctgctgccgtcgattctgtaacaggagaaagccccatccgcgcccggattacagaccgtctgggccctaaactcagggggagactcccggcgtcttttgattccctgtcctcctgcagctctctgctggcgggcgtctaaataaagtagcttccccaaaagacccaagatcccaccgtggctgtcatctgacccttctggagactatcagttcaagtggaggcccccaccagtccccgagtgccctgacagccctccctgaccccaagtctgccccctcagtgccagccctccctacagatgtgcctcccatcacccgctgcacctcccctccttccggttcaggcccgagcaccctgaaatctggattctgtcccccagcgccccagctccatggcttctaaacctaaatccattgaaaccttttctgtcctctaaattgactgcctaggttccaataacaccatggtcacctccttcctttctcatgaactcttccctggccttccgggatacccctccggtttcccgccctgtcaggctgtctctgcttgggaccctcctgctctgtcaggtttctatgtagctaattgtgatgcccaaggccttttctctccttccctggcactgttcctttgggggatttcagccaaaccctggcattaaacacgggctataggcccatgactcgcacatttatatctctcttggtaccagttgggtgatgggtggtggtttattatagtcttctacttttctacttgcatgtaggtttcaaattttcttttctttctttcttcttccgtttttttttttgtttgtttgtttttttgtttttttgtttttttttgagacagggt

SEQ ID NO: 69248 - DNA, 1541 bp, Homo sapiens
gctgaaacccgcaaggacaggagctggggagatgggaggccgcctgcgggaatgaaagcacaagagaacgagggccatggggttgggggcggcacaagtgctcaggtccttccagccgcttccctcatacagatgccacttccatccctcagacgtttaaggagtgtgcactgtgagccacgcactgtgacaagcaccatgtcgtgccagcaggtgactgcacttgctgtagctccagggtcatgtgctgtgtcagggctctttgatccctgtgtccctttaaaacgacatgatcttcatgggcagtgtttgttctcttggcccctctcagagccaaatgctgtgctcgtgagggcggtgctggttggcaggggatgggcacagagaaatcaggtggccagggcagctggaggagggacctggagccgaacaaggggagctgggaccacgagcaacccaggtgacatcctggactctgtcaaagataagcaaagcaggacgctaattaaagcagtcaaaacattttattcagtaatgactggagttgggaaaagggccgagttccatttactcagaggtgttttaaagggagaacgagggccggggcaggaggatcgcttgaacccaggagttcgagaccagcctggccaaaatagtgggacccccatctctataaaatattttaaaaattagctgggcatggtgacacatgcctgtcgtcccagctacccaggaggctgaggtgggaggatcacttgagtcctggaagtcaaggctgcagtgagctgtgtttgcactactgtactccagcctggacaacagaacaagactctatctcaaaaatgaaaataaataaaaggagaatgagggagtagaaagaaagaatgcgtggggagttgagcagaatcagggaagtgaaaaaaattttaaatcagctaaggggatgggtcagtgccgtgaggccctctgtgtctgtgaaccggtgtttatcaaggctaggcttctaccctcccacagagacagggagacagaggccctgtacttcctgatgatttcaaaagaatggctcgcagatcattgagaaaaatatccctgcgttgtgggagatacatacatgtctcaaagggacagaggaaggattcaccactataagccctttttaataaatgctctccgaaagagaggtcaaggcctcgcatcaggggctgggaagaacaaatggtaagttccttaggcagccttgggtttttccagacaggaattcaagggtgtggccttggcctgctagaagctatgctggggtttggccaagtctcttagtgcaggggtttgtttgttttggctttggttttggtttttgaggcggggtttcactctgtcgcccagtttggagtgcagtggtacaatcatagctcactatcacagcctcgacctcccaggctcaagcgaccctcccacctcagcctttcaaattgctgggactacaggtgtctgccatcatacccagctaatttttaaaaaattttttttgttgtagagaa

SEQ ID NO: 69249 - DNA, 1756 bp, Homo sapiens
aatatagagatggaatatatagatggaatacatatatattccattgcattgttctttacaaacattcatttaattatgtaattgctaattaattgcttggttgttataacaacgaagtatttgattccttattttatctcatcatttaaattttatttcgcatattttcacaatgcactggatctattactgaggaatttaattaaataatcattcgaaccatgggctcgaattgtttactgataaagcccgacgaccaaaacagcctagcgactgctgtttggagcccctcggcccagggcccgtggctgttctctccaagggaccatctcgcccctcagccaagtcgcccggaaaacgagcgctcgaccgcctctgccccgctctcgctctgcacacagcaacggtctggtcgctcagccacttcctccttccagcctcatctggttcccaggccgctggggactcccaacgccactgtccaagactctagggtcagcaagcgccccgggcggagaagggcgaggacgaagagcgccgggccgcgaccaggagcccacccgcgccctccgactgcagacatggggaagagacgcgggaactccaaagtcgctgggtctgcgcaggtgtgtgccgcgatcctgtgaaggtcaaggcctcctgtgagggggagtcgtcctggaatgcgatggtgaagtgctccagaccggccataggccggaaagagtgaggaagaagagaatgcaggaggcctgcgatttctaaggcgcgcgcgcacaggggtgctgcaattaggatggggcaatgggagcttggagaaggggtgctagctaggaggaaaggcgcgtgcgtggaggaacggcgcgtgcgcggaggggcggtgtgtgtgtcagaagaggcggcgcgtgcgtagaggggcggtgagagctaagaggggcagcgcgtgtgcagaggggcggtgtgacttaggacggggcgatggcggctgagaggagctgcgcgtgcgcgaacatgtaactggtgggatctgcggcggctcccagatgatggtcgtcctcctgggcgcgacgaccctagtgctcgtcgccgtggcgccatgggtgttgtccgcagccgcaggtgagaggcggggaggagagtcttggcgcagggcgggaggtagggcacgcagctgggctacgggggcggcgatgctgttgggggcgacagacgcccagtctgggaaaccttcggtccactttgccgcgccaaagattaaacccgacctgggctcgcaaatcaaccaggagaaagtggtgttctgggtcctctcttgccgcttgcctgtggccgtgtacgggtcctcgggagcgcccgggtcccacccccgtgaaatggcggtgccagagctttgtgtcgagtttgattctttccgggaaagtaccgcggctccgctggtctgtttgataataaacaaaacatttcccgaaatgcatttcctcaatctggtgaataggcgcccagtcccacgggggagtgagctaagtgtggccaggatttctctgccctcaggattcatacaggccaataaaaaatgacagtcggagtgactgaagcataattgtcagttctcgaggtttactaagcctgcttcagggcgcatccgggaaaaacgtgagccacaaacacgtctgtgactggttttccagaggttttcaggaggtggggcaggaaggcagtaaggcaaatagttctgtgagaatttagttagtgccca

SEQ ID NO: 69250 - DNA, 1157 bp, Homo sapiens
taaaagtacatcatccactctgaaatctccctaaaagaactccactgcatacacgtggagaagtcatcatgccccatctgtgtctgtacctgcgggtgtgtctagcatgctccctagggaagggattttataccatttgcttatatttatttggcaagctccatgaaaacaaggactgttttttaactttgtggctgacacttggttgcctaagtgtttaacggtgattgagcggggacgttgacggtacaaacactgattgaatttaccactggagggcaacaagtcaccctgttcaggctgacaatcggttactattcaataattccattcccagaagatacgccaagtatgtttatacaggtggtttcttaaagttctgtttgtgattatctcgtcttgagcaaatgaggaaaggatgtgaagaatctggtgtccccatgatctcacccagaaatggtttggtagttacaaagcaagatagagcagttgagcaaatacttagcccatctagtcctctaccactaccaccttcgccttttaatgagcaggactttgtagtaagcgagttgttgaaaaggagctccacatacttagtaacagcctcggagcggatggaaagaagtaggcattgctgcagagctgagatgaacctgcaaggagacagccttggccccagggaatgatcactgcactgcgccccctactggcctggctgagatgactagctgtgattccctccttagtctcacctgttgaagatggcgcagaacagttacagccatgatcaaaaaagataattaatactttagtgtctcctgccctatccgcccccagggagaggccagaccattcagggtgccagctggaggttataagggtggagtgtggagacagtgtttcgtgtcactacttcctttttttttttttttttttttttttttgagacagagttttgctcttgtcgcccaggctggagtgcggtggggcgatctcggctcactccaactttcacctcccaggttcaagcaattctcctgcctcagcctgctgaatagctgggattacaggcgcctgccaccacgcccaactaatttttctatttttagtagagagcttcctgatagctgaacatgcagaggctgctgggaagggca

SEQ ID NO: 69251 - DNA, 1409 bp, Homo sapiens
tccacctgcctcggctcaggacaaaccacccaaaatatggccataggagatcagaacatgccaaaatatacttccttggcatattttgagctggttattttgagaaactacaggcacaggaacagctgaaaagctgtccttttgtaaagaaaatttatatctacaaaggaaatctacatcggtaaattgtatcaggcagaaggcctgggatatctctatttttttttaatacctctattagctcagagactgtttctctgcagagcaggacagggattgctcaccaagcacttacttccctttccctgccatgacttgctgttgcttaatccccggaagcctcaagcctctactcctttctgtagagcagaatgctgtataaggcctgacatggtggtcacacctgtaatcccagcactttgtggggcagaggcagctggatcacttgaggtcaggagtttgagaccagcctggcaaatatggtgaaaccctgtctctactaaaaatacaaaaaacaattagccaggtgtagtggcacatgcctgtaatcccagctactcaggaggctgagacaggagaatcacttgaacctgggagtcacgggttgcagtgaggagccgagatcacaccaccacactccaccctgggtgacagagcaagattctgaaacaaaacaaaacaaaaaacccaaacagaatactgtataaacctcaatcatctggactttttgagcctcagatttggtgggacttccatgcgtatacacataattaaaatggttttagtggagagactgtcatctgtccactgtcagtttacttcatagactcaattatcaaaccttcagagagtagaaagttttactctccaccacactagtctttaaacatgcgtggtgtctctaacatgcagccgagctgagaacactggctgggctatcttcaggcctcccacgccctccgctgtgactcgctctgactcacacaacaggatggcagaggcttggcaagacaggaagccaacgcctggggcagcagccaggtctgtgctcccggaaatccacatttggtcaaaggggacacttcggggttggtcctccctctggctgggttggcccgatttcttcctgccttgcccccatgcttcagagactcctccacacagagctggtcttaaagcataaacaaaacccatggatgatggggccacagagattaaatggcaagaccccggaggatgctggaggaatgtgtgacctctaattatgcagagcatctgtgagctggatgtcccgtacccgttaaaagtcactcctcgtctcccctcctgccagcccctggcatccattaatgtactttctgtctctatgaatgcacccattttggaaattttacataaagaggatcata

SEQ ID NO: 69252 - DNA, 2024 bp, Homo sapiens
acatggtgaaactctgtctctactaaaaatacaaaaaaattagccgagcatggtggcgggcacctgtaatcccagctactcgggaggctgaggcaggagaattgcttgaacctgggaggtggaggttgcagtgagccgagattgtgctactacactcctgcctgggcggcagagaccctgtctcaaaaaaaaaaaagaaagaaagaaaagaagaaagggagggaggaaggaaggaaggaaggaaggaaaaagaaaagtaaagaacagaaaaagaagaaaggaaaagaaaagaaaggaaaagaaaagaagggaagaaggaaagagcagagaggcccagtcgctcttctcagagtctccgtggcatctcggtagatttgctgatccctttacataacccaagttgaggcatgccctaatttcacccacaaatgctactaagcccaggcccttatccagccaaaaccatcctgccaagctcccaccaccaccatcagcatcattttcaggttgttggtcatcactggttgttggtcatcactggttgttggtcatctatgtcacctaacaggccactcatgacgttagcccttgacttcaaaaaggacctcaaagaaaattccagttttcactccaaaaggagaaatcaggccgagctgtgatggctcatgcctgtattcccagcactatgggaggctgaggcaggcggatcgcttgagcccaggagtttgagaccaccctgggcaaacctatctttccaaaaaaatacaaaaagattagctgggcatggtggtgcgtgcctgtagtctcagctagtcaggaggctgaggtgggaggatcacttaagcctggaaggttgaggctgcagtgagcggtgatggtgccactgcactccagcctggataacagagcaagatgctgtctcaaaaactagcaaacgaaacaaaaggagaaactgctggcagcccctaatctagtactgtcccggctccacccaccttcagatccagcctcctcccctggcacacgggagccccctcctctgactgtgctgaaagtgagggaagatcccctctggggagagagctgtagccttgacctctgcacaccttacttatccagagcacgaggcagggccgctgactcatcctggtttaccctgggctttcccagtttcagcactgaaagtcccgcatctggaaaagcccctgagtcgctgacaaaccagacagtccggaccatgcaaagcacagtgcatggtgctttagccacaaagttgattgaaaagtcagaggcagtgagccacaggaagcgccacgtgacccagactgcgaggaggacacaggaaaccaaccctcactgtgtcctgctagggggttaacccgtctacaagcatcagggttgccatttcagagatcagcaaactgaacagcagtcgtgacttgtcctcgcctgcaagacaagcgagtaacaaatccatgaagggaaggacacggaattgagcaagggggcagggccggatgtcattttggcgtttttttttctttcagtgattgaggtaaaattcacataacataaattaaccattttaaagtgtacgattcagaggcatttggtacattcacactgttgtgcaagcaccacctgtatctcgttccaaaatattttcacttccccaaaaggaaactgtgtccccatcaagcagccacaccctactccctcacccccgcccccagcctctgacaaccaccaatgtaccttttgtctctatggatttgcctttactgaacaattcatagtaatggaaccatacaatatgtagtcctttgcgactggctttttttactcagcatcaatttttttttctttttcttcgagacagagtcttgctctgtcaccccggctggagtgcagtggcatgatctcggctcactgcaacctccacctcctgggctcaagcgattcacatgcttcagccttctgagtagctgggactgcaggtgtgcaccaccatgcatggctaaatt

SEQ ID NO: 69253 - DNA, 3482 bp, Homo sapiens
ttaaaaccctctcccaacaggcgtcaaacgacatggtgcaggctcgggctggggagcgggcctgcggctgcccagctgctaaaggacttcctactcgtgcaccgccgccggctccagggcaaaccccacgccatttagaaatgctggaagtttctgtctctccctccccctgctcggaggccattccccccacccccagagccccacctcctccttcactgggccctttctaactccttccccttaaaacccttttcaaaatggggttgactggaggcggaggttgcagtgagccgagatcgccccactgcactccagcctggtgactccgtctcaaaaaaaaggggaggggggcgggggagagttgaaagcttaatatgtactttgggggctattaaagcaaacatttcgactaaaggggcgaatcctcgaattgtgcgatcaagcacccgagaggagagttggggggggtcaggaggggtgggggctccagggaaagcccgggggtctgggccggggtctcgcggggcccttccggaaggatcgcggcccccgaaggtgggcgtcccgcggggctccagtctccaggacgttccgggaggctccgcgctctgggaggccggctgcgtggggtccccgcgctgcagccgcagaggccccccagggccgcggttcccggagcgggaaagtcccgcgcgggggcggtggcctcgggggcgggacggggcgggggcgggggcgcgggcggccgagccgaatcccctccaccgggacgccccgctgctgctcgggaagaggcgggccctgcgcgccctgcgctcgccatggcggtttgggcggcgacgtgagcggctccgcggaccccgagcggggccccggccgcgacctgagccgccgccgagcgcccggggccatgcgaccgacgctgctgtggtcgctgctgctgctgctcggagtcttcgccgccgccgccgcggccccgccaggtgagccgggcctgggcctccgcggcgggacgcgggcgcagccgcagcatgtgggggctgggggactcccggatcgtggggtggggggaatctgccgggtgctcagagtgggtgggaatctgcggggtgctcctggtgggtgggatatgcggagtgctcagatcaggtgggaacctgcgggtgccccaggtgggggtcttgcggggtgcccagggctagaggggcccgctgggagcccgcagcggggctgggatgggcggccaggagttccagacaggagctgggcagcagcaggaagacggggggcacccctcctggcgtcctggccgccgggacacccctctccgggagaggacactcggtgcccctccgtgaagccggtaacctcggctgcgccacctcccccacccgcgcgcccgcgccgggaaagccagcgtggccccagtctccgaatttctcggaatgaacaacagcaaattgaatccagggctccggcgggggccgcctttgctggccactggttctgcagcctggcgagactgcgcttagtccccgcctggagtgcctcccgaaggcctggctggaagctagactcagtccctttgtagtagcagcggtggagcagggaccagcgtcttggacgggtgacccagactcaattccgactttggccgagggcatgtttgacactgggtgtgaaatctagacagttcccgcggtcatagagatggggcagcagcattcaggcagggctcagaactgtccgggtcccatcagtgttggggcggaagaggaagagtgtcaactgagccaggcatttatttattttattgttgtttgagacagggtgtcgctctgtcgcccaggctggagtgcagtgggcagcatctcagctactgcagcctccgcctcccgtgctcaagcgatcctcccacgtcagcctcccaagaaggtggtattattggccacgcctggccaatttttgtattttttgtagagaggaggtctcactgtgttgcccaggctgttcttgtactcctgagctccagcaatccacccgccttggcctctgaaagcgctgggattacaggcttgaggcaccgtgcccagctgagccaggcttttaaaaccggttctgtccctacccagagagcttcttacctggcggcctccttaacctctgacaccagctgaccacgcttatgagccaaacataaaaaccaaaagaaacccaggcttggtggctcacgcctgtaatcccagcactttgggaggctgaggcagcatcatgaggtcaggagttcgagaccagcttgaccaacatggtgaaacccccgtctgtgctaaaaatacatagctgggcgtggtagcgcccgcctgtaatcccaactactcaggaggccgaggcgggagaatcacttgaacccgagagctgagatctcaccactgcactcccgcctgggcgacagagcaagactctgtctcagaaaaaaaaaaaaaaaaaaaagaaaaagaggaaaagaccttaatgacaaatgtgtggctagaacattcttgtgtatgtatctgcttttgttttgctgggttctttcccctggggagagtgatatcataggagtctcgagaatttagaagattcttcccattcgaagctataaccttgtgttgtgggtttgttttttctaccggcattccttgcaaaggcccataagttccgtatctccttgatctggggtgccttgcacttgaggaaattattaactgcttttccatgggagtcagacagatgggttcaaatcctgactctgcttccacttggcttcacgtcttgagcaatctgcatatgcctcctccctaggcctcctcctaatgagagttgatgattgtcctagtgtgggatcagcaggcgagtgacttcatgccagagaggagtgactagtggtgatctgtggactgtttgtgacttacctgtgatgagtccagaggttgaaagatgtatttagaaactatagtctgacattgccacaacatccagctacctgtccatcttgttaatgattaactttaattgtattctacaaaagttttggtctatgtgatatgttgcaaaataaaaaaattttaaaaagtgaggccaggctcggtggctcacacctgtaatcccagcactttgggaggctgaggcgggcggatcacctgaggtcaggagttcaagaccaggctggtcaacaatgatgaaaccccgtctctaccaaaaatacaaaaattagggggcgtgatggtacacacctgtgtcccagctactcaggaggctgaagccgaagaatcacttaaactcaggaggcagaggtgcagtaagctgagatcacaccactgcactccagcctgggcgacaagagcaagactctatctcaaaaaaacaaaaacaaacaaataaaaaaactggctccattgatcctttgaaaagtagtagcagctgggcacggtggctcatgc

SEQ ID NO: 69254 - DNA, 817 bp, Homo sapiens
cgtcccaaagtgctgggatttcaggcatgagccactgtgcccggccaggagtttatttctatcttgtctcatttacagtttggtccggagagctgccttagactctccaataaatctattcaaacagctgcctctgttatcttgacttgctccaggtttggaagaagcctgtgtaggatctgtgtttcatttctggctttgatgtctgggcgtcagtttccctggggttaattattagcttaatgtgaaggcagcattgtggaaatttctctgcatagttcggatgctattcagatctgtctgtgtgactgtcatgcaggcctctctgtgtgactgtgagggagcattgacctgccaccacccccctctggaagcatccagtccccaactggctttgggcattgctaggtcatagcagccacagcacacctggtgggcctgcctcttgccacgcagctttacctgtctgccttcggcccaggatgtcatgaggcctgctgtgtgtcaggagaagtgttgttagctggttgggtgaaggtcacccagagctcataggtgtggaggggaggggcatcctataactaaacaaatggccgcagacttggcaattcatctttcagaagaagagccagtggtcaggctgtcagctgatctctttgaggttgagcgcatttaccgaaaatgtgtggcttgaatttcctgctttgaattttggaacagcatgtttttcaaacctttcttccaccttctgggcatttcttattaatctttttggtcaaaagccttatcttgattatgttttctttctaagacaaag

SEQ ID NO: 69255 - DNA, 507 bp, Homo sapiens
tgtgggatgaacagaggttagataaggtccaagtctgcagaaacatagcagcactttcagaaagaaccctagtcacttgttccttcatctgccatgatgtattgtaggtacacaggcagtatacagattccctactagaacctccctggttaatattgtcacaaaatcacagctcctaacaggtctcagaatcttacttgcagtaataatctctctctctcctggtagaactaccagctgagccccagtacatgaatatactatgagtcattcctctgagacatgaacagaaaacacaggcctgtcagttcacttttctaggaaagcataaagaacatccgccaaaggtctctgagttacatgggaacagtgaatcatgtttcacttataattctggggtttcacaagggtacatgttttggttttgttcctctttcagtcagtcagctacaagcttattgtcttccagtatctttcagcatttccaagagctagacactagattct

SEQ ID NO: 69256 - DNA, 1291 bp, Homo sapiens
aaggttttcctgaggagtggtgactgaattgagatccaaaagaagagggggaattatctcggcaaagtgagagaggataaggaggcgggagcagagagatgggacactccagggccatgagttgagctgtgggcatactaaatgttttggatttgaaatgtcagcaacccaagaagggatgtgaagtaggaatctggatatacggtttaggcctggaaagggacatctgtgactcactggcatataagcaataattggagtcctaagtacacatgagttcacccagggacagaaaaataacaaggagtttcttaaggccaagaacagctttaagagacttcaaaaggtagtaggcagggagtggaggatcagcttgcaaggaaaacagaggagtgaccagagatgtaaataaaagaggttgtaccccagagcttagaacaggtccagcacacaggaagcatacaggctgcctgataacttgccagcctctgggcagagcacatagatgacacagctgtcaactatgtccacctgagcatacaaggtttctgttcatccaattgtcatttaagtggattcatctaccaccacaaagtgttgaatctgaacttaatctctaaagactgcctaaaatgtcttcataacaacttaccatatccccagaaggctgtcagtcacatgtctttgacatataagacagcagaaactgccaaacatctttcaaaaccaggagtgtcaaggccacaaggcgaaatccaggtagagcatggtggtctgagagtggagggagaccacatggctagagtttgccatgcagcgtacagacagccacacagagggaacgcaggagatctgcagggggtgctccttcagtctgtggctgagtactgaagagtctatacataagaggaaactacccaagggaaggaaagaaccactggaaagaacatgtcccagagctaccacaaggctggaagagagttcatactctcacaagtcgagtagagaaacctcggaatacatgaagcatcagagagtggaaacactcaaagggtatgactgccttagtagggggacaaatcagtcctgggctacagctgctctggtcctgcctataacaaagcttaagagacataaaaggatcaaattgtttctgattgtttctgagtcacctaactgcatcccaaaacaaagcttaaaaacatttaaaggactagcaaagatccagtcccaacaaattgtatgcaaagcaccaaataagggaaaataggtccaaaatgaagagtaaaca

SEQ ID NO: 69257 - DNA, 2099 bp, Homo sapiens
gtgtgaccggcctgagagttcagagcctctgaagtgtcaagggatccacagtgcaggtaggatgaagagtctgagaagggagatgggatcctccgaaaagagaaaatcgggtcttacagcgcgatgtaagacgatgcggatgccacttccctcccaccccgtcccgtccgaggcctccgccccctgcccctccgcaccccccgacccaggcacgcgcagcggggagcagcccagcctagcccgtctcactgctttggttttgaaaggtcacgtatttaccttagaatttcagcaccttccaacttactgttttaagtacctttaaccagcctattggctaaaaaccgaaacggtcctacccgcgactaccactgctccagtgacaatgctctgctgctacttatttaacggagctcaaggtttataattctcgaaagaatgttgttccccttccctttcccctcccgcctctgtacttgactctcgtaagaatgaaatcagaaaagtgcagaaaacacaggctcctagcaatggttcggggcaaacgggaggggcgaagaagggctggagccgccccggggccctcgctccggcctcgggagggcgtcgcggccgcagcagggcgtcccgaaaaccgtcgcctccgtgcccgccgcgcgagaaggtgaaaggcacgagatggagcctctccagccctccccaggaacgcaacctgacggcgtgacagcgcggcagggcagcctccccgggctgcttgcgggtcgcggcggcgccacggtcacggtcggcccgaagggacgcgggcaggggcaagaaggggcggcgggggctccgcgggcccgagtctgcaggccggcgccgaacgcagggaaaacccggctggacggccccacagcccccagaaggccgggccggacagggcccgacgagggagcctccttacgcgcgggcggcgggcgcgagccctctacggttgcctggcgccggagacccacagacaggactcacccagcttcctcaaacgcccacgccgacttcaggcgcgcgcgcaggaaggagactgctgcgccacaaccctgccggcgtcccgcggctccacctcagccccgggagcccggagctgggagcagacgcgaggatagagcgccggtgaggcggggcgaggcgccgtgtgcaccgcagcgaccaatcggagcgcagcaagtggccggccgggggcggggcgggacgcgagggggcggggagagggcgttggctgggcgcagcgggacgccgggcgctcctcgcgaccaatcggcgtgcagcaagtggccggccgggggcagggcgagctccgagggacggggtgggctgctctgcaggcctcccggagccggagttcagacccagctatctacggttccgggcagagcgggacgggcctctcctgtcccctgccggtgggcggccgccgccgggctcccactgctgcgtttctgcacgctgacttgaagtgcagtaccgtgagattacgtgcggacggagctcgagacccgggggaccagggtttcccttcgcctatggccgatcagtcttgtctgtctgcgagctgcccagagtagggaaggtgctccgggagggttctcgggaacggagggtctttagagatgcctttttctaatcccctcaattcagaaatggagccccagaaagttgaagttagtaaaccagggctacccagcgagtgctggttacccgaggtgatcctcacaatacaactagtcttctgatttcgctcggcgctctcccgtctattcacgtagatttttgtctttttttttttttttcgtctttcttatagtcagatatctttcagcctcttggattttcaacataactttaacagcgtttggaagccccgtctaaatttcctacagaaatgcctataaccatttagttgtttgggggaaagtcgagctttgttttttgggtggtttgtttgtttgttttgagacagggtcttgctctgttgtccagggtggagtgcagtggtgtgatcttggctcactgcagcctcttacctcccacgctcaatcaatcctcccacctcagccttccga

SEQ ID NO: 69258 - DNA, 1212 bp, Homo sapiens
taagctccacagctcgctaggaaggagctatctgccagaggccagaaaaaccatgatgaattgtgaggcctcccaacacgtttgctgctattgcaataacatggtctcgaagaggaggaagacttgtacactgacaatggccaaaaaatactggaagtggcttaattggaattgggatatataaacgctaaaacggagctcctgagaccccctattttctaggcaatcggtgccaacggtctgggagccggctgcgaaggtggttatcatggcaagggaggtcggtcctgccccgccccctcctcacctgcgcagacctggggtaggggttccgcggctcccgcccccctgccgcgcctctgcgcatgcgtgcgcggtccgcccttcactgcgggtgtccctcccaccgcctccagctggtgcctccgccgggctagaccatttgccactttacactgaggggctcgggggtacggaaggcagaatcgtacctgattgggacaggtgaccttaccaggaaaacggacaatcttccgccaaacgaactttaccccggaggacccaggcagggcacctcgggagccttcgtcccgaccggggaccaccagctccacctccgtccccgccccgagcggaggtggtccggccgattgggattgtgggagatgtagttcgctagaaggggcgatgtgcgcctgcgcctctcgggagggacttagggggcgtcgaaaatgatgtaaagaccgagttggcggcgtggggagttgtggctcggagggcgagggtaactttctgggggcaggggaaggcaaggctgtttccccggaacgggaccggaacaggtttattcggggtcacagaaggagtcacctgcgcagatacatgaggcttaaaacctgcccttttattaattcaagtactgttgaggggctggcgacaggccagaggacaaaatcaaaatagggatcttctggcttggagttcaaccactgacgtggggactgagcatttcccctctctgtacaggaagcaagttttttaacaaggaaaaagaaaaaggataaaaagaaaaaggcagaggcttgggagttttcagatctgggttgaaaatcctgtttcttctgcttgcaccttaggcaagatacctgcaaaatgagagttgcaataaatagtaaactatagtaaatagtatgccattgtgctaagtgcttt

SEQ ID NO: 69259 - DNA, 3804 bp, Homo sapiens
gtagctgggattacgggcgtgcgccgccacgccaggcgaatttttgtatttttagtagcgacggggtttcactacgttggccaggctggtctcgaactcctgacctccaatggtcaacccaccttggcctcccaagtgctgggattacatcacatccggccagaaataaacagatctttaaatctagagcaaatgttacatctttagtttgaatatagcagtagtgtgggaaaattctgtttactctagtggatcactgaaaatagccttactacccagtggtgaggacgcctgggctcctgagtctcacacagcgccttggcctgggtagagacgctgccccatactagcaggaagaccttgggggacttcactaaccttgggcctcattcctcagaatgggtaacataagcagaataagacaggcaaataaagccgtatcagaggatatggagaataaagtagaaaccaactacaaaattaaccaagtaatctgccagagacaacgggtgcataaagagaaagtacaccaatttagggttatgtcctaaaaatgtataaagacacaaaaaggccttgacatcttagaaaacaggaaaagtaaaagagcaaatagaaaccagctaacagtagcaagtgaaaagcacatggccaacccccacccaccgcatttacaaacaacaggaaaatttctacaaatcagtttctatggtttcactcagttcgcgatcttaaatccccaaaccaaagcctaagcgcgctccgtgtaaaagcggagggggtttacgcaccgacaccgggtggccacctggttcccgcttgcccgctcgccggaagtcggcccaccgggaccggcgcgggaccagcgcggcaccgcccctcactgccccgccctacgacggcttccctgccccattggtccgcgcggccctgggtctccgcggcgagaatctagtctgattccctcccgccctgggcgctgcctgactgctccccagccgagacacccaagccttagcacgtttataatgtgacagtggtacggggtgccacgcagtgtttccaggagcgccgggggggagcgccaaaatgctaaacccattcttagccaattgtgcgccgctcacgagtcagagctgagcagctaccgcggaaaaatctcgtgacacgcctgactcctgatgagactaaaatgcaccgggctttgaatgccggtcgcttaggacatccggcctattgctaaaaaaaaaaatgaggctggttatagaacgcactggggaagacacagggcaacagcgagttcctcctctcacatgccagtgggggcgggggctgaaaaattctctcccggatgcatatccctgtcgaaactgaacttggcgccacctgagagcgcctgaaagccgtgtgttaaacaccgggttgcccttcttgctcttcttcctcttcgcctttaatctcaggcacttagcaagcctgttaaggctcccaaacactgctggggactgacaacttatgcggacacggtcgcctcaagagagacggctcctgtaatggcgcctgcgtcagacactaacatggcggacatagtcgtgcgcggcgcaaacgtcagcacctctaccccagccgctcagaaacagcagaggagagcagggccgtgctcactgattggtccctcggtggagcgggccggaccgggcattccctttggagccaatcaggaaggcgagagaccgaattggcccgtgcgcctcctcccgaggcatgctgggagcctggaggactagcgaggaggagttgagagaacggagcggacgccatggcgaccaacatcgagcagatttttaggtctttcgtggtcagtaaattccgggaaattcaacaggagctttccaggtaaacgcctcccagattcttctgctcccaacggaccgttaggccctcacctagccttctttggcacctttcttcggagacgcagtcgttccccggctcaggccccgctagggccccgcctgggcctgggatccattttccgggccccccccaaccgcccccccagccgctcccttccttttccctcgaggaacttcgccttttccgaggtaacccaagactccctgtttcagaaccgagttaagatgttcacccttctcccctgtttgggtcccccctgccgtttagctactcgtaggcccggttgtccgccagggacgggcctagttccttcctcagctcctcctccgccgccgcgtatcccctccccctctcgcctccgcggattttgccggccggtgcctatgaccggaaagggtctctaacggccgtttcttggttaatcttaaatcctctttattattgcgagcttcagaccgcttgggggtctggatctattaataagattattcggggcctagtgtcctgtagtatctgtcagccgttctgatagttaaatgtttcaattaaaacgaactcaaactgatgcacttgctagtttgttaaaatactcgagataaagatggaaggggactttgaaatggttgcgattaattacagcaagtgaaagtggactttgtgtgtaggtctattattttcttgctacccctgccccagttgacacgctatttttgtcattgctggtagactttacataatttgcgcttggcttcacaaaatttgaaggcgaagagattgttaaagaaatggttgtttacttaggaaaatagtgtgtcatgttcagcggttgtctctcgatatttgcttttgtataagatactcatttctttaaagtacagaagtaggaaagagatcttgaaacgtaagtgttccgagttcaagtgtttttaattgtattttaaaagttgagagcaagagcagtacgtgaatttgaaaatgggccgaaaaccagttgtaagtgcccaaagtaatacaggattattagggcaatgatgtattattgctagaattatcacttttgcagaatgtgttgttttttaagtggaaatagatccactcacattgctttttaaatttttgtgatattgctagtagtgttttggatgagaagagacccgagctaagagaatataattttcctgacaaatctctggctgcaataagtagttgtttgcttagtttaacgaggtgtgtttttgtagcttttaaaagctagtctttcctttagaaaatgagcgttttattataatttagaagacatgaaaaaggagaaaagaaaaaactcacgttattgatattctcatgtcatttcatttccccccccatgtattgtgtgatatgtgatcatcttgttttgtattgatcatttttccagctaatacgttgtgaacaggtttatccctctcagtctcagtcttttggacttcttcatggctgcatagaatcccattgtaggaatatactgttgcatatttaggtggtttgaaattttcattgcttttcagtaaatgcggttaacgattgctggctttaagatgaaatcattacttccttgtagattaacttttaaaaccataattacttttctgattttcaaatttgtcataattatgtataaatgcttaggaaaattgtaaaataaagtgctacagaaggaatatctaaaaataatattagacgaagcagtttattactagaggaatatgcagcttctcttcaacacataatgcgttatcagtctgcaaacaagtttttgattatttgccatttcagtgagctgttttttttctcatctgcttttatgtaaattagagtaatgaggctgacatttagatagttaaaacaagt

SEQ ID NO: 69260 - DNA, 2184 bp, Homo sapiens
aaatttaaaggatgctgaagtttgcgttaaatatgtacagagcctcacctggcatacatgtttctcaataaacgcaagtacacctaaattcagaggcaccccatccaatctatgagtttcaacacttcagttttgtgtctgaactttagtatcaaaattgaggggaacagggaccggcgtttcaaaccgaaagatccaaaaggctttgggtaagacagatgctagtgaattctgaccccacgaatcctcgacattcccccatctccagaataatttggagtgcgtgagagaagggaggccctaaatcacgggggaagcagggcttgtcacctgccccatcgaacagcgtccttgcaagatgggggctctcagggtttttcgagctcttttccaagtcacctctaagtcctctccaaggggctcctcgctgccctctggggccccctcactttcctcgggaacgcgtcccgtgagcacagcccgcagcggggtagccaggggagcgctcttcccacaaacccggccttgccagaatcgcggctcccagggcggggtaccctaaggccacgggcggccgaagtcttcgcgcccatttccttgcctcgaacgcgaggactttccatcccccattcacagctggctcaacccacgaaagacaagagccccttggcggccaggctacaagacactcaccgggaccggggcctccggctgctcgcgggccggcccgtcggggggctccgcggcgacccgcggtcggttgtccaggcgggcgaaggggttcctccgagcagcggccgggccgccgccgctgccaccgcctctgccccccgcagcagggaaagggcgaagaggcagccccgccaccagggcggctcggcgggccgccggctccgtcagctcacggggcggggaggcggcagctccacggctccgggcccttttccgtcggagccgcactacctcgggcggctttcggaagcccggtgagtagccgggcaccgaaagggccatgacgcgcggcggctgagggtagccggccgccctacagagacttcccgcgcgcgccgggcccgcccctgacgtggcgcctcgccgagctcccgcccccgacgcggccccgcctccgcccccgccggttccgagcggagcatgcgcagtgggcagcccgcgagacgcagcccgcagcggcgatcccgggtggccgtcaacgcccactgtcccagcggtgaccctgccctggcgcttctgccaggtcctcggccagagtccagtcgccaggttcagcgacgcttctggaaagtatgcgatccagggcgctgatgtgcactaccctgtggggcaccgaaatagcttaactctatttaagcccgcagcagggatgtgatcagcccggggtttggcgcctggatgaaaaggaaacaaacttgagctgcggcgatgggctgctgcttccataaacttaagagagggcagtggctactgctctcaagaggcgaggagaggggactaggccaccttcctcaacccccagagaactcagataagacgtcagcacgcttcctatgccagcgcagcctaccgacatccctcccttccccgttcccagtgcctggtcatctcagacttccaggcagctgccactggcaagttaatgggatcttctttgatcctggggaaagccggagtgaatgaatagttgaaaacacaaaatttaagtgcctatgggctaagtcttttaagacttcaaaatatactcaaatgcttaaattatgacagcaaagacttaaggaaggtgttgagaacggagttgatacaaaattaatacgttactttgatagcttagcaaaggcctgcaacagcttttatcaagagtagtgtgacttttgctgaaagcagcagttttcttcatggaaggaattttatagcaggggcaaaatatatagaaacaatgaaaaggtttttagaaaaattcccttaagatgttaattatagaattatcttgatcatttgcacaagaatttttcaaacacttttcaaatgtgtcaactgagcatcttgtcttagcagagaaacgtgcttaaaaatgcaacttgttttatcttccttggtttttctcaacaatttccaaagaaaattctggcttcaaatactggaatatgttcatccgactgaggtctgaga

SEQ ID NO: 69261 - DNA, 4167 bp, Homo sapiens
atctcgctccagatgattccgccgtttagcataatgaagagggccgatctggctcaaaagccacatacagcgaataactactaactgctttccgaaaacagcaaagtgatgaggaagaaagaagtggctgagaagaagtaacagagaaagaaaaagacactcaaattctaggaacaagaagcagaggagaaaaacccaacctgggagattaagtggaagggcactcccagacctctgcctccataaaagtagagggagatgcaaactgagataagacctacaatcaaaacccgtcaaggtccaggaaactgtccctcaaatctagtcttacccacccctcagcggcctcagctaagctaggcctgggcccgaacaagtcccaggttagggttcgacgcgaaccaccatcctccccagggctgcacggttctgtggggcatctctccacctttcgcttaaaggcccgtttcccaagacacaggacgcgtttcccggggctcacctgcctctgagccgccccaacggcctgcaccttcaccaccgccaccttccagtccttcgtcagagagcccgccccctgctcccattggtcaggccgctcgtcactcctgaagggcggggtcggactcgcgaggctgtccagaacgccatggcaaccggtctcggaactacatctcccgtcatgttccgctcgggggcggagaaagaggcgaggccccgccccaaggactaccaataaatgggcgaagttggaatcgcccggatgggttccgttttatgcaaattttagccgaagaccacacccttcctcattccaaccataggcccggccaacccctttgggttgtgcttcgcctttttcctttccacattattctctccttgaaaacctccaataattaagtcaattaagtgcatcctatctagtgtctctcacggcaacgagcagatgcaccgaaatcgtgcaacaaaatctccataaaccacgataggcaacctcagaccataaatctcctgttacgcctacatggggaggagggggagagtgctaatcctgcccccacacagcccctgctgattggctcattcggcttgtcactctgttgtcttacatttctttggctcaccctctttgggttcgcacggtgggcggggccagtggtagggggtggtgagaaggtgcgggccccttcttccaattggctggcggtttccccacccacttatgggcggagatggatggtggatggggggcgggggaggcagcggagggagatgaggagataggcgggagcgagggagcgagggagggagcgaaggaggtagagaagagtggaggcgccaggggagggagcgtagcttggttgctccgtagtacggcggctcgcgaggaagaatcccgagcgggctccgggacggacagagaggcgggcggggatggtgtgcggggctgcggctcctgcgtccctcccagcggcgcgtgagcggcactgatttgtccctggggcggcagcgcggacccgcccggagatgaggtgaggagagggctgcaaggcggcggcctggaccacgggcggctgcagcgggggcgggggtcggcgcgggggtctgcgcgatggctgcccggggcatccgtcccgcgcccggcgcttgtctccccggccgcccttagcccctcgccgcgcgcccgagagacggcagcggctgcccctctgccttgtccttcccgtcctcgggggtggcggcggagtggcgggcggacccgcactgggaggccgggggccgcggtgggccgtggggtggcggccgcgggacgggcgtggggatgaatgggcgccgcggccccgccgccgagcgggctccctcctctcgcggggaccccgggcggccgctccttcccgggctgacctcgctgccctcggccgccggcgaggggcggcccggcctcgcctcccgccggcctcccggggacccgcgttggcgggagcggcgccgcctctgcctggagccccggctccttcctcggcccctcgctcgcaagcctgcagaatcctgggtcagtgaagggcaggcaatgccgttcggccccagggcgcgccgcggggccgcccctgaaggcatttaaaggggagcgtcttccgcgccctgtgagcgcgtccccgggtccgccgcgtcccttcccttcttacgcaccgacacggttttgtggtgtggacccaagacacaattgcagtcccttgcttgcacgaatgcaatccgaattcccaaaaaaaggaaaccggcgaggaatcggccgcaccttcctgcgcttctgcttgccttgggattagaaaacaacttcggagattacatttcctatgggcaatcttttgttgtgattcagactcaagaaggctttgctttggaagaaatagattagcggcttctctgtggagttggaggctatagagatttttatagcctcttcaatatgaaagtttcctctagaactttgccatcatcagtgctattctgagggcagcagcaacctggaaatttagatacatgcaggctccggccagatgcgtttctttgtgcttgtctgttggcattcttctcttgctgctcctcttgatcaaaacgtacagataataaaggcaaggccaatgaagagggtagataataacagcaaatcccatacaaacaaatgcctctagaaattctcagttctgtcagcggggaggcagttttgctaatcccgtggaacggatgaaaagaaaggcacagagatctcatggattatgtagtggacaggatgtgagggcaggaactggggccaggacccagcaggccagctggtttgcatggtgccactctaaacccccaaaatatgaataggaggaatgtatttgttgggatacctttatttttagatgactttaaggttgagagtgcagaagcttaaacatccttcatagttattatttcttagtttatctctgagaacaaaatatgtttctgtttaaaatttcttttactggtgtgcttgaaacgttattttgatgggagtttccttgtaagtaaaaacattgaaaaatacatacatatgaaagaaaaatccttagtgcagatgggtttgtaaagaatccagggacttttaagtcatataaattaagaagtgagggacactaatttgatgatggtgttaaaattatttcagacacctttaagtagtccagtggagatcatttctgatagtatgatctttttttaaaaaaatggtatttctttatctaggaatgcttctgttgaaattgctacggcgcatggtaccgtcacaaaactcttttattattctgcctgagtaagagaggaaatgaacaaatttttaatgtactttggaaccctgcggattgcacagatactaagcattgtgaaatagggcataaaatgagtggtagcaagttagttctgtgaaatgtttgtcgctgttagcatttttttttttttttggcagtcgactagcaattttcttttccctaaagcttatcttcaatattggtagtagaacctctgctcaagtttatcttttccccaagtgcctagactgggacaaactatcaagcctcctgtaagagattaaggaggagctgctggtaaattcctttcctttttttttttcttgaggcagggtctggctatgtcacaggctggagtgcagtggcgcaatcttggcatactgcagcctcgacctcctgggctccagtgatcttcccaccccagcttccagagtatctgggatcacagatgcacgccaccatgcccagctaattttaaaattttttctagagacagggtctctctgtgttgctcaggctggtctaaaacgcctaccttaaacgattctcccacctaggcagcctcccaaagagctaggattagaggaatgagccaccatgcttcgtccaaattcctctactctaaattatctttttaatttgctaacatttgtgagttgtagagaattgatgacacgagagttgggattatattatgcacctcaaattcttctgccatagagctgttcccttctgaatgatcacttcctcctgaatggctccacttaactggttgggtttcttaaagtgtgggcctcagatcacttacatcagcattaatggaggcact

SEQ ID NO: 69262 - DNA, 778 bp, Homo sapiens
aaacaatccccccacctcagcccccagagtgggtaggattacaggcaccaccatgcctggctaattttttttttttttttttttggtatttttagtagagatggggtttcgccatgttggctaggctggtcttgaacgcctgacccaaagtgatctgcctgctttgacctcccaaagtgctggaattacaggcgtgagccactgcgaagggccttgaaacaagactctaaagtgtactgtcgaaataccaagaagttgaatcacagaatagtttacctggggctgggcttagttcttagattagctttctgtgtcgtggtgatgtcatgtatcaggaatccttaacttaaaaaaaactcagtgataagtttaagtagtccactatctaaatgcagttgggtggggaggtggaaaaagtgatagggagagaaaaaagaggattgtaggagagagaaggaagaaaaaggaaggttgctttattgccacagttttctttattcataattgtatttgtatgagctttttcatttccaagtggaagaagcacagcattgaaatgtagtgactcacatacctgtcaagtccaaggattctgattggcctggcatgatcgtgtgtctgaacccatcatatgaccaagggaaacgtgtactctcattggctctcctgggccttgggtctaccttttcccccagttggtgagaccagtacctaaactcgtggaattaacagaaagcattaaagagaagtaggatctgtcaagaggagaaaaaaacgc

SEQ ID NO: 69263 - DNA, 722 bp, Homo sapiens
aggatgggctctctgccatgaggagtaagccagtgcctccagctactggctagaaacagggagtgttgtcaggagatctgcactggggctgaaggacatccccgcctacttcccttttgctcttcttactatcagtctttactaccgcagatccctttctagggtccacgacctttgctggggtaaagtgggatgcagggatggggcctggggatgctctaggcagtttgcatgaaggagtggctccattggtgttaaagattaggccttctgatactttcttctccacttgtactttgagttaaaggctcttacctcaagagattttctttactctgtggccatatctgtaactgtccttaactctctgtgcatggcagccccaaaccttcccagtggaacagtgcaagctcagagccttgcaggtcagtgaccccacacttggcacaggaattccagggaaaagtgtgaaagggcagtaggtggctcctccgtcctgcttctttgaaaacctctgacctaaaaggtttttgaagctgaatatttaaagaaaatatgtatgagattgtagagatagatgcctaggcggctgaaggggatgtggcaagtggatggcctccctcagggctcctttccacctgtggtggccacaggttcaagactcctgtccaaacattctggtttgtttatgtgttccagaaacagacagagaagaaggtatt

SEQ ID NO: 69264 - DNA, 780 bp, Homo sapiens
agcaaaagaaggaagttcaccatttcattttatttacttagtttcctttataaaacctgaaaggtagtacaaaaataaagcaaccagaagccagtttcatttatgagcatagatccaaaaaagtcaaaatcttagcaaatagaatttcacaatgtatgaaaagaatacacaatgaccaactttatgccagaggtgcaagattggttcagagtcgaaaaattctatcaacattagtcattatttcagcagataaaaggaagaagaaaacttgtgatcggattggtaattacagattaggcacccgatgaaaaatacagtaaccatttctaataagtagaaaggaaactacttaaatatgtgagactactatccatgaaaagagtcaaactctgtaaaatatttgaaaaggtttattccaagccgaatatgagtcaccaatggcctgtgacacagccctcaggagatcctgagaccatttgcccaaggtggttggtatataacatggttttatacattttagggagacataagacatcaatcaatatatgtaaaatgtacactatttcggtctggaacaatgggacaactggaagcagaggcttccaggtcatacgtggattcaagagtttttaattggcatttcattgaaagagttattatccaaagagctggaatcaatagaagggaatgtgtgggttatcataagtggttttggagaacaaagttttgtcatgcgggtgaagcctcccggtagtagacttcagagaaaatagatggtaa

SEQ ID NO: 69265 - DNA, 3087 bp, Homo sapiens
atcttgagaggcagtgctggaaaggaagacgtatttatttctccctctctgactgtagtttatttaaactgagtctcctactgtgcgtttgtctgatgtctaaggccactttcataccagaagtgaagatgtttatgattattttaagaaatgagagcttattttgagagaagagtagaaattccaggaattcttcttttttttttttttcttggctaacataggaaatgtgttttgttttgtttttttaattgagacagtgtctcactctgttgcccaggatggagtgcagtggcataatcttggctcactgcagcctccgcctctggggctcaagcgatcctcctacttcagcatcccgagtaactgtgaccacaggctcatgccaccattcccagctaattttttgcacttttggtggagatggggttttgccatctggtcttgaactcctgagctcgagccatctgcctgcctcagcctcccagaatgctgggattacaggcacgagtgaccacaccaggctggaaatgtgttttaatcctggctattagcgcttcctgcaactttttttttttttctttttaagtctgtttagtgaaacagtttcccggagatctctccgaggtcccttcctcctctaagattctccgaatcttccctgaatttgcctgaggttgagcagggtggagacagcaggtggtagcagcggcaaaagatgttaaacttaaagagaataactttcaagtttgtaaataaagcccaatacaaataaagatggtaatgtggacaaaaggtcaggttatattttgaaactctaaatctttcacatggtcattctttatcaaacatccatttaacaaaaatttattatgtgtcagatgctgtgctctgtgtttctcctctttttcattggggcttaatttcctttttacaaagccctgcggtagtagcaaatgttatttaaagcattgtgattgcatgaggtcatggagtagtccacatacgcagaaccctggtcctcctgtacagtgagtatttgctgactcatctgtatgtccttttcctggttcctgtttaggtccccaagcaagaactattcttatgcagtcaagtttaccacaggctcagctggcttcaatatggtaaggaatgaaaagttctttggtttggataaagtggaaacttggttagattggtgtggcctcatgggttttagattaataccgttttttatgggggaatatgtagaatttgcttaatttcagtgagttgtaatgattgcctcttttataatactatttcccctctcaattttgaaaaatacaaaagcagattaatacaataaattctgaaggagtgataatacaacttaacaattctcaactcgtgaccagtcttggctctccctgtctttgatttctttttctttttttttttttgagatggagttttactctagttgcccaggctggagtgcagtggtacgatctcggctcaccgcaacctccacctcccgggttcaagcgattctcctgcctcagcctcctgagtagctgggattataggcatgcaccaccatgcccggctaattttgaatttttagtaggacagggtttctccatgttggtcaggctggtcttgaactcccaacctcagatgatccacccgcctcagcctcccaaagtgctggaattacaggcgtgagccaccatgcccagcctctttgattattttaagccaaatcttagttattatataatttctactgcaaatattttagcttttatcttcaaaagagagggattttcctttttttcattcattattattattattacttttgagatggagtctcactctttcatccagatggcagtggtgccatcttggctcactgcaacctccacttcccaggttcagcctattctcctgcctcagcctccttagtagctgggactgcaggcatgaacccccacgcttggctaatttttgtttttttagtagagacagggtgttgccatgttggccaggctggtctcgagctcctgacctcaggtgacctgcccacctcagcctcccaaaatgctgagattccgggggtgagcactgcgcctgaccgactttcttcttagcacagtcataacagcaatagctcacctaagtttttcagtagtcatccttatcattaaattaatcagggaatgttcacattccttagagtgcctcagaatgtttttatagttcatttgttcagctcaggactgaaataagcctgtattttgcaatacttgagttttccatcttttatgtctcctttaatctataaatttccccttgtcttgttctctgcttcttttcccaagtcccccaggccgccccccaaccaaaaaaaaaaaaaaaaaaaaaaaactccgttaaaaacaaaccagatcatttgtcctgtagtttcttaatggcttaacttttgaagagtgcgtcactgtgggattgtctaatttgtttctgtatttcctgtaaattgataattagatctagagcaaagtttcccaaccccagcactattgacattttgggcccgataaatctttgttgttgggggatgtcctgtatactgtaggatgttcagtagcatctgtggccactactcactggatgctagatgccagtagcatgagctccacacccagcatgacaatcagaaatgtctccagactttgatagatgtgccttggggtacaaaatcttccctggttgagaattgcggatcagatttgatttttttttttgttttgttgttttgtttttgataagactgtgccagagaggtctctgtgtactctcctcaaaaggcacataatgtctctattgtgtaatgattttgaatagctatcgatgagcattgcctgggtcctacaggcttccttaaatttaaatgttaactagaatggtttcttaagaagtgtgcatgttatagctgtatgttggtgattgtccctggaaaataaactttgtctacaagactcactgcaaagttcgtgattttcttgcaggccacattgatagggttgtttcacaaatgatcaa

SEQ ID NO: 69266 - DNA, 1628 bp, Homo sapiens
tgaggtcaggagatcgagaccatcctggctaacacggtgaaaccccgtctctactaaaaatacaaaaaattagccgggcatggtggtgggcgcctgtagtcccagctacttgggaggctgaggcaggagaatgatgtgaacccaggaggcggagcttgcagtaagccaagatcacgccactgcactccagcctgggtgacagagcaagactctgtctcaaaaaaaaaaggaatgttaattcttaaaatcagaacacaaacagtttatttcttataaacaatcatatactactttagatgtatgtagatattagcatttttgttattcttataagaaattggatgttatacttttttcccctccaaatatttgttttccttttctaacataaaattctttttaagccaattcagcttttgacagtgggaagaagtaaaactcctattctataattctaaaaacaaaattaaaaattagcatatttgaaacttttataatagttgacctttggattgagattctaggccaaattgtctagacatctgagtttgaggtatgtgtgctgttctttcagagtattaggtaatgatcttttctcaattgtacgattccaggaaagtgctcttaggggaaatattatttgagccaacttagtgtttttcttcactttgctttcatgcttacatggtgtgtgtttgtgtgtacactatatatgttctatattcatgcatatatgattatgtgtggtatgtcagtattggaagtacagctgtaaattaaccatctctagaataagtgcaattagaaacaaaaaaacaaaaaagaataagttcaattaaagtatgctcacattaactttcattgtcacttgtctcttttataagcaaaaaaaaaaaaaaaatagcactgttgcaaagcctatgttgctttttaatagtctcttgggatataaactgttaaatattaagctctcttctgaacccaggcagtagtccagatttgtgccttcacattgattctttttctagaaatttgactcccctaaaaaaggttcaggtattagaaaatgatactctagtgagaggcttttgataaatgtctagaagattaaataattttggtgattgaatttctgttgccattactaaagagaacacccttaatatgtggcgagtcacccctactttgtttaattgactatggctgctttcagtatcacagagtttcttacataaaggccaattttagcccccttttccactagccctttttccaaatatgcttatttttaaataagagtatttcttcttgttttttaattttaattttggctttctcttattaactttaattaatatgatgagtttaaaaaaaatcacaggtcaggtcgggtgtggtggcatgtgcctgtaatcccagcactttgggaggcaggtggatcacttgagcaagtggatcattcgagactagcctgggcaaaagggtgaagccctgtctctacaaaacacacacacacacacacacacacacacacacacacacacacactagtcaggtatggtggcatgtgcctgtagtcccagctacttgggaagctgaggtcagagaatcacttgagtctgggaggt

SEQ ID NO: 69267 - DNA, 898 bp, Homo sapiens
attattttcatctaggtttcatccttaggctaattatttcccaaagaaatgtagaggaagagtgtcttcatcggggattatcagtataaccaaaatcagcacttagtttttatatgaccaggttaaagagcctaaaacatctgcattttcatgtttcagtatggaaactggtgcctctgttccctcccaaacaagttgactccttggctgattcagactttgggtcatatcctaactgctacattgtactcaacacactgggtagggaggagggcgggtattgatgctttacagatctgcactgctggagcccaaggaaagaggcagagacaagggacctttaggcagcctcgccgcacccaggcttggagtgacctttgtttagagagagtcactaatgaactctctcatgggtttttgttgctgacgtcagatttggctgtgctttggcattcagtatgtgtttcagaaattccttgaatggagggaaatagttcagaggttaagataggcaatagaggagaggttagttgtttggcttgttgtcatacatttgtgttctctgtaattatttatttttgtcccccccacctttttttgtaaacagaaaaaggtccacttaccatttctgcacaggaaaatgtaaaagtggtgtattaccgggcactgtacccctttgaatccagaagccatgatgaaatcactatccagccaggagacatagtcatggtaagaaagactccagtgagagggtcatttctgttgaagattagcctctgtcctctttttttcactttattcaacaattgtgagattgtcagtgagtatgaaacccaataatccagcatctagatttttaaagtataagctcaatcttctttcttttctattaaaatga

SEQ ID NO: 69268 - DNA, 790 bp, Homo sapiens
tcctcctgcctcagcctcctgagtagctcagaggcgtgtgccaccacaccgagctaatttttatttttttacattttgtagagacagagtctccctatgttgcccaggctccagatctttaaaagttaaaatcaccttaacagtagcaaaaacctcttcaagtatactccatggcttcattcagcacacagttattgactgaaacatgctgggtgccagccttactcatcctttacagaaagaactgttggtttgggcatgccactctgtacacacaaatggtaacttgagccagcggggtgtgtttctgtcagctttcctctgacttcaccacctgctgtttcctacaccgtggtttctgatagcctgaagctactttactcatactgcctcatatttgaagtagtgtatcctgtaaagcagattaattgtaaaatatgtaaacaccatataataggaatctaaaatttctgaaaatacaatgtcacatcagtgaggacctcattacaattttttttttaatgttaaacaaaccagcctaatatttttgaaactggattttgttgcaacacaaggtgcagagaagcagctcgctctcatcctaaagtaagggaatgttatgaaatgtgatgatgaggaaatgttgcaggtgatctgtatcttaatgagaaagtgttgctctttttcgggaacatatctgggcttcacttgtaatcctaggcctgttgaaaccttttcctcgaattggctagttaaccaccagcttgatgagatgcgtagagtttagata

SEQ ID NO: 69269 - DNA, 1203 bp, Homo sapiens
aaatactccagctatggaacgtgttttatcaaaactgcttgtgaggattaagactttttaatgcttatgaaaaaattacctaagatgccaggaaggggtcatgatatgtaaagcaccatggtgagatgcagcacaaacagcataacattttttcaaactcgatcttctgggtgattccgtgggttcaaatctcaattctaccacttactgactgagcagccaaagactcatttaaacttttcggcctcattttatttataaaactgtgaaatgtgttttacaaatattccttagcattactagtaagtgatctctgacaggttttaccacaatggcaaaggaagctgatttgggggctagtccatgccccttccccggaattcagcgaagggcagaccccctctcctgcgcccctcaggctagcagcttccaggggctgtgctcggaagacgccaaggttacggcacgcgcagccccgcgcctactgccccgtaggcatcccgggggacaaacgctgggtcgtcctgagtcgctcccactcgccaggtcccataaccttgaagactgccagacttccccagccgaagcatcgcaccctggtgctcgaggtttggtaccggtcatcccaggagggatcctcccactggctctcaggaccacctttctctcacctgccgggagagcccggacactgctggggcagccatcttctcccgggcggctgtaggtcaaacccgagtgggaagagagaaacgcgcaagggcgcacgcgcgcgttggcgtaaccgctaggttctctgggaagtgtaggcgtagggcgtcaggccgcaggcgcagagacctccctcgggctgggagttgtagttcttagcagtggtaagggctggaccctcggggtggagccacagggcttcgactgcatctgaaaatgaagtcattgttactggccaagcggcgctcactgtagaatggatttgctgtccccagttttaaaatttacatttagataaatatggtggcatttgttccatttcacagttattaccagcgtcactggcttctttacacttccttcccagcatgctaaagcctgcatcaatggctttttctcacgttgcatacaaagacaaaaccaaaacaaaacaaaaagcccccaggagccttgcagctccaggagcggacaccacgtctctcttacctgggc

SEQ ID NO: 69270 - DNA, 1110 bp, Homo sapiens
tttttcttatcttacgtcgcagtgtactttgtctcttgtaactcctgcaggatttttcttaaagccttacatggtgctgttatcacgtggcacaaaatgaagccgacctctttgtgtgtgggaatagagggagcattacactgctgggatgcaacagatggagggtggaaagctgtccagcaccttgtctcttccaagatacatagcccaggggtattcccattcctccacgacacaaatgacaacttccttgagctctgatggcttgccaggtggctgatggcgtggagaaccttgctcatgtttacctgttcttgcatccattactcacctctgcccacgtgcccccacacttgcacacaaagccacagagtggcttaaaaaaaaaaaatgaaaagcctccccccaaccctattgtaaaatgtcaagtgtttcagttttgagaaaaaagaaagctgaagaaaccatgactcatgacatgggctgacaaacaacgatctgaaggtatgctggtgagtcacactgtggagctctgcctttgtgttgtggtgagggccggggctggaaggagtgtcatgggaccagccagtaaaattccactactctccgaagccgattgggaggcaatttaaaaaccctgggctttttccagccccagtgtagtggatgactctgggtcccctcaggtatgtcgatctgtatgggaaatcaggaagaatgattattaataactggaaaaaaaaaacctgttagtatctttccatgcccaatgccatgctgaaccagccctgcctgcttctgcaagccagcgaggctgctggattttctcgaagggtattgagttgctaagcaacagcactggcggcgcctatcatgcccagcgatgtcaatgcctgagtgtggcctgcagagcacatttgctcccctccccctcgcctcctctcgaccccttccccccactacatgagaacattaatttgcatctcagggacaggagctgtgccaggtgattctgtgtataaaacagcgcagtgcagcccctgaagcacaaatattgttttgggttgcaaggcggtgcatgtgacgtagttgaaaatacagactcatttg

SEQ ID NO: 69271 - DNA, 2147 bp, Homo sapiens
ccccatctctacaaaaatacaaaaaaattagccgggcatggttggcatttgcctgtagtcccagctactcgggagactgaggtgggagaatcgcttgaacctgggaagcagaggttgcagtgagccaagattgcatcactgaactccagcctgagaccctgtttcaaaaaaaaaaaaaaaaaaaaaaaaaaaaaaaaaaaaaaagccactgccttgaggcatcaacatacaatatggaagagtccctgagctggggccacagggtttgcttggtaggcactgtgtttgtaggagtacagtcttaactgctgtaacaaaggggctccaaagtacagtgacttaccaagagagaagttgatctgtttccatgtcacagtctggaggtcagcaggtcagggctgctggggtagctccacatccttaatacgtgctttccatttctgtgtctaaggagataccctggttcttctcctctccttccagcagtggaaagggggaaagggactgggcacaaggggtcgatgatactaccaattttttgagggcaagatcaggatgtgaccctcatcacttctgctggctttacctcgtcacatgaccatggctactgcaagggagactgggaaatgtagtctttggccaggcagccatgttgccagctaaaatttatactacagaagtatagaaaaacaaaaattgggagacaaccagccacctgccatagccacttaggacctcacgaaaaaaggcaagagtgatagttacctctcaaaagggctctttgctgggttcccttggcagcaagtgcatagtacaaagtctaactccccatgaaccagaagggaattcaggaaatgattcaggctccctggctgactcaaacactcaggatcctggagagaaaagtagccatacacccatttggggcttggggtttagtttataataataataatgactttggcacagaaaacttcctgagggttaatgaatgactggcttggattaatagcccaaatcactgctgaaatctatcaactccttccagcttcatattaatctacaggaaattctttgtataccgagctattacagcttcaatctcacaaaataaaaatgaatggatgtttcattagaacttggaaaaaaacttgatcaccattgtgggtggccaccatgctgttattattttttttccaggcacatttcctgcatttcctccggttctctttctggcttcaatttgctgcagtggcaacagcagcagctggccctctagactaacatctccttgctatttataatacactttgcaatgctcattatttcttaactttgtcttcccagatagactgggagctccatgaggtccgagacaacctgaagacgcccagctcagcagagactggctacggcaatcactcagtaactatttgttgaattggacataatagaagagctgaagaattttaaacaagtcaccatcagtgcagtggattcctcaaagcaaacctggaaatctcggcatgagttggatttaaggcagtacattttcagctcctgaaaatttgaacagtttctcaagagaacaacttgaaacagaaaggcaaggatgtagatgtggttgtagaagatgatgtctgcggccaccaaactgtccactgtgaagacaaaccatgcatgtttagtaggcagtggctcctcttccctgtggggagtcccactgcttccctggcctgggtgttctctgccggtagatgttattgacaaaataagcaaagtcctctgattctgagaattagagttaatgatagctctagattgcctctgccatgctatttaaagtcctgctttattgtctgacatgagttcggcatctatgaggacttgtccagtgcaaagtacaatctccactgaaagatatcaccagcacatcttgtcactgtgctgtagcaagctgggcagtacaatgatgttggcaggatcctgtttaggtggaggatggccacctgggcatcaagaatcttctaccctgattccacattgactccccaaagtgggcttcagacagctctttacttacgtcttctgattaaagcagcagacagggtcccagctagagaaaagttctgggagcaggagaggtg

SEQ ID NO: 69272 - DNA, 625 bp, Homo sapiens
cgtgaccggccactgctgcctgtttttgtactgcttggcaagctaagaatggttttcacatatttgaatatttgaaaaaaatttttcaagaataccattttgtggcacacgaaaattatatgaaattcaagtttcaatgtccacaaataaagttttataggaacatagcatgctcactcatttaggtattgttacggctgcttccacactacagcagcagggttcagaggtcatggcagagaccacgtggcccacaaaggtgaatgtacttccctttgtagaagctgtttgccaaactcttggctagcagagtgagtcatgagagaagagagaagtgcatggactgaggtctgtccagggcctgtcaagagccagtaaccgttgctgtgcgtcaaggatgccaagatggtgcctgctccatgagcaacaaagcccaggggcccagcaagccaaggctgcttgcctcttcccctggggccagctgtgcatcttgtggatggctgaagttgagcaacccataacaggctcctgacccactgtgagatggtggcatgtgaaaggaccagcatccaacagtcttgcccttactatattagtaatttcctggggctacaggagctattta

SEQ ID NO: 69273 - DNA, 745 bp, Homo sapiens
atggatatatatatagagagagtgtattttgaaagccagtgtgtgttttatacttagagcacgtctcagttcgcaccagccacatttcaagggtttgacagccacgtgtactagtagtggctgctgcactacacggtgcacttctagagggttcaaagtttccattaaaattgtattctaggacaccagccaaaatggcaaataaggatctccgaaaattccctcctccataaaagcaacaagaacattatcaaaaaatgtcagaatcaacgttttcagaactttggaaattaaccaaaggcttgcagcaatctgggaaacatttatttaagaaaacagcagaatcttggtaagaacagggagctttgtggcactttaacttgccgtattcccatccccaccctccccagcaccacattagctgtgaaatccaacagcctgcaaaacgacctgtgaccacaggggaaagtccggcagtcactggaagggcttagagctcctcaaggcccattctcggagaattgtcattatttgacctctctggtcacactacttgcaaggctgtttttatttgagctgacttagagctcatccagcacaaataaaagcagccttgagagtagggtcaattattgaacctcacagctgactgaggtagtggataacaagtgggatagacaatgtgctaaccaaaaaacataaaagaaaaagcagaggaatgggatgtccttggagagagtgggcg

SEQ ID NO: 69274 - DNA, 2379 bp, Homo sapiens
gcaaacaaggggcagaggcctcagctgcagggtactcaacctctaaggaagggcgctggagaaaactgcacttgcagagcccctggctggagggcggagaaccatgtgggtgtaaagggatggcaagggcagaacgtatgcccctgcccaccttagacagttgctaaagggtctcccaggcactcagcctagcctttaagtgaaagcggaggaaacatttaaagaaatgagatagagttaaggtgttcgcctgccctccgctgaaacacgtgggggcaggtcaggggcacaccacaaatgcccgtatcgcgcctgtgtgtaccaggcaccgtcctcggaggttaacgtgcagtaactcactcgggtccccactttcggcacaggcagcaggcccaaggtcacgcagtgccaagggactgagtcagacccgagcccgcgcgccgcggcccacggcctgtgccagcgcgctcctcgccgggtagggggcctggtcagccgcgtcagacctgagagttgtggctgggggcgagagctgcacccccctaccgaccccgggcgggaatgttccagaacccctgcgagcagccgttggccgcacagcccccgggccggccgcgaccccgccttgcgccgcgaaggtccctagctccggggagtcgcgggcgaggggcacgcgcacggacgagaccgcaccgcagcgcacgcgcactggcgggcactcactcgcccgccgcccgggaggagaaggaaggcatggaaagttccagccggttcgagagctaggtagcaggcatggcaggaggcggggtaggggcaggcagggtcgcgagggggcgtgcggccgccgcgagccgctctgggccgcgtctgcagcaccgcccctagccgcggccggcgggctgggctggggtcggggcgggggcggtgcggcgggtgcggggctgcggagggggcgtggcggccgcccgcgggcggagagggggcggggcggcggcaaggcgcgcgggcggggcggggcgcgccgagggggcgtggcgcggcgtctgcgcagctgccagcgcctttaagcccgggctcgcgctctcggaccgtgctttcgccgcctgggagccgtccggcgcagcagtttctaggtccccactgtccccgccgtcccgccccttcgcgtcccgggaaccggctggcttccgagccgcactcgccgatcctccaggcatgccccgctacgagctggctttaatcctgaaagccatgcagcgggtaagtgaccttccctcagagccggtcttcccgcgcgggcgcccccgctgccgctaggccgccgtcccccgcgcgccctggccgcgggaccccgggccttcctgcactcctcggaggaggccggggcggcgggcgggcggcgggcgtccgcgggaagggggcgcgcgtgggccggccgggcccggccgcgtgcgcgcgggaggcgggggtgtgcctgcgcgtgtgcgcggtccgggagggtgtgcctcgcaagcggcccgccgggcggggggcggggcggaccgagcgggccccgaccccgatcccggcgccggcccgcgggagtccagtggaaggtccgcgggaggacacgcgcgggcgcccagcccgactccggcccgtccccgccagtcgtgaagctgcctcgtcgccggccccgccgccgccgcctggtccgtcccgctccgccgcccgccggctgccgccgaccgcctccgctctagcgcccgccggccgcccggaacgtccgcgcccaataaagcgttcctccaaagcttgtttgtgccgttgtctgtattccagtctcttgcaatcgctctcatgttaaaaaaaaatcttttgacttttctttttctgacttcagcgaaaatcccgctccgggtgcccttagcccagtttcattcatccaagttgtggcctttcttgcgcctccagaagacactttcttccccctgcttttgattgatcttgaggtaggggatttcaggtttggagggatgctaagcgaaccagcggcccctttcaggtgacggcgtggccaaggacaggggcccgcggcccggaggcagctcacttcgtcctctgtcctgggtcatgtactcctcaagtcgtcgccgaaatccccattctcccgtgaattcggaattcggtaacgtagtttggtgttatgtttttttttctccaccaggtgtaataaaacaaaaatcattgtaccacgtccgaactttgtaagcacagcttcctacagcgctagaggagtggacgcatttttacgtttgaaattaggctccaggtcaattgcgaggagtattaccaagtttggttgaacttaagctcaattgataaactaacaatcacgga

SEQ ID NO: 69275 - DNA, 372 bp, Homo sapiens
ttctcctccagcacctgagtaaatgctgatggtcttgtggagagtggattaagagtacgagctaagttctcaatcccaattaagaagcggaaaatttaaactgtcttcttcaaagtttatcacaaccaccaccatcaagacagcaaaccaaaggacaaagactttgaccctgctgtgttgctctgtgtagtccagttcacgtatggtttacagacttggctggggttactaaaaataaataaaaagttggacacttctgtcattggagcgctattattcacaagttaccagaatgagagctgtactggacacagcagacattgccatagtggccctgtattttatcctggtcatgtgcattggtttttttgc

SEQ ID NO: 69276 - DNA, 2333 bp, Homo sapiens
gtgaaaccccgtctctactaaaagtacaaaaaaaaaaaaaaaattagccaggcgtggtggcgggtgcctgtagttccagctactcgggaggctgaggcaggagaatggtgtgaacccgagaggcggaggttgcagtgagccgagatggtgccactgcactccagcctgggtgtcagagtgagactctgtctcacgtctcaaaaaaaataaaaaaaaaatcccgatgaggtgtgagtaatgcacttatggttttcttttttttttttatgttcagaaaggaatgtttggggattttgagataactagtttagaattttgtctcttgaggaattattaagaaaaattatccaaaacttagaactaaggcaaagtggaaaggggcatgtcctctcaatgttgtgctgggacactgtgtgacaggctgagccaggagttgttttgagggagaatatacctgtgtttaactttaccgtttactaggtgataagcccaaacacagtgaagtcacacgtaacttgtcaatttctgtttccaagaaaagataaccagaaaggttgtagtcttattcctgtgtaggacattaaccagtttgtgtgtgtgtgtgtgtgtgtgtgtgtgtgcacgcctgtttgaatcatggctttgctctatcacccaggctggagtgcagtggtgcaatcatagttcactccagccttgacctcccaggctcaagtgattgtcaccactcagcatcccaagtagttagggcccaaggctgcttgccacctacacccagctaatttttgttgttgttgttgtttttttttgtttttgtttttgttttcggtagagacggggttttcccatgcttcccaggctggtcttgaactcccaggcttaagtgatccacccacgtcagcctcccaaagtgctgggattacagatgtgagccaccgtgcctggcccggttttatatctaacctagcagtccttctcgcattctgttttgttcttaaatgctgatgaattccacaaatgctctttgattcctctttactatcctcttggcttgctcattaatgagttcaatgttcattttatatttgtgtgagagtcatgtgtttagattttgaaactcagtactttgacaggaaggagaggagacattagggcaataactttaagagtgtgacattgattctcctctgcctaagatgaatatatggtcattccttgaagcaggaagatgaatcagttctcaggtgacccatgaatagttaatcccttggtgagcaagagctaattggattttttttccaaccttaacagctaactaagcaaggtctgcctggtgggttgtgggtgaagccaccctgggaagccagggtgggaaagagggaattcttttttttttttttttgtgagacagaatctcgctctgctgcccaggctggagtgcagtggcgtgatctcagctcactgcaccttccacctcctgagttcaagtgatttttatgtctcagcctcctgagtagctgggattacaggcacctgtcaccatgcctggctaatttttgtatttttagtagagatagggttttgccatgttggccaggctggtctcaaactcctgatctcaggtgatccacccaccttggcctcccaaagtgctgggattacaggtgtgagccaccgcgcccggcctggaaggagggaattctggctgctgtcgtgactggggttctgaaacaagagccctggtggatgccagggtcgaactggagaatcagatttcagaggggaaggaattcagggagagacaagttctggtgtggttgcgggagaaggtggctgaagtgggacgggaagctcattggagcagaggagttaaggcagagagtggctgggagtcaaaggagccgcctgtggcggtgctgagctcctccctgatggtgacaggccctggggtggcaacaatagcacctgctctgggctgtctggagggaagtggagtgcctgggggagacccagaccccaggcatggccagagggtggaggggccctgggagggaaaagggtggcagtgaaagtctcttttaaacggaatggggggaaggagtgcaggatagcgggggttcatgttgcagatctatacagggaatgagggtctaggagagagctgtttttttgttttgttttgttttttgttttcttgagacaaggactctgttgcccaggctggagtacagtggcaggttcacagctcactgcagcctcaacctcctgggttcaagtgatcctcccacctcagcctcccaagcagctgggactacaggcacccgccatcacgc

SEQ ID NO: 69277 - DNA, 1353 bp, Homo sapiens
gtgagggagggggcagggtttagcttgataatcttattttgcagtggtttctggggggattttacgatgaagaggtaaattctaaggtttgctgtcgactgtttccagctccctggcgcactttccgtgcagcgaggggacgtccaaaggctgcagcagagctgggttagaaaacaggctcccacccgccctctactcccctccctggccccgctgacctgattaatcagagccctgcaaagcccactgaggagggctcctggctaatctcatctccgcacccacgcggggacagacacctccgctcggccaatgagacgcaattctgcaaactcggctgagcggtggaaaattccatgctctcggcgctgccctcggtggcggccctggcgggatcgcgcgctcggaatgccgcagcccggccgccgagtggccaccagctggggaagagctgagcgaaaccgccccggggtccaggcgttttgccacgagtcgccgtgcgacaagttggggtctcccttgttctcccacctctctgcaccaaaagctcttgaagcaaattaaagaaagcaggcgatgcttgtatcattgcggagtggggaatggagctgggggacaaatggtgacattctccctccctccgtgtgtgtgtgtgtgtgtgtgtgtgtgtgtgtgtgtgtgtgtgtgagagagagagagagagaaagaggccacagtcctccacccccacgcttgcccacccaagttataaatcctgcctgtaattgtccccctgcctccaccaggctttcaacccagaaatcgtgggggagaatgaaggaggcacctttctagatcaatccacctatgaactatggtgcccttttagaagtggccggtgggtcctagagagcaaagggtgatgagttcgcaaaggtggacgaaggagaccaagaccagcagtcaaaaccaatggagcaagaccggtgccatgattcagagacgcacagaaaattccagggccaccgagaagggacacgttgcgcattctgccagcgcaggggaggaggggatggaggcgagatggaggacaggactttgccagccagggaagggggaggcgccccgagcctgcgttccagtccccggagctggggccgcagcttttccgcgaggttggtctgtgttaggaaatcctatctttcttaactctgtgtgaattatggcaatacctccctgttatttcagaggatccaggcctgtttctgctccttgcaaatgtgaaagaccctggtgaacgcagtccaaaaatttagaatgcgacctggtgcacagcgctcagctcgaggagacttacaatggtttcttctgcca

SEQ ID NO: 69278 - DNA, 878 bp, Homo sapiens
attgaatgggtaaaacattctacatttgcttttattaaaacaagaaatgaattttgctgcatttcaatttatagattttactatcctacctcgtgccaggttctgtgctaagtgctgtatatatctgtgatcacatttaacttttataacaagccaaatgagcaggaactcttatctctatcttacagacgaagaatccaaagaccagggacagtaagtaatttgctcacctggtttgccagcctccatgacacatcgccgtccagttctgcctttaattaccaaagcacaacacgctgctttgattcccctctcctcggcgccagaattcaagagtgaagttaaaccgcaagggctgagttagaagattggcctcagttccctgttcccaccagcaggtggcaccgtctcctagcggaattcttacttgaacgttttgcttccatttctgcagaggcatggtgaacacagttacaccaccaaagtgttcctcctggctgagtttgcctatcttgttcagtgaagacaacccatgaggacaaatggtgttaatgagaagcttttgcggagttacagagatcctcgtatttctttaaaatacacctaataacgttaactctgcaataatttgtagatcatgttaaatcttagctatcttcctcttgccacccagtgtgcttcaagccacatggttcagagcaccatttaatgtgaaactccaattttaaaacaaagtgaaccttccttttacaaaaccatgagacaagttacagagtaatgaccacccacatgaccttgaagtgattttgagtgagtgagtgtaacttccgtggctgccatttaaattggattcaaatccaaatggctccacctccatg

SEQ ID NO: 69279 - DNA, 2174 bp, Homo sapiens
agcatagctcagatgctattttaaaaggagcccaggatagtggctgatttgatagaatctatacccagattacccagggtcaagtcccagctctggtacctgcggcctttaaaaccacgaaaaaattactttaatctctgtgtctccatttcctcatttgtgaaatggttatcattatagcacgtcccttacagccttgttatgagacttaggcaatagccactagtgcttagaacaaagctatttttgtaactttctccaggaacacttcccttaacagaaccaacccctccacccctcagtttgttcttccctccacaccctctaacattctaacataaccacaaagagtcctgatgggatttggagttacactgcctgggttcgaatctcaattccgccactgccattcgcgcgttttctattgccagccaccttactctcccctggcctcagtttcctcatccttagaaggggagcagagcacatggtggtaactccctgcacattcctctctttccttgtattgggtgcccagtttgtgccctcacatggcgctagcactgagtgggctcaaactctgtacgcgtttactaagcatattgactgaagaaatctggaaacctagtaccgcggcaccatatcgttaccccaaaggaaaatgcatgcacgctgtcagagatgacgaacactgcgtctggaaacttcttaagggcacccacgtgtcctcagctgcagacagcagcgaggagacacccagggaattcgagacagcggaaggcggaagggtcccgcaacaacccaccctccagctcaggtgagttcagagtgagaacgcaccgccaggcttggacaaaggcacccggcctacaccccagcggctccccgccggggcctacgtggacttcagcctccagccacagggacaagagctgctggccagggctgcccgcctgggctcactgcgcctgcgcagtgagcagcgcgccccaggtcttctgcccgggcccactgcgcctgcgcacggagtagtgcactctcgtcggcggcaccggcccactgcgcctgagcacgtagcggtgcatttcgggacctgtagttttccccggcaggacggtagaagtcgtggtttgtgcgcggccaggcgctggagcctccgctgccgggagcagtaagtgtgtgacgtcggggtagaagggagtgacccaaattccaaaagctctttgggatgctgcgatgtcgcggccggccccgcgctcgggttttccctcctagacaaaagtctgccggctcccggtcgcgccgggtcggggatccggaaggtgaaggccgccaggccccacctgcggggcgcccctgctggacctggccgtcgggcgccgtcaacccgttgagcagcgtgttccggctggcacgtggcccgggcggggcccaggattggttcaagcctacggtgttggtccccggagagtctagggagacaagcaatcccctggaatggtgggggaagcgatgacagcccctggtcctcatccgcagctctgggggaagtcggggggtggggagggcgggtgttgctccctgagtgttgggggaagggtatggggagaggaccctgaactagcccccaggttacccaggaggagctgaggcccagagaggttcagcgactcgcccagggttgcacagcgagcacaggcaccgacgtcgccctccgaggcctgggcttccagcagggagagacccggacacctgtcatcgcttctcggtggatccctgaaatgttgagttgtggagtctgggcagctgagatcgggcagggctggtttcttgtaggcccaggcttccgtgtagagggccaagtgatgcccaaggttcacctggcagccccctctctggacctacccctccttatgattgggtgaagggttgggtgaaaagggtagaggccgggaatgagaacagcttcagaaagctcagacaaagggcgcagcatgattcgtggctggaaggagacagcaagcgatagactgatccttgaatttgttagtgtgccaagaagaaaaagtattaatagattgtggacgacacattatccatattgctttagttggtctaaccaaaataagcgaatagcttttttgtttctaagagaaacctgacaaaggaagaca

SEQ ID NO: 69280 - DNA, 1219 bp, Homo sapiens
agtgttgggaggtgggacctaatgggaggtgtttagtcatgagggctccacccttatgaatggattctctctctcttgttctctctctctctcttcccgccccgcccacccctccttccccaaccttgtgataccttccaccatgtcatggcaagaaggcccttgccagatgtggcccctccatcctgggttcccagtctccagaaccatgagccaaatgcatttctgtctgttacaaattatgtacggtgtggttttctgtgatgaacacagtgctgtaccagggccctcttgccaagacagccagcttataggagcctgcatgtgaggcccggacgtcctacagagcagcagttagaggtctggccttctggataggcactgccctgccctgcacacaggaccttggtggggcatgatggggctcttcaccacgctgccctcattttaggaggtgggcaaccctttctcccccttctccatgtgcttctgcagttggaagaagtgaggggggttcagacacacttaagctgagcttagagcaaagcatgtccctcaaggtgaccttgccgcatggcctgaacctagaattcccctgaccagggtggacagccatcaccatgggcctttctgcctggcctagtatggctctccttcgaactcacctagacccttgcatcaaaggactcggggactctgctgcagtcatcctagcacggtcgagaggagtaggaaggtgcccagcggctcagcctttaaggaggtctattggtcaccattgcttctgccttcttgagaaccatcaccctcggaggatccggtagtgtatcccagtcaagtgtcaaatgcgttgttccctggagaggaaggcttatttccagaaagtactctgacgttttgtaatttgtgatttctatcactggctcagtggcctacccactgctcagctcatgtggcatgaccaggctggggcgtcgggtcatcttgttctctgggtgtgtggcaacactggtttatggcgtaatttccttcctgagaagaaattcagtaatttctaatattcagggctttaggtagaggcctgaaaatcactctccatgcctctttcagtattttatatatagttgtctcttggtatccatggggtttggttccagaatcccctgcagataccaaaatttgcgaatgttcaagtcctttatatatagtggcatagtat

SEQ ID NO: 69281 - DNA, 9009 bp, Homo sapiens
taagtgaaccaaggacaaactgattttattacgtctatttcctaaaaagccttctccaataagccctcggtgaaggaagtggtatattctggagtatgcagaatttttattaacagcatttgcctctggaactgtggacacctctttgcaagtggagaccctgttttctcccattcctaacctaggggaagactccacaccctcagccatgctcatgcccccgggccaggagctgctgtggggggagcacacgcttcctcaaaatggccatttctgatcttgaccttcacgccacaattagcagtaagtaatgtgagtcttgctttatcccacagagggaatttccgtttggacaatgttttcagaaatgtaatcttttcaatatgaaactgctgatggaccaagaaaacaaaaccctcaacccaagggaacatcagattgctggtcaaggagaaatgaggagctgacggtctcagcatttatttgacttgctccacggacagagcaggagaaggctcaaacctcttcaccccaagactctccctcacacctgcctcctcacccaaaccctagaggacaggacaggaaccaccaacattttatggttttcaaaaatcctgcattgaacactgactgtgagccaggtgctgatggaagtgcctttcactcgatgatctcatctactgctcacaattccaccagttaaggcccacattttggacaaagagcctgaggaacctaccccctccccgcagtgctcacacttttgtccctccagaggacgggaacttcctctttctttagcaagctctgtaggggaccagcccacaggccctggggtagggcagcccgaccgcggcccttccctcaccatggcctatggttctccttcccttttcctttaagaaggccaggtgagaatcacaggaaagggagaatttattttgattaaaaataacatttcttaaagggggcatcgattttccctttccaaagtccaatcactcatccctatccggagcgacagaacctggggccggggctcaggcctcccacgcaggctgtgctcagtggacacaggaatggattcctgggacactgcggggggtggaggggcgtgatgcagggtccccacgatcagccgcagtctctctaacactgcaggtggtgccaagaggcaggcatgctcccagcacaagggacggtggcgcagaagaatacagagaagctcacaaaacatgccggcatgggctcaggagagctacgggggtagtggtggtactgctccctggtgcagggcagcagctgtgtctccccctgcctccctcccacccgagggccctgctcacctggccccagcttggagatggcatataagagatcatagtttatgactggggtcgcatcttccacttgtttccatcccactggcggagaggcgggaggggagatcagaaactgcttgtctggatttggcggagccaggtgtgagcttcctatgtgtaaggtctgaggagagaaaataagcacaggtcagttgttgccagggaagaactgcagtgaggcaacagcacctaacgccagttccgggagatgggcaggtcaatgtccaggcgtcaggacaggtgtgattccaggaccaattgtaagatggtctgtaatggggagggcaaaaggacatatgaactctggttgtggcacagataggatgacagccccctcccagggctatgggagtcacaggcacagggactgcaaataattacgcttgacctagatggacagaaaatcagcagaggtgactttagtatatatggaaatttaagtcactgtcattgaggtcaggagggctcttggaatcagtctctccccgctcctcataccacagaggcaagctctgaaagtccaaagcctaggccacagttctgagaggacacagcttctcagggacagggagccagggctccacctgcccctagggttccccacccagcagcagctctgcacctccctctccgggactctggatcagatgccagaaaaaaaaaaaaaagccacttcccaggagactttaagaaataagaataaggaacaataacctacgatcctagtttggttttagaaatgctgaccagtgatgagagggctgtccatagagctcttacatctcaagctgcgcggtgtaggttttctctgcacttccagattgccctccccaagttttcacaatgaatatgcattgttttacaaacagaaaaggtcagaggagtactaagtaattatttgcataaaatcttatcccgtgcagaaaggagtgtactcacacaggaaggcctaggcacccaaggtcaaagctcagcctgtgcctcccagggcaaaaaggtcaggggtggggcggggatcccaaatgctttatttatacttgaagggcccagcaagttcgctgtcctcactttgaggaagaaaagacactttggctctctggcgtggtgtcagatgagcttcctcccactgggggaggcctttggacagggtcctctcccatcccagcaaggtatgtgtgtatgtgtgtgtgtggtgggggcgggttgggggggtgctcagagcctgagggggacttgctttactgaggagctggctgcattctagaagctcctctcttcttccctgacaatctgtcagcccctaaggacatcaaatggaactctgggagctgccttgaaggtgggtcacctgtcctaagttccccagaggagggtcaaaatggtagtgggcaggagaaaaggcaagcccaaccccagctacccctctccctgccgtgggtgccctggggctgggaaccctgccaaccagagggtttcttagcatctgcgcccagtctggttatcccctattttcctttcaagccagacctggcagtcctgggctgatttgcaggcatcttctgcagactcctgtttctctgctgagtacccccagcaccacatgagcagggaaccactctggtctgctcagtctagagtgggtcatgagctccaacccttgagcaaattcatggaaacctgctgcgcaaaccttagggtgtttgcatagccacgcctaccccgctgcaccctgcaagctccccagtgaacagggaaggctttctttcccccatcattatcaacccaggaaggtcaggggcaatgtctgaggttgctttcaaatgcaccttgatatcttcttaaaacaagtgagacgctgaacattcagagtaggaattttgtctttctcaaggtgaagtctcagagtttccggtcagcatataacataagcaacgtataagctgctttacaaaagggagggagggaggagggagaagcatgcatagcaatgaacccaactcacctgagcaaaatataacttcatttcctttcccagaaactcagtcttatgcagctggagcctggcatctgctgcggagaaggggttgctgaagtttattctgactcgtttgaagctcttaaaatactgaaaggtgatgtccttgtcatacgtcctaaagagggactcaaatttggcctgaaaaataacaataaaaataaaaggagttgaaatttacctgcatatgacccttgactagatgatgtcattacttttttttttttcttcgagacagagtcttgctctgtcacccaggctggagtgcagtggtgcagttttggctcactgcaacctccacctcccaggttcaagtgattctcctgcctcagcctcccgagtagctggggttacaggtgcctgccagcacacctggctaatttttgtatttttagtagagacggggctttgccatgttggcaaggctggtctcaagctcctgtcctcaggtgatccctcggcctcccaaagtgctgggattacaggcatgagccaccgtgcctggcctcctcaatacattttttactgaggaagtggatcatcaatcctttcaagaactcctaacttctttcttagagaaaagcctttcccctcttaggggactatggcctttagtcccaatgcaggtgattttacaagaaggtaagaaggtatgatttattacattcatcgaatcagcagaacagttgccaatacatagacactacttacggtaacaaacttttttaaaaagtagaatgagcattttccagggaggtacagtttggtaatttgctccccatgtttctctgtcctatggccttcccccactcacccccccttttttctctgtcctatagccttccccggctagccaactccaaccccaccgttcagctcagggcagtgttgcatatatcaaagatttctttaaggcttaaaagaactgcagctaatttgaaaaaaagaaatactgacttgaaaaataacaaagttggtagaaagttttgcatttcttaaaataagtagtttttaaaaatttccacgatcgcttttatctcagtctgttactttttaactctctaaaatgatactggtttaaaaattaatgttctgcaaatggaccattttctgcatcctggctttcgtgtctgtgcacacctcgctctggtgccatagggctagtgagaattaggagatgtcctgagctcttagaatgcaaagctcgaggtgggggattacaagcttaggttgctcaggggacagccccctaggctgggtcctggagtgtggctgtcggtgggggcagctgggggccactgcaactcctcagagagggagtttaactggtggacagtcaaagctccaaggaagactgcatgggcttctagtcgccgggttttgtgaatctttttaccaggcaaaaacacttaggacagtttgtgggagcccgtgtgaaaggcagaaggggctggccaggaagaaggggatggcgcagggtgtggatggtaggcagcgcggacagagctcactgaggaccttggagaacctatggaaggcgcagtgtctctgcagtgggagcgaggattcaggataagagaggagagtgtcttcaggaatgttcactgctagcaagcgcggggaggcactggtggatgcctgctccacatggggctgcgggtaggagcagggtagtcggtccctgccaggcaggtcgttaaggagcagtcggaacaacctacgaccttgctctccttgcattccccggcttttcttcagtttagggacatttctgagactttcccacgagggatcccgcagaggcacgtgcgaaggaacgcggagctggcggacggtagagttcatctggccgcctctcactctttttccccacctctcttgagcacgggcaagtttctggcaaaagtgtgtcttcgtacatttggaattttgtatgacctcatcaataggcactgtgacccactgtttagttttgaagttatgattcagaatttgggagagatgactttgaagaatatttttagaatacaggttcagggcttaggaccagaacaaaagagaattcacattatctttaaaatctagattactatgatgcctttctcttataaaagaatcttatttgttctaataactgatacctagttattatagcttttggatggcatctctacttcatttaaaaaatagtgattttactcacataaggctcatgttaagtgaactcactttgtagtactttaaaaacatagaatgtgctctgcaatctagtccaaacactatggtgcgagcccataagcattatatacaattatggagttacatttgattttttttaaaaaaagaaaccttcgcatgtcccaatatggctttggatataaagcatataacaccaccaggcacaaataccacccctcaaatagagcatacaggattcattcctatacagtattattaaagctcaattagccggatagctgctgatgaaaaaacttacattttaatcaaatgaagaagaaaagtgtagtgattaaaatgattatattaatcaccatcaaagagagctgctgcccaggaggcacactgatctcacacttaatttctccagttttattatttgctctggcggcattttctcttgttagagaaatctgggagcttgaggccaggccctcataattactacaaacatacaaatatctttataacatttatttcctaagacgaaatgaaattattcacaacgctggctacaaaagtaaaacactattcactgtcagaagaggcctctttctgaaaagttcacttacaacatacacagaatgaaaaacacacgatgccccaactctcgccttcctagtgagttggttcaggggcctggatgttgtcaaatattgagatctttagaaattccttcctcagttaattcctcaggcaacagcttttgattttcaaggctcgaaagactttggatttctttcaaaacccccaaacccacaagagagccacattctcccaagtattcagttaatagtcccagttagcataatgctttgaaaactaaagaaaatcacgttatattagaagccttaccctggtttcactttcgctgaagatatcactgtttgccacacaggcaatcagggagctaaaactgtagttaaagtttctaaaatgcatcttgctttcttacagtgaaagcgctacagacccacgcagtcaagcccctagtgagattcctttccaagaggctgtaggttccttcttgagctggtgcttataaagcagtaagggccagcccccactccctggggaaaaaaaaagtgcagcttccacagcatcctgtttggacagcaaattcctgagtcaagtcctgcatgcttgcaggcagacagggacaaagtgtaagtttctactggaaagaggtgacgtcaacaccttagtcattttccctatgctaattaactttgcttggggagaatggaaaaaacagctgaggtttgcttcacagctgctttatcaacctctcttgcagcatagtttccactggtagtaattccattcagctactcagacaacacgctcctcggccgaatgggacgacccttcttaagatggaaaatgttacaaaagaaaaaggatgaaggtctgtggcaataaacagcaattagactgtagggaaatttcaaggctttgggaaacctggaaaccaaagtccgggtgacatacttgatccctggaatttcctgaaaacctcaatcaaagtttcactttggggtattagagaaaacattttgaaatctgtcttggtcaataaaaattttaaaggacaaaaagaggaatcattttgaagtgtagttaaaatttttttccccagtgacattttattggatgaatgtcccaatttctacttgtatcccacagtggaatggagcaaacagaacctaaaacaatcctaggattttcatttgaaaacttcattattataatttgagaactggggatatgaaacacttcgatcattttcaaagcactactgaattcaggcaaaggatacaaaaacactagcctttgaaactgagcaatctagcctttgaaactgagcaaagaagcattaacccatttatgccagaggttgcaattttttgaatttttgccatcagaccttggcaatgaccttgagcaataggatataaataactcccacatgcttagcgttccaataatggaacactaggcataaatgggttaagaggtcctgcttaaagactcataaactaaatgtaaaaaaaaaaaaaaaaaggaaaggaagaagaaatggaaagaatgtacactataattgaaagggaagatgcagggaagatgcctggtttggagaagtgctctgcgatgcaagactgactctagttctttcaaaaggttgcaactcttgaaccttctaagtattttaccagtttagatccctatggcagcctgggtcctatgttcttctcactctctccaattttattatcacctaaaagcactcaagttatttaagcattctctgatttaggggcacacagggacagctctcaagcttccagaagttaaatggaatcctgccattcacatttaaaaattaacttcaaagaatcattaaagtcagccaataatttaaaatacatgcaagaggaagaaacaaagcagggcatttagccttccaaaaaaggaaaagcaaagtccttttggatgagtgagtgttgcttaatttcaacgcactgtgccttgctgccaactgtagagttatgtaagaaaccagttatggtgtttgctttgccaaattatccataactcccaacctgaaaagacataaacgcatgtattccaaaaaagtgtagaatactgaacaatgcaacatgcatcaaacaccaaggggaagtggtcatcctggatgatgcttcgagagggaatgtgtatgcttgcagtcctgcattttcagtacagggagcctttgtctgtccagcaggcacatgaagattgtggtggtgggcaggagaggctaaggggaaacagaggtgaggggagcagacacagtcctgcattccactcctccagaggggcttggaacttctctgatgttccctccccctctccaactctttgtctcccccttttctcttctcctggcatgcacctgggcaaattccattaaaaggtgatcagaagagacagaagaggctaatttagacacaagaggctgatttcactgtcttcttttctcttttaaaatcatgacacaaagttccagctcaattttgtgggcaaatctcaaacatctctgttcatctgagacaacagtgtgggctcacccgaatatacaattttgatttcgttatatggatggaaaaaaaaaaaaagaacggtgaggtatttgaagattattcaactgtctttgctcatagaaatgataaatctttcactagattgcccaaaaacatgtaattctatatctgcctttgaattgatcggttctatctatctgaattgaatttagtaaacttgagcacttccatttttagatcaggagtaagagccggtcaaaatggt

SEQ ID NO: 69282 - DNA, 2002 bp, Homo sapiens
ttaagactgaggtcacagttcatactagatttcatcttgtttgttaaattccatgtgcgctcagaattccattaactcttattccgtattgcctcaatctttccttaatatgtaaaggttaaccaccccactgtaacttcttggaaacgcactgcttgcaatgtttaagatgaaaaaatagccacaggcaaatcaaaactctacttaatgacttggagaccagcagatgaggattaggggaggcaacatttatttggagattactggggccaaagccaccctaattaattaccctttatttgttctctctttccagagccaccttgctttaattactgactttaatttctgctttgatgccattctcagccaggggcacagcactgcagcagcaaaaacctggggaagaacaatcacccaggagtgggctggctgtggtcactcaggcccagggaacaccagtgtctggttagccctcatccctgcgctaagcagctttcacaaccccacggctggttcattctcaacaagtcagtccttcacacgcaaagtaggaattctactttccagggttaatgctgcctggaaaaccttttccttccgctgcagcattccatactctccttagaggagatgattctcccagggaggctggcgcagtgaggggtccaggcacacaccacgccggcacctggtgaatagctggctgaatgtcagcggaggagtaaaggtgagagggtcatggagggaaggggaaaaaaatgagcaagatcaaaatctgcaactcttcaataaagacagaaaacccagttctgaatggcttcgctaaagatcgtttgtatccacacccagtttcaaaactcaagaggcaggtcagaaatggttttctgttgttggtttgttttttctttttcaccaagtgctgggagaaaagtgagttatgtgctcttacctgctatttccattaccatacacacaccctgtttccatgtctgcagttgagaagtcccaacagggcactgcaaacgctttctttctgcatttggcctgcattctttgctgatgacttaaaagcctgataacaagtcacacgaggaagcatgtcctgtcatcttcatgaaggtcaccaatgattcaaaacatactgaaggaacaataaactacatacaaagaacaagcaagaccccaccacaacttggatattatctctgtccacccaaagagagaacaactgtgccaacctggttcatcaggaaaatctaggtgttcccgtcaagtgactaaaatgtgggcacacatctttgcaccgagtatctgattcctaagagctgttccctttccatcaggcctagaatggcccagttagttttctcctggtgaactgtagcccattaacattgacggaaaattagttgttaatattgaaaaattgggaggtgtcacacagaaatagaacttctgacttctttttggtggtggtggcccggggagatgtggccaccctgggcccagagctccatttcactgtggccgagcagatgccccttgttggggaacccatgctcttcaaataccccaggcctcatcactgtctgtggtctactcgcccctccaccaatgatggctgctggctgaccagcccccagggcatttcaatttgtggcttaatttggtaattcatcaaaaacagattagtcacctgctagggccagccatggtgtgaggtgccaggcgtacaggcagagaagtttacccagctctggggctcaagctgttctatgcctaacaatttacaccgaattatacatggagagggcatggccctcactcccacatggtaattgtgtgtgtgtgtgtgtgtgtacttattttttcatctggcccatgtatgggcacatcacattcctatgggtgactccctgggcatctgtgaaatgttgtctcccactcctgaaattatgctgtaaatgccagggaatggtggtgacatggttatagcgac

SEQ ID NO: 69283 - DNA, 1429 bp, Homo sapiens
tgtgcttcagattcttcatctgtaaagaggataatcacaggacctacctcatgtggtggtggtggcacaaattgacctaatgcctacattgaggcttggtgcataggaagtttccatgaaagcgttcactgttatgatccacataggtgtgggcctcagactatgagctgggctgaatgacagcccctccctagtccctggagcttgtaaatatgttgccatacatggaagaagggactctgcaggtgtgactaagctaaggatcttgagactaggagatgatggattaccagggtgggcccagtgtaatcaaggtgtctttataagcaggatatggcagggctggagtcggagatggagacaggatgatggaagcagagattcgagtgatatggggccatgagccaaggaaagtgggagtctttggaacctgggaaaaggcaacgaaacggattttgccctagaagtaacgcagccaggctgacacctgattttagcccattgagactgattttggagtttgatctccagaactgtacagtcataaatctgtgctgttttcagccactaaaattgtttggtaatctgttacatcagcaacaggaagcaaatacaaatttaagactggagaaaggtagctttatagaacatccagcagctagaatgttcaaaggaagttgggctttggaatcaataaactgctgtccttttatttcttcttctcctgacttaggcttcgagggatgacattttctttttaatcctagcatgtgaagtggccaaagctcaggcttgggtgtcagatgggcctgggcaggaaccctggctgcagtccttacttgctgggggtcctcagtcaactggtggtgctggccaagatgaccacagtggcactgacagccagagtcagttgcctgctagccattcggagtggtcagtgcccacgaggtaccagttactatgtgctatgaatattatctctagactgaatcctatgaacttcagtttcctcatttgcaatttgggaacaatctaagtcaaaggttgttgtagaatgtgcataggtaggtgcttttcagactgtggctgccacagcagcagtagctgccttacttggcaacttgccagaattcttgccctacctattgtggtaggctgaattctcaaatggccccctggtggacaagctttgcatgatcccgggactctgtgatggattctgtttccacagttaggttatattaccctgggagattatgtggggtgaacacttaaaagggaccgggttctttctgaagtcggagaaaggatgggagagacattctctgttgctgattctgaagatggagggggccatgtggcaaggactgagagtggcctcaaggagctagagtggccacggggatctgaatgtgcttagaagcagatt

SEQ ID NO: 69284 - DNA, 1980 bp, Homo sapiens
aggaacgcagcccaggagagaaccggttccagccttgttaaccttgagcagagaaccctgttgtgcacatggtgatttctgacctacagacctgtcaactaagaaatgggcattgtaagccactagatttgtagtaatttgtcacacagcaatagaaaactaatatatatttactgaatcagaaactctgctggtttttgtttgtttgtttgagacagggtctcactgtgtcacccaggctggtctcaacgagcctttgctgaatctcttccttgtcagaggagactgctggtccccaagatagaaagtaaaggagacccagccctgctgtcaggaagcacccgcctcgggttggagtaaaagtcacacatgggacggggctgtaagtctcagcaaacagcagtgcgagggacgcacgtggaagaggggtagtgagggcaccttgtgggcaggagagccttttaaagactgtatgacgtgaactccaagatctatccttgaaggccagggagtggttgaaagatggagccctctgatttctgacttcacttctgcaaagcctactgtgtcatttactcctcaccatcagtggagcgagagcctctgggaccacgtctcccgagtcccatgcctgccatcatggtgcgggctggaccagccttcttagtgggatatgttccccatagaaagtaaaccaagaggcaaaagcaaagcaaagctacgaaagcaggctcagtgcccccgccccttgtttcagtgtcacctcaagtttgcttcttgctctcagagggagatcacagcattgcacaacgggcagtgttgactatttgctggcccttgtcacccacccttccaaaactcgggcagaggacaatctgaacaccagtgtgacagtttctaacaaaaggctttgctagtacagtgcctgagtgtgggtgtccactgaaaactaatttcagccctgactaagaaaggcatctcagaaatgaggaagtgtattttgggctcctgtggtttctgatgaaaaatgctgcaatgtggggcatgggtgaaagggaaacactgagaaaatagatgtgacccccagtatgcttccttgaagaagtggggggctggccaggccaggcacaaagatcctttgtgttccctgagcctgtgacttctcccgctgtttctcagcagttacactaacgacattgtggaggaaacagcttctccttgcatggccctgccccttgcactctagactgtttagcctccctgctggtcagtcccctctccctacaaatgccagcagctttcccccagtccttgctgcaaccacaaagtctcgcaaggattttcaaatgccactgggaggatagcggtgccacccatggagaataatgaccccaggccctaaaatgaaacaggttgctctaacattcgaagaatagccccagcacaccaaatgcattcacttaatttcttgttcaacagaaaagaatgacctcttttaatacagagctgctttgaaacatgtcatttcaaacaggtcctaagaagatcctgatatttgtctgtatcttaactggatctctgtgggttgaaaaacgctcatagaaatgttgaaggacatcagtcaatctttaataagatgagatttctcagagatacaacatgctgtttgaccatctgaaggatgctaaaagaaagtgatttactgaaataaaatagataacaaacatttcagtgacttagaaaatggcgagaaatcacgtcaggcaagtttatatttttgtgttaaaaaatccccacctaacaacactctcttccttacatttcttcccagcaggccaagaacttactaaactctggctctagaagaaaatgacattaaaatgctgactttacaggtatatagtctagcatttgttggcagttacttattagtttttttttttttttagaaatgtaaaaactattttctttgtttcaaac

SEQ ID NO: 69285 - DNA, 584 bp, Homo sapiens
aatttaatcaccactagtgtaattggtttaccaagaaactgtggaaaatgatcatcctatttcaagaagagctcccttttatcattaaggagacacagtacccagttgttccaaagacggtaggatggaaaatctgcagaattcaccttcaccttctctgaagcaaacacagaaaatcagtgggaccagaatacaaacagttaacccactatggcccagggatttcgcaagaggtcaaggtaaaaagtcctcgaattaaaaattccaggagatggctccctctgcccaatgaggactaggttgtccgagggctggactcatccacatgccttttgggtcccggacccactgcttctccagtggcaggcagaagatcacagaatactggaggcgcctgtagctccgacaccatgtgccctctttctggctcagttccattaactgtaaaataagggacatcctggggctggtggaggtggcacagggggtgactaggagctaatcagggggccccagggtggacccctacttcatgaggggctgctccactttgctgttttatgtgttggagttcagtgaaagaa

SEQ ID NO: 69286 - DNA, 432 bp, Homo sapiens
acttaggtctgtctagcactagagtctgggttccttccatcacactgcatgggatccttaactctgagtgagccagggtcctgtggaattctccaaaactgctgtgccctataatatggtgactggaggggaagaaatgcaggaaagcttgtggaaaatttttattcatacccaacagctcaacaatgtagtttaccttagatgatccctaaggaaccacccagtgacatcattctctgattccataattgtccaacaagttcctccttctatttcccaataaaagcacagggttttgcattacctttgtcagataagtgcaataaacaagtcacagagctctgcaggttcgtacctgcaccacccctctctggaggctgtgtcctctacccgagctgttcttttctggcaataagagttggggcccctcca

SEQ ID NO: 69287 - DNA, 2167 bp, Homo sapiens
ttgtattggcagcagccttcaactatagttcattgacagcatttgtggacccacagccaagcgctgaaagcactgctttttttgacagctgctctcctaatggggcatctctcaaagaccggtttcattctgtgacgcccacgttgtccacattttattctgcacaataactgcagatttgaaataaattcttcctccccaccaccattattgattactcatacctgcccctcaccctccaaagtgtctaaattgtgtggattttgcgggggtggggggaggcgggggaaggagtcgactccccatgtactgggtgtccccgatggcggcaagccacaccttcacacaagggggcaaggttcttgactaaatatcctaaaggtctgaaagatggtccccttccccccaacacaattccaccaaaactggccagccgctggctaatgagcaaccacggatcctcacccaaacattggcttttcttccaatagtgcagattgggaatgcagggacgtcgtcctatttatgaacactgagtcacgtcgccgctcaatgtctgtttcctcctccctaggaatgaggtgaccccctcctccagcgagtaaatgcggggcgatggcgagagcgcagggggcggcggcgctgccccaccttggggagcgaattcacccccctagtcgcaccagcctgggcgcacacgggggccggggcgagcctgtgggactctgcagtgagctccgcgcgccccgggggtgctaggggaccgggaccctcggggcgccgtccccacgccccagccctgacgggtccgcggccgagcagcccgggggacgtcgctgcctccccgccccgcgcgcggccgggactgggcgctgcgacccgcgccgcctcctcgggcaacaagtgtccgccctccgccccgacggcccgcccggcgcggtcctcacccggcacaggccgtccacgaacacgcgcgggtccaggtgacaggcgatggtggcgctgggcaggtcctgcaggtccacctcctccatctcgcagtcaatgaagctccagtcgccgccgccctcgtccgcctcggccgcccccgagaggggcgcgaagggccgcagcgtcaccccgggccgcgctcgcgcctcggccgcctccgccgcctccgccgcggccccgagctggggaccggccacgccgtcctccatccccgcgcccgcgcgaccctgtgcgccccagcgggctgctccgggcttgcgcgccggagcctcacgcgctccggtccgcgcccggccggcggctccgccgttaaccccctcggaatcgcgcggcggcaggcggcgggctgtcagcagtctcccagcgacacggcctcccagcgccagccccgcccgtcaccgttccgcgcgggaggggcagaagcccggcgcggcgaccgcccccccagcccctagggccggccaccggcagatccaacggtggcccctttaaggccggcgccggttgggttattgtaccccgcccttccaggagacggggccaataaaggaacggaattctcttcacgtgaccttccttctgccgcccgaagcccgaagcctcagggcggccatgttggttaggggcaaagtcctcgtccccagttccgcttttctgacagctggtgccagctgaaggacgccgggcagagtcctcggctcttgggcccttggggtgataactggggaggcaacgtttttgtggttcccatgcggggacgttttgaagcacaggggcccacttttgggaatttaagcgagacatagtctccctgtggctctgtggcccctggcaagtggttagatgcttaccgtatattatcagatatagtcgcaataaagactgaactagaccatgataacaatgccttacttttctatttcagcgtattagtcactataccattgtgaaaatttatgtaattagaagtaatttttctgaattaccattatatgctatgtacaataggacataacgaaagaattaagagatcacccctttcctttggggaatagcggaaaaataagaggacctcaagtgagcagacatgtctcttcctgaaaaatagaattcttttttggacagtatgatacagtgagaacttgggtctgaatttcagctttgctttttaactact

SEQ ID NO: 69288 - DNA, 688 bp, Homo sapiens
agtcaactgataaggaacttcagttacatatgcaaaatcccttcccctttgccctataatgcaggctaatcagaggagtggtattccatcgtattcataggtcctacccaccctcgagggtgggagagttacacagggcatgaacaccaaggcccaggaatcttggggtcatcttcaaattatcctgctagagatgagtctggggatctgtgataacccttccaggggaagtcgccctcatcaatacacaagccagggttgagatcagctgggatagtaaaacctcactttttcagggggtcccaggccataccctagcatcaggtgtctgctgcatatcttcttggcaagtttccttgagacacttttacttctaatccttaggctcaaacacctgtggagcgggaagtatggcatttccgcgaagtcctcttgacttgagtcccaggtccctctgacaaagcaggagtttgttgacctgctagtcctggcaccaaatgtacctatttactcagcttttgccagagggtggggagagagggtggagaagaaggaagggctcttttgcagttggtcaatgaaatgctttgttataattttgcttcatgttgtgcaggtggccaagtgtcttgggtacaaggtaaacagatttctcccccttggtcttccctgcattcagtccccagcc

SEQ ID NO: 69289 - DNA, 883 bp, Homo sapiens
gacttctttgtttgtggaggcatatgtattctagaatatgtgtatcccaatacaaacaaatatgacacacactcttatctcccccttttattacatgaaaggtaacatcctatacacaatattctgtaccttgtttttcagccaccttacaaaatgtcctggaacttctgtccccatcagtacacagagagcttcctcattcctttttaaagccgcatagtagttgtttgaatctagcatgctttatttaactaatcctttcttgatggacatctaggtttgtttccaagtatttgccatcaccagcaaagctgccatgaattatctcacacacatgtcatcttaaaagtgtctcggcagcacaaattcccagaagatgaatgactgggtcagagggcatgtggatttgtagttttgttaatgatcactctgtttctttctgcaggggttgtgccaattcacatgctcactggcggtacacaagagtcccacagcctccaccaaagagtgagttacccaactctgcatttttctcccaatctcagtgtaatcgaatttgaatatctattcctatgtttaagaaagaggatttaaagagttctggttttgtctcctaaaaggaaaaaaaaaatgcatctggaacctccatgttacttgtttacatttaaggataaatgaaaaatgcagtaatttcccgtaatgtccacaaaatcagtgacttgccgaagtccacacacctttccctatctggaaagaagcttctgtggaaggcctctgtttcccaggatacctcacttcccaccgtcccagggacaggctgtgagatcccactcctccacactccccactgttgactccccacagtcagctcccctctgagtgc

SEQ ID NO: 69290 - DNA, 9227 bp, Homo sapiens
tctatttgatcaatatattaatataccaataatataaattaatctgtgatattaatatagcagatgataatttgacactaatgtaaaggatgcacaaatatgttactactaacacaatatgttatacataatatatatcctaacaatattaatatataataatacattacacatagtatttaggttgaatgatagaaaattgccatttttataggccttcgacagttgaaaaattgataatttcctagtatttaagcgaatgcatggctcagtagcaactgctgagcgaatgtcagggaataccattaccactcctcctctccatatctactttcatactagttccacaattttagaaacagtactgccttgagttcacctggtattctctattatgcacttcactagtttgttaacacaagtagatgtaggaccttgatttatctactctgttttttgcacatgtggaaattttaccagaaattgtaaagctttgtctctaaaactcactttgttacgactgtacattattttgttaggattatggatttacagtttcaccaactggctttagggctgtcctgtggttcactggctctctctgcatttttcttacctacaggccgcccttgggaactacggaggatttgtgtattaggcagggttccctatatctgtagatcagagtttctcaactgttgacactgttgacattttgggccagatcatgatttgctggggtggagggggctgtctcgttcatcgtaggatgtgtggcagcatctctgctttacccattaggtgttagtagcatcgcccgcccctcttgtgacaactcagaatgtctccagacattgccagatatcctgcgggtggggtgacggaagcaaagtcaccccagctgagaaccaccactgcagatgtagaagggcaccctggagaagttcaggttccttagaattattcattaaatgaccaggctaggactctcctctttatatcagcaaatccacagacagcaacaaacagtagaaacatgaattcattgttttaaaatgtgaagttctcagatcaacacacaaaataactcttaagctcagatggcatgtggcctgtgtccttttgagttcaggctgatagagaaagtcgacagagccaaaagcttgctctgaaaggaaagctaccaaggtggattaatctgtttttggaaggcagcggcagttgatcaacttcctcatatttcaagcctattattccagcagggagagctagtgtgttttctctctctctcgctcgctctctcgtctcttccacaccccatcctccctccctctaatggccttttattgctctaacacatttttaaaaatgaactcctctgtacctttggggtgaatgtgatgaggggatacactcctcatcagaggtaattaaagtttatagaaacagcccaagtctgtagcagatcccttcactaatgaggaaaccaggagtctgactttcaaacaaacactcctgttaatcttttcaaagccaggcagacatgtgggcagggaaaacgttgtaaacggacagtggttctgaggctgcccttccttggccacactctagtcattctcgagccaggccacacctcattccacagggttcatccctgcccgctctttggggccatctgtgagcaagccctgtgtcacttgtttttgctgacatggagagctgtgacatgtttgagagttaacaggaagctttactccatttttccatttagatttatagagtctacggagaagctgggacaggaggaaaagcattaggcaaatacagtcagtttgttgtcatctgatgcaatactctggacacaaataaatgactctgcccattattcctcttgcttcatttgccctgagacaaaaaggtgaatccactggaaaatgaacgaaaggtcaccctgttttacagcaatgtctggacatgctctgccagtaggttccaactactacatggtaatgtggtgatggtaccaagttactggaatccagagtgagtccgtgatttgtcatggacataagtactggaatgatgttatggtctcagctgttgggggaaaatagttctttcacttgtgaggagaacatccaaaagaaagagctgcaatgctgcctgtgatccttcttctatgtacacatgagcaacgtcatactacaaaagaccatccatttggtcaaactatcttttttacacacattttgataatacaatatcttaggccttctagatatgctcagattcaaatgctatattcaaatgttggttttcatctttgtgtcttgtctcagatcccttattcaaacccatcagtctgcgcagttcacccatccagctgtagctcttctgtccttttggctggcctggtgtcccctgattcagcagaagtgtggggggagttgggatcccctgatattcacagagagtttttaagagtaggaaatctggggcttaggaggtccaggtattttggttggaagtgttttcccattgatggggctaaatatttgccatgacagctcaagtcttcgctctccagcttgacatggatgaaagcagcctcgctacagggcccctcctactgcccccagaggattaaacaacctgagcaggtaatggctgccttaaaaggagcttttgcatgactcagattaatgcatgctgtctgtcgcccaggttggcagctaaacattaattttttttgaaaaagaaaaaaaaaagtaaacctctagatgacaactcttttcagacaaggtgtggagtctgtctgcaaaggatagagagagagagacagacagagtccaagtccccagcgcagaaggaagcccaggtggggctggggccgggaagaggggcagagcacaaagctgtcgggctggattaaaaggcaaagcagccacagagcagtgtcaggttctcaaagctgtcggccaggcagccactttccttttatgtattccacccccctcctgcctccaggtttatgacaacacttttcaggcctgtgctccaggcttgatttctcagagggagttctgccaaattgaagagcagtctcccatactgttctatgccactgtgaaagctcatctggaattctgtcctccctccaaaaagaaaagaatcattcttgggttctgaaatgaggcatggtttttatctacttcacactcccatgccataaaatgttctctcttactccttgggtgattgaagtccaggatattcacaaatgtaactgtgatatgggactttggagtgcacatgttactcattccttttatttaaaaagtcaccctaccatctgaacaccagtcagctggaggagttggcccctagggttcttggactataaggtgctgatcttgggtgatgaccaagtcaaaagacttatgtaataaattccaaaggatagacccatagcaggaacatttgaaggagaacaggcattatttcaggtgaagaccgtagccggtgtgcagaggggtgccctgagaacaatcagtaaaagctgacaagtgcctttgttcttgagggataagcttctagaaaccacaagctaaacaagatgccaagatacctgtgctactctcaatgccttggagcagaatgtaccatgaaaatattggcattaatggccaaaagtaatgtgaaaaccaagcacttaagttggttttcctattttactgtaccacccaagaacactggaaggcagtggttctcacctggggacagttttgccccttgggaaatttggcaatgtctggaaacattttttattgtcctaactggggtgagggggatgctattggcatctagaggccaaggatgctgctaaatattctccgatgctcaggacagaccccccccaacaaagaattatttggccccaaatgtcaatagtactgccgttgtgaagctcttagaaggcattctgtgaagctctgaacagcagctaaggcatctggtgaaacctgaagtaatcacaactgtctggaaaacacaacattacacaacatttaaaatggcagacatgactccactgcccctgtgcctgccccctaatctgctataatttgatcccaagagctgaaaagcaagacccgccccgttcccccaacacacatgcgagtgtgtttgcaggcatcataacactgaagttctctgaagtattttcacagtttggtgcagctccaatttcaaagccccaaacactaagtttcttcttttgccttcaacaaaggaatttttctctgtaactctgatttccctgcccacgagcaaaggtgagtgccaagcccaaagggctcataggttaaatgactaatacttaatgagctcatattaacaacaattatgctaaccatgacacctgagtttttcacgctgttcctctggcctctgtatgaacagcgcttagttggaatgtctaatttggggtatacagtcggttctctatatccgtgggttctgcacctgtttaaccaactgtagatcaaaaatattattaaaaaaaaggatggttgtgtctgtattagacatatacagacttttcttcttgtcattccctaaacaatgcagtataacaagtatttacatagcatttacattttattaggtattacgagtaatctagggatgatttaaatacatgggaggatatatatgttatatataaatataccattttatatgagggacttgagcatccatgggttttggtatccatggggggtcctggaaccagtcctccatggataccaaggggcggctgtatttatttcccattccacatgtactcccgtgtgctgtccatgtgatctgtgaaaatttaccaccaccgcatggaccagtcccattagtccagaattcatttggaataatgagtcctaaaagttgaaaactttggctttttatattgttcttaacccttcagtcaccatcctttcttgccaaatgtgaacaactttagatgtctaaggaacctacttctccaagccacttctgccttcacatccacaatctctgcctcttatgtatccaagaaaatcagtgcatgggcatgggactcagagtagagataggtcacctttaaaccatgttttactcaataatgttctgccaactccttcatgcacctctagtctcctggaccttccaccccagctcagctgcaaagaatgtgttttcaagtggcttacttgagagtcgactggaaagttctgcagagagggttgtcatgccgctggcacgtccaggtgaaatgggcgttgctgggtgcacagaaggagaggcaatggatcccaggtattggtaggactgatcgtaggaccacggtggggatggttggatctgccttgtatctgaagagaatcagaaaggtcaattatatgtaaagtggggtgggatttaaaaaatgtcttttaataagaaatgagtggcccttgttcaaatatgtcacatacatgtatgtggcctatgtaccagggtttaataagcctactcaagtccaagtatctgcctctgttggattattttcccccaaaagagactgattcttggagattttcacctgataactattccttccaaaggttttatttaatcatgctaacaatgatgagaggaatggattacactttcaaggtagaagtattaatgtccagactgttgaactgcagcacttgagaacttcaagtatcatatgactgctgacatgatttcagctttgccaataattacaattatcatcatcagaaacattttataaactcaggggatcacctgtctgtgttcggtaagaacgtagagttttgggctttttttttatacctttacctttggcaaaaagtattccatgggctggtaaatgttttatagtaaggcgaattctctcccaaggatgacaggaaagaaggtctggctgggaaaccggcaatgaggtctaatgactagttcacaaacccagcagtagaactggccctatcaacccaagccttctgttccttttcaggacttcgagtttgcaacttttaaaagtcagagtttttagcaggtattttatagattgccattataagaggcctgggatagagaagagacaaaagtctgacttcaaaagatttagacaaagtggattttgtcaatttgactccagcgttcaaaggagtcttaattttcaaaagcatcatactgtttgcagatgaaaaggggaggaaaaccaacgctattcttaggcaaatgtgtaaggaaacttaaattggacactgtcccactagaagacagttttacatttctttggagttaaacattaattttctctttatgtcccaactttgtggacaaagataacagtgaactaccgtaactcccaagggtcttcatagccagagcttcatgatcctgcaggtagcagtgtaggaagagcagacttctttaggaaaatactgggtataagttttgtataggtcaggacataaagaaatgagctatttctgctcattataaaatattcagatctgcttcctccaggggcttttcatttccagcagttcaagtttgcctttctgtttatctctttgaagctgccacagtggataacagaatcagacatttggagacccaagtcttcctccccagtattctcctgacagcctccctccctccctcatactgattcatttctttcttttttgtgtgtgagtgaaaataactgattttttaagtttaaaaaacctggtagttcccaggcaaatagtttaacttggaatctttgaaatctaatattaaagaaaggtcttcattttattccaaattttagaggatttaaagagctggcaaggaacaaaaggagctggtccattttaaactcagcagaaaataaatgttcaaccttggctgaagctcctgtgtaatcttacagctaacagtgtttccaatgactaaaggcaaacagaaatagcagacggttcaatatccccatgctactgcaagtattttgctccaagtgaaaaaaaaatcatatacttagatattttgtataagacatgcgtatatactagatacacacatttactaagtgaatatatagtactccaatactttaatcattttaaaagcaaacaaaagaggtttcagaactgtcataaagccccccggggtgtgaactgcagtacagtaattcacgccttgttgtgtagacagcctcacacctctaaccccatgtctaaagccacactaagcataaagtactatgccatgattcatgctccgtcatgttttactgtagtgaaaaagtcgtgctaggcttttctaaactcataattaaaccatgcaaacgttgcataatatttcacagcctttaaaaaatatgctttggtaaaatgatctttatgattaaagtccaagttctatgagtttttttgttttttaaagacaggcttgcagattccacattttctgacttcacaccataacttagcttttcaggtgctggaggggaagatggcagtcaacaccctgaagcccacccaacccccacatcagttttctttcatgagaccacagtgacctgtgcttgggttcattgccagtggtgggccagaaggtggggatggtgagcctctaatgttggggttttagttgtttcctcttctacctgtgttactaatagaaaacaaaaacaaaaaaggcctgataatatggtgcattctgggtttaatattcattactgtctttggtctgacagggccaacatgaactcatgggccacccgagcactggactaataggcaggagaggtgaactcttggtctttctgtctggtgagcaactgggtgacattggattactcactgacactttcttattctcacctccgaaggaggtgatccctaaatcctttccaatggtgacagagcaggattctaattccaataggtcctacacagtatttctttgctttacttgtacattaagcagagtcagggaagaatcagatgtggggtgaagagtggtgcctgtaataataaatttgtgtattctaggaagaggaagtagaggagagtacgatgggagttatccagaaaaggccccaggctgaggaagagaaccactgtaaatcattctccagagcacagggctacttgttcttgaaagagttgcctctgataagtcaatccatctaaaagaacaaaagcttattgaacatttacagtgtgccaggaatgtgctaatttacctggcaggagagtgatgaataagaccaacatggtccctgccccacaggcacttacagtcagtgaagatcccaggatcttgtgatgcttggaaaggcatcttcctgtggcattaatcatcatactgggtgttgcttcattcatttattcattcatgtgttcatgaaattactttttcattcactcatatttccaacaaacatttttgcttcacttgggccactgttttggggactcactagtgaatggaaggttcctgccttctggaagttacagctactagggtgcccaagggctgtatctgggctaactgctagattagctgcctaatttggacttgcaaacagctgttcccaaggtagaaacaagaaccctagtggtatctattacatgcttatgttctgcctctgagaggaggagactagggaaagcaccgaactcaaatcacagacaaatttcagtttgcatcctgccttcaccataaaccaactggatgaccttaggcaggtcacttattttctctgattcatagttagaattctgacttcaaagggtaataggagtaagtgagataaactatatggaaagcaagtatcacaatttctggccatagtaaatgctcaataagtctgaataacctttatgattgtattactaaaaaggaaaagaaatccatgccaagggacttatctgatgttcattggtgagaccacacacatttgctccaggataaggctcaagtaatagtgttttgttcacagctacagtcttgacagacacactcttcaggctggagaggagctgggctcaggagattaaatggtaaaggggcaaatttccaaagattggaaatttgggattaggatggagaaggcaggaactcagtatctcaaccaactcatgtttctattaaaaaatactggattcagggccgggcgcagt

SEQ ID NO: 69291 - DNA, 3227 bp, Homo sapiens
gacctaaacggcactaccagtcaacttgatctaattaacatttatggaatactctaacaacagcagaatacacattcttcagctcacatggaagattcaccaagataagccatattctgggccacaaaacacactttaagatccttaaaagtatagaaagcatacaaagtattttctcagaccacatggatttaaattaaaaagccaataatagataactggaaaatctccaaatatttggagattaaacaacatacttctacattagacatgagtcaaataaaaagtctcaagagaaattaaaaaatgttttgaactaaatgaaaatacaacttattacaatttttggatgcagatagaacagtacttagagggaaatttatagcattgaatacatatattagaaaagaaagatccagaatcagtcactgaagcttccacctcaggagactggagaaaatagcaatacagacctcaagcaagcagaagagaagaaataataaaaattagactaggaaccagtgaaattaagtacaggaaaataatagacaaaatcaatagaacaaaatatcttgttctttgaaaagttcaaaacatccctctttgtcctcgtgctccccacaggcgctgggagaagatggatagagacccctcccggccctcctctgactgtccactctagggtcttttaaacacccaccctcagaagctgggtttccaacagcaccccttgagcggtggcacccttcatcctgggcttggagaaggttatagttagaaagccccttccttgattgtgtggctgacatctttaaaacgccaggtctttcagtcatctctcagagctatttaaaaataaaagtcacatagaccacagggttctaccatctatttttgaaaaaggcaaatcagcttggtgaacatataaaccctaggggcagccctggttatttccctggaggaattttttccctccttcatcctggaggaaggtagggacgttcccagggttccctccagattcacctcagtcatggggagctggtgtaatgccctcttggagacctcagaacacacaacaggatgtgactcaggactcagagatgtgagtcagtttccagggtgatgtgttagggcgagccccagtggtggtttgcatctcactgtctgggacccctgggaagaaaggcctaggctccccttgcagacaaagggggtgaccccagatgcttcccagcatcacatctgtcagaggtgtgtgatgtcaggggcctttcagagtccctgggggtgggtgactctgctctgaaagggacatttccctgaaagttccactgtctttgagaagcagtgtttcctctggcctctgcagcagggagcaaagctccggcacagcacaagtaagaagagcagtcacctattcctactacaggtacccccaggtagcagacaccggctcagcacactgttgctatatcattgaaatcccatgataacatgagtcagtcagcaccagctctggatcctggaaaaaagggaggttgtgaaacagctccaggatttgccaaccgttcgtctctggccggctgcagacatcttggttagtcatgtgtagctcagatgcattcgttgttccagcaattactttgaagagaagcagacagaccaagccggggcagaaccctgcctgggtatgctgttttaaaggcctcaggttttgagggatcccatcctcactgccgacctgccagcctgggaggtggcaggctgcctgcgggaaggaagaagggagccctgtgtccgcctctccaccactccctgcttccgggacccgtattcatcacctcgccggggaagctttgtggctttgtggtcagggccctgtgaatcaagaatgctggttcctcacatcaggccgcccccaaccctgctggttcaccctggagtccttttcttttcaaacctctgtttcctcacctctaaaaatgggggtaaccaggctcacttgcctcacaggtgtgagagttaattaatgtttgtggggcagctttgagatccacagatgaaaggtgctctataaacgcaaaatgcaattcctcattagcactgtcagacggttcccaggggaaacagttcaccctgcaccacgaggctgctaccctcagccagatgagtctgagacacgtctgggaaagggctacgtatttaggcagagtgcttttggagggagggttcaaggataggtcactagcttccagaaaagatgggtgtttttagaacatgtctcattctcagttggcatcgtgtccctgaggcagagggagagtggccttcagtgcacacagctggagggaccatagttcagagggaacagaaggcaccttctggtttctgctgcctcctcccttgcagacagattctttctctgtactttgttaaataaacatttgttgcagacatcttttccataaggatcttctgcactgtgcactttctgcacctctgccccccgtatacaactttccaggcctgaaggagctctacagacaggttgggtacattcctgcaacaccagcacatcatggatgtttagattcttctatggccaccctatttatttccttccactcctccatgtccttcttctccaggagggtaaagacaactttctgctcccttctactcctctggcacctttgccccgcttagttccttgaaaaacatgagccagaaatattgtgttgagggctgggatatctcaagcagcctccatcctgagactggacccttggtggagaatgaggatactcactccagtaaaacaaatcactgacacctcaagtgggagctgggaagcttcaagcagaagaggcacagcatctcccaggactgcacacagctaaagaaacagaattttctgaagaacactccattgaggtggcacctgatatcaagaggattgtgcacgcttgatagtctatgcttggaaggcctgggttgggagactgtcatctccaacctgcagtccaggctgggcatggaaggccgtgctttacagccaatctccactgtgctgatgaggggccggtgggatttcctagagaggcacctgtgatatctctggctaaacagatacagttaagagctgtcgctggggcagatcatgttaagtaacatggctgagatttgccagggtccatgtaatgccttagggtgtcagcacgcaa

SEQ ID NO: 69292 - DNA, 2035 bp, Homo sapiens
ggcagccttcattcctaaacacagtgtcctgcagacccacccgctccagcttatttttcacagacatatttctggaggagtagtgtttattatacctctgaaactcaaggcttctccatgcacagaaatagcctccaagaaacagccctctatacccccgagaaatgcccccaagaaacctccatgcccctgagaaatagctctcttgcacctctctattttttgaaatttcttaaatatttgccaccaagcaacagagtgaataagaggctaaaatgttccctcatttggtgacaagttcctatgcaagttttgaattatttggaataattggatttctttggcttgtgagccaaggggaatcactatcactttcttctatggtatcagaaaactccctctttcttctaagttcccctgctgcagtcttctcccccaccttcatgtgagagctacacaaggggaatttgttcacttaagtttgcagccattttgcacaccccaaagagttgaccttgatgtgaactaattgggattgcagtgggttaataacacaggttggtgaggtggaatttgcagcataaaggaaacacttgaagataagagccatttgtgctttcataagctcatccctggtgctctgaacaaaggacacaaactaataaagtcagattcatctaggggcaatctacactcgctcaccccaaactctgattcagaaaggcaaatggaaatctgccagaattcttttaaactccaacacagatctcgatttaaaaaatgacacacacaaaaccgcttggtaataagcagacctctgatgatctacagatccacagcttcgtttattgacttagagaaagtaaatggcatttcaaatacaaccttcatacttcaatagatgaggtcaccctgagaaagatgatactcagcccagcagtgggaaacctccctccagagaactgctttgatttacaaggccaaggaaggctttctcatagaagccatatacttgggctaaaatggagtaattttttttaaaaaaattaaatgtagaggttgagatagcagacaactatgaaactcttgctcaacaagagggatgacctatggaagacaggaatgctaggacctacagaactgaagggtcaaaattgacttactaccaagtttagatagctaagtaactcacatttttttcaggcattgagatcctgtgtatattgactagaagatccttgtgaatttcccaattactcttaaatagcgatcatcaaacgggtgatttctcctccaggggatttctggcaatgtctggagacatttttggttgccacaactgaggaagggggagtgctactgtcatctagtacgtggaggccaggaatgctgctcaacatcctacaatgcacaggatggcccctacaacagagaatgatcctgcccacaagatcaagcgtgccctaaagtgtcaaagaaaaccttgctcagggaaagcacacactgccacaatggtttcagctaccatgatgacaagacggaagatgtgacttctagaggtgctcttcaggatcggggaaagctaacacagcattgtcccctgggcacagtacaaatgaactgaggggtatgaggagatgaggtgtgtggtgagcactttctggagcccttgtgagaatcctgggtggctgcagtcatgatgcacccagggggaaactccatccccatgtaaggtttaaggcgactgctctctcagtctcatggcctggcacccagacttagagctggcatgttgagccctgggtgagctgcaggtgtgaactaccaacaagactgctcctgagctgaccgtcggctttgccatctgggagggtacaggctagcacttgcctctcctgggcttcctgggcatgagtcacatgtaactagataatgacgcaaatcaccgtcaacattacttaaggtttcattctaatgtcttatggaatgatagagcagaaagcaacctccgagacagcagagacaaccatgccag

SEQ ID NO: 69293 - DNA, 2120 bp, Homo sapiens
gggtggctgagctacaaatgatttatactacaagaaacagactggcgcaacctcatctctggtaagtcctcagtctcaaatgaaataaacagcatatggattttccctgttgtgtcgctgaggccaaattaggagtcagcaatggggcttagtgcttaaataagttgtgtatggatgagaaggatagggctgcccattccttgtttgagtgactgctggcacctaaatgcctcccggctcaggtaagagcctacctgatcacaaacagagctgggagatttgtcgagttactcaagcccccaagacatggccactacatgtgtgagattttcttagctcttctacacaggctccttactgttggctctcgcagtaaagagtggtttttgataactctgggaagctcttttcctgactcctacactatgggcctccacgtcgtgtggtcctgcaatagaaagtcatttcagggtggctttgactaagtaatgatccttcagagcgatcatcacccttgaggggtgccagcctgtacccagaaggactcctgcccggggccgcctcatgtcagggcctcttgagaactggatttgcaaagtgtctgcagacgtaagtcctggtggcctgctctgtctgctctgatcacaggggacaggaaggctgaaccaggacagaacagtttgcggtttcatcaatgaataatatggagctggggacaaagtcccctctactttctgcggctgtcactgaaatgtcagcagtggagggaaaaccagaagagaaaacctctcactgacaggcgccctcagtgtgcaaagagctcaagtttcagtgctggggtggggtgggggctgcgcccctgcctattcaccccactcctcccctgggctgctccactcccatgatgactgggaatttatcctacaacaggccacgagctccttgttctgcagtaggaaattatccttcataagagggcaactgttagtattgtttgtttgttttttaatttccaaaagtaaggagaagtttattaaataagagcgggggaagggaggagggagaaggagagggaaagggcccgagaggcagctgaccccagcatttcccgtctccccttggcttctcccatcccccttgtcccagacccccctccttctggttctgaatgtgaaaaataagcagcctgcacctcctcgactggagatgtgtctaacaaggccctcattgtctcagacaggtgtgagattggacttgattcggggccaacacctccagtaccggagccagctctgtgagccgaaaacatgcaccagccctccagtaataccactgcagccagccagagactcaacaatttaaggcttaacacacacaacataaatcagaggaggatggaccagccgaccggcagcttcttgggcagatgcctgcagactgtctgcagatcataccctgcctgtttgggttatttgagactctttttctgtaatataaagatgagaaactgggtggagcagcgtgcagaggcacacgggtgtttgtcctgtcttgttccaacagcccctctttcgcctaagtgctgttttgaagggactgctcaggacggttcacattgctacatccaaatcctaggaatgtgtccaagctggggaggaggggaaaggaaagctgagcgctctgatatgggtggtatctgtgtgaccctgggcaagtctcttaacctctctgggctcatccatctaacaaggggtctagttttctgcgattcactcatctctaatgctcagaagttcaaagtcactgtaagaagtgcccaagtcagaggaggtcattacacttgggaggaaactcacagcaccattgaatgctgtttctgagtggatccatgtctttgagcaagaaaagtctctcctcctcatacctgttctttagaaacttgtggttctcagactgctgaggcaagcccagagctcgagcccccgggagtgtggtcatgacatggcaagagccacacgctatgggaggggaagatggagatgacaggtctgcactgctagttactgccatgctccagtccctcttcctaatcaattcttagataagtttcattgaggagg

SEQ ID NO: 69294 - DNA, 6971 bp, Homo sapiens
tcgctctgttgcccaggctggagtgcagtggtgcaatctcggcttactgcaacctccaacctcccgggttcacaccattctcctgcctcagcctcctgagtagctgggactacaggcacccgccaccatgcctgcctaattttttgtatttttagtagagttggggtttcaccatgttagccaggatggtctccatctcctgacctcgtgatccgcccgccttggcctcccaaagtgctgggattacacgtgtgagccaccgcgcccggcctgagaacccatgtttgaacccaaaatagagagctactggcctggaaacccaaaggaacagatgatatttgtacatcccacaatacaactcacatacagaaaatgcctggggaagctaattcctgctgtccgagaggggcaaagagctaccacatcgattgctggccacctgcccttttccccagatgtgttgcttatcttttccttaacaagcctgctactttgagaaagaaatattactgtaaaccatatcacacacagctgcatcctgcatggcacagagaaaagtctgcattttggatttttgaaacggtatcacagagcaaacagtcattgacgtcactggtctacagtgtaaatgaacttcttgtattatctaatttggcacagtgggccttaggcaattattgcatcttacagcgctttagtaattgccagctagccccatgggctggggggacctgcattctctattgatttgcaaataacacccttgatgtgatgacatccatacatttcaactatttcttaataataaaaaaacactagatacaaaacccacaaataatctggcaatagcgagaacttgaaacatcccatcttcactttgcttgacgtgtgtgtgtgtgtgtgtctgcgtgtgtgtcttcaagcctaatgggtaggtaaaaaaatagcatagccaaagctaactcttaaaaaattcaagagagctatctatccaatatggatatccatacccagagctcctcgtatcctctgtagcagtgcttttccttgtggggatctggttacaatgcagatctgactcggtgggtctggggtgggtggggcccaagactctgcatttccaacagctcccaggtggtgctgttggttcgaggcctttctctgagcatcaaggggaaaccccagttggtctgggaaggtgtgtgcacatgggggccagttgtgggtggtggcccaggtgcaggagaggcgggcagtgggctccatctggtacttaccctgcatctgactctgaggctgagggttaaaggcagtggagtggttcagggaggcacgagggttgggcgtgggggctgggtggtgtgggctgaccctcatggctgtgcgccgcagctgctccagttcactgagccgctcggaaaaggacaagctcccgggcttggtctgatcatctagtttctgccgatgtcctattgtggggagcagggaggggaggggatggggggagggaaggagggagggaagagatcagaaaaagtattgtggatttcctaaaactggggcttttcttgtctttcccctctctctcccctcaccccaacatagactcgctagagatatgccagctgaatttggggccactgtcctctcagcagaatgggccccctttcaccgcctcggccacagagtgctcccccagtctgggccttggcaccctccccaaccctctacacccacttccaatgggcacaactcactgagatacagaacttggcggtggtggtgatgccgggagggaaagaggcgcattaattgttggcacatggccacatgccaggggctatgctgtggcagccaggaaaggtggcctcccaggggcatcagaacggctgttccttactgcaaacccagccactggcacgttttagaggcggcaaagtgggccccgcagcttagtggtagggccccttccaagaggaaatgaggcgtggctgcaaacccacagcctctggggaggtcccatttccaggtacacgcagggcatcctcagcccctcagcccctctccctctccctctcctcacaggcttttcacaagcattccttcttccctgaagccgactcccccatgtacccctaaggaggagttgacaggaaggcctcgcctgtgtcttgtccaatattcccagcagaataggcccactggagcccagaggtagctacagcctatctggtgagcttccccagggggctcaggactggtgggatgggatgatgggcccctcagtgtctatatagggtgggatggtgggcccctcagtgtctatatagatagcaagtgtcctcatcatgctcttcaccaaaacaaccgtcaccaggaagcagcaagcagaggccactcatgggggactggggcctacggttttctcaaaatgtccttaaaccagagccagtcctgtcgtgcaaagctgaggctccaaggtagggaggtagccacaggaggcctgggccattcatttctcttttaaagacaatggcctcctgctgcttcctcagccttatggttccaataaagagtccttgatcgattgcacaacctctgttccctattgccaaatgtccccaaagccagactgagaaacagcctgcccgctgcccccataaagtgctatttcacatgccctgacccaatcctagactagaaagaggcccccttgattccactcccgcagcctggggtaagagcagaccacgagaagtgcactgtagtccagctcccaatggctacaattataaaattaaatggtataacttgcatgatggctgcaaatctccatggctggccatttcttcctgctgccaggccccttggcacagttgacattgtctcaaattccagaccagaaaaaaagggcccactatattgcagtgattttatcattaacgagacctgtttggctccaaaatgaggaaaaacacttaagcataatatttatgtagttcaaatgcaatggcccctcttgtcatgtgtcaccaaggcaaatctggactctgattcagcgctccagcccacaacaggagacttgaacgcaaacagcctgagtcacgcaggctcagcatgcatgtgggaggcctgttcttggctgcgtattttaagcaccggctttgtggatgaaaggccatggggccaggtcttgcagcaacccccatcatccctttccctcagaagtatgaaaatgtcttttttctagagcgctctgtgttggtcagccatggtgtgactcagtgcctctggatgaagccttccttagctcctccctcctcttatctctgccatagatccttggcttcctgatgatcaaactgaaaaatctgcagttttcttgcagaaaaacaaacaattccaatggaacaaccattcaaaacataataactcagccctttaacctcctaccacagtctaatgcctggcattacgagttggggtaaagaagaaggcaggaacaatgattgtggagagctctatctgcctcagaaataatgccagtcggcaaaggctgccggcaggttttgtgctcatttcaaaacttcacattcctcaggcacttagtggcatttttgaagaacactgtgtcaaggacagtgggtgacccaggagagtgatgtgagcgaggtcattctgaatacacagcacttgacgtggtagagtctacagccacagcttggaaaaacagctcttggcagttgtgtctctcttagccagcaagcgtggggacctgtgccacggagacacccaacaggaatcatcattccaggtaagccagtcctgtggtcaggcacaacgtgaggtattttttgtttgtttgtttctttgttttttattttaattagtccccctcattactatatacttagaaatgagagctttaacttgtgagcaatttctataccagctgatacctgccaaaattgtagtcatttatagagattaactgatgactgtctgctttagcagaagtgttcaggcataactctcagagaaaacaattcttcactctaagctgttttctaagccctgggagtctcagggctgagtttaatgctggaggattggggaagagcccattccactctccccacgtgtgttcctgggagtcagtaggaacgttattgccttggtaggggtcttgaccctcaggctcacaatggtgctggagagctgtgacaccaaggcacaggggaaatgagaagcattatcatattcagggtgtggtttggatgcacttacaagctagatcgaaggaacatctaattcttactttctgaaaccatcagacctcatgtgccaaatagcaatattttgcatgaaatataggaacttccgatataaactttcaagctggggaaaatgaatactttatgtcttcagtttcctgtatctgtgttcagttaaaaggctcatttgccccccgaatgttaaatagaggagtatggaaaatgtctactatccaattcacttttcttctttctcactgagtaccgggctttagagggcaacagggaattcgaccctgggtcaagcccttgggtagaaccaggatgcagctctgaacacctgcatgctggcagcttggcttcttcagcatgtttggaatcaactgtgaatgtttacagggcggtgctttaaagtagtgggcacatcaagatttcaccctgggacatcttaatcttaagcagagttgaaaaaggtcctaaattcttctagtaccattttctcatttttgaaaaaaatgaaagtacttgcttggaattttattatgtatgcagagtcataaaaatccaaaaaaggggaaaaaattgtatataataaaaataagtcaatgccgtttgcaaaattttacttcattccaaaggcattcctattgttttcggggttggctgctcattaggccatccttaaatgttatgatattttgtgacggatagtgagaccagctttcacttttctgccatacaaaataaactgagcaggtatgcatatctcgttgataaccgagctgcctttttcaagacaccattgtgatctgtggctgtaagtaacataaatgtaatatatgatcttccattaaagaaaccagataaggttaaattgccaccgtttcttggaaaattttggttagatagaataaagaattttctggcagtcaacaacatattagtctatgtttccgatatgggtttactagttttcttgatagattcttagcagaaaaatgaggaaggtatatactcagaagactgtcatgatgagccgttgagccaaatctatgcaaaagcataataccaaaaagatatatttctctctgtatatacatgtataaaattgtggttcttctaaaagcatataagaattttatatagtcaattttaaaaggatatctgtatttcagaagatgttggccagtcaattggatactcactacatgaatctggatataaaaatatggggttttcttcctttgatttgctactgttttatgacaatggaaaagaaatcaatgtgtgtagagaacagcttacttttcctggtatcacagtctaacctttaggttgcagggtcattaggatttcaaagtgacagtactgaatgtgactcttcctgaagccccttgcagatggtaaaataaatctccctaattgcaaacctaaccatatgctggctaatttaatgttgggaaatattcttcaatattatttaccataccacatgtatattatatatactatataatataaactatataatggtatatagtatgtcagtatacattctaattcatattatatatgcatgcttatatattgtccagtgctacgtaactatgggtagcctcactttcccccaccccaatttcttctcatatcgttaagctaagacaacaccacaaggttggagtacttcagaactggagaatggccacagaaatcagccttggtttttaactaatgtgtgggaagtgaggttcagagaggttatgtcatttgcccaatctcacacggccagttacaggaagagggcaggtctgaaaacacacacactctcaacacccaccgacacacacactcggaatgtacactcagtgcacctagaaattcaacacccacggacacacacactcagatatgtacactcagtgcacctagaaattcaacactcaccgacacacacactcgggatgtacactcagtgtgcctagaaattcaacacccaccgacacacacactcgggatgtacactcagtgcacctagaaatacacatttctgtgaactcaaagcgaacagggtggagaagtgcacaatgcttcatagttttagatctcagagacacgaaagcacttgaacttttgcattctgcctcaaccatctcacttctgctcccagtgtgtgtgtagaatcagaagacagccccagccacactgtgacctgcaggctgtgaggctgtgtttcacctgcttgagtgggcaatggaattacctgggcattctagtttggtaggttggtctagggtgaagggcctgagaatttggagttctaataaggtcccaggtgatgctgaggctgccgatacagggagcacgctgggaatatctgcatgagagggagagctcctcctgatactcaagcttccaatgtgcattactacttcccttctcctgcctgcttctgatttgctgtgtgctggggagaaacacgcgaactaaatatgcctgaactgtgtttagactgtgttcatgagcaatgactgacggcctccttttggtgataactatttggccgtcttttcatttttttaactcttcaatacacacagagcagctgaaaatgcccaaactctgccctgcagataggccggtgtgtgaccgtctctgtctcctacaataactgggcacattctgtcagagtcactgtca

SEQ ID NO: 69295 - DNA, 1601 bp, Homo sapiens
cacaccgttctgtgatcgccctcaggacatgggccaagacaagtgtagcaagcaacagtcaatggacaggaaaggctggccaacgccaaggcaagatcaacaaccaatacaacttcaagccagagacgcacacaggcctgcccctccccagcccccctgcaccatgcgcccaagactcacgggacaaaaacccaaacaaaactctgctccctgagtccagggctcattgccacgagcagtggagtttttcgcccactcacatgagactcgggcctctcctaaaagcagagcactcaaaatctaaatctgccatccccggtcgccagggctcactgtccatttctgtctggtgactaaggaggtaacttgagctcagggcagagaagccacctgctggcttttgctcttgaccagaggtagccctctgtgggggaagtggaggcagtttcttaagaagggtgcagacagctcccaaattcaaggtttttcttcttctaccagcctataatcccaaatattagcaaccctccctaggttaaggtcttatctcaaggaaacccccagttacagcgtaactgaaaagtaaccagagagtggtaaccaccagtgacatggatttgttgatcagagtagctcctgcccagggacagactctaaagagaaggcgacttgcagaagagaaagaaagtattggtggcgggtggcgcactatggagatatgagcactgactcacagaacgctgcctggagcttctgacatggctttggagttcaggcatcagcagggctagtcctggggtagacaggcaagacctgggggccaggagaagaagatccaggaggcgcacacacactgcttgcgtgagcatgttaccagcactgaggctctccacactggcctcctaacctccctgcaggaatctcagttcccctcccgcagcagcagatctcatacataatgggcagagacactgagcatgtttggacaggaccgaggtaaaggcagggcccttccaaggttgggtgatgcctccataaatgctggacaaataaatgaatgagtgagtgagtgaatgaatgaatgagtgagcccctttcctggactagatttattctggaatgctcatccagcagtgtggaggatgatctctcctcctctgtacttctaaaaagagggaaggaaattccctcctatttctaaaagccctgccccctgggcctcggggactttcccaacagcaggggaacagcatctgactctgacgctctctcctgtcacagacgccaactgaggttctaggctggccttgcaaagcccttggacagatggctgagcaggtcctggctggtacagaaggacagggtaccctggccactcacagctcctgagtactcactagtacaaaagccaaccgcagcaagttgttttgaacagaacgttgaccctccctcacaaataaggcttccggttgtttgtgtcatgacagcctcattcaggcatcaggctcacttctatgcactgttgtccacgtgccagaagcagccacctgctgagaagggcatctgtgaggagggagacctcttctaaagttacctgaatg

SEQ ID NO: 69296 - DNA, 935 bp, Homo sapiens
ccatgaaggtggaaacacagtggtgattcattcagtgtggactctcaaggcaacctacttaggttcaaaacctcgctctgccacttgctagctgtgtgacctcaggcaagttacttgacctctctggggcctcagctttgtcatctgtaaaagggggttaataacagtcattccatctcgtagcattgttctgcaggttaaatggaatgctgaatatacaagcagagcacagggaaaggtctcagtaaatgtcagtggaatgatcattaaagacatgataaaggtgattccacaaagaccagagctgtgacagatcccgtaagaaggagctggggatgaagtaggcactgacgtctgacatgaggaggggttttgtgcgtgtgtgtgtgtgtgtgtgtgtgtgtgtgtgtgtgtgtgtgtgtgttcagcaggtgatggggctgctaccaggcctaaacgcaacttgaacttcaagttcaagttcactcctgccccgccagctggcgacctttgtaaggcacaactgtgagtggctgatatgctatgtaaacaagccaggccagtgctcctcactgcaacatgtgttgtctccctcgacgccagtgtgtccatccaaatgccagggcaaaatactaactgctttatttagttgggaagaaggtcaaggggtgagtcttcctggacactcgctgccatgacacactccccagggccagtcagcggggaggccccaggtctaggcttgattagtcttgacgttggcggccctggggctggtgaactctgacagccaattgtggtcaaataaagccacggctggaacctgcagttccgcatggcccagcgcactctccacttcctcaccacatctgggaagtggctaaacctcaggattgcttcaaatgtgcacactgctccccaaagagctgagggtg

SEQ ID NO: 69297 - DNA, 684 bp, Homo sapiens
aattccttttgaccctgaacttcaattttttgggggtgtcatggagtcccagtccatttggctaaaatgtgaattattctgaacaataacctctgtgctcacatgacctctggagttcagcccggtccccagagctccctaaccctcatctcctgggagctgctatctcttcctcctttgtaaaggagcggtcgatttacatggagatactgaatcaaagagagaaacattccaagggtgagatacactctgaaccaagatttaaactgccaaggagaaaaaggagggaatggaagaaaagagagaaggttcaggcttctacagggccagtgtagccagcgaggccatcaaagccggacaggcaggttttcccagttacggaatgaacccgaggttaggagctgtgatcctggatggcagccagcgcccagatagattcgttttgtagaacagagaaaaacccttccatgttcaacctctggcagtttctatgaggtttacaatccccatggactggcagctggtcacagaaagagaacttctttctctacctttcattttgcaccacttactaggccccttggagaatccatcagactggtggcttttgacagaattcaaaattggcactgaaagtttggatgagccaagagccagggccttctgagccatggcgtggtgtgt

SEQ ID NO: 69298 - DNA, 1547 bp, Homo sapiens
ttgagtagctatgccgtctcctgaatacaagcatctcttcttaatttctcccgtttgagaaacagaacatcctgtgtttgtaagtttataatccaacccatcttttacttgctcagacctccactaacaggctgaacaaggtgcagactttacttttagaaaataaaacaaaacaaaaaaacacaaaaaaacccaatttctgctaaaagtagatttcatcttgctgacgattcttaagtaacttaaactgtccctctacagttcatctttgatacctcctactcatcgctattatcttgagttttactagcaatgaattctagcacacaagaaaaaaaaatcagaaatgcacccttcgtttactaattacaaaatcaacagacctcagaaagacgggacattcacttctatgcactcccctcaattcaggggtggaattgggttgcatttttgtatctgtgagtctcagcgtgtgtaaactcatgtcctcacagatgcctgaggttttctgctagcccagctgatcttgaccaggaatttatttaatgtaactgagtaagtatgaagtcttatcagggctattggagaaaactggtagataaatgtttttatactcaggtaattaagaaaatgaattccaaagtaaaatactctgaaaagcatgacctaaagatactttgtacaatagcatcaatttcttggctatcatttaggccttctagaaactattttcttggtctagacatttactattggctgtatttcctttgtttctatttttcaaagcagtcatacaacttcaaatcgaaatgccccaagctgtatttattctgatcatttctgacattctttacggtaaagtcagtagtgacatttatattactcattccaattacatcatcatttttggttgctgtttttgaattggtaacagtaaagcattccttaatctagtgttatcactccttcctctgcctcctacttcccaatttttaccttaataactgctacataattttttgtagtatatattttcaggcctctttttctatatgtaaaaaaggctgccatagactcacttgtatgatatcgaagtcatgtttctcaagattcccattttcatgatctgcttagccatcaccctttccctgtggcctccagatgactatctattgtttttattcattagaactgcttcagtccttgtggcacagaacacgaactaactcactatgagagatgaacatacttccaaccccaagactacaccaggataatctagtctcatagaagcagggaggcattttcctctattttatccaacttgcactgccaaacaaggtctgggccttttctctctttttaatcctttcattccaattgttggacatgttttccatataggagattttaaaactctgctatttattccccaagcaccctctaattagctatttagttcccattataagtgtgtttgttgccatttaattaagagcagtgatacgacaattccctttttgttttaaaaagatatcacggaaata

SEQ ID NO: 69299 - DNA, 6198 bp, Homo sapiens
tggtgacagacaataatcaaatggtctgatttctctgctatcctttcctttcccctaaatgttctcaggggatctgcttgaacttttttcaagagctctgtatttggatttttagtagcctatagattatcactcaataaaacaaattaattgtttttaagtgaattgccaaaagtcattttaaaaaggaaactctatggttattatggtttctgctagaaagaattctgacagctcataaaagcaatatgtataatttttcattttttagaagaaaataaatactttcatgtaatggcttgagactctgaattgctccaattcctgaagattatttattaatcatttagtcttttaatatatttgagtgtgggttccctggcagaggagggagttcagaagagaccctgatttcccccccaaaaggaagccacaaatctcttagagccctagtgcattggggcagccaggttttaatggcctttggtggttatcagcccgtcttgcctctgctctttatctgatagtgaccccatggcccaaccctgttgggtcccctctcaatgcgggtgccctaaagagtcatcgctgagtccatttaggcaaagggttagaatgatttaaaagtaaaatggtctcccaaacccaaatctaagtaaacggagggagggaaaaaagagtcaagcaagccaccacgttccttcgttccttctcctcatttccacccccactaaaaaacaaaacaaacaaaaaaaactgcttttagaaaagtgagtggaaaaagaggccaatctatagacacagccaactgcaaatttcgttttgttttagaaatcacaatctaagtgtggaaactgtataaagcttaaaaataaccgcaacaatacttttttaaaaagtgaatattcgtcgttgtaataagatcaagacccagctgaggcttggaactataaaaagcttatattaaattaatctccctttaaaggggacaattatttaaactttttttttagtagcttatctttacacttggaaccacctgccttgattcgccctttaaacgaacaggaaatgacccgcactgattttacttagtcgcatcttttcaaacccaccaaagacaaaacagaatctccactgcagaaattaaattcctactgcttgctgctagtgtagtagggtgattgtttagaaacgcctggggttgttttcatacccctgttgaaggtcaaggtttttaaaggcagctcaaagctttggggatgatcaggggtgaaaagtgaagggagatctttggagccgccgcgctgaagtctccggctacgcgccgccccctcctctagcaggaaagcgggccgctgggacccctggctctccgaaaacagcctcgtcacctttcgctacccctggcttaatctaggtgagctgatgatagcattcagaacggttccgggaaaagaaacaggattcgatacttgcggcttctggcaggagcaggctaaaaagctcagagaactcttcagaaaacttttgcaaacttaactacgcccgctgtggactttggacatgctaattcctatagggcggttagagaaggggaaaaaaaatccctgacagtttccctagttagtttcttttcactgacttgaaggcagaaaagtcttactattttatttcctgatcctttcatctgaggaagacaaaatggtttgggtgttaatccagcggtaggggcagcagtaagttagcagacgggctgtctctgccgggctgggttataacttttcctactttgtatcaaagctaaggcccctgccagggaggtcccgaccggctcccagtggatatctttggggacaccctgatgttttcagccctcctgggaggccgccccagaaagctgagacgagtgcctcccgagggtcgccacggcaacacagcatcccccacatcccaagctaggaagaccgacccggggctgcgggggcccctttccagaatccggccccgcccgcctggccgctgccctcgcggatctcccccggcctcgccggcctccgcctgtcctcccaccaccctctccgggccagtaccttgaaagcgatgggcagggtcttgttgcagcgccagtgcgtaggcagcacggagcagaggaagttggggctgtcggtgcgcaccagctcgcccgggtggtcggccagcacctccaccatgctgcggtcgccgctcctcagcttgccggccagggcagcgccggcgtccggggcgcccagcggcaacgcctcgctcatcttgcctgggctcagcgcggtggaaggcggcgtgaagcggcggctcgtgctggcatctacggggatacgcatcacaacaagccgattgagttaggaccctgcaaacagctcctaccagacggcgacaggggcgcggatcttcagcaagcagctcccgggagaccaacatacacgttcaggggcctttattactgcggggggtgggggggggcgggggtggttaggggaggagggagactaagttactaacagtccaggaggggaaaacgttctggttctgcggatcggcctctgacccaggatgggctcctagcaaccgattgcttagtgcattaaaaagtggagactatcttccacgaatcttgcttgcagaggttaagttctgtctttggctgttagaaaagttcctgaaggcaaaattctcatacacttcctaaaatatttatgcgaagagtaaaacgatcagcaaacacattatttggaagttccagtagttaatgcctgtcagttttttgcaggtgagttttgtctaaagtcccaacagaacacaattatctcccgtaacaaggccacttttatcatgcaaaactggcttcagtcccgaaaagcaagagctgagacttccaaaggtagtgctactaatgtatgtgcacgtatatataaatatatacatatgctctacttcataaaatatttacaatacaatctgtggagaatttaaacacaacagaaatccattaatgtacgctgcagatttttttaagtagccttgaaaatcagcttcagtagttggagcagtgctgagctagaagtacttgtcatgttctctgttctctcaatgaattctgtcaaaacgctcagtgcagaaaattcagcgtttcagagatcttcagctaatcttaaaacaacaatcataagaaggcccagtcgatgacactcagggttctacagctctcccacatctgtgaactcgggtttggggatgttggttaagtttgtggctggtcctctggtttgttgggagttgagcagccgcagagtcacacacatgcaaacacgcactcttcggaaggcagccactgtctacatcagctgggtgactcagccctgactcgggcagcagcgagacgatactcctccaccgtcgcccagcacccgccggttagctgctccgaggcacgaacacccacgagcgccgcgtaaccgcagcaggtggagcgggccttgagggagggctccgcggcgcagatcgaaacagatcgggcggctcgggttacacacgcacgcacatcctgccacgcacactgccacgcacacgcaacttcacggctcgcctcggaccacagagcactttctccccctgttgtaaaaggaaaacaattggggaaaagttcgcagccaggaaagaagttgaaaacatccagccaagaagccagttaattcaaaaggaagaaaggggaaaaacaaaaaaaaacaacaaaaaaaggaaggtccaacgcaggccaaggagaagcagcagaggttgacttccttctggcgtccctaggagccccggaaagaagtgcctggcggcgcagggccgggcagcgtggtgccctggctgggtccggccgcggggcgcccgtcccgcccgcgcccgctggctctatgaatgagagtgcctggaaatgaacgtgcttttactgtaagcccggccggaggaattccattccctcagctcgtttgcataggggcggccggcggccaatcacaggcctttccggtatcagccagggcgcggctcgccgccgccggctcctggaattggcccgcgcgcccccgccgccgcgccgcgcgctactgtacgcagcccgggcggggagtcggaggccacccccgcgccccgcatccaagcctgcatgctggcccggggccccgcccgcgtgcggacccctttccgcagccacacgcaggcttgtgcggctccgcgagtggccacggtccggagacctggaaaaagaaagcaggccccgccggcccgaggaggacccggccggcgcgccgcacccggagaggcccggccccgcgagccgctgcaggcaggcgcagtggccgccacgaggctcccgaaccgggctgcagcccgcggacggccccagatcctgcgcggccgcccagggccaggcctccgcttccagggcgggggtgcgatttggccgcggggcccgggggagccactccgcgctcctgcaccgtccggctggcagctgcggcgaagcggcgctgattccttgcatgaggccggacggcgtccgcgcgtgccgtttgctctcagcgtcttcccttgggtcggtttctgtaatgggtgttttttaccgctgcgcccgggccgcggctcgatccctccgcgcgtctcacttgctgcgtgcgtcagcggccagcgaagagtttcctagtcaggaaagaccccaagaacgcgcggctggaaggaaagttgaaagcagccacgcggcttgctcccgggccttgtagcgccggcacccgcagcagccggacagcctgcccgggccccgcgtctcccctccggctccccggaagcggcccccgctcctctccccgcccccgtgcgctcgagcggccccaggtgcggaacccaccccggcttcgcgtgcgggcggccgcttccccctgcgccggtccccgcggtgctgcgggcattttcgcggagctcggagggccccgcccccggtccggcgtgcgctgccaactccgaccccgcccggcggggctccctcccagcggaggctgctcccgtcaccatgagtccctccacgccctccctgccgggccctgcacctcccggggcctctcatccaccccggggctgcaacccagtccccggatcccggccccgttccaccgcgggctgctttgtggtccccgcggagcccctcaattaagctccccggcgcgggggtccctcgccgacctcacggggcccctgacgcccgctcctccctcccccagggctagggtgctgtggccgctgccgcgcagggactgtccccgggcgttgccgcgggcccggacgcaggagggggccggggttgactggcgtggaggcctttcccgggcgggcccggactgcgcggagctgtcgggacgcgccgcgggctctggcggacgccagggggcagcagccgccctccctggacgccgcgcgcagtccccggagctcccggaacgcccccgacggcgcggggctgtgcggcccgcctcgtggccttcgggtcgcccgggaagaactagcgttcgaggataaaagacaggaagccgccccagagcccacttgagctggaacggccaaggcgcgtttccgaggttccaatatagagtcgcagccggccaggtggggactctcggaccaggcctccccgctgtgcggcccggtcggggtctcttcccgaagcccctgttcctggggcttgactcgggccgctcttggctatctgtgcttcaggagcccgggcttccggggggctaaggcgggcggcccgcggcctcaaccctctccgcctccgctccccctgggcactgccagcacccgagttcagttttgttttaatggacctggggtctcggaaagaaaacttactacatttttcttttaaaatgatttttttaagcctaattccagttgtaaatccccccctccccccgcccaaacgtccactttctaactctgtccctgagaagagtgcatcgcgcgcgcccgcccgcccgcaggggccgcagcgcctttgcctgcgggttcggacgcggcccgctctagaggcaagttctgggcaagggaaaccttttcgcctggtctccaatgcatttccccgagatcccacccagggctcctggggccacccccacgtgcatc

SEQ ID NO: 69300 - DNA, 770 bp, Homo sapiens
agaattctttgaaattctcaagaaataatgcaatgagatgcaaaagggtaactattattaatcttcttcctgaagtgtcaatcaggaaggtatttttaaattgtattggaaaggaagaagagacaatgtttcttcccattaatgatctgaactgaaagtaagggaggaactaaaaaatgtgcaaaatgtcctcggggaaaaaaagtagtataaaacatagtcttggatgatacagcaaggtcgttgctcaattttatgttgtaacactattttaactgtcaccaagggctgggatagcaaatattgcatcaactctgcaaggtgtttcctgggttttgtggacaggggggtcgggggaggtgcaatctccattcttgtgaaggccagataaagacttctgctgcaagccactatctttttgtgctgaagctgtagataacacagtttcacaccctgctgcccaagtcctgctttcccaatttgtaggtctttattgcaaaagtcttttgtgtttgttttatcagacacattttatcatccttctccaaacaccctttgtcaaagtcagcctttgaacttcttttgcatatacatagaatgggaccaatgattcaggatatgtaacaggcttatcttataattctaaagaaagaggaacagagccattgacctttcttctatattttcttggggctggtgtgtctgtgtgtgtgtgtctgtgtgtgtgtatgtgtgtgctaggggtaagatgtacaatctcattaccttta

SEQ ID NO: 69301 - DNA, 741 bp, Homo sapiens
caaatcaagatttgcataaattggctctgaagtcagcttctacaaaccagctggaacactcgccatattcctagttcagtgctgtcttcccagtgggttctcagactttgcagctcacccttagccttctgttgcagggaaaccacatccatgtggctcccagtctctggcaagccagcaaagggctccaacttctcttgctttctccaccttctcctcactggctggagcactcaggactctcccaggtcctatttttctccttttggtaatttcctgatagaaactccagcaatgaagataattttcagaactgttttttttttttctggtacagaattcattttggcttctgggaactaagaaacaaatgaactgtctttctgaagtcaagaactgtataatgaaagctaaatgcagaggcaaaagccactgtcggttgccctttgtcctctctgtcaccagccctggacatgagggtgagacagaaagcctcgctcttccccagtgaaaccctgcaattgttctgtgccagatgaagccctcttcagatgctggacagggtccaggtgctgccctgtgagtggatgccagcctcagtcctcatccaggccaggaccatgtccagggcgggcttgctcctgaatcacatgcttccagtcaggactctgaatgcaaatgctggtgttttgtattttttgtcgttatgttattgttgttctttttttttttgaaacaagg

SEQ ID NO: 69302 - DNA, 947 bp, Homo sapiens
tattgactaaatctgtcagcattttgatctacaacaaacacaaattgtgtttttctaaagctctttggggtttcttataaagcaggctttttaaccaatgttttgaacatatcaggttaaggtatgtgaaatagtctctccaggtgggatttaacataatgcaataagaactgaagatttaatagaggatttcttttctaagcacaggaagaatggtgaaagcatttagctttcaccattggccagacagataaaacagacattccctaaagacatcagcaccttagagagaaaatcaaaactactcaacagaaaagtgtgaggcaaggaagagctgcagatagtgtctacaaagggtggctcagcagttctggagtggtttctctcactgcatttcctttccccagaggtccctttggctaaagcactgtccaaaggtcagttgctggaatgagtcgtttagtgctgaggaaccagttgcctgcccaaagagttgctccgccagcagtaggaaaaaaaagaaagtgtgaattcaagtatttcagaaagtttgactcccactttataagagcagggggaaaattcataaagaaagtgaggccattaaagagctggagtttacaggattgtgaagcaggaaaagaagtcagtcttgggaagtaccattaacaaatttagtaacaggctgggcttcagcctcctcttcccttgccacactccacgtaacacagaatgcacaagacaccaagccacatgtgtgatttctctggactcgcacgtgtagggcaagctgatgttcatttgtgaattggatttctcatttgcggactcttatctatgatgcaactagtttcccagacattatgctttgtcttggacagatgttggtgagtgccatgcaagtgccctgggtcaaaaacggtttctcttctcctctgcgccttggg

SEQ ID NO: 69303 - DNA, 771 bp, Homo sapiens
ctgtaatgtgcagctgccactgcagagtcgactcacacttaataatgacttagcaattcaaggggccatacagaatatccttgggagatttaattttagaaactccccagatgcttttagccttaggtgtccagatgcttaggagaagggtttggatgaggcagtgaacggcctgaattctcaacttttctctttgggcctagctctagccagatatctatttcttccagtggggtctttgtaggacaggttagagtgtaaagacactctaaggctggggctcgttgaagcctcactatacgctgtcatcttcgggactgaggtttcaacagggcaccagggggcagaatacaaaggcctgcacgctggccctgcacggccttcctgggcggggttaacagccacggcagccgcagcataacttcgcagcttggtgaggcaacagttggagcttttctgggcaccctccaggtcatgacaataagtaaagcctcagccagctgctggtgaacttggccttaccacttccctaggagcccaagacaaaagggcacgtctgtcatcaatgaaccgcctggagaaatacttaatcctaacttaactagaacggtttaggactctttaagtttgtgtattgacccacaccctctgtcctagttcctgcaagtgactcagaccctgggtttctggcttggggattgtacccaagagtctgcagtggactgtggctttgccaaggaattggatgacagttttcattctcgctcatat

SEQ ID NO: 69304 - DNA, 997 bp, Homo sapiens
ctttattatttttatgataattagaggaagcaattagaagactgtccagcaaaatgattcttcagaaagtttctgatttagctgcattctctgtggcactctatacctgctgtctacttacagaggaacgtagagttgtgtcttaattgagaaaaataaaacttaaaatcatttttttctagaatataaattactattattagggttgactgcaaaaactctacagacccacaaactcagacacacacacaaacacatacacacatacatacacacacaaacacaaacacacacacaaacacacatacacaaacacacacacacaaacacacacaaacacacacacacacacacacacacacacgctttagtccaggatattgatttcactttaaactctggcctcacttggcacgaatgtttgggcaagccctaacatattacctttgggtattccccattcctgtagttagtcaaccacacagagggcagatctagaggagataactgatttaatgataagttaaaggattaatcctttttctgcagcatcttaatatgcagagattatcttgtctgatgcctgagttataaatatattgccactcgtgtttaatcccacacaccacctatcttttccttgaatctactcaagtgttcaacaacagccttctaggtttctgcctcccaggtaattcagatgaaaccaggaaatcatgctgataaaatagtttcatcctgcttggaattgcgtacctcgcagtgcacccttttcagagaagctaaaggaaattcaaaataagagatggagtcatgactcggggatgacaactatgtctctgtgttctgctgtattcaggacagtgtggatcatggactacctaggacctgcttctgaaggtagtgagaagcagactcaaccatgaattcctttagactcagagcccttcacctattaatatatacaacatacacacattttaactccaagacttcc

SEQ ID NO: 69305 - DNA, 604 bp, Homo sapiens
ctgccagggtgctgtcttctcaccttttcaaagaccctcatctctactgtcccatatccatccctgctgaccaaagcaaaactaggtttttcttgcttttcctgggctgagcctcttattgttcctagacacagccagcctggtgagcacaggcaaactggacattggaagacccagctgcacaaagactccttcctgtgagaggcttggagaagactttgctctagacacacaagggagcctgtgggaaggtgagagagatatcccttctcattccaagcctctaccgggaggaaaggttgctcccagagttggggttgtggagctgtttatcagggttgggtcagatggaaaaacagaggactgtatgtaacctaaggtgaagtaaagaatctaaatatgctcagagaaaggcctggccttttgctctcagcttctgggaagtgatctgtgcctttggaatgtcatgtctgataggagtggctttgtttgcctgcaggccttggaccagccagatagtgacaaggtgattttgggtggggccttgggtcacatcaacaagccttagtgaagatgggggctttaggtcatgtggtctcagctt

SEQ ID NO: 69306 - DNA, 2015 bp, Homo sapiens
gtgacttggtataggagctacattcaatagtacggccagctagggcttctttaggagacactgtttgtgttcaagtttgaatgataaaatcagcaaagcacagagctgggattgagagggtggaatattccaagatagggaaagatgatgagcttggtgtacactgtacagtaaatatagcagtcctgagactgctagcctgatgaacacctacttgcaaggttggtccctggttcacatctgaaaattgggatttcagtaatgtttccaccactagagagtggcttaattaattgataagctttaactaattgataaagttggtttaccatacctgaagtgtttataaacacaatgggacttatgctgaacacctgcttttcttggagagtctggaatgttggtgtgtgttaggggaagagtgcctatgtgataagccccaaataaaaactctggatactgaatctctaacaagcttccctggtagacaacatgtgtcacaattcaatgctaaaggaattaagcatgtcctgtacgactgcgctgggagagaggactcatagaagctggtttcttgtttcctctggacttgaactcatgtgccttttcactttgatcatctcctttggtatcttttcattataatacactgtagctgtgaatatgaccatatgctgagtcctgtaagtctttctagtgagtcattgaatctgagaatggctgtggggatccctaacacatcgtgcatacttacttcgtgtaattcatgtcatatatttgaagaaaggggttagtatgaacaaaagagttgggtttagtgctaaagacagacaaaaacaagggatgtgttttgcaggaaagaccagcttaagagaatcaacaccaataaggctgcatggtaataaaacctttggcaggtttcattcaactgctttgactcttttttggtccttttatggttttctcatcataccattctttctaagtaactccaagactttaggcatttaagttattcctggatattggcctaagcctttatcttcttaaaatggttcttccacgtttacaaccattacaattcaccaaacataaattaactgtctttgagactcctcaagattacattactccatcattcaatgaatagttattgagtacagatattttattgcaaccctaagtactaaggtagccattgctgattcaaagatgactaagacaaatccatctctattctcaaggaacttgctcaagggaagaaaagtgccaaagaaaaacaggcaaaagggctttgttcggatggcagttttgcaattgcatataagttttcagggccttctggccatccaaagccacatgtcctatgccacagccatgctcccaacaggtgaacatagaaaactgtaggtgagtcagcatatggaaaatgcaggggattcctgaaatagtactgagtcattaatcactgatatcctggctcagttcacgaagcaactgggagtaaataagcaaagaaagtgaactaatgcttagaagatggaaatacccctggggacatttgttgagtcagtataagaacgtggaaaacttcaacagtcatagattcaaatggaatgaaataagaggagaagaacattccccaacagcttgatctctcatcaaaaattgctggcaagcaccactcttctgaattctctactttgggaattggaggaaggaagaaaagaaaggaataaaatgttgttctgatctcagcggattctaaatttatgtgatgtgacaacacatagtacacaaacacatagctagtgtttgatgtgtgatgttgaattgacttatacaaggcaaattataatacaaaggaaaaataacatagaagaaaacaacctggagaaactgatgggagggaagataggctttggaaggggtaaattaattaactcaaaataagatagtttaaaaaaacaaacaaactacaaatggggattcatatgtacgggttgtttcaaaat

SEQ ID NO: 69307 - DNA, 662 bp, Homo sapiens
ctgagtggattttgtccccagctgctgctctgggggtgattctttgcatgggcctgcaattcagcgatgagaaaactaagaaaaaggttcccctgagtctctctggactttcacttagggggaaaagtaatccgtacaaaataatgacttcctgaccccagttcctggagaaagccgagagacagcttctgctgaactcagaagtgctgttttcctacgtgaactggggtaaaggtactgaccagagagaagctgccctctgggcactggcatctcttctgggaacagggttttggcccttctgcaagtggccacagagatcgggttacagcagtgctgagctggagtaaagtccaggcctggggtcaagcaaggcctgagaactgttcgggaactgactcaccccaaagccctcagccgaagaggcaggtcccagagcccactctgctcacctctcagagtgaggggcttcggcaacaccagtcctgcccacttcagggaacagtgtaaaaacaagggaggcttgagaattcaaaagttctggtaaaactatgtatgggacctcttccttagccaggtgcataaccctgctgatctagactttttaaaaatatcccaaattccctctgcctggagtgctttcttcaatctaactatacctg

SEQ ID NO: 69308 - DNA, 1407 bp, Homo sapiens
cttctcatgtattttttcctttggatggttttgatttgtttttattgttgctccattgagtaactttataacaccataacattttgtagaaaaggattcctagatgaatgaaacctttctgaaatcctaaaaatcttacctttgccaagctagccttactggcatgaagcctgctccacttcctggttctgaccaataattttctatgcgaacgtcatcatcaaagcttgcaggacaacttgtgtggagcatttccagatacccgtcctcccctctgttatttcagtcaacagctgctcagcctgttcttcccatcaccgttcatgattgcgttagacaaaaatccacctttaaataaactgtgaaaactgagaacggcaaagcaaccagtggcaactaagaggcactctgctgttatcaacctcagctcacagtcttgggcgcatgcccagcaggactaaattctctatacagcaagggagagtttcagctgacctgctgtgaatgccccaagtgagtcactgccgttaactccatcagtgccacttgctgtctacttggacatttctgaacagctgcttggctctaatgtcgacctctaactggaaatatggcctcgtctgactcagtttcagaagagaaaaagggggaggcagaagggaggagagaaaacacacatgcccactctcaatccagattgacaactttgtttttttctcattgattgtggtagaaataattgttgatgaggtggaaatactaaacccagtttgtcatagtttctctattttgtctcttaatatattcctcatgaagttggattgggatcttctactgaaattatacgctgctgtggaaattcacagtccttaagagctcaccccatttccatattttgtttttaacatatccactgaattttccaaacacaaaagtgaatatttcttttattctaaaaatgttgttcataatattgagaatccatttagaatcaatcaacatttttggagtacttgttagaacagacttctggggtagacattaaaaaggattctgagaaatatcagacatgcttcctggattcaagaatttataataaaatgaagagaaaaggccttgttcaaacagatggcccaggaacaagatgagacagtgtgcacagaagtgtcacatgcctgctacagctactagaatctgtgagagctcagagaaaggctctgggctggtggctttaaatccagaatgatggtaactgatactaacaactgaagtgaaattgacttcataaacatggacgatgtgtcatagctgggcatgcagcccaagtgtctaagttgaagactgaaaaatgctcacatggcctcagtatttcatttcagcaaaaatccgtgatttatatgtgtattg

SEQ ID NO: 69309 - DNA, 1176 bp, Homo sapiens
gggtgagttctcagagctgatggttctacaaggcagttttccctgctcttgaatgctctctctcacctgccaccatgtaagatgtgcctgcttccccttctgccatgattgtaagtttcctgaggcctccccagccatgcagaactgtgagtcaattaaacctcctttctttataaattacccagtctcaggtttttctttatagcagtgtgagaatgaactaatacagtttgttttcttaattttcatgtctgagcacagaacagaattgagaagtaagaaaaattatatgtaggaaaattttcccataattattccttcaatgtcattgtattccaacggccagcaaaaataaggcgtgaataatatcacaacctcattgttgaccttgagaaacagaacttgacttcaaaagtcaagacatgcccgactgatggagcttaaggccaatgaaaaaaagaatgatagagtcaatgactgggtggttaaggagacataaagaaaccagccatttgaatgcgctcaatggaataaacaacctgcaaaaattaacccatgagccacagtgtgccccctttttgatcagctcctgatgctgtttggggtgttgagatagcccctagaagggatctgggcacatgctgcattgctcatgaactgtctgttttatgaaccttggactttgagatcttggccactgctgcctggatgatgttcccaaatcatatctggtcagtgtagagagagatgggaatctccacattccacgatgttgccagctcattgagcaggtactccacagatgagttcagtcctcttcatataattccttgtgagtcatttcccagaataagcccaggcactttgccagtgtattagtccattttcatactgccataaagaactgacccagacagggtaatttataaaggaaagaggtttaattgactcacagttcagcacagctggggaggcctcaggaaacttacaatcatggtggaaggcaaaggggaaacaaggcatctccttcacatggtggaaggaaggagaagtgcagagcaaagggggaagagccccttataaaaccatcagatctcgtgagaactcactcactatcaggagaacagcatgggggaaacctcccccatgattcaattacctccccatggtgtcttc

SEQ ID NO: 69310 - DNA, 622 bp, Homo sapiens
aggatttgatcttttttggcatatctggtttgcagctgtgtgtctgcactggattgttaataatatcagaaacatatctgaaccacctagagatgtgcctctgttgtcaacactgtctggaaatagctgtcaggcccacactaaacaaggctctcaaagaagggagagaggagaggttaagtgtcctaatagaagttataaaaacctatcagttcaggaagaaagaccaagctgcaaagacagggttggaaaatgtgctgtcactgcttgagtagtggccaaaatacctggaaacctgagagaagcaggtcagggccagtgcacagtccaaagtagtcatggcaaatatgcatccaaccctgcagcatttgtttacccgtatcctgcctattgcctgactatcatctacagctgggagctctgtgtgattaaaggccacgtagtgcaatccccgtctgaggctaacacatacctacactcacacatcaactgcagtagacacaacaagtgcccatccatattcctttgaaccttctcttttcagtgcctctggccccagttccaaattccagcacctgcacctctgtcaaaaggctttctctggccaccagagcctgatctt

SEQ ID NO: 69311 - DNA, 2009 bp, Homo sapiens
gggagcccgaggcgggctgaggtcaggagttcaagaccagcctggccaacatggtgaaaccccgtctctactaaaaatacaaaaatcagccgggcgtggtggcaggcacctgtaataccagctactggggaggctgaggcaggagaatcgcttgatctcaggaggcggaagctgcagctagacgagatcacgccactgcactccaacctgggcgacagagcgagactctgtcacaaaaaataaattaaaaaaataaaaataaaaaataaatctacttctaaaacatacgagggcagaaatgagcaagagacaagaactccaggcaatattaataccgcacttccgcagtataaggttcattatttgacctaacgaaagtcggcatgtccagctccagaggcgaacggcggctggttcggtgcgggtcccagcgctcagtccacagaccgcgccgggaagtgtccccaagactcccgggccctcgcgcgagctgtccaccatcaccctgctgaggaccacgtgaagcccggtgaccgccacagacacaggcaccgtccccgcccccatagtcctcaaactctagccgtgaggccgtcctacggtccgacacacaccgctcccgcagccataggccagccaggcgagcatcggacctcgggcctcaggctcctcagctttacgcagcgcgccggagcaacatgcgctaagtgtaggactccacaagatgagaggttactgcagcgcacacgataatgcctgccctggaggggacctgcgacctaaactcagttctttttacgctgatgaatgaaagactaaggaacgcaccccgccgactctgctcccgttacccgggcaactggaggcccgacccggaagtcctactagctcacctaggcgccggcggccgcttccaagatggaggctgcagtgggcgggcccaaggcacgtggaaataccaaacagccccagatgaaggcaagttaaaggaaccggccaaaactgcagagggagaggctgaaggctgtcgcgcctgcctggtgtccttaagcaatccaagtcctcagtctcccgggtccgccccttccgccgcgggcggcagcttccggctcgcgcatgcgcagtgttcgcggactcgccgccaacgcccagtacagtcggggacgaggtcggcacacccacagccccataacccctacgtcgagtcaggggtcagaaaacccagtaacccgcaggcgagcaagctgcgcactgaaaagccggcctgcggagtctttccttacgaagttaaaccacctagggcgcgcggccctgttcgcccagacctcgggctttcctgccaggctgggtttgccgggtcgagtcactttgctcgccaatccccgcccccattccaccgtttcattctggccccaggacccgcctcacaggaaaattctaaataatatatctaaataccccttcttccaatagcgggagctcgatttctgccccacccacccccactttgattatgggctatgcctagtaacttgattccaaagagtacagcctggaatggtgttggggactacagtggagaaacctggcaaacagtaccttaccgggtggtcaaggataacatcaggaagaaatcatgctgatagcatgttcctgtggtgtctctctccaaaacccttctatggaaatcttctatgggggaaaaaaaattagtactcctaaacatgttttctgtcatgaaaaacaagtacagttgtcccttagtgtccgtgggggaatggttccaggaccctgcggataccagaattagaatgctcaagtcccttgtatacaatggtgtaaacctaagtaacaaaagaggctccctaaaagaaaatgagatttatctgggagtagcattgcaatgggaatatgcatgccatagtaaactgtgtgcgttttgggggaggttgaggcaaggagatgtttttaaaaggaaaatgaagattatatgaattgctttaaatcaa

SEQ ID NO: 69312 - DNA, 2094 bp, Homo sapiens
cacccacctcagcctcccaaagtgctgagattacaggcgtgagccaccgcgccaggcctggtctcttttgaataaacaaattgaccctcccagtctaaaaacttgagaaatttacatttgtcttatctgagttcctttctcagggaactagccatcagtcctcccagatagcaccaaggaactgaaacttatcggatcaccacatctggaaaatcagacaccagacccctcacctgcaacaattgcctgatgcctgttgacccactcctcttcatctctccctaactcctgctattttcccacatgcagttacatttcttccctgctatatcctaattttaatcagttgagaagatggatttgagactgatctctcccccctaggctgtagcacccaaataatgccttcttccctgacaataatggggtctcagtgactggctttctgtgctgtgaaccaccagacctagaccaaactcctggcatttctctaacaatttcccaccactgaactaagttataaattctgaggatggatccctgtttcttcattttaagatggggattaaaaggtacatcctagagtgttattgtccgtgtaaaatagggctgtgaaaccccctacacctatgcacagataaactgatggccctgcaaatgcccagagaagtaaccttataaagatttagtgaatgtttcccaccattattggaaaatctggctaagtcagtagctttgttttcatatacttagggggaaaatcaacaaaaacttgatgccctgttatttccttccagtttcttctgcaactctagctccaaagactgcagttcctgcagtatttttttttttagaacaccaggaaaaaaagaaaaaaaaaccatgcaaatgtactatttcttcaaacacaactaggaatgattgaacagctgggagaatatgaagaaaacccctcagagaaccaagggcaagcagtgagttcagatctaggcacatggccactaggaatggttcttcactgccacgtgggcagccaacagccagtagctagagaccagcctcggtcttcggcctgcgggttctgcaaagtcaggctagctggctctccgcctgctccgcaccccggcgaggttccggtggggaggggtagggatggttcagccccgccccgctagggcggggcctgcgcctgcgcgctcagcggccgggcgtgtaacccacgggtgcgcgcccacgaccgccagactcgagcagtctctggaacacgctgcggggctcccgggcctgagccaggtctgttctccacgcaggtgttccgcgcgccccgttcagccatgtcgtccggcatccatgtagcgctggtgactggaggcaacaagggcatcggcttggccatcgtgcgcgacctgtgccggctgttctcgggggacgtggtgctcacggcgcgggacgtgacgcggggccaggcggccgtacagcagctgcaggcggagggcctgagcccgcgcttccaccagctggacatcgacgatctgcagagcatccgcgccctgcgcgacttcctgcgcaaggagtacgggggcctggacgtgctggtcaacaacgcgggcatcgccttcaagggtatggggaggggacgtggcctccccgaagaagaaccgatgcactggggctcctggcgtctgcggggtccataacgcctccctagggaggagagggaggagctaggagatgcagggagtgcagaaaccttggagaaagtgagagttttccagccaaagggaactttgtgtttccctggctgggactcttggggatctttttcaggttttctgcagtttttctgaattgagctttaaggcaactggatggattttgaactgattttaaaataaacgacaaattgcaaaaagaaaaaatggttatgccaagatccagtgtgtgcacccttcatcctccttcccccaatggtgccatcttacaaaaatactagaacatgatcaaaccaggagattgacattggcacaatactgtaaccagatacagacttactttaggcagagggcactaagtttttttttttttttttttttt

SEQ ID NO: 69313 - DNA, 993 bp, Homo sapiens
ggtgagaactgacatggcgggacccaaggccaccaagagcccagaagaaggtgcagagacccctgtgtacttggcccttttgcccccagatgctgagggtccccatggacaatttgtttcagagaagagagttgaacagtggtgagctgggctcacagctccatccatgggccccattttgtaccttgtcctgagttggtccaaagggcatttacaatgtcataaatatccttatataagaaaaaaaatgatctcttatcaattagcactcactaatgtactactaattgagcaacctacgcactcagttgactacgtaaatctgtcaggtcttttgtgatttcctctgatgcaggagaggaaaaattgtaattgatgaaaataatgaatgaaaatcaacagatgaataaatggttctttataagtgtccatttgtacagattgtttagatgctaaataagctttgtctcaagtacaatcaacctaaaaggtcaagggaagggacagtacaacttgggggtgagcaaacccagaaagtaaagaaagagccagttagtcaatattttcaatgttgtaggtcaaacaatgcattggaactccccaaatccacattatgtaacaaaagctgacagcatgtaagcctgtgagcatagctggctctggcccttcccagcctctaggaaaacaaatagtaccacaacggcaaaggcagctgacctggtctctttaaaaaagccaaagtcattggggaaaaacaaccagttgctatgtgtgaaacgtgagtgtgcacttgtgtgaaacaccgagctgatgagggacctatcagatctccataggaatgtgttatttatgtagggatgaagtgtcatgaggtgtacaacatatgccccaggtgtacaacatgtgtttcagcaaagtatacaaagactgatgaacaggtaaggcaaaaaaaaaacaacttttctgtttgttgaaagctttcaaaacctgggg

SEQ ID NO: 69314 - DNA, 1133 bp, Homo sapiens
ccacatttgatatgttttggatctatgtccccacccaaatctcatgtcaataatcctcccagtgctggaggtgggtcctcgtgggactgattggatcatgggggcgggttcccatgaatgggttagcgccatccccccagtgttgtctcgtgatagagttctcatgagatctggctgtttaaaagtgtgcggcctctcctccctttctttcttccttctactctagccatgtaagttgtacctgcttcccctttgccttccgccacgattgtaaatttcctgaggcctccccagccatgcttcctgaacagcctgtggaactgtgagccaattaaacctcttttatttgtaagttacccagtctcagaaattgctttacagcagggagagaatggactgatacaacatccctttgagcatttcccagtttccattagtactgatcccttgtagtgaatcagttggttgtataaacggcaaatactataacaagccagatggccaaaaaccaagtactctttataacgtcatgcaaaaaagtgggaattttctgtctccgttaaaatgaaacttgggtatcctttcatagaaattagcacttcaaccaaacttactaatagagcttgtaagcaaccaactgatatgggactaactgtacaagtaaaagattctgcttttacacagatgctttaaggaaggtttctacttacgcttagtctccttgactatggaactatgtgctgatgtctgcatttcactgtctggtgctggaatagacttgtattgacttgtgtcaaagctgtaggacaattacacaacatcatggggtattttggcaaacaatggaactttgggtggcctccagtgactgatagtggatttatgctacaaaagcttattggctactgcccacaaatcagacagagatgtgccaacccaataagctgatgccaactatcaggaaagttcctgatatttctctgggtccctttggcccattgatttcccctcattaaaaaaaaaaaaaaaaaaaaagtcttcaaatctcttaattcaagataaagaatccaggcatggtgactcgtgcctatattccctgcactctgggaggccaagacaggaggattgcttga

SEQ ID NO: 69315 - DNA, 406 bp, Homo sapiens
cacacattaggcttggcctcagccagccccctagtggtacagctcatgcccccaagagtcccctactcttctcctacatcacacggggacactggagttgttcccagggtgtatccttggtctgggtcattttctgtgttgagatgacatcatggccggcaaacaaagacagtgttatctgttgctctttttatgcaatgccaagtaccagcctacccaagcctccatcctactgccagccagcgtggaaaggcctcattggcattcagcaccaggcttccagacactcaggcacccaacagttgccaccatacctcagctgcctgccctttcacacagaggagggtgggcaagtgagagctcatgtttcccaccaaggaagggatttatcaggcagtgggagagg

SEQ ID NO: 69316 - DNA, 2228 bp, Homo sapiens
tcacctgaacccacgaggcagaggttgcagtgagttgagatagtgccattgcacttcagcctgggcaacaagagtgaaactctgtctcaaaaaaaaaaaaaaaaagtttacaaatcccatcgtaacctgaaggcaattgctttgagatctgttcacaagagccatagatttatcatgtaacttaacttcatttggtacaaactttgttttttttttggagttggccccatttgggaaaatcagaatgtagatctggaatttaaatattgcctacaaagctaaacagacaaaatgcagttgttgcttacctgaaacaaatgtttgcggcatctaaggactgataggctgggacagaattaagatagtgttaggaaagggtcccctaaggttgggtcgagttgccctttcataggaagaagagaggcctgggaaaactttctaaccaggaaggtagacattaatgtccatagttaacattagtcaatgattatttactaggtatgctctttttagagacgtttatgtacactctcgtttagtcttagtacagctcataatgagctggtactattataaccctcattttacagaggaggaaacagccttcacatgtgtacagaaatcagtgaagcctgcctatcacccatacttgctgggttcaacatgaacggcacaggcaaggagaaagccctgtgaccagcggtaccagaaagagtgaaagggcgccatctagtgactgtcatggtggttggcagtagaggttggaagccggtggttttttttcgtgggttttttttgctgttgttttggggttgtttttctgtgtgagacagagttttgctcttgttgcccaggctggagcgcaactgcggactaccaatttcagttgtttctatctactgggaaacggccgctccctggtgccagctgcaaccaattatcattttagcgaggcaggatgacaacctccggcccatcacgtgatggtcgcctgacatttctggtgtgtggggggagctgtctcctgccctgctcatgccccactagctacctactgtaacattctcgggtatctggaatacagtactaagcatcttaaaaaaaacttcactggcggccgggcacagtggctcatgcctgtaatcccaacactttgggagaccaaggcagacggatcacgaggtgaggagttagagaccagcctggccaacatggtgaaaaccccatctctactaaaagtaccaaaatgagccggccatggtggcgtgcgcctgtagtcccagctactcaggaggctgaggcaggagaatcacttgaacctgggaggcagaggttgcagtgagccgagattgcaccattgcactccagcctgggcaactaacagtgaaactctgactcaaaaaaaaacaaaaaacaaaaaacaaccccccccccccccccacacacacacacacacacacacgcagaggcaaaatggcggggggtaaccttctagggggtcattccaccggaaacgggaagaacgactcaggtgagcatgcctgcagctccagtaaacacacgtaactccggtaaacatgcttgcctcccaagcacaatcaggtcactgcgcatgcgggtggctcaccctaagggaagaatgaagggaaaggggtgcaagacgccggaagcagggcagcatgtaaaatcctaggtccaaggtcaaacggagcacttgacctccaaggtgcccccttaagcctcttccaagtgtactttcctttctttcattcctgctctaaatctttttcatcaatttccactccgctgtaaaacttgcctcggtctcttttcctgccttatgacaatctatttttttcttctgaggaaggaagagttgaggctgctgcagacctgtacagattcgctgccggtctctcagataacttccactactagcaagaaagcaaacacaccacatcaatgaaccaccaccatgtagcttaagagctgtaaactttcacttttacttttttttttttttttttttgagatggagtctccctctgtcacccaggctggagtgcaattgtgcaatcttggctcactgcaacctccacctccggggttcaagcagttctcctgcctcaccctcctgagtagctgggatgacaggcatgtgccaccacacctggccaactttttgtagagatggggctttgccatgttggccaggctgatctcaaacg

SEQ ID NO: 69317 - DNA, 615 bp, Homo sapiens
ctaagcacttttataatattaaacattcatgctgtactccttacagcaatcgtaagagctaggcactaaaactattcccattgtacagatgagcaaactgagacactgagagattgggaaccttgcccacgatcacacagtgagtaagtaggagctacaataaggagccatgaaggcagggagctccactcctgcccttcccaggcctctgttcactcctgagcatgactggtacctaacaggtgctcagacagtcgctggatgcagatgagggaacggctgtggacattcagtccttcagaccacaaaaggactttggaaggagaagaaccctggaagaatgccatgttactggcaaaggtttgggttcttacccagtgatttggtaaacacaaagggacaatggcattaagtgatagcaaagccaatctaaacagaatcacagcagtaaaccaccagaacccacaactttttttttttttttttttttgagacagagttttgctcttgttgcccacgctggaatgcaatggcgccatctcggctcgccacaacctccacctcccgggctcacccaatcctcccagctggaactaccgcacacaccaccacacc

SEQ ID NO: 69318 - DNA, 1454 bp, Homo sapiens
tgtgagccaccgcgcccggaccaaatgatctttaggagaaaaaagaaggaaatactgggggaggcacagtaggagatcacagcaggggcccacctccggaacctcaagtaaggacttgagagagaaggtagagtcagagtaacagagacacaggcgggttagccagctctgcatggaaaaggctgagtcgtgatgatgtcatggttctccccaaatctcaaagtcactgatcaaacaactcagtttacactgaagacgatggatgagactctaattttgtgcccacagcttgacacacctttgggaatttggtttaactttctttgccggtacacagatctgtgagaacatatgatcaatccagatctttatagatctatatcctccctggacaaacctaaatgcagacacttttagcacccgtaggagttaggtaggattaaataaaaacattccctcccacttgggggcacattcactgggaatcccagagcgatgtcgcctgcccacacctgctaagtgcgctcacagggcatctagttccctctcttgagttccttttaagcaagcaaggcaacctatgtccagagaagcagttactgtgtctaagtaagtcactgcatcttaggaaaaagcaaacattcgcattttgcagtgcatgatgggcgcacacccaagaaaattactcagcacttgtttttctcactttggggttttcccaaaataatttcttcagtccagttgccaagaatctggagcccccgactgacccatcaaggtccgatttggcttcggacacctcgcagatcaccccgcggctcagagcccggatcctgaagggcgcagcgtgggcagggggcgggcccgggagttggaacagagggcacagacggcccctcctcggaggggagggaccggagccggggcctttttctttaagactcgcagcactggatcccagaacttagtctgcgcggcggcattgacactagctgggctcctcggggcgcgccccaggtggtccgaagcccggtccgccctccacgcaggtgccccgcgctccccgctcagccatgtcgtcctgcagccgcgtggcgctggtgaccggggccaacaggggcatcggcttggccatcgcgcgcgaactgtgccgacagttctctggggatgtggtgctcaccgcgcgggacgtggcgcggggccaggcggccgtgcagcagctgcaggcggagggcctgagcccgcgcttccaccaactggacatcgacgacttgcagagcatccgcgccctgcgcgacttcctgcgcaaggagtacggggggctcaacgtactggtcaacaacgcggccgtcgccttcaagagtaggtgcagggcttgggttggggccccctggagcgctccgagggtgcggaggtggccagccgcaggctccccacccgtccacttgagtgac

SEQ ID NO: 69319 - DNA, 588 bp, Homo sapiens
gaggagggtggcgccgacccctagggatgcgctcagcccacgcctcccgcgaggcggttttcgctttccgtgattcgctgagccccaggcgggcccgggcgacaaacagcgcgccccgcccgccggcctgtgagggcctgtgcgcggcccggggccctccccgaactgtcagccgctgttgtgtgcaggaaaactggcctcctgggagggggcaacgccctgctagagttcatcagctttccttccaacgcgagaaacattttctctgcaaagaaacggtctccgctcgctttgggctttcgctttccttgaaagggcgcattcatagatgcccggaggcatttgctcgggaaaggaaatgaatcgctaaaacaggattagcgcgcgcttgcccttggtggacttgacaatttgtgtaatgcagagctttgataggctctggcaaaaaggaagcgagccttctcgttcccccacccccgcccggggagcttatgtttgttataaaatacgtgcgtgtggtcttaaaagcatcttccttaaggagaggggcggggatcaagagattgcttattctaactactactgaag

SEQ ID NO: 69320 - DNA, 801 bp, Homo sapiens
caaggtgctttgaacgcttacattagcctatagtctggcaaagtcatctaacacaaagcctattttatcataaaatgttgagtatcttatgtaatttattgaatctgtactgaaagtgaaatgcagaatggttgtatggggcctccaagtacagattctgcagaatgcatatcgcttcctcatccatcagtgaagtcagtaagtcctaagtggaaccatcagagggcagggaccatctatctgtatttgacttgcttatttgttcaaggttctgagtcaataggacaagcaactactaagccactagagggcgcaacttgcctactctttctagagtaaggcagcaggtgtttcgggaccggtggggccacctggacctcagtggagggtggtgtgggtgcagcccttcccagggctgatgacgcatctggctgacgaggctgactgtcagcctctggcctctctcccagaggtgtgccctcagatcaaagaggacacctcctccccttaagaggatttatttcctcgaaggcacagcttctatgatctgtgtttttctttcttcctttcccattcacatttaattccttgtagccgccaagtttctgagaacaaagctgtttagaaagcaatgaagaacacaacatcactgatgtagtattcctggccaaaatattgatgtgactctcctcatgagaacagaccaattcactttgagagaaatactacaaaataatggtctacagtcttcaaaaaagtcattgccaactaccttacattaaaatatatgaaagagatgtg

SEQ ID NO: 69321 - DNA, 1456 bp, Homo sapiens
agtcaagcctggcctttcagtccagcccagcccgtcgaggccccgcccctgttgttatggcccgcctccaggcaccgcccttgatcccaccttcatgagtcaggccccgccttccagcctagcccggccagccgaggccccgcccctgtagggacagcccacttccaggccccgcccttgatcccgcctccttcggtcaggccccgtcttctagttccgccccgcccgcggaaaccccgcccccgcgcgcctatggcccacctccaggtcccgcccctgagcccgcctccaggcgtccagccccgccttccagccccgccccaagcgccgaggcccggcttccaggctccgccccgacccgcgcggtggggaagagccgctgccgctggttctccggctcttcctcggcggttctggctcccggccgcgccgcagccctgcccagtctctctcccccagcccggagggctcctccgcgccgcacgtgagcgcgcccgccaacagggccactgccgcggtaagtcgtgcctgcgccctgtccggcgtccagtcctcagccgctgggcgaagccggaggagccgggcatctcctccccgccggcccgcgggtccttctccgggtccagagggcttgggcggcgccgtggggcggcccggggtgcaggtggcttaccggcgcgcggcccgggcctgcggcgcgctctgctgcagtgcgggggcggagagctcggggccggagaccgggagggcagcggggagactgggtggggtcccctagggttacccgaccctggcgcggaggatatgatgccggccacgccctcgccgagcggggcggcaggtgcaggtccaggggtgggtcgcggcccgcgcgccctcccggggccggcccacgaagagacgctcagcctttgtttgctggtgccctggctggggaggaggctggggacgcagacctgtgagaactaagggctttcctcgttggggaagaccccagtcttccagccagtccccaggagaagggatccgggccgcagtgcgcgctctgccagcctggcccctgcgccctgcagggttcccggctgctcgcggggactgttacccgcagtgttgccttacactcgcgactgcagccccacaattgggaagactttgctaggatttttttggtaaggcgagggaagaccgtccccccggccccacaagtctgctgccattaggtggcttaaattttttccagtacaatttaattgccactttgaaagaccacattcaaaacagtgtgtcccagagttgattaagcccattggtgatgagtgtttctgtgctgtggactaaggatcattatcaattttattactaatagtacatatctgttatctgttgctaaatgtttttgcttatgtggtagggtcactgtcctcattttcatcgaactgagaaatgttccttcata

SEQ ID NO: 69322 - DNA, 844 bp, Homo sapiens
ggtaattttaagaaaattttaaaaggaaaaaaaaagcatattctaatgtgtcttcttacctgatgcagaagatggagttagcctgagtgacccattccttgctagcagctttattggaagctgggatttgggtatgtggataactcatgctgagagctgattaatcacgtgcatggccctgttagggttcaactgacttaggtaaatacaacacaatgatatttcagctgtgacctttcagagaaggaagctccttgtttacataggagttatagcagcactgctctcccagttcaacaaaaactggtctcactggttacctgtggaaccccgactccctgagatggctctcggcagccttgccttctgcctgtttctccagcttatctcttgccaccgccactccctcaagctggcaaagcaaccgggtcatgccatttcagtcaaggtggaatgccacaccatgagcacttgggaagtcctggccaagtgctggtctgttccattttcgtcctgtctaaagggcactaacagtgccccctggcaggtgcttcactgagcgtttgagcctgtgtcacctggcctccctgactcactgtgccactgtgcagcttcctttcagtggcatgaaaagaacacccttacaaagatgcctgacttccagaaggaagacatgtcagtgtttcaccgtgaaaaatgcaactcctcgtttgcttggtgggagacgtgcttttaaattggctgacttacatttctttctagacaaagacatctggcattctgaagtcagcattgtactctgtgcaaaagtagggtgactgtctcttctaggaacttttaaagg

SEQ ID NO: 69323 - DNA, 3396 bp, Homo sapiens
agtgcagtggtgcgatctcggctcactacaacctccgcctcctgggttcaagtgattctcccgccgcagcctcccaagtagccaagattacaggctcgtgccaccacacccagctaatttttgtatttttagtagagatggggtttccctctggcggccaggctggtctcaaactcctggcctcaagtgatccgcccacctcagcctcccaaagtgctgggattacaggcgtgagccaccacacacggctcatatcagattctaaagtccttcttctttccattaaactaggctgcttctaaattaaaaagcaaagccagggcagggcttgagaaggcaatttagtgtgatgtgaagcagaatatcttgacaggtttcagtagcaccttggagaaatctatagcactcatatgcacaaaagttcatgtagctttgtgtgtgtgtgtgtgtgtggtcactgcttaggaatgggagaaagtgtgaatctgttccgactattgagtatggccgggcacggtggctcacacctgtaatcccagcactttgggaggccagagcaggtggatcacttgaggtcaggagttcaagaccagcctggccaacatggtgaaaccccatatctactaaaaatacaaaaaaattagccggacatggtggtgtgcgcctgtaatcccagctacttgggaggctgaggcaggggaatagcttgagcctgcgaggtgaaggttgcagcgagccgagattgcaccactgcactccagcctgggtgacagagtaagactacgtctcagaaaaaaacaaacaaacaaacaaaaaccagactgttgagtatacacagtgacctttgtttccggagaagtataaagtaagaactcacttccagcttattaactcttctgagagatgccacagtgattcacctctgttaatgggacctgttttaagagcccatgttcagtcactggtgacttttgtgcttgtaaaagctgccatgtgattacacaacgcgctgctcatattaccctgtgctggaggccctagtcaggtcaccctttcctgtggtgtcagctgtgactgaggggtgcaggaggctggagtctaacccaggaatcaatccaaggtccatttgcacggctcccccagccttaagtaaaccaagtaatcagaatggtttgaagggttagttaggaagtggccaagggtgcatttcgtgagctctatatcaggacttgacagatgtaactaaaacattgcactttaaccatttcaagctctcacatagaccaggtgttggctctccatttcccaaaggagaatccacctttacagtttctaccttaggaggcagaatctgtctcgttgcggttttaagcccagcgccaggccctgtggctggtacacggtgagactcggtaagtgtgtgttgagttaacgagtggtccaggtcacataggaggcagctggaggacattgccagactccatgccaatggactcctaatcccaggccctttctagaagttctgctgtgtttgtgttctgatgacagatatgtgagtatacatcctacatgatttttccatcattggacagatgaacacattagttccctaaagcttactgtgatcttttaaatctgtgtgaatcacactagaagtgtaaatagttggagtgtttttgttttcttagttgataaataaaggttcatttgaacagttgctaaagttgcttaacattgattttttttctgaatattgtgatttcttgacattgaaccaagagccaagtaaagcttcatgaatcaccgaatctatttagctgtgacagaaaaccaaatgcagtgtggcacccagaagtgattagttatcagctctccaaggtggatgcaggtgaaaggttatacaataatctctgagccagtgtgttgcagccacagtaattgaagtgactgtacaagattttttggttgctatatccatttcagtctgagacggtttggtaactgttcccagaagtgcttgggtagccaggtgtggtgacaggcacctgtaatcccagctatttggaagactgaggcagaagaatcacttgaacctcggaggtggaggttgcagtgagccaagatcgcaccactgcactctagcctgggcaacagagcaagactccatctcaaaaaagaaaaaaagtgcttgggaattgagtgaaacaccccaacaaatgtgcagagagcagaaagggagggtgcagtggggggggtcatgatgagcacgtgggtagaaattgcaaagtggtgagttaggttgagctggtgaaggctgggatgactcacaggtttcatgtaggtggaggctgtccctggtgtgtgctttttagtgaaccataaggaatgaaacttttggcccctgttagaacttattatccaccctggctttctaaccctttggggtctgcagataacctatgactggtcagaaatcctttttttttttttttaagtgcccatgaaatagctacatagctgtgttttgctgtactaagaaaacaagattagaacagggaaagcactaaactcttcttctcaggagatgaggagaggtgaatgttttaaatggtttgtaagaaggcaacaactagctcaccagatatttccatttaaatcagtaattttcaatgtagtagtaattttgcctctcagggtacatttgacaatatctggagacagttttggctgtcacaactgggggtggggagggtgctactgatatttagtgggtagagtccaggagctgctgaacattttacaatgcacacaggtgccccgacaacaaagacttacctggtcccagatgtcagtggggtggacgttcagaaaccctggcttaaagagttgaaaaatatttattgacatttcttttcttttggagctcattaataagggaggccatagtacagagtttccatgatgtcctgtcccattaaagagttacccacagcgtcaccatatgaagaggggaagacgtaccctcttagggcccctatcgtggaggaaacaaatggaccctttactgagcacttgcgacgtgcatgacccacatgatcacattgaattccagggtcttgctgtgtacccaggctggagtacagtggcaggattatagctcactgcagtctcaacctccaaggataaaacgatcctccggcctcagccttccaaagcactgagattacaggcatgagccaccccttttggctgacatttctattttttttttttttttgagacagtctcgctctgtcgcccaggctggagtgcagtggcgcaatcttggctcactgcaacctccacctcccgggtacaagcgattctcctccctcagcctcccgagtagctgggact

SEQ ID NO: 69324 - DNA, 1129 bp, Homo sapiens
tgcctgcctggcgggtgatccacccaccgcggcctcccaaagtggcattaagattcatacattcaaataagtgttcacaccctcagaggtcccttctggaggcccctggctttgcagaaatgtgcttagctgcacacggcgctcagacggcctctgcacgcagagggtctgctgcattggcgggtctttgtttccttcctctgtcctgtgtcacgggggccactgcccactcacacatggaaaccccctcctcccttggcgtcctccccctcctctcttgtctccattggctgctctcaaacctaaattattggggtcccccaggtatccatctccaggcccttcaagggaagctctcttccctggtaacgacatcccttctcgtgcccttagaaatggtaacctcccagatctttgtctcttttccccaaacctgcctcttgtgcttttgtgtcttgctgtctttcgccacctggtggtgttcccacactttgatcttaaagtgttcagattgaattcgcaggtgagaagatctgcagctgagtgtgaattaccctctggttccatttctctttgcaaaatgggggttgtagacctgcttcacaggatctctctgatgacaaggtggaaaaatggatgaaaagcgcctcgcacaatgatcaggacacaggcgaccccgatgaacacgtccctttcctgccccgtcagtatcccctttgtctctttctctccatcgtctcagccctgctctggcttcttgtctcttactcttggatctgactggtttcttcccatcccaaatctgctaagagatttgggatggggagaaagcctagctttgctcatatgtatcctgtgctttaaaaatgtctgacttcccggctgggtgcggtgactcatgcctgtaatctcagcactttgggagccctgaggcaggtgaatcacttgaggtcaggaggtcaagagcagccgggccaacatgatgaaaccccacgtttattaaaaatacaaaaattagcctgggcgcagtggctcatgcctgtaatctcagcactttgggaggccgaggcgggtggattacctgaggccaggagttcaagaccaccctggccaacatggtgaaaccccg

SEQ ID NO: 69325 - DNA, 788 bp, Homo sapiens
acttttatgtactgtacagttcttgagagttgaggacagcggcagctagtgcctgtccctgttgcagatgctggaactagagacacagcaaccttacccatagccaggacgtgcccccaattctcagactccagacagggctgttgtctgatctttcagcctttttttaatcctgcgggaacagctcacataccagagttcctgcttcccacagtgcaaacaagaaaaggtcagatagcccaagggtgccctgacctttcttatcaggtagtgttggcagatttcagataactaagacaacacccagaacagaggagtagagtaaggtttaaacatgtgaaggaaggcccggctcggtggctcacgcctgtaatcccagcatccagcactttaggaggctgagggctgcttgcttgagctcaggagttcgagaccagtctggccaacacggcaaaatcccatgtctaaaaaaaaaaaatacaaaaattaacctggcatggtggcacacacctgtagtcccagctacttgggaggctgaggtgggaggatcacttgagccaaggaggcagaggttgcagtgagttgacatcgtgccactgcactccagcctggggcacatagtgagaccctgcctcaaaaaaatatatatgagggagtaggtatggatttgtgatcggcatcaactctcaaaaaccttgcaaaaaaattttttaaaccttccggaagggagtctcttgcatatatatttgccatagtgacagcaaggaagtcggggggggggcggtcta

SEQ ID NO: 69326 - DNA, 824 bp, Homo sapiens
gaatgcaaagaaagaaaaaggaaagggaagggaagggggaagggaaggggaagggaagggaggaagggagggaggaaggaaggaaggaaagaaagaaagaaagaaagaaagaaagaagaattagaattttttcttgcctcttggtaatcatatgcattcactggagtcaacactggccctagctttctgtttgggaagttcggttacagtgccaattttcccgaaatgcctgttgacgcctggaatgtaaagtaggtgcacagggtgggagatcactgtagaagtctaaggggatgtgaatgatttggggactcataggacacacttgttttaattgtacatgatgggcactatcatgtctgttgttatatctgaaagattctttagtcaaaaacctttgctttgttaggctatagatctgtttcattttgtatctgaattcttttagccttatttcccaccaactcggagtaattggttttactttcattttcagaaatcgcccctagtggacattcctgtgttgcagttttgctatgcttttctccaaaggtaatacagtcccccgtcctccaaaaacttccttaaatacagatgctattgcagtgagcatgcataataaatatctggttttatttctagactactagagagccattgttcagaaaatatcttaaagttgtcataatttcttcccaaggtattgatctatgcttttccttctccagagagttaacatcttaaaatctgtgcagcgtactttgaacactttatatgagcgaagctttatgtgaggcctgttaaactttaaaaggcttggattt

SEQ ID NO: 69327 - DNA, 3237 bp, Homo sapiens
gaacccctatcaagtgaacccccaacctcgacctcccaatgtgttgggattataggcatgagccactgcaccggccttatgcctttaggactcttatttatttattttgagacggagtttcactcttgttgcccagggtggagtgcaatggcgcaatctcggctcattgcaacctccgcctcctgggttcaagcattctcctgcttcagccttccgagtagctgggattacaggcatgtaccaccacgcccggctaattttgtatttttagtagagatgggatttctccatgttggtcaggctggtctcgaactcccgaagtcaggtgatccgcccgcccacctcggcctcccaaagtgctgggattacaagcgtgagctaccgcgcccggccccagaactcttttttttttttttaaatcatgagttagattgatagttttcagggcaaatccaaacagtctacattaatttccgtctttatttcgttaaggtttcacatggacactggtggatatggaatggcttttttctgcgcaattcacatccgaccaggtcaagtgactggagttcaccggtctcgggtataccgcatctcgcgccaggcttcaaactctagatccccgagtctcgagctccagctgggtgtcgagacgggtacgggccggccgcgcctcgcgcatgcgccctaggcccgcagggccccgcgctggaagctcagctcccactgtaccctgctttaaccagtcaggcaattcatcttccccaagctcccaattcggcattgcctggaggcggaagtgggtgggaggggccagacgtgcgcccctccccggaagtgggcggtacccatagggctccacagtcgttccgccacctcccagtcgggttgcggcggaggccgttcctggctttgtagctcgctcaagatggcggcgcagccaccccgcgggatacgcctcagcgcggtgagcagccgcgaggggtggagcgggccgtgtcccaggagggcgggcgggcaagcgaaggggggccggcagtgggcggtggcggcttgtggggccgacgcggcggcgggggctgcggcggggcccggggagggggcggccatctcgctcccgtcggcggaacagctcggctgcgggccgggctgcgttccgtcgcctctgcattgtgtttctgttttgcttcggggcgggccagggtcgcggctcctcctcccagctccctcctagtctcccagcagctgtcgtccgcgggcgaggcctcggcgggagatcggtctgctctcggggccgcggggcccctgaccctcttctgtccgctgggcgtcgtggtgggagggagcgggttccgcgtccagaaacgccggcggcctcgacgtcccgggggcggggggacggggctgcgggcctgcctgcgggcgagtggagtcaggatgagtgtgcctgatgcctgtcagtgcctgcagcttccttggcagtggaagccttggggcccagaccctagatcgctgagctcgagctctcctctttatcccgcgttgcgtctgttttggggcgtttcgagttcttggaaaccctgtgaacatttcttgtatcttaaatcgtagggagcggtcacacaagataacttgaaatctcacgtccaggaaatgtgggcgtggcttccccacctgattatcctaaaaaacttttctaccttgtgagcgcagttgatgttatgctgaaatgttcctcttttctggaggttgttgacttttgccaaagaatgactgccctagtgccactaattttaacattcgaatgggtagtgactccttggggtacaaacacgtagtgaataattggtgcattgctctgggactttcattcgtttaggcagattctaacacctggttttgacggactttaaattttttctagtccgatatttgtgaaatgatatttgcttttacttgcgtttccttgactgtttgtgttgttgagctcttcgcatgtattagtctttgtggttttttgttttgtttttttgaattgcctattcatatcctttgaccattttctgtttttcttttgggaggatctttattgatttgtaagagttctttacgtattctggataaaggtccatcctttcgttatgtaactagcttattgagtgagctaggctttagtagtttgaaaatagaggacaattttattctttttttcttttttttttttttaaccactgagtgtaaacattaattattccccacttgtgtgaatctgggttgactaacgctttcccattagcttaaggtattgtaaagtctggccttacctagtttaaaatctctattctctctccctcccttttccccctctctttcccctatctcctttccccacttctctctccttcctctctcgaggttgagtcttgttcaggcccagaaacctgtagtggagaaacggagtgagttgatttcctgtttctgtcctttgattctcttctcccttcccgcccccaggcccttgtagactctggctcttcaagattgaggggagaaaggaagcagagataatggtcagtgtttagagaccagcattgttagcgggcactctgggtgtagctgctgtccatgtgctgggtctttgttttgtgggtaatatgggctgttgggaacctgactgacagaaatctcccatctgcagcctctttgcttttgctttaggtcaggagttggcaaactacatacagctcatgggccaaatccagcccagcacctgtttttgtgtggcctgaaggctaagagtgatttatacatttgtaaatggttgagaaaaaaagaagaatgtttagtgacataaaaattatgcgaaatacaaatttcagtttccataaaattttattggaatatagccagaaacattatttgcttatagttttcaaatgcatgcgttaagagataaaaattaatgagcttatgtatttgtcaaaagtcctacattttaaggcacaaagggtgaacccttagtgtatacacttttttattttattttatttttttgaggtagagtttcactcagtctccaggctggagtgcagtggcacgatctcggctcactgcagcctccacctcccggattcaagcacttcttctgcctcagcctcccgagtagctgggtttacacgcgtgggccaccacacccggctaattttggtatttttagtatatatagagtttcaccat

SEQ ID NO: 69328 - DNA, 825 bp, Homo sapiens
ggaactgttggaccataagtatatttttaaaaactgaaaattttaaaaagtaattttaaaaaacgagaacaacaaaaacaagatgctatccagaaaagccaggcggaattgctaagaaccaaatagaactttgagaaatcagcttcccaaggaggaattctacgtctggtctcctgccatggcataattctggctgctagctcttggaaattggcatgaaaggaagaaaggcgtatcacattgttcagtttgctgacttgctgtttgtttgattatttgtttattattgtaataaaacacatgtagcaaacaatttatgctaaccattttaaagtttcaattcagtagtgctaagtacattcacatggttgtgtaataaccagtctccagaactcttcttgttgggaaactaaaaccctgttcccgttaaatagtaacttctccagcacctgacaaacactattctactttctgtctaggaatttgactacggtagtccccccttatctgcagttttgctttcttcggttttaattacccaaagtcaaccatggtctgaaagtattaaatggaaaattgtagaaatagttcataaattctaaactgtgcccccatctgagtagcacctggaatgtgaatcatccctttgtccagtgtatccacactgtggatatatgatgccaacctattagtcacttagtagctgtggttatcagatttgctgttgttgtatcattctattttattattaaattattgttaatttgggcgcagtggctcacgcctcagcactttgggaggccgaggcagggggatcacttgagg

SEQ ID NO: 69329 - DNA, 1651 bp, Homo sapiens
agaaatgcttgaaccagggaggcagagattgcagtgagccgagatcaccccgctgcactccagcctaggcaacagaacgagactctgtcaaaaaaaaaaaaaattagaaggagccagaagctagacctggaatgcagtaatgtcaagacagctaatattggtctcctggacaaataataactgatcaagtaaactttaagttgtggcttaaaaatggcaccccactatgtatgtgtgtgtgtgtatatatatacacacacatatatatatacacacacacacacatatatgtatatataagtgaataccagatagttgaaagatttaaacataaactacttcatgtctgttgcctcatggtcacaaagtggctgctcacctccagcatcacgttttttaggcactgttaaaaagctgctaaaatgacttcctggaagccttggtaatttccacttacatttcactggccaagatctagctgtaagagagattgggaaaaacgaatgtctttatctgggtacattgctcaccccaaacaatactggagtttttaaaagaaaaaatgatagaagggataataggtatacaactagtagcatctgcccagtgtctcactgactaattgttgtaagatgttgggggaagagagaaacaagaatgacatctgggctctaggccccagggactgggaagccaatgacactgtctactgatttggaaacataaggttgggaaatcaatacttctcttttagccatattcagtttgagatgcctgtgagatttctgagtagagaaatcaaggagacagtggaacatgcatacctgcagctccaggatatacagatttgagagagcagcatatgaatgaaattttaaaaccatggactggatgacatcaccaggcagagaagaggagaaagtctaggacaggctggatacagtggctcatgcctgtaatcccagcactttgagaggcagaggtgggtggatcacctgaggtcaggagttcaagaccagcctaaccaacatggcgaaaccctggttctactaaaaatacaaaaattagtcgggcatggtggcgggcacctgtaatcccagctacttgaacctgggaggcagaggttgcagtgagccaagatcgtgcctctgcactccagcctgggcgataagagtgaaactctgtctcaaaaaaaaaaaaaaaaggtcaggacagagacctgggtctggagggaggaagagcaaacgaagagattgcaccagaacctgcagtgttcccccaagccccaggaggaaggtttccaggatgaagaagtggtcaaatatgtgacttggctgctgccactgtgagtaagataaggatagaaaaccagctggtggttttggcaaaatacgggccattcgtgtccttgataagaacttttactcactgtctggtggacgtagccactcccttaatgatgcacacttgacttgtctttttttttttttttttttgaccccccagatcccatagactgagagttgtatcttgttttctctgcttttttgctaatgaaggcaatgctacaatgagaatcttgtgcatatatgtttgcaaacctgtgaaagtatttcttttggataaggcctagaaaccattgagtcaaaaa

SEQ ID NO: 69330 - DNA, 1603 bp, Homo sapiens
gccggccaggatgaagagggtgccgccgaggatggcaaaggtggtcttggcgggtgtgcccttggcgcagcgcgtgcacttcatcccgatgacggcgcaggcgcaggctatgcccgagagcaggcaggagatgaccatgagggcgcgggcagcctggaggtcttggggcagcgccagcagggatcggtagatctggcactggtagatgcctgtgctgtgccacacacactccatccagagccctttcaggtaggacacggccgtgaggatgttggtgcccacgtgcgctgtcctccgccagtgcggcaggatggtggtgatcaacgtgcccaccatgcccaggaagctgagcaggaagcccagaagctgcacggccgtgctggccatggtgcggctgcctgcctaggccagccgggcagctccctgggccctcggggtcacgccgctcctcaggtgccagccggagccctaatgaagccaagggaggcgggagcagggagagaaaggaaatgggttaaagattatctcatgcacttatttctgtcaccgaaaccaagtttttcataggtggttggtgtggcaattagcatgttctcaaaaatagtttctgagacttcactgggtgggagagtaactgctttcctgggaaggtgggatctgaagggatgacagccggacgctggcctcagggaagggttccagccacctgccggaagttctgcttatgtccacccttgagcactgctgctgcattggcatctcctgtccttcctggttcatcagtaaccaggaataacagttgttaaatcaacatgtattattcatgccttggactgacagtgctaaggtgtgtgccagctgtgacttagaatatagccctgggcggttgtcaggatgaggggttttctgaagtaggcaacttccccacccacgtgctcgggcagggagaggtttagtcccctcggcaagtcagatgctgccttcagaattccagagctggatgtgacctagagattgtcagctgatgccggggcaggaatttccaaggtcacagctcctcaggagctgcggcaggagcacgggccagcatccctcctctccagcacggacctccgctcccaacacgctccccattcactatgcctgcttgtgactggtgagggctgtccgagggtgactttattataaaacagaggctgctacctggctttcagggatatgggaatgctgagccctttcaaaggcttttaaagaattcttagcataccaaaatccaggatactttttcgggacaaggacccagcatcaacatagggccaggcatatagaagacactaagggccaggcacggtggttcacgcctgtaatcccagcactttgggaggccgaggcaggtggatcacctgagttcaggagttcaagaccagcctggccaacatggtgaaaccccgtctctactaaaatacaaaaattagccaggcatcccgtaatcccagctactcgggaggctgaggcaggagaatcgcttgaaccaggaaggctgaggttgcagtgagccgagatcgcgccactgcacttcatcctgggcgacagagtaagactc

SEQ ID NO: 69331 - DNA, 2331 bp, Homo sapiens
catggcacaggcctataatcccaacactttgggaggctgaggtgggaggatcacttgagctgaggagttcaagaccagcctggtcaacatggtgaaaccctatttccactaaaaataaaaaaaaattagctgggcatggtggctcaagcctataatcccagctactttggaagctgaggtgggaggatggcttgagcctgggaggcatagattgcaataagcagagattgtgccactgcactccagcctgagtgagagagcaacatcgtatttcaaaaagcaaacaaacaaaaaaacctcatttgtgattataagaactgcgtccccttccaggacaggcattgagtgtgatctggtggcttcacatttgtcattgataaaaacaggccaggtgcagtggctcacacctgtaatctcaacatttggaaggccaaggtgggaggactgcatgattccaggagttcgaggccattcctgagcagcatagtgagatcctgtctctacaaaaaacaaacaaacataaaaacaaaaaacaaagccatggttagcttcatgtctcaaagtgtggaggacaaaatctaaggaaaaggtagaggacatggagaaagaagaatctggaaagtcccctgcaaatttgaaaattcaagtgcaaacacaatctatagtaagtaagccatatagtaatcaaatgactcagcttctccaggcttaaaaagtgtgtgaattcacttagctcacagagagtttgggggggctcatgtctccagcttgtgtgcaattggctggggtataattggtgactgaccttttcaggctgggtgtctggttttcttaagtcaacatgtcttgatttcatagagcataaaagccccaaatttggggcagagtccagatttgaataaggtgactcagaagcctgctgaagctttaccttggaaatccagcagagcccactaggctccgcctttagtcaggacttacagcaaaatagaaaaagaaagcaaaccccaaacaagcaataggacattgtcacacctggctgaaaaccttcatgaattagacaactattctgtgaatttcgtaagcctctgaaaattatttacttgagaattgaactggggataaactgcagtggttaaaatgtgtcaaatgaaaacataaggctaagattttctaatggtaaggaaaatactattaaacatgaggtttaaaactcattctctgtaaatttagcctttgaagcccaggtgctccaaagcagttagttgttaatgataagagtaaaaacagtcatagttaaagttccagagtgtttatgatatgccaaacatgtgctaagtgcttctgtgggcatgcaatgaactcttaaacaaatcgcaatgcgcattttgccatctttatttacagatagggaaactgaagtgtagaaaggttacataacttgtccaaggttacgtctgggctgaattagggagaccaaacaggaggttcttgtgatctttcaggtaagagatgccaggaggccgagccaaggtggtggaaataaaggtgggtgccaggaagaggtcagtttctatattcaggtgaggctagcgggatgtgctgatggtttagctgcggggtgtgagacacaggtgcctaaggttattgtcttgggcaactggaggaatggagttgccacttattgagagcttgaagagggttggagatctgggtttggaggatgtgatgatcaattttttgtgtcaacttggctgggccatggggtgcccagatatatgattgaacactattcttcatgtttctgtgaagttagtccttggacaaggttaacattgaaagcagattgccctccatagtgtgggtgggccacacccagtcaggtgaaggccagactggaaccagaaaaaactggtgtctccatcagctcaggctgccacaacaaaataccacagacttgctggattaagccacagaaattaattttctcacaattccggaggctggaaagtccaagaccaaggttctggctgcttgggttcctggtggaaattcacctgacgtcttctttgcatgcaggcagaggaaatctttctctctttcccttctttttagagcacgaatctcattgtgagggcacccaccctcatgacctcattgaaccctaatgacctcccaaatgtcccgtctccaaatactatcacatcggggcttagggctccaacataggaattttgggagaatgcaaatgtttagtccataacatgcagcttcacctgagcaagaaactctctccaacagactgtgtttgacctttatttccaacatcag

SEQ ID NO: 69332 - DNA, 5744 bp, Homo sapiens
caggtttcaccatgttggtcaggctggtctcgaactcctgacctcatgatccacccgccttggactcccaaagtgctgggattgtaggcgtgagccactgccctcggcccatggatgacctttgaaaacaaatctcctcctggcccaggccccaaagcatacactcacagtggtgagaatgattgggtgagtcttccagaaaagcctgtgatagtttgatataaagacatttagaattaattgggtcaggtatgagatttcagattgcagaaatccttgtgtaagcaaaggccttgcagctaaagtagtgcatggcaggtgtggcttagcctttagacatacacacagtggccagattgtgcatttgctctgaagagtaccaggccctgtaggttacctttgcctgctctcaggacttgctagataatttgcagaacccagtgcaaaatgaaaatacagaaccccttgttcagaaattattaagaatgtcaagatggcgtctgcagaacatcaagccaagtgcaagcctgtctgagcacggggctccctgtaactgcacagatcatgtgcctgtgaagctgtccctgcctgctatggacatgctgggaactggacattgggattttccccccttaaaacaatgagtgcattgagttagaatgttgaaaggaacagagacgctcttgcagtgttctgtagaatcgaaaatatggtttcatatgtttactttaccttcatttaagtgtagccctgatgcctctgcgaatatctgccatggaagagccttttaaaaacaaagctcttgctggtctccagtgcccaagagtggccgccagtggaaacagacctggtgttctaaatctcagtttttgtttctttcttcttccaagaaagctgtagatgagcatgtgcacttccaggcctagaagggaacagctgcctctgggtggctcgcctctttgcacaaggggctcagctcagagcttcccctaagcctggcaggtccccccgacacttctcttgggaatgaagtggacaaagtgagtgaatgagcctcagcttctcctgtctttttatagagtcacccgacagggagagataaaggaggtggtagcagcttaggcccaggagccctctcagcaaatggcccagagtagaaaattccccacactatgttgctgttggtcacccggtgaaaagtccctggccctggcagccacttgtcctgcaaatggtgcgagtgaagaatccacagattagctggaaggaggaacgtttgagtttgaaaacgccaagaatcattcctgaactggcaaggctggccacctgcgttttaaaaacacattggcactagccttgaaaacagacttttagacttcttactctgcgtaatgaaagatcttttctgatatataggcaacagaatgatttttttaaaaacaataatggacatattccattttattgatctttacctaaaaactaaaaactaactggaaaacaggaaatatttaatagtgacattttcatagcaccaaaggaagaatctacgtgtcttcctttttatagatttttctgtagatgtcttaagaagcattgaaccctttatacagatgggtaaataaaacacagtaagcttgagatatgcaaatcagattggagccagataaggatgggggctggcgctggcttcaattctgactaatcttgggcaagctgctcagcctattactcactgtctacacaggaatgactgtctacataggaatagctcctctgcagagacatctagaagatgctgagataatatatgtaaaaactgacaagccctttgggacagataccagcaaatgcaaggcgtatgctatggaagttttatcatcctaacagataagcccgtccccaactccagtgagtgactgagagacacgggcatgaacgctgagctcagatgacagcatcttttcacagcagacctgggcccagcccctggaagcacacgatgatgaactgtcctctggtttcccaagacttcaaaaatgaaacccagtgatcaagagatgtttggctttgaacactgcgggaattaaagccagcacccagttaaagccagtgaggacagcactccaaggtttggggacggtctcaggacactaatcctggttccttttctattttgcctgggtccctcctgcccatcctgggaagccgtggcagctgttggggatgtggggccccaggtaactgaaggattaactcacgtctcaaattgcatggcatttctcctcttcagcaccattttttaccctcattgagagagatctatcacttccccccctctcctgccatgccaatatgtgtctgtgttggagggcaggggtgtatttagggagcaggagaatgttcccaagtctggaaactcggaacagtctgcctggccctctttgcagaaaaacgagggagtcccagcagacagaagggggcagtggcgctgagctccccgagctgagctgtggcctcaaaacactgaacagattcagtccttcctcccaaacaggcctggtaagcgatgaaaagagttctgcccaaacactcaggaactggattattgtcgttcctggctcattaggagcctggctgccctcatgccagctgcgtggggtcctctggaggccacccagaccagcctgcagcttcctttcctgtaggggccagcacggtcccttcctctggagaacgctcggacccctggctgcatgcacatctaaccggcagggcctaagggcttccaaaacagatgactgtcaaccccagcccgcccaccccacatccacagcttcaccccaaactcacatgcagaaaacctcgagtctcatcttcctgttcaggtcccttgccagccggagccgctctggagcctggctggactccagctcccatgtgcaagaggactcagccgggacgctgccaccctcctgccttccctcttctgccaaccagacgcttccaggacggagtatttgagagaaaattgtctagacaattacagtgttccttagaatggcctgcgtgggcacacgtgccacttggttagctagcatgagaggaggtggcttggccagagcagacattcaagaccaaccagaaatgtcatttctgcactgtggaaaaaaaatgcacgatacacctgaacctgggcatctccttcctaacacgcgctcaggatcaagcctccccttcccagcctggcagggttgcagggcgtccatagtccagcctacgcctgcccaggctctcggctccgggtccattggctgttcacactcacttccctgtgtcctggaactgcctgattgttgtagattactaaaaatccacagctcattccctcctgcgccctgaccacctgcccacagcgactgtgtcctcctctgagccaccacctggcggttgtcctcacactgctttggacttttctgctattgagtaactcagcttctcagcctttaggctgctatgggccctagatgcatgctggtcgattctgatcaacgagcaactgcttttgtttgtttgcttttttctacagctgcagctgtgggtgattcggatggtctgttggtggaatgtggagctggacgggtcaaggagcacagtgtggaaagagggacaatttgctacaagttggagataagagacatggcatactgtgaaaccagtgctgacggaagaaggtgactttcttggaaggtcaagacacttgcttgacagcgatgtccaggagggctagggagagttctgctggaagtgaaggcagcacctgagggtggctgagggaactggtcagggctgggaacgcctccagccctttgaggaatgattcgctgattaagagatgtttggccttgaaaattgcaagaatgaaatctcttggtgggaatgtgtagccaaaagccagcaccctgagtggctccaaggtttggggaccctctcaaggcacaaatcccagttccttttcaattttgaaaatcgttgtgggcgattctggaattgagaagtgtgctgagagccatggatttaacatgacaagaatttccgccccttcgtcactgagcacaccgcaaatgctccagggccagggacttacttgggcttctgcgtgtcttccacagtgtgcatcaatccgccgggctctggttggtgtttaaaaaaaaagatgcagcgaaggaatctggtgtggacaaacgccctgggcatggaccaaaagcctggcccttgtgtccctggcaatgggacggtgaaggacagaaagacagcacatccagtagtgtcaggagcttggagcaggcattcggaagcatctgttaaatgttattgatggaggattgacataacccacatctgcatagcttttttggtctgtttttggaagtgaacagtcacaaacaaaaacaactttggttcaggtcatttataggcccagatcctctatccttagaggtttcccaccagatatactatttcactatctatgccaggaaagttacgtaaaaccacgcagaattttacctgacaacgaaatagaccttttcgttagatcctccaccccacctaaagcagttacacaggctgaaatgaaactgttaaaggaatgaactaacttggagatagaatcatcgcctttgctgaacaccattttaagaatattggaatatataggggtaccagcataatagtaaaatgtgcccatattatctataattttatgctgggcactttttagaaattattttttataactttgtctttgagatgatttggctacaagttcattacatttagtttacaactggctttgatttcttggcattcgttgtgtattattaggaaaccccgcagagagaaaatgtaaactccaaattgctttaaaatattatgatagtttttagggatattacactgtgacagtgaatgaaatggacgtaacgttctgttttgtagatattttgtgaaatctttattagtcttgattttctttggaacaagtcattcctgttctgggctgaagcctgaaaattccctgacctgtgaccctggcccaaggctcctcttggataaaacagtgtttcctggaccagagggcaaagtcacagaaacatgatgtgacgaaatctaaatagaaaggtattgatttgttcttcgttcatcaaatagttattggactccagcacgtatgagtagcagggagcctggctagcactacaccttcccctcctgcctctcagggtcagggccacaggcacacacagagcgagggaaaatgagggggtagagaggctggtcccgagtctccagcccttctctcccaatcctctccctgagtgggcagggaactcttctcttggctcctccaacttccatcaacgtctgcccttgggtctggttttaaactctaaggtgtaaatgactcataatggctcaacattttgtccctcccaagaggtatttttaagtctaaggaataaagatttaatagtaaaacttcgaatgccaatcaggggtaagtgaggatttggaagaggaaggtcttgagcattttcctaacactgctaaaatcatcccattgagttagggcagcaactatcctgatgggctgggtatgatggaagttagtcaatgtttcaatagatggatggatggatggatggatggatggatggatagactgacggatggatggatgg

SEQ ID NO: 69333 - DNA, 2810 bp, Homo sapiens
cctgcctcagcctcccaagtttttacttgaaacctgcatacacacagcctttttgttttatgggctgggttcctacagagagttatgaatggaggattgagtgcatttaggctattagtagaaagtgatcaagattagaatagagtggcttatctgtgtttagagtctctaaagttgttgcagggggcttgttgcaatgtccgtaccagggccccaacccagacctaccgaatcagaatttcaggaggggaggttaggaatctgtggttttatgtcagcccctgttccagtccacgtgactcttatgcatcatgatgttgagattcactgatttagacacgcagacaataaatactgattcttggactacagagccaaagacaaatcgagtgacgtattctagctcatggagccagctgggcaaagccagcagggatttattgctccttagatgatcaatgctgcccccagggctgctgtcatctcctgatgacgagcaacattttcacaacatcagggggctggtggagaaaatcggggggtctccggagcaaccccgggagcagtactgggcccagaagcctgccccagccgcgcacacagagtctacctgtcttccaatgcgagtcccgcgaggtgaagaattagagcatgttgttcatttataatgtttgctttgcttttggaaacaccctggggcaactcaggcaaggttttcaatgtggtgtttgacttggcttagctgcaaagttccccctttttggtctgtttatggcaagttagcacacggccccatatccaggagcctaacaccagccccagcagaaatcagggagcgggcaaggaagtgaaacattgggagggctgggttgggcttccctgtacccgccctctcagccgggagctcgcctgaggtcaggctgggcaccaggccacctcagactttgcagcctcggacctgttactgcagcccgaataacagtgacgcctcggacagtgacacgtcccgctgaccaaccacagggtctggaggataatttcccaggaaagagatacattccattcatttttttaaaattttattttaaatttagacagagtcttgttctgttgcccaggctggagtgcagtggtgcaatctcggttcaccgcaacctccacctcctgggttcaagcaattctcctgcttcaacctccctagtagctgggatcacaggtttgtgccaccatgcctggctaattttagtatttttagtagagatgaggtttcaccatgctggtcaggctgatcttgaactccttgcctcaagtgatccacccgcctcggcctcccaaagtgctgggattataggcgcacgtcaccgtgcccggctgatacattccattctttagctccctctttcttacatattttcttttctttttacaaagtcaacccactttcagtaggaagttgccgattctttctcatgtttacttttgagtttcaaatagacaccgccttatcttttaataagacttgctatcactgtgccagccactccatttacatcatttcatttcatctgcacagaactctacgcagggggtatgattagatcgcatttaatgatgagaaagcaaactcggagagcttaaatcagcggcccaaggtagcccagctaacacccggggggtgcggctcagccgcaggtcttctcagcgatgtggttgctgtctgcctggctaatggcctgccacatcctgaacccttcaatgtcaccctcatctttccttctctgccttagaagagaaaaggatgatggcttatctgagggctgaaagatttcatccacatcaagccccatttgcatgaaatgtatctgcccagtttatatcagcaacatgaagagcaaagaaaactgcctgtttatattgccacatctgcagggcattgaaatacattattaatgggagtttcagtcaatatctcacttttttttttttttttttttttttttttttttttttagaaaagtgaaaccatgattgggttacattagtgtgagttgtagaaaccaggttaaatctgacctttgggacatggagacggtcatctgacccagggcgggtcacattcaaagagcacagacaaggtccccctgaagtcagtgggacatttgggcctgagactatgaaactgaactagaacttatgggctttagggaacaagcccaaaagctcctaaatttcctccttgaagatctcctcgctactgtttttcttctagatattctgctgctttgacaggtacgccaccccctgtctccaaactcacacgttcaacccagtgatgggtggagactgggaggctctgttagtctctcttttcagtagcctggccctaaattaaagggcccatggttttctctagttgaacacaccccaggctcccagccagcccctggccctcgagaggggttgtttttgatggcaggagggagataaaagtgaatgtattttaggatcttgttactaggccacaaggaaacactggatggaaagtcttatgaatttgaaaagaccttttttttttttttaaatcaaatccaaggaacccaaaaggcgttaagctattgtttaaacatagacccagtgcccaaaccctgcacactagtttgtagaggttggaagaggcaggatggaaggggttaatggtgctattctttcttgaatattctgtaacacaccacaatgagccaaaagcagtcacagggaaccatcatgaggagtagcatgtttttacctatgttaactccaacatccgcaat

SEQ ID NO: 69334 - DNA, 792 bp, Homo sapiens
agaatttcagagtcttcaaggccaagtttgcttctcctggagcatccccaggagatgtctgcccaggcgggaggaggcaacgaaacctcttcttggacccaggacttcaccaaggtcctgcaagagcccttcagccctccctccagcaagagcgagaaccagtgtggtggcctcaatgggtcctcccgcccaacagctgcctttcaggaaacagagactgtaacctgggacttattaaaagtttggagagaaataatatttctgaggttgttcaacctctggctactttgaagtttattcttggattaatccagatcttcagagacctgcatatgggcatgcattattttcactttttgcagaatcactttcactaaattgcatgttagtcttatcttattgacctacttctaaagaatatttggttaagaaaacaaattctcaggcctcatcccagagcctgattcagcatttccaggaacacgctggaaagctgtcagtgtcaaagcgtctctgtggtcagggtgattgccctgtgacatatctttgagagttcatggctagaaacagctgtgcttgttctgagcaatgggcttattttttatcactagacactgtgatacttctaactaatcatgtcatttctttgggttgactgtaggaacctcagattcaaatccacccctagcaaaaatgtgcacggtctcagcacaggtaatttttgtttattttctagcaactgcctttaccttctttcccctctgttgaactttcctcaagcacttacctttt

SEQ ID NO: 69335 - DNA, 517 bp, Homo sapiens
tctctgggtggtaagatttcaagtgatttttatttctctcttatactttactgaattttccaatatttttataattgtagtgcattcattttataaatcctattaaaaaaagatttatttaagcccaacctatcagtggattaagcttgcagctgccagttcactagttggtggagcaatctcctttccagcacagattggcaaagaaagggcggccaagtgcaggcagctttcccaggctgccatacctgtcccgtggctcattccctgccgcacaggccaaggccacggagggctggcagtctgccactgggagcagctggcctctggaagctgggctgtacctcagactggcctccctttctaaaagatgttgtaaagtctttctctggaaaacacaccccaaaccctcctaagtctgaggcatcgtgccctgcagcagtctggcatggggtgggtgtgaggcgacctcgaagtctccctcgggcctggagggcttcctcagctcatggtcctg

SEQ ID NO: 69336 - DNA, 877 bp, Homo sapiens
caaggggattttcaaaaggccattccaggaacagctctcacaatttttgtagccttttcaaaaacacaaaaaatctaattcatttgctgcactgcttcagccatccagcttaaactaattttaaaatctctccttttgtaaatagagatgttagaaacgccaccacagccacaatataaaatgatggtatctttctcttttgtaatcaaattaccatcatttattataaagcttcagacagaaacctgagagatgggcaagacgacctggcgttcagaagagagagatggcatttttgacattgaaataaaggcttggagggcataaatccttttttaaaaatcaagtatttagcacaggatttggtataaacactgatcaataaataagagccagcagtcatagcagcacgctagaatcaacatcatctgagttctagcacagactcgtttctatgaatcattgaaaaggaatttcatggtgccagcagcatcagtacagaaagtcagaataagcacttagacagtaataccagcaacttatttactatcctacgttagagtcagtttgctggattttatataaggtaagtaatggatatctaaggtactgtcaattaaaaaaagttctccaaagtaatttttatttaaagttgcatatgataaactgtaaaaccaaaataacatttgggtcaaaactccaaagagttgggctatcactaagctagaaagagaaaaacagcagaaagaggattttcttgctgatatgccaaaaacgtgactctatttctttcaacagggtttattgttttcttcctgttttacaacagcaatacatataagaattttttttaattcagaaaattgcagagataagg

SEQ ID NO: 69337 - DNA, 4117 bp, Homo sapiens
tctttcactgcccttaaacttaagaaatcttatctcatcaagagcatgactaaatatccactttatcctctcctcctcattcatattttaatatttaattcactcatttatctggagtcctttttgatacatctctaaaagacagataattccacaatgagttgctagctaaacattacttgaaatttcaggatgggactctgtcctcaccaccaagctttgtttccaagagatgccatgactgataaaactgaggttggaaagatcaatgtcttacagaaaacagaagattggggggaaacgattgaaacagcactgaatatgtttatgaaatgcatccactcactcaacaaatatttaccgtgcctctgtgtcatccaagttccagggatacagcagtgagcaaagttcctgactttgtaaggtttaagtgatagagacagagacagatgttaaataacgcagtacatcaagggctgaggaggccttgaagaatagtggatggagggtgcctgcagtgaggtggtggctgctgttgtcaggctgggagggagcccgccctgccatgaggacctctgggcatctgcaggagacagggagcaggccatgcagctgtgcggggcaagtgccttccaggtgaagaggaagcccatgcacaacgcaccagaggctaaatgacccaaatttgcagagtgagccagttcccaaatgctcctcgtgcatcatcccctccccaggcttgggacatctacaacaggctgggaaccactggggcaggacttcctaccaggtttgtcatctacaggctacacctcttctgaggcccctaagtcacccaatgtttggcttggagttttttgttttttgttttgttttgagatggagtctcactctgtcgcccaggctggattgcagtggtgagatcctggctcactgtaacctccacctcccgagttcaagcgattctcctgcctcagcctcctgagtagctgggattacaggcgtgtgccaccaagcccagctaattgttgtatttttagtagagacggggtttcaccatgttggtcaggctggtctcaaactcctgacctcgtgatctgccccgcttggcctcccaaagtgctgggattacaggcgtgagccaccatgcctggccagcttggagttttttgtcttttgtcctggcattcttcctttcctgacttggttctcctagaacctccctggcttctcacaaatggtttctaagctgaagaatccattgttctgagtctgaccttgcaccctcagctctccccactctgcaaactccactgggacccccacagggtccacaagaggagaggggagcaggacaactgtagtcttgttcttttgcgtaagtggactgagttttgcagaggtaggaagatggaagattttcatcttttagtttcaaaagtctgtctcaaacccacagctggagtggccttgctgcacagagcagtgactttcatacaagttgtcttgtggttaaagggcatccaactccaaacccaggagtatccctcaaccttttgaatttcgtttaaaataaaactgtaggatttcaacaaggaatagaagtggtcccaaggtgggcttcacaaaccaccattcccagacatgtttgtggggaagccttcagcagcaatgctgctcaggtgggcattcaggcacagtgacaaggagatggggaagaagacggtttcgcaataatcaattacaccactggaggctcctggctgcctaagggcacactggccctgaccccatcctgaaattgttccttgcaggtcgcatatttactcaatcaatattcatgcagagtccactctacagcaggctctaggtcagaattagctggatgagaatgctcgggttccctgcatgtgtgcacacacgaaccctatatatagtacattttgcagtgggaggggttacttttaattgagcacctgctttggtgtgtctaatatagtgtttgatttcaaccttattctgagtaggcattactattcctttttttcaaatgaggaaactaagcagagacagatcacataacctcccccaaggtcagccagctagttagtggcggggcgggactcaagccagggtgatcagactccaaagccatgccccctccaggaagtcacacccctccaggaagccacacccctccaggaagccacacccgccaggaagtcaggctaattccccaaactagccactaaaagtggccaggactggtcagatcaacatgcagagaaagctgctgatgttttattgttaataaggtcccaagttcaagttttatttggagatgttcaaattttaattattacttttaattgaaatgcactgtaatttaatattaatttttgtgtaagtcaaatgaattaggctaaattgcaactttcattttattttggaaggaggagaggctgaagaaaaaaagcaataaataaaaaggaaaaattatttctcttagaaattcacctgatagagagggattactgcattttctaaaccatgtctagtttagacacggcacatctggtatgatagatgctgtgtatgaatggaaacaagtttagggtaataaatgtttcccagtgttaaaataaacgcctcagcggttcagattttggccaggcagtttctccacagtaggaggcacttatctactttaacactttgctacttagaaattatcactcaatcaattaccgtccacctgggtttatttttacagagagcttcaataaaatgagtgtgaaaataagttaaacacattctattcattttctcaatttttcacctctcccaatggtggttatgttgacagaaaaattacttcattttatttcaacagacatttatggaatgctgaccaggttctgtgctaagggctgggagacaggatatgaccaagtggaatgaaatgtggtccctctcattacagagcatatataacctaccttttagcacaggcggtgtctctacagcccaaatgaaggcaaccacgagaaaaattctggaccctacaatctccacagccctccccttcctcccctaccacaagagactgccctttgcccaggtaacgtccctgtggtgtttacctatgtggtccgtcaagctctcaggtgcttccagatatggaaatactctttcaccaaaagatgtttgttatactttcttttttctttttaaacttttcttttaggttcaggggtacatgtgcaggtttgtttaatataggcaaactcgtgtcagaggtttggtgtacagaccatcttgtcacccaggtactaagcctagtacccaatagattttttcctgatcctctccctcctttcaccctctaccctccagtaggccacagggcccattgttcccctctttgtgctcattggttctcattatttagctcccacttgtaagtgagaacacacagtatttggttttctgttactgtgttcgtttgcttatactttcttttaaaagagtacctccctcttacatcacttctgacgtaagctttagaatttctgtaccatctgtctttttaaaaataatagctttactgagacataattcaaataccataaatccaccctttcaaagtataagactcaacggtcttgatactttcacaaagttgtataaccatttccactatctaattccagattcatcacccccaaaagaaatccctcacacattagcagccactccccattcctctctcctccacccccctcaaccaatctcctggcaaccactgatctattatacttactatccccatggatttgcctatcctaggcatttcctataaatgaaatcacacaacatgtggtcttcttctgtgtctgacttctttcattttagcataatgttttcaaggttcatccatggtacagcatgcatcagtactgcattcctttttatggctcaataatattccatcatatgactagacattttatttatccattcatccactgatggacatttgggttgttcccaccttttggctatcatgaagcgtgatgccatgaatatccacatgcaagtttttgtgtggacctct

SEQ ID NO: 69338 - DNA, 1542 bp, Homo sapiens
tgcagtgagccatgattgcaccactacactccagcctgggcaacagagcaagaccctgcctcaaaaactaaaaataaacattaagaaatgaggatatgtacaacatacacgtactcattccattccttgggctcccaaagtaaagcagaattcagtcagaaataagcagctgagaggaaagtagtccacagcacagatatccaagaaaatcaacaaggccaagtggagggcccgcaatgggaagtgaacatttctgaaaataattattttccaaagttattatgtaataaggggcttagtagggagtgtccatgtatgtgtatacagagcaaatatttgctttaatcatgttcaagcatttcattcccaaagtttgtgaaaggggaaatcaatactccctcaattgatcaatgaacaggtgaaaaagtatcacctcccactgccccaggctgtttaaaaaactggaaggacaaaaatgtgaagcatctgttgtgtgcttgaatataagcagacacatgatacaaagccctgacatgggtatttcaggttatactcatcctaaatacaccagaaatgccaagagttccaaacttccactcacaagagaataacctggggcagggccactcttcctatccactactctgtccaagagtccggaggtcaagtccgaagaccagcatgatcagaactccgagaaagggcagggagctctgccaagggcaaggccaggccacctcactcccggacttccccagctgggagcctcagagcaggcactggctaaggtagccagccccagccctccatccccaggaaaaggcgacagagaaggtctaggggactggcagtgctctcagattttctatctgtcttctccaagtgagcccatcacacccagatagctcatagctctgctctcctccaaaaactaagggacacagtgtaacacaaaagaaagtgcctcctttttaaaaaatgttgggatgagaggtataatttgtttgtttcaagagaaagtaggtaagtttagtgtttaaagtcacctagactattgggtgtttgcagaaactacatggttatgtcattcaactcacaaatttgtctgttcagagaagacaacagaaatagacaaaataatttgtcacaatgactatgaaactgatagtatggccaagcagggggattagcaagaacctacacctggagaatctggcgacctgcccaaaaccaggtatcaatcacaggcagcaagtgcaggcatgggccaagagaattcccgaacacattcccagctccgtgggcattttcctgtcagacacgactcacagacgtgaaacccagagcgctgttgccacaagatggcagacattagcacaaatgtgattgttccaaagatttgctgaaagtggctcaagtcaaaacaaatgttttcaatcccaaatgaataaagttacagtctgaatatactcttgacacagggaccctcttccccctaacgtggaaagggccacacctgcagacttaacacctttctaaact

SEQ ID NO: 69339 - DNA, 2083 bp, Homo sapiens
aaagaccatcagtcgggtgcccaagttggtgaatgatgcaaccaactgacagaagatggagagggaaaagggcagtttttgtaaatttggggacatctgacaaaaagctgatgacacaggtgggagttttttgtttgggatttttttttttttttcttaagacagggtcttgctttgtcacccagactggagtgcaatggctcaatcatagctcactgtagcttcaaactccggggctcaagtgaacctcccgggatcaagtgaccctcccgcctcaccctccagagtagctgggactacaggcgcgtgccaccacgccgacctaagtgttttttttgttttgttttttgtagagaggggtctagctatgttgcccaggctggtctccatctcctgggctcaaagctgtccttcctcctaggcctcccagagtgcagggattacaggcataagccaccgctcccggcccgccacagctgtctctcctggttcacggtcacccaaacgccggctcgaagtgtgggagaggaggttgggggcgaccccaggtgggcactgctggcgtccggctgtcaatccacagctcacgtcctcacaggtgcgcgcctagagtcacgcgtccagcaccgcccggctggccgggaagaggcgaccgggtccgtggtccgagtcccgcacctccggcctctctctgggccccggggcaacagcccctcccgggccgcacaggccgcactgagggcgccactccggggctcccgaactcccgggctcccggcggggacgaggcgcagggacgggggcacttccggctcgcggggcccgggtcgcccgcccgcccgacccgcccacctggctgtcgctgacgcagaagacgcggccgccacggctcaggcacacgcgggcgcccgggggctgcgcggccgcgccgcagaaggtgaaggaacagcgcgaggcacgcagccgccgcaccgtggcgcgcacgagctcagccggccggcgaccccagcgcgcccacaggtacaggtagcacagcgtgatgagcatggccgcgccgccggcagggcgagcccgccttgcccgcccgccccagcgccccaggcccggccccgccccggccggaagggccgcgccgcccccccgggccaggcggcgcgggggtggggacggcgggggaggcggggacccggaaggtgacgcgggcaactggaggctgcggcgggaggggcgggggggggtgaggccgcgcccggctgtgtgatggggagctccggaggccgcgcccagggctggtggcggcggcgaggggcagcgctggggcggggggtgtgcaccggggtcaggggacgccggggctgcacccggagagggggctcgagggagtggaggccggggtgcggggccgcgccagggctgaggagtgggatgggtatgttgtggatgcgggggaggggaggctccagtggctgcccgacctgtttaagccaagtccggcctcccttccttggaggggtgggaggcggattgaggagggggctctgcctatgttcatagctgccaaggccaacctttactaaccagcagcacaccgggagtcccagagcgctccacagccgctacccagtcgacttgggaaaataagataaggccgtttttattaaattatactaagccttcatgcaaaagattttaaggtcaatcacatacattcacgggatgcaataatgtttttttaaataaggacaggaaacagaaattgaagacagataagcaccaagaaggctgcctctaaaaaggctgtgccaggaaggctccctatggtgttcttgctacatgtgggtcaacagtttgactgtaagcatcctaacaccagtgggaaaaggaaaacatcaccatgatttggtgttcttgtctccaagggaagcataattagtcctgacacagaggcttctcccatagaacctcatttctttaaaaggcattatgtaaagaacgtgttctgaacagctgcgaagcacagcaaagaattccatccagtggcttcctattctggccctcgctgaaaataggtggcaagatgcag

SEQ ID NO: 69340 - DNA, 1115 bp, Homo sapiens
atcacatcaatgcactccatccagcctgagcaatggagtgagaccctgactatatttaaaaaaaaaaaaaataggaagaaacaactcaaccacagggctagtatgttactcggttataaaatgataaagccctaaacagagaattagcccgtttccagaagaggccaagaacagatgatacagctgaactgaactcctgcctgtacagctcgttttctacaagattccagacctggaagatgatggcatccagcccccattgaagcacctcgaacaagaaaaacgccgagtccgaagagccaggccttgaacacacgattcctgtctataaataactccccctggggaataaaaagcaggatccaaggcaggaaacccgagccgtggaatctggtaagttcttaggaaacccactcacgggcctgagtcccccgtggaagcggcgacttcggcacctggacacccgagtccccagagccccgggcggccgcgcgtccctacctgcaggcctgataccggccgcggagcgctcctggccccgctcccgccaggctccgggaccgctgaaacgcacccaggggggtgaaggcgtagtcgccaaggacagcgcagatggcagcggaggcatgggagccggaacctaccgtggcaaagggccaggtcgggacgcccctcggcgcagccccaaatcctgcccgcgccccagccccgctcaggccgcgcccctgccacctctggccacacgggctgagacgtctggctcctgcacagcgcacttcccgctgcccttctccactggctgctcaggccctgcctcgccagcacggcatccgcgggggatccctacctgtcctttagggcttgcctcataggtcaaacgtcacctcccagggaggtatggcctgccccctggccaggtgggccccttccacgctcgcctgcaacaccacccacccaccttgataactgcttgtaaaggttgtactgctttcccccttgagactgcaaaccttcaagggcaggaaatgggtctgttttcctggcaaaataatgaagttggcttaaggttttgctgaataaaatgagtgacagacaaaagtagccaaatttggcac

SEQ ID NO: 69341 - DNA, 1795 bp, Homo sapiens
attacaggcgtgagccacagtgtctggcccatcttttttttttttttttttttttttaatgagacggagttcgctcttgtcgtccaggctggagtgcagcggtgcaatctcagctcactgcaacctccacctcccgagttcaagtgattctcctgcctcagcctcctgagtagctgggattacaggagcaccaccagcagcacgaccgactaatttttgttatttttagcagagacacggtttcaccatgttgcccaggctggtctcgaactcctgacctcaagtgatctgcctgcctcggcctcgcgaagtgctgagattacaagcgtgaaccaccgcgcccggccccagcttccgttttttaatgttattatgtatcagtcttttttttccgggcacttaggcgctgggtcattaggaagcctttccccacacgcaggtcctagtcaaccgtgctttttagcggcgagtaggccctgcggctctgcccctaacatgggcgcggggcacgcggccaggggcccgtgggagggggacagggcgcgcgaacccaggttctcaggccgcgtcgccgcgcgtgcgcactgacagccgggccgagccagcccgggtcccgcagggaagaacgccagcggcgcgcggaggccgcgctgccctgggccgcgaggtccctatggctgctccaccggaagccccgcccccttctggcagctggaggcggctttccggccgtcccggctgcagccccgaggcctcgactcaggagacggctgttccctggcagaggctcgcggtggactgcctgaccctcgcccggccccagcacgcccccggcgaacgcccacccctgtcccggcccgcagcgccccgacttacttctgaggccgaaacgcggccgctcctgcgccgggtggtcgcccgcgaatccctgccgcgccgcgctgcgccctctcgtggcccgcctggtggtgcaactgggctctctgcgcagggccgcggggccgcctggcctcctcctgccctggccgcggtgccgcgcgctcgggaacgcgggcctttcgccgctagccagcttctgcctctcggccacctgtcctctctcgcccacgctgcctgggaggcgcgcttctgccgccttcttgccgcgctcgctctagcctcgcccactcctgcggccttacagggccgaacctcaccctgccctgcggaaggcaggcctacaccttccctccgcgccttcctccctgaccggcaccaaacaccacgttgccctttccagcatcgacgacctattccccagttctctgacaccagctgaattagcgcgaaactactggttaagggattagcccagggagactgccctcccttcgccagccacaagcggggtgcccagaatgcccgcatttctaccctgcccactagaaactgagggattgccacagctcccgtgaggttcagcaattccctgggacgacacagaactcagggagacactttactgttagaagattattgtaaagaacacaactcggtaacagccgagtgcaagagatgcgcagcacggggggtgaagggcgggagtgctgtcctcacagcacctctgtgtgcccacctgcctggaagctctccgaaccctgtttaagagatttttatccaggtttcattatgtcattggccattagtgattgaattcaacctccagcccctttcccttcccgcaagaggagtagggacatgttggagctgaatgaaagttacaaccctctgatcacatggtgtgttgcaccagccc

SEQ ID NO: 69342 - DNA, 3047 bp, Homo sapiens
ttggggagagacttgggacttgctgtgtgagtgggcatattagtgtcttagtgagcatcagtctccttatctgtaaaatggaatgttatggggttaaattaagggagatccaggacgcaaacgacacacctttcaacccgacttctctggcctacttctcctgttccccagatcccgcagggcacactggtgacatcacaagctcctcgggtccaaaccctctcacgccctcattcaaggcctttccacttcttccctccctcttactctttcctaatcagcatcagtgccagggggaaaggcctctgtagaaagccttgactttccagtctggtttcaatgtctctccaccgtgctccctgacactcatcacactgagcattaactgtagatttacccatctgtctcctccacaagaccacgacctccttaagggcagggaccaggctttatccactttgccatcgcgtctggtgctgtataaatatttgtagagactaaaacctcctaggctagtgctggcacacggaacactcagcaaacacgagatcccttcagattttcttaaaaagagacatagggagaaagaatcaacagttcatgtgtgcacagtctaaccaatgtattcttcccttgtcactgaacgccagaaaaagcccctggccatccatcaggaaagtacttactgaagccaaattgggagcttaagaaaagaacaaagccataaatcgctctttctggcaatggcgacggtgaattttccaccatttttcctggggctttagacaatctgtggaaaaggaacacaatcagcgccagcgatgtgctccgtggcaccattgatccattctcgcctcctcgctccgccgcgggtacggcccccgccgcgcagaaccgcctcccgcgcctccgtccgcaacccgcgcccccgcctcgagcgcatacagacacccaggctggcgcgcgccccgcaacagaaggggtggcggaggatagggcagggaggggggttctggggcgatagacgcgcgctccagctctgcaagcgtggcctccctgtgggaggggagggcagggaacaaggctcgcgcggcgcccaccagcatgcgggcctactaggtcgcggcgcccaggccccgggccctgcccattcgtggagacttctatttctcattcgaggcggggtatgggggggccctcgacctcgggtccttcatacgcccacccaggcccctcccgacacctcggccacctcagcgctgagttctccgcgcaagcgccgactggggagccgcagtggggaagaggaaaacctgagggaaaggcctaggcgcgacggcaacccccaccctggcgcaggcgcacaacgaccctccccgggtgggagccagcgagcgcgggggcgggcgtgatcccgcggctcgcgacggcgaaggagggggcggtggggtgcgactgcgcacgcgcgctgccagcccacgtgacgcacctcgcttcaacgccgccacccgctccctcccgccgtcggctgacgtggagggccggaggtggcggcggcggcggcggcggctgctgctgctgctgcccgcgtccgaggctcgcgggcggcgggcccgggtgagtgcacacccggcgcgctgccgggctcccggatgtgtcaccttgtcccgctgcagccgagatgccgggggagcggggccttccacaccccctccgtgggtgtgtggtgagtgtgggtgtgtgcgcgtctcctcgcgtccctcgctgaggtgcctactgtgtctgcatgggttgggtcccgcgcgatgagggggtgtggccgccattgcctaccccagtgggtttgcccccttggtctggtgccccttcgcgagcgaggccctgggatgccggtgcgagggtgtgagtagtccctttgtgcgcaaccccccgctgcccgtgcctcggccggtgcgtggctgacacctccgctgggtggaggcgctcgcgtgtcgcctcgtcgccccttttgtgtcggtgtccgcgctccctggcggctgcgtgggcgctctcggccttgcaggtggcccccctttgtgttactgcccctgtctgtgggctgcgcgtcccctagcgcgcgtggccgcgccttctgcaattgcgacccccgcctagagccttgctcgcgcaagtgtgcgtccttgcgtgtctccgagtgacgcagagtgtctgcgcatgggtcctgttgagtgcgtgatctcttgtgtgcggatttaattctgtcgagtgggtatctcttgtgtgcaggtttcgttggtgagcgtgaacgttcgtgcacaccccttgctgtgtgtgcgtgtcacgactctgttgccacctgttttcgtgtgaactggcagtccagtccagggcctgtccccacggaacggacccaggaggggggtaacctcgccgctcccctcgcccccgcgcctctttctgagcattctctcccacagacgctaatgggaaggggggtggacaggatcgagtctggccagctgctccgcagtgttgacgctgccagtgtggcctcttcagccagcctgttcaggagacagaatagggggatcaaagataaaaaatgaagccgagacgtaggtgaatttgggctggtaccagtgcgccgtgccttttccagtggcgccctggacgccaaaaccccctcagttgcagagacctttcaaaatatatgcactctcctactgggcgatgcggtccttaggcgttcttgatgatatttaatggtttatagagtattttatggcattcacctaaatctctttccattttgcccaagatcctggcgagggaaacaaggtagaaattttacagattttactcctccggagagagccttttccttataactacgactctagttaggacattttttgttgcaagaaatttgcgatttatcctaaggaaaatgggatatagtataaggatacctagggtaagaaacttcaaaccccttagagacccagctactgctccgattgctcaaggtttcgtgctctgcgctcaag

SEQ ID NO: 69343 - DNA, 729 bp, Homo sapiens
tctataattcagattctttgaagaaaaatttagaggcaagagtggatgagactaattgctcagggtcacctaaggcaaatctgtatctagagattaagaggaacatatcctagggttggactgagctgtggtaaatcacaggattatataactctgtactgtgttctgactttcgtaacttggctgggagaagggaagagtgagcaagccccctgccctcccctaaagcaggcgctttgcctaaagccatgcaggactgcagaaggcagctgcagatacagttgttgtgtaacacgaggtagggatgctttgggcacctaccagggcactatttatcttgctgactggatagcaactggcctagcacaatagttcattcagtcggcagctattagataagaggctaaagtacgccacgggaaaaaggcagggcctttagccgcagaccacagagtgaggcctgctaagcctctgccagccgtccccacctgtctgaatgtttagaaacgtggggctattagaattctagggtttcagagaagatactggtcagcttctgccagaagagacgatgtaagatggcagcaagcctggcatagttagacagctgaacatgcctgctttgaacatagatcctcatggatttgtgatcccggaaagttatttttaagtgacaagattgtcactagtgagtatcaagtaagcaaattataaagttaatgcttgctt

SEQ ID NO: 69344 - DNA, 1362 bp, Homo sapiens
gtgaaagaatgggctgcagcgcaggcaaaactgcaccacgttacagactgctcgcctgggatggaacggtggggaggtgcgcagacggatggacaagcgcctggcaaaatggatttcttttcctagactgctaatgctactaacagttccctcctcacagggtcgctataacgaggtaacatacagcacttagaagacggcctgacccagaataacactaatgttcacatggctgcgagtctcagaccaaaatcaatagccggtatctactgaaactgcagcaaggcgaaaccacgggaatggcgctccgttgagtagagcaacgcacagcacatcacatcgcatcctccgtagcgggaggctctggcctcaccgcagcggcacttcccggaagagcccaggatattcggggacccgcaccggacaggcggcccaggccccctggcgcccagctggccgccctgttgcagctctcatgccaagacctgcgcctaacggcagggattccggcggtcatcatttattcttggcgctaagctgccgcttctcttttttatcaccacagagtaacgcagaccccaccgtttccttccattctgagccaaccactccagcagccaccggggcgccaggttatgctggggctgcaccacccggcccgaggcttttgaagccacgcctgagcgcggaggatgggcaggatttgccccgtgaactcccgcgcacgcaggctccgcgcgaggcccgggcgcccgagcggcgattccctcccctatcaccagctccagggtggtgccccccggctgtggagcccagaccccggccgtccagcagcgtatagacgagcccatgtctgcgatgtaactgcaccgcgctggggatccacctcccgccagggtgagggcgccgtcctccagcgtatgctaggcaggcgcgccccgccctcctggtcacgtgaccacgcctacagccgaagaggatgggaaaatgcggccctgttcctgaacaggaagcggaagcaggaaggaactgagaacaccagcatctgctgccgccctgaatcagcgttagcatgtggaggcaacctcagcccccagtttttgaagaaggtgattcagattcagacacaggaattatggtgacggtagaaatggactggaaggttcgttccccttgcccaccaagactccagagcaggtgggttcttgatgtctactctgcatgaagccctgggctttccggccctccctacttttcctccgaattcacagcacagcggagccaaaatgtattcctgccaaaacgggcatttcccaaaagaaaatattgttttagattcattgttcacagcctctttttttt

SEQ ID NO: 69345 - DNA, 413 bp, Homo sapiens
agagctcacagaaaagggaatgcagattgttcctaaacacagaaaaatatgctcaatttcaacaaaaatatgataaatagcaattaaaacaaagataaaaaaatgtcattacattgtgttgccagaggggaggcaataagccttctctgcattgctggggataacctgaaatgttgcaacctcgtgccggctatttggcaagaccaaaaacattttacaaacacatgggcccagcagatacatttgcagatgtgagatgacttatgaacatagttattcactgcaacactgtttgtaaataacaaaagatggtcgacaaactaaattccaacaataggaaaattgtgagttttctttcaacaatgtggagatcatttacactagtacatatggggatgcagggctagtttcct

SEQ ID NO: 69346 - DNA, 1773 bp, Homo sapiens
gaatcgcttgagcctgggaggtggaggctgcagtgagctgagactgtaccactgcactccagcctgggtgacagagtgaggctctgtctcaaaaaaacaaaacacaaaaaaacaaacaaaaaaaagcaaatatatgtaaaaataggaagtgcggtttcccaaaatgaggtctgtaaacaactgatctagaaaatgttctggaaaaagtaaaaaaggatcaggatctgaggtcaactgacctctccctgcgctctggacaggcaaacaggcaaggttccctctgaggccgtagcggcttctcgtgggcgagtccctgttcgcaggtgacgtgtggaccacgctcttccgaagcgtctggcctgtgtgctctcggggaggggacgcaggtcagcccacctagccgatggctaacaagtcagtttgttttctgaacggaagcttaaacctagaaaagtaactgggttggggtgggggtgtagccacatgcagtaaaagcactgcctgtctgtataacaacgacctgatgaaaaaaggaacgcgtgaaatggggagtgttagggcgtcacaaactccagtgtggttgaaatgaaagcagaaagcaaatggcaagctggcttccccttccagcttttcacaaccctgccttgctcatggtcagccccaagcacgggcggaagaaaggactggaggggagggaaaggggtggggagcgagggtaccagaggcgtgggaggacggggacaaaggggcagcaagggaccggcggaaaggaaagtcggcgttagctggattggaaacagtccagacagaacgatgggctctgctgcctccgggtggggcaccaagcggggagcggggccacgaggcaggggacagtgaagcaccatgcagcgcccaccagccggcagcgcccaccagcctgcgctgcgctgcacatggtacccgcggccccagctggccagtgtgtggcggagatgagaccctcgtgaagagactaagcggccacagcagggggaagggttgctcacataaccccatactgctcacactacgaggttaactgccgtgagatctgcctgcagccagcagaaacccgttctaggaaaacgttgcccagtgacttcagtgagtgccactgacccgggcgcctccgccccggcgtccggcagcagcaccgattgcgcaggaggcaccttgcaaacaacctttcctgatccgcgctgcagttcccaggccggttgcagccgtttcacagagactgcgcacacaaagcgtctccgtgccctgccattcacctttcgacacagccgcaacccctcttttcagtgttaaaacctggcgccaaaaggaacatgcgatgtgacgtgttacctctgcgcatgcgccgggcattcccagcgccccgaacctgatgaacgcgcggtggggaccccaggcttccgtgctttcgttttcctggaagctacgtgtcctcagtctacatattgttacctggaaaataaagttttctccttttttcttcctttgttaacaggcagaaggtgtaggctgcaggtttcgggcctaagagagggcatggctggcgacacggagtagactcctagatgacataacggaggcgagtctgcaccggggactcggcattaggaggaggcagaggaaaagcccaccaccgtggccgagggagatctagcaagcagcttgcagggggtgaagtgtgtgcaaagcaggctgagacctgtccagtatcgaaacacgccgcggtggtcaagc

SEQ ID NO: 69347 - DNA, 2493 bp, Homo sapiens
gttttagcatccatccaagacctttgtctgaaattctgtcccttttgagattactttgcattaatatgaccaaccactgcgatcaattttattccaaagagtgttggggctgtgatttcaaccctagctgcacatatatcaccggtatcgctgggagtggaacccaagcaatcatattttaaaattctccaggatgactgattctgatgtagagtaagggttgagattccccgagttagaggaaccttacaacaccctcatttgcaaataaggacactgaggcccaaggaggttaaatgactggccaatgtcacaaaacctgttaatggcatagtcaagattttacttttttatacttgcattttaatagccattcctttgtgtcagtcgaagaataaaaccagaaaaagcagtaactttcgtagtatgttagtatgttgttaaaagtgactaccatctaatatatgctgccgccagacatacccatttctgcttccaaggtttgttttagctttcgttcattagacctttgcggtcaccttaggagagagggaaaggggagtttggtcgtcaactcctccgccctcagcgctcactgagggagctcaagcctgagaacccaacaccgccgggtgttcaaggggccagatgggaagagcgcagccccggagctgggcgcctgccctgcacgtcccgcagatgcggcggcggcgcctgccctggggcctcctcgcagggcagccagcctcgcgcgggaagcacctggcggggacgcacctggcgggaacgcacccaccttggcggagacgcacctggcgggacagccctgccccgcctagggacgcgggacgtgcgcagagcgatggagacagcggaacctgcagacccgcccaaccccacctccatccccacccccagcccccacttaccccggcgtgataaactttattcgctcttttaatcttgatgtccagggcggtccccatctccaattctccgcagcagccgccacttccggctgcgcgtgaccccagggaaacaaggggcgcctccccgcttcgttctgggccccgcccctttccctctctgccggcagtggctcacgtgacctcgcagcggcgtcgcacacactccctagctccgaggggcgaatgcccacgccttcctccttccggcacaagagccggccttagtgcgggccgaagcgctgtcacggttcaccccgccccctctgggcgtgaaagacggggccaagctagccccaccccttccgtagggacagtcttacgccggaaatgctcctttgctgtccgggttagcggagggagggaggaacggctctccccgcgtgccccgcggctggaggcggagccgagcctgtctgtcggttgcagcctgcgcaggaaggatgacgctcccgtcaggctgtgcggcgcagacggtcgcccaatggagttgtctttcaggaggttttaacttggtaatgcctgccctcctcaaatgtccttagtctcctcaactctagccctccaccgctttctccctggggttctgaagagccggcgcccccttgtctgtctgcggccaggcgccgcaccctgcccttcccgcgggagcggttccggtcaccctcaggggtgcggcccctgcgtgctagtcctgcaaagcgctgattggccggcggctcggttgcctcgcgtcccagcgccagctgggcctagggccaaggtctcgggaagcgccgggtgacctcgctcctctcggagccgcgggcgctgggtcacccgccagccgggctccgcgggccgcgagggattgtgggtgttccccaggcgcgtgtcctggaaccgggtgttaaatattcagatccgtgcgccccgcgtgaagggtggaaaggcacggcccccaggctctggggcttggagattggttgcaaatgaaagactgaaagctggagtgaatctgcctattatttttattcccagcaacagctgaccccagatacagtttgtgggggtggggggcgttactgcagggcagggcagtgcactgttaacgtacttcgtttattgagttaaaatctcttgtaaatgttataaatgaggattttgccaataagcagaaggtcaaatttcattttgacaaatgatttaattaaataatgcggtgaaaagtgctttttgtttaaattctttgctttttgtttaaattctttgattctgatcattattttttaaagtgcattgcttttgggataacatcagaaactatctgtaaaaagaattagtatcacgaatgcctccctcttaagaatataaaatgttttacaggccagcagtgatggtgctgcagctacaattgcatttgaaggttaataaatggtattttcaaatattcaggtcttggtttgcagctcctctctgccctcagggctttggtctctgtcttcaatgttttcctggcaattcaaaactcagcgattttagaacaatt

SEQ ID NO: 69348 - DNA, 2366 bp, Homo sapiens
tttttaggacttagattctaaaaagaaaaaggaaagtgctgtaggcagtacagagagtttctgtttactctacacctagtacacccagtttcctttagtattcatagcttccatggatatggtatgcttgccaaaattaatgaaccaatagtgacacattttattagctaaaatctgtagtttatgcacatttcccaggtttttgtcaaaattttacaatctgtgtcaacataccacacgacatcagcctcctgtctcccttaggttcttgttggctatgacagtttctttgtttcgatgaccttggcagtttagaggagatggcctttaatttaataagaccttttaaacatctttctccataaacatttagaatgaatcagtatccataatttttccctctggaataagataagatcttaaacatctcatgctttgtaggaataatctaaaatttcagttccaattgagcaataaaattctttctacatttctctttctctttaaaatagtttcttaaatgtcttaatcttaagatctcagtataaattttatcagtttatttatatttgttaccactttttcatgttttgaatttaattatctttcttgaattactttttcccccccgaaggaaatattttcagaaaggatggttgggtgataaactttctgagcccttcatggtcaagcttttcttatttgcaacatggagatcaaaatacctatcccacagaattgctgaagatgaacgaattcatacttttaagcttttagcagagttcaccatataagcaatcaataaatgttagctcttgttactattacaatgagcacatattattttgtaattataaggaaaactatgcacggacgcacgcaaggaaggagggatagtggtaaagaaggtgataatacggaaagtgatgtgacagaatggaagagcaggtgacataaccactattttcagcttggtaaatgtggaaaagtcctgagcatttctgccaaccagcttaacctgggctatgctgtcatccatggtccagacagccacgtgggtgttagaagccacatggcccatctgtctcctctgaggtcactggagtttatcagctgttgtgtacccttagcatgagtcaggagggttctgggaaaatgtctttctagttgaaggactggcaattcagttcaaagattaataaacacaaaataacacttgagaagcatgtgtcatgtcaaatgcagaacgtgtgttccagagggaggaacaaaacacgagtgctctctaaacagaccaaaatttcttcaattgattctttgctattcatgagcaagggagggagaacaaattgttatgcctgacaccagatttcaggcctggaattttgtagtgtgattcatgcagctatatttaatatttgcagagtcatccagtaacccctgtcagagcccagggaagccttcaccctggggcaactcccttctccaccatccatgcactgcttagggatccttgtaggacggtcttggtatgacgtatcattcctcgcatgcttgaatggcagttgtgtctccataaacaccagtgccggccaaacacagccaggtctttcatgtcaatttaggaatgtgttgccctcataaagataaggcatttagtgctcttgaccttgttaaaggtctgtgactggctcagaatttttaatacccggggagtagtgcggaggcgcggtgggggatggactctagttgtttcctgtgctcagggtagaatcctggaacctgagttgccaaaaaaaaaaaaaaagaaaagaaaagaaaaaaaggaaaagaaaaattggatcattaagttaggatattatgtttaaatcttataatgtacttgtaaatgttgatggcataatatgtaagtaacaaaagacatggcttcatcaatttctactttaaaagctttcacaggaaagagataaagaataatgtggctaataaatgacatgctgataaagtattaaaaagaacagaacacttctgatggcttcacactctggaaggatgggaaataagcaaacgcaaaataaaacagctgggtagactcaaaggaaataaaaaaggggtttcccccacccctgtacattccctcaaataggagctaaaaaggaaaataaaattgcaccaaaccatgagaggggaacatttaagcattctaatattgtaaatagacattcaggctgagttttccatccaaaagctaggacaggaaataaatccttaagcataactaagagactaataaggaaatattttcaggggtttaaagcaaatagtttttttaatgcaaaaacaacataatcaagacatattatcac

SEQ ID NO: 69349 - DNA, 4978 bp, Homo sapiens
gcaattttgaaacaataatccgaaagaacttttgccagctacggcaacttttttatatcatggagatcagcctgaaagcaagctatttgcccgaccactttttgaccaatttattttcggtttagtcaggtttcttccaagtctgtgctaatctgaatggttaccttagtaattactttttgactaatttattttcggtttagtcggatttctttcaaagtctgtgctaatctgaatggttaccttagtatatcaatgtcctagtaactgtagcaaggacatttttgctggaaatcatttaaagcaggtgtatttgagtcatgtagcatagacagcggcatttactgcgagttttttacatctaatattgtttataagattttatctgttgtcacatttgtgaaatttatgaaaaaaattggttacgaacactatcacaaggtggcaaaatcaagcttagaaatcaattagtgactctgctgtaaaatagtatatatatacacacacactctttttaggtatacatttattaaatgccattagagttggtacaaaatacaatttttagctggtggctctctaccgattacaacgcagccagcacagcatacttgggttttcaagcctcgggagctcacccagcaatacatagctagggagaaggggtagggagaataaaaatcagcgaaagccaggatattaataaagagttttgatggttaaggacaagcaggcgaattaagactctggaaaccgagaaggtgtatagaaaagaaaaccagagagctggacgacaaggacacagtaacagcacaaggggattcatctaaagggcattccgatggagcaggcaggctgcgccccgaaaggtggggagaggttggaagcagatgggcaggcacaggcgagcgtgcactgcctgaaaaagttttcatgatggctccagcctaatttcccaacgctggtctcgggcgccacaaaacctgggcggcccgaccggagccaggtgccagcctcagggccgccgggcccggcgcagcgtccggaattcctgcgatgtctggggcgcggcggtggctcctccccgcccccaccacggcctccgccggcattttccggctaggaggcccgccagcccttcgaagaaccggctccacgcgcggacggtcgcggccgccgcgcttcccggggagagaggcgagcgcggcgcccggaccgcggtgagagccctccaggcccgggcgcgcggggtgggcttcccgggtccccgcccgaaggccgcggcgcccctcctcctccccctcccccgcccggggcagcccgcccctccccccggcgcgggcggggctgcgggcgccgacgcggaagcgcggggcgctagggctgcgggggcggcggcgcgggaggccgcgcgcgctccccgggccgcagtcggcgcgggcgcggggcggggcggggcggccgggaggcggcgggcgatcgcgcacaggcctggccgccgcctcgcccccccttccccagcccctaccctccctcggcctagccgtccccctcctctcccctcccccgggcgaatcacgcgccctcctctgacactcgtagcggacccgagctccgaatttatccttcacgtgacctgagggggttgggtggttggctggggacagagggggagacggaaaggagggaacggaatctgccgttacctgagcaacaggccccgcccgccggctcggggctggggggcgggaggaggacgtcagcacgtcagccggggttttgcgttttgattgacagttgctatagcgaccgggtcggtccgtcgccattttgttggttggtttttttttaaaccctttcgcttcccgcccgaataataataaaaagccccattggagtgaggcgggggtggcggcggcaaccgcggcgggggtatccggggagactgctgctgtcgctgctgctgatcgcggcccaggtcggcctcagagagcggacaccccgagcggggggtgcgggcgccgccgccgccgcttctgctgctgctgttcctgctgctgctgttggtgccgctgccgccgccggcgagcaggcgggaccggtgtgagtgcgagtgtgtgtgcgagggagcgtgtgcgagggcgattgtgcgcgcgagtgtgcgggtgtgtgcgagtgtctgtctgtctgtgcggggactcgggggcgggcggttcgggctctcctggcggaggagccgccgccgccgcccgggccccggcgcttctcgctgcgcaggttcggagcgcgcgccattttgtgagatttacaaaatcctcctcgggaagaagccgccggcagcagccgccgctcggcgcccggcctcgccgacgccgccctctgcgccgggccggccgtgcggccccgccgcctggaatcggggcccggggactgcggtatttgccggggagggggctgtcgcctccccggccccgggcgccgctggaaccgcgagccgaggagagactgagcaggctgcggcgcggccaggagccggagcgccgggggcggagagaggctgccggggcggcgctggctgcggaggccgcggcgggagcgcggcgcgggagcccgaggctgagactcaccggaggaagcggcgcgagcgccccgccatcgtcccggtgagtgtccggcccggccgcggccccgcccggcctggcgctcggctcccccggcggcccgcagccgggccggagccgaggccggccgggcggagggagggacctgccattttaggaggaggcgccgcgggcccagggccggccgccgggggagggagcctcaggccgggtcccggaggagcggcgggcgcgagcggagggaaagttgcggagggtgggagcgggggccgcggcctcccgggagccggggcctggggggccgtagacagcgccagaccttcactggccgcccgagcgaaggggtggaggttgtcttcctcctcctcctcctcctcttcctcctcatcctcttcccccagctcctccctcgtccctcctctcggtccccaccagtgtgggaaccgccggggtgattcgcaaggacaatgcacgggttaagaaaatggggccggctgccgggtgggcgaggacggcggggccgggccgggccgggcgccggcgaaggtcgggagccgctgcctcggcggccctgggggtccgcgctggagcgaggggcactcactggcctccgaagttgggcggggagcgcgagtgtccccggcggctcggggtggagggatgacctgcccggcagccgggggagttggtggctgaggagaggtgaattagaatagatacctgtgtatcgccacaaaacttcaccagtctatttataggcacaaacccactctcgcttcggagccaccaaagctgctgagtagctcagtacttggcgaaaggctcctccctaatctgaaatagttaaaaatggtaaaattagtgagtcagtgactctggttacttgcctgtgcctttcgcccaaccctaggtgacacgaatcccataatctgggcacagcgcaggaatgctagcaccatttggttcttgaattccgcccaaattgtcagaaaatacgccttagaacgttgttttcacaagtgccaggctctgtttttagggttttcagtggatcgaccagcttgcccagccggtaggaactgttcccattttatagatgaggagagtgagtctggagaggggcactgactggtctaaggtcatacagctgggactccaggagccagaaggctgtagccagtctggagttgtgaatcattagggtgtaactcattattagaaatactggcaaattttggagtgattcgtgtttaatgactcagggttctaacctagagatgtgtccccgtaaggtttttagcgtggaattacctttgtggcttgccgaggccaaaaggtaaggtaatggtgatgaggcctgttaataaacttttcaggcctttccccccccaagaaaactatgtagtcaatttttgaatgaaaggaattaaagatattccttgatgtgttttgtacttcaaacaattttgattatagtcattttttgagtattgatgagtcataagaaagttttgtgtaaagttatttttagttattctttgaatgcttaagggttcctctgtgacccttttatagtttatgtgtccaaagtattaatgaatatatttagcattttgattttgaggtgttttaataactcaggggaattacctttagcttttgtgttgtttaatttctcatgtcttgatcagttactttaggataatattgttttcaagtagacttttaaaaatgtgagaccagaactaaagtttcatgtgttaaggttttaagctgcagaagatcatttcaaagaaactggttatgaaaaaagcttacttgattatagtcaagattttttacgcatacttcaggtatcccagtactttggaggattttccctggtatagcagtggtgtttatggtagctgtccaaatttatttatacttcaaaccatgccagaaagttaaggatttctgtcaatgtctacacctagttctcttgttaagactagtaaaaagttctcttgtaaaaagttcatttttacctcgagaggcataagctcagagattattgcaggaggaagggtcaccccttgtgtttgcgccatgaaggcacactcctttttacctggtgggtgttgaaaaaatatttgaaggaatagacctgaatgaatggtaattattggtaggggtgggaaatggactaaatgacctagtgagatctttgttttgagatctaagtataagatcatctcttaaaccttttaacaatattttggtggaacctattagaaacttaacacattattgtgtgcaagatatctaaaaataagtccagttttttagaggcagtaacatttaagataatttaaaac

SEQ ID NO: 69350 - DNA, 548 bp, Homo sapiens
tatactggaagaacatagtgtattaagactcatggagagggagatgtgatactgtgtcactgaggtcgttccagtcataggagaaatgttaccactggattgaggtctggtacattttaaaagatgatttaattctatgatatgtgttcaacttgcactaggatagtttttactttcacctttgttccatgcaccgcgcaaatacctgggaacccttgttgcccaactcaagagccagagtcctctgtcatcattttgcctctctcctaagtgacaggactgagtgcagacttggtgtttgtgggtgaggcatgtggactgacaggcaggcttcagtttatttagcgagtgtgagccctggcaggaagattctctttctctgcttgccaggttgaggaggcctcattaagcagtttgaacttgtggttttggcgtgtctagtcctggtgcaggtggcttggtatcctcacaggcatttctttggcctcacccttggggtgactgttcacttgtgtttgagcggctgggactcagtaggttcactggag

SEQ ID NO: 69351 - DNA, 748 bp, Homo sapiens
cttgaagtttgagttgaagacttctaggaggagaaaataggagggcggggatagcatgctagttggagagaagagttgctgaagagaagagcgaagagctgctgaagagcaccattgaagaatggtgagaaggtcggtgcagttaagggaaaggatgtcatggaggggacaggatggagagaaatggtgggaaataagacgagaggtgtaaacacttaacctgggtactctgggtatttaaagtattgtgaagtattgattttgagctttttttttttttggttgtggacatgaactttgacagcagtagggggaatacactgagggagggcatggagcctggataaggagcagttattgtaggggattcccctggcccctttctggattaagatcttgacagagcatggaaataagcagctggattcatgagacattccagaggccaaagtcacagaatgtagttagattgagggggattgaggtaaagggggtggggaggtggaagtaagagagcgaataagattgaggtttctagcttgagtggatggatgggtggagatgccgtttatagaactgggtcaaacttggcgctactgcctgctccccagcctgtgcagacacagttaaatatagcatgccgtgctttccagctgaggcttgagttagctttggaatcttttctatagcagtgagtgctccagacagccactgccaatctatttgagtttgtactggagaggaaacc

SEQ ID NO: 69352 - DNA, 1479 bp, Homo sapiens
aattcctaagggtaacatgtttttatccataacccattgttactaacaattttaatatatagattcagttaatctttcatgctgaaaaacctgagattttatttacgtcttatatgagcaatttcattgtgtttctagataattgagtatgctcttttggctagtgggttgacaagcttgtgtgtgcatgtgtgtgtgtgtgtgtttaatgttggcacgtgtgtgtgtgtgtgtgtgtgtgtgtgtgtatcctgtagtaacacatattggccactagagggtaataagaaagcagttcatttgttcttattggctcactgttactaaatagtccttatcattagactttttgcatagtcacagtcattgcttactttcactttaatatatatttatttaacaccttctgtggagccaggcactgcactgtgtgcttgggatataaaaatgagtaagagcagttgactgagcaatagctgtagcctgtgctataagacttttctctgcttttgattcaagaacccctcatttaaaaaatactacattcatccttacctcccgtgcagtcccctccctccctctctcaatgatttcttcacagtctaaatattcctgatggattcagttcattcctttattgcacagatatttattgaatgcaggccatgtgccaggcactgttcttggtgctgatgataaaatcgtgaacaaagcttactcatggactttcgttcacttaccctcttaatcatgtgcctttatttccggccatcattagaggtgcaattcattttggatgtgccttgttgctagggacctcgtgggtttttgcccacataagcttggttgccctcctcatttcttagtggattctgtcttagaacctcagcctcataagtttccacatttagatgctatagttttaattaaattattttcatttactttttgttctttaatattgttctttgatttaactgtttctctttaaaatctactatcaattaatactgtcacaggaatggtcccctgttaacacattactaacaaagaaattcaggttaggtaagaataacattcagatctacaagtagagctacgtgtgggttatgtatcagagatgatggcttctgatacttgttatttttacttttttgtttttaaacttagggtcttttctcatgctttttgtatttgctgtttcctctgtgtttaccactatctttttgaatcttatgtcccagtctttgagatgtgttgtttatgaaatatttctctgtagaatcagtgctgatccatactggtaatatggtctctagttattatagttccttgctagaacatagtaacgtggctgaagtaagaaagctgcttcatttttcttttagtaaaatattgaatttttcccaagtttagcaaagttacagaaacatgctcatggtaaaaatgatccatacagttcagaagcacgtaaagaca

SEQ ID NO: 69353 - DNA, 3434 bp, Homo sapiens
agtggctattagtttgattctactaagacagcatttctattttgctgttgggactgaaacaaacctcattcatttgacatgaaaaaagttgggacagttttggtatctccttagctggctcggttaagtgtatgtgagggagaccatttttcacgcctggccggctctgtgcttaagtggccccatcgcagccagagtagcctcattacagctgaagtccctggtaggtctcctccttcctctgagcccagcgcagtgccaaggccggggactctggctggcactggtgacacgctgtcttgtcctgaagacacgaggttgggttcggcagctggctcctccgggacagggcccagtgcactgagcttagctgagcccttcccctcacacctgaagtgtggcacgaggatggtcactcagaagcagcgagtagggtgtcctggtgggaaaagcctggctttgtgcagtctcggggaaggttttcaatgccatctgagcctgtttcctcatctctaaggcagggaccaggtagcccgccccgcagggtagttgcaggaagcagacatgtatctgggagcagctggcgagttcctggcatgcactgctcccatccgatttccgcagatttcctgctggaacgttctctcgggcctcaagttttcctgagaggacgacgtggagagtggagacaaagatgctcaaaagccaggaaatcgcaggctcggaagcccccacgcatgcctctgaacgcagcgccatctcggggctgcggcgggaccaagcgggacgcttgcaggctgtcggcggcgggggccgcgagccgccggcgtaggccgctccagctggaagaccccaccgctagggttccagggggctgcggacgcttccgaggggcccaaggcgaaagaacgcagcccgcttgtcggccacgtgaccgtccccgtccgcgtccgcagcgaccacgtgactgtgcgtccgcggcgtcgattgactgggagctccctggccacgccctaagcgccagccccgggcttcggggggcggtgctgctgcggttgccatggcgtcttccgagcgcgcaggcgtgggcccagagtagcttttcgggtatttgctaccggctctcggtagggctggtcacctttgcttgctgagcttcgcgccctgcgtcctttggtccccagcaacttgcagggcagccgtccctcatgaggccctccagcgaatgccctaaagctccgaagttgctccggaggaaaacaggcttgctccgagggtgcacgtccttactgcccgtgacgtcgtggtgccttgagggcacccttctgggaagatccttgcagaggccatgtcccctctccacgacatccaagcccattcccaacttgcttttcactcctgtccccccggggaacgtctactggaccttaggacagcccctcacccccgtgcaccccccaggtggatctgcagcgaaacctctgtggtgactcacagttgctagcattggttatcttcttcctggcagaaggtggcaggctgatgctgtcgtcgttcctgtgtgtctgacaaatcacaaatatgaattcagatcgtcacagctgagtcatgcccaggatttccatgagccctgctggggtggccagcttgagctcccttccccacagcctcctccagctctgcagcgccaggcaccagtgtgactcatgggggcctgtggaagccggggctgctcagtggggctgagtctaggagggggagagagagaaagggagcccatcaacaattacagtgcaaacgccgcagctgccaccaccgagtgcctccagttaggaactggtttgtgaaattcattaccctatgagacgagttttatctctgtttcactcaagaggattctgaggctcaggaggttgtgaatgactcggggaagcacagctggtaggtggcagggttgaaatttgaatccaggtcattctgacccaggagttcagactttttcccagcccagcctttccactcgacctcaattagcacagtcatgctgggtgccaaagctatttactttgcttgcgggagtccaggagctggctcctaatggctccatttgaaatggttttttaggcaaaggagactagatgaacgtggaggagagggaaagtatttaggcgcgaagatgctacagaacaggcttattccagtgcacctccaaacccaggcgtggtgttcttccttctcgtgccttacttttacatccccagccactgcttggtatcacctggttgtcctctgggcacctgaagctcagcatttcccaggatgaatatttgcttttccctgccatatctgtctgccctgagtgagtcagtatcagcggccatgtgaccgtccgtgtctgcagcgtcctccccccatcccaatattcttgcaggcagtcaggctttgaagaccaggttgtctcttgttaacttgaaaatcacacaatctagaaatttggaccaggagactttctttctttcctttcttccttccttttttttttctttttttttttttttttgacaaagtcttgctctgtcgcccaggctggagtgcagtgtggctcgatctcggcccactgcaacctctgcctcccgggttcaagcgatcctcgtgcctcagcctcccgagtagctaggattatgggcgcccgccaccatgcctggctaatttttgtattttagtagacacagagtttcactttttttttttcaaatagagacagtgttactggtggagggtgtccaggttcttggcgtcttgtacaaagaactgggcaaaacccacaaacacagcaaggaaagaacgaagcaacaaaagcagagatttattgaaaacgaaagtacactccacaagatgggatcagacccgagcatagggactaagagcctggtttcagaattttctggggtttaaatgccctctagaggtttcccattggccacttgctgtacacccatgcaaatgaagtagtggcttgcaatctactgtaactacaaagtgaagttacaaaggttacacactatgcaaacgtctgattagttgtggaaagcaaccaatcagcggctaaagtgaagttacaaagttacacttctatgtaaacaaagacttagcctgcaatcagtctgtctggttgtagaaaatgggaaagtatggagggtttatctctggtccttttgttactttgttgtggaaagttggggttttccttttgatttagttctaggaagtcaacatgagttggccttaggttccctgcttctagaccccattctcctgcctcaacagggtcttactatgttggctaggttggtcttgaactcttggcctcaagcagtcctcctgtctcggcctccctaagtgctaggattacaggcgtgagcccccacgcctgc

SEQ ID NO: 69354 - DNA, 925 bp, Homo sapiens
tgtggccctgtgtccattcaggagagcagccagccagccagtcagtatgtcatctgttaggaccaccaataagtattacgcagctgctttgtgctgaatgcaggtggattagggagaagagaatacctgtgaatgtttacacagaaggatccagagctacacaacattcctgcagcactgcatttgctccttgtgtctagaagaagaaactggggtgccagggacctatgtggttgactcagctacagctgtcagagcctgagccagcaccagccctcacgccagctctgtgctcttcctcttaatctcaaaaccgaaatgtgaccctttttcaatgtttccctgaatgacccacagaagccccgcctttatgcctctaaaacaaacattgcagggcttttaggtattaggaaaaaaaaggtcaacactgatttgattttacttctcaaacaacgtttctcttctgaattattttctttatctgtgcttgagggtggggtgaagacaggtgatggcagtgatatgtgggctcagaatgagaaacaaacaggaagtcaagaggaaaaggtgatccaataactctttttccaccaaggaagtacatgtttatggtaaagtggctagaaaatagggctgtgataacagttggggaaaatagcaagctaatcaaagaacaaaaagaaattctggggaaagaggttcacagggagctttggaaagctctgacatattcctgagaaactagaagaccacatgcatgtgtaaggctgtgcacatgcccaagaaaaaccagagaaggccctgagctctcacttctggttgacaccgagtctctgtgcaagtaggaggtgaaggttaatgcagttgtaaagtgcctgactgaatgttgaaggcacgtcccaccatgtgcatagagacccttgac

SEQ ID NO: 69355 - DNA, 1020 bp, Homo sapiens
ggagattactgcttccagcgtcatgtctgtctgcagatgaaggaccctcagctaaaatataatacaatgctggaaaagtacaaaattcataatttgaattaaacctgagttcaataaaagcaagagatgagccttctggggctggtgaagagggaataacacgcctattccttcccaccaagtatagttgaggcctctggacaatgtacaaaatgaaaccacctgaagactctagaaagttcacaatagcaggacgattggagaagggagtcaaaacttgaggaatgaatcgtctgaggataaatttttctgccttcctcttttattttctggctttaacctgagagtggccccagtgtagaactggggccccaatgcagaacaagtgctggcaagaaaatctcagagagaaaccctgcctttctaaccggaggaccaggaaaaggtgctgctgtgagtcagagacgggagtgggaatccccgttaattgagtgtgaggacttccccaccagccctgagtgcagcctttgtcctcagctgctctgcagtgcagcggtgacacaggtgccaaaaactgagagagagcctgtctttttggaccgagtattgggaaaggggaattccagggaccagagtttgtggctgcattttcctctttcctctgactgctttaccctaagagtggccccgattgtgtaaaacaatgcagcagcccaggtggctcaaatgctgagcaagtcttggctttagagaaagaagtatcagaaaaggaggcccgggagctgaaagtgggggccgaccggggggaggggtggatctcacagaggagagaactggagaagaggatttccagattctgtgtatgaattgatataatcgtgagctttgcatgcacaggacggaaaacaataagaaaagatgaacttaaaaattacctcgttttggaatatatgaccacacttctaaatgtcaaagaagaaaccataatggaaatttgatagtacttaggactgagtgata

SEQ ID NO: 69356 - DNA, 2255 bp, Homo sapiens
ttttagagattaagtggaaaataaaagagatcagagcacctcaagcatacagcaggaacgcacagtgaattaaatggagagatggaagtatttggtccctgaagacgagcatgacattgcgatttagcttggatgagaaaactgaggtttcttggaaatgcctacccacgtgggggaatttctctgtcaagtttctgctgctttgcagccatttaaaatgggtcctgaaatatctgcagtgcagaacatctgagaagagcttttcatttgctagaatgttgcagcaagcaggctaagcgatgttagcaggcaactttgtgatagatttagaaagccccgaagaaatgggtggtggtgatacagagagattttttctttcctttttttccttttttggcttgtctgcagaatagatgaaaagagaaaatatacccagatactttgctcactctcccaagtgcacactaggcaatgtaagctccagaggcagcgcttacaggaggggaagggacgctgaggccaagagtgctggctcactggggtggaagggacttcagagggcgttcctcactcctcttattgcaggtgaagaaacagaggcagtggtcctttgccccaggccattcagctggccagtagcggagcccagggctacccagatcctccaatgcccaggctggtcctctttcctttctgaccccaacacatgaagagtccatctggaaatgttggctcccacacttcaaaacattaaactccttgttctctttctccaaatgattaatttgttttcagtgtttacattagctggaagccaagttgggaacactcctaactcgtttctcaaacaagatgtttttaaaatgaagtttcccagcatggaatgctttgctactttgtaagggcttcagttgctaagaacttactgcacctgtgtcaaaactgtgctctcagggcccctggtggagtccagaagaagagttccacgcagtccctgtttttcttttttttccaggaactcctggaaactgaatcacagatcagatcatgttgttccacaagaacgatgtgtcactgtgaggctgcattcctgaccacgaactgagcaccaaataagtcatggacatgcaccaaaaggtgtgacccaagggaggcagggtgagccccatgtctcagaacatcctcgcggacagcaaagcccttgatgtggtggagtaggggcctgtggcaacccctcacacatggcaggtcctttgcaaccccaagtgcttcagatgctaccagccctccttgggcaggtctgagatgtgacagagaagaagatgagaatggaaaaagagaaagaagagcggaaaactaaaagagggaagggcagaggaaagagcagaaatgcagtctagctggagggcaggctgctggctccagccactgcctcagatccccccgacctggggtactcaggagtctgagtgggtacagggctatagcctcaatttccccatctgatgtgggacttgccttgacccaatgcctggaccacaatcatccctgatacctgaagcctccatagatatgactctttctaacgtttgctgcttcaggattcaaccttgtccacttttggcttcttcatgccctctccaatgagcagtgattcaaaaccttttataaaactacccatcactatcatctctggcaacatggctgtctagagaactcagaaaactgtctccctctgtaatgtttaaaatgctggctatatttcagaaatgtagatggctgcacatgacaaagttaaaaagaaagggaagtgttcagaggtcaaaagaggatgccaaagtccagagagctgcaggaatgctggagggaggctgccctggggcaggtgctaaccccatgacctcaggtggctttggtgtgcccacttcctggggacttggcacagcagcttgggtgagactcacgtgcagagctcactgtccaggcagctttcccaagaggcacctgcctgggcacacacctacactctcttccttttttctttcacaactggtcccctccaacttgaccaagaaaggccatgttttaccaggattcctgccacagggtgcaaggccctagacaaaggggcgagagataagaaatatcagtgctgttggacacccttctaatagtggcatcatgtgccccaggctggcttcggggctctccttctctcccatgctctaccctgaatgggaagcactggtcgtggg

SEQ ID NO: 69357 - DNA, 740 bp, Homo sapiens
agggaagtctttacaaaagatgtgctgggctttgaaggatgagtaggagttgatcaggcaaaccagtggaggaaagaaggggaaggggctctcattggggctcatcctggctgcacatcggagacacctggaggagccttgggagagaagatggccaaagagcagggagagctgatgctgttccctcagggtttacctgtttgcttccatgctgtgactttgagccctgtgatttcccttagtgatgacagcatatcccaaccatgtgaagtctaactgccctctagccagtgtaaacaggctattctggagtgtggggccaggggagaaccttcagatccctgaaatatgccccagatatggtttgcggaactcaacggcatctttttcaccttcaacccaacctgtccccaatgtcagctctcagctgagttactgcagcaaacctttccccagttactggctgctatctgcacattgtgtgaccaactaatctctgtttgcctgggacttacccacatttagcattgaatgtcccacatcccggaaatccctcagtcccaagcaaatgaggacagttggtcatctacagctcacacgccaaccacagccatcctttcaaaatgcatgtaatgtcatgccactctttgctcgacaccctccagggctcccctctcagagcaaaagccacacaaagctctccctggcctggtgcctgtgacctcactcgcctcctctct

SEQ ID NO: 69358 - DNA, 987 bp, Homo sapiens
gcaaacaaagccctgctttttatcactactttagctttccaagttgtattaaacatacttaattttgggccaatgcgaatggagccttagtctattttagactcagtctctacagtctagccatctcagctatcccctattgtacattctcctctaatcccattactcatcaagccctccattatccgtccgctttcacagatttctattaatatttacactatataaaacatgcttgaggaaatgtaaaaggaaatgtatttacttagcagatgaataattaaaatcttcctaggatggcctcagtatgagtcgtcgtcatcatcatcatcatcatcatcatctccaaaaagggtcttgttgagtgttttacagtggaatggaaaccccagccgagcttaattaggctgatcaaagcctatatctttttattatagtgctttctggcagggaattcagagtcaaaattgatttttccctttcaatgttaaacttttttttttcctcccttaagggtttgtcagctggccgcactttgggttacacttggttgcactttgggttatacttggcacggcaccagggcattttggatggggttaacccagagcttcaactggcacagtcacctgataacactgaattgggtagaactggagggtgggagcctctagactgccctttcaagggactcaatgccaactgttatgcaagactggatcattcctgcctgcctcctgcagtcaggaaaggggagcccagtggagaagccatggcctgtaatcaagaaattatatatcattgagccatagttgtcggtgcattaatgaactcgaatcaataaccactatcttggagctcctcaaacatgccataggatttgtgtaggctcctctagaggggcactggagcagatagactggggaaggggcagccctgagactgcatcctggcttcatcacttcaccagctgggtgaccttggcca

SEQ ID NO: 69359 - DNA, 666 bp, Homo sapiens
ggtcatactcactcttcttttaatggggatctcataatacatgctgactgtttttacagtggggcacgtcaaagaaaggcaagaaaccttattttcttctgaaaggagatgacctttgacagtcttctacattctaagccacattcatggaatttgaaagtggcatatctgaggatgggtctgccaatctgccttgggatccccaaggacatgaatgtatttgtttgggaacttgaagtgaatttcaatggacacagtcatgctgggaaaaaacagacaaggtgctgactaatgccatgggaatctaatactgattacttttgaaagcacaagggaatgggcctacaaaaaagtcagtatacaaatctgaaatggagttagaaagaactggaaaaggaagtatgagaaatattaattaaagttacaagtttgagactagtcatggaaaggtcagaaatgttttctttaaggtcatggttccatcagtagtgactttaattaataataatagggttggagaacctctacccttatccctgcaccattaccatctcagataggaagatatcttctttaaggtcatggacagaaagctaatgggattatgatctggctttcatatttttcaagtacctattgtgtgcaaaaaccagaatttgagaagga

SEQ ID NO: 69360 - DNA, 1108 bp, Homo sapiens
ggcctgtgccatcctgggggagacttcctctcctattgccctctgccttgcctgggtagaacctgctgttaccagaggttgatgggaggatgagcagaagtgggagtggcgggaggtgggggatggagcctgaaccaggggtggaggtggtgggagggaggagcgggctcttggagccaggtggcagattgtgggaggagggcgggagggacagtgagacacagtgagatggggtggcagttggtgggaggcggggaaggcgagcggaggaagtgtgaggcaagagagtttaaaaatgtgtttatttacttttctactttgggctggagcaaaggcaagtgggggtaggtgcctttcatgttccctctgggagctgggggcctccagctttggagaggtgcttctgcacttgggtttggttggggctcctggatgtcacctgggcaccccactggcttggaaggggctgggaacacatcctgctgctgggtgtgtgggggccagggggcagtgatggagacagaggcagaggtgtgtggagcttgtggccccagtgatgatggtggccgcctggctcaggcctctgtgtctgagttgccaagctgggctggtaatgcagtgactcatgttgtgaacagctgctttgcccatgattactttctgtaagaggagtggcaaatgaggaaggccaaagtccctgtgaacccatgcgagagaggaagacactggagtgaaatgctccatggaggctttgcccacgcaggggtgcccccgagatgggggcaaatggaaccaagtgaaaaggtccatagctgccccagagccgggctttccattaccaataacttggaaaggcaaaatgagtgagaaaaattattattgaggaagtcatcgggcaggccctaaaacctgctgttgtggaaagaatgacactctcgttccatgttctgggagaaaatggccagctctgctcagaatcagggtccccgcctcctccacctgcccactttcctgctctcctgtgtctgtcagtccccaaggcagtggtatttccaactccccgacaacaccatcacgatggaaaaatcagtgcatctttctgagcctc

SEQ ID NO: 69361 - DNA, 1931 bp, Homo sapiens
cctctccctgcttgaaatccatcagttctttagcaagtgagaatgcagtccttgctttgagccagggcccctggaccgatggttctttcttctccactcataccttaggtccagctccctgcaatccgtgaccattttctacctccttgccttggcaagcactattccctctgcctagacactccaagttccacttcattcttgtcctctccaaattcatccctaaaaactctgctgggcaccaaccagtctctgctggctcccctgctctttctgaccattttcctgagttttatctttaggtttgtttgtgcacaaatgcatccatgtgtcacactgtataatttgttatggcattgagggactctggaagctctggaaaattccaaagccccatctcaatagcctcatctggaggtcatggctgggaggtagtgtgtggtagaccagaagccctgaccactaaacctccctaggaacctggacaagtcattttacttttggagctactgtttcctggtgtgctcatttcagaagtggtccgctgcttgctgttttctgccccgtcccccatcccttactcccgcggaagtcagcaacatgaagaggatacctgaacatgctttgatagactgtgattattggtggtattttaaggtgaaaaagacagatatatttgtttcatgaacttgtgttaaaaatgtctttccctgggggagccaagggtttttatatcagaggtaatcatctcatgttcttttaaaatgaaaagaaaatcagaaaagcaggaatcatacttgttgggagaaaagaacttactttggcctgaaaattttttgttcttgcttattgtgtctatcccacttggatgttcgtagagagagtggcggggagagagagaaagagagcacatgtataagagtttggaagcctgggtctagaaaggtttttgtcatggttttaccacttcttattcactcattaactaatcttggaagctctaattttctcatctgtgaagtggggataggtggaatttgcactgcctgattcacaggactgtttgaggaacaaatgagacaatgtatataaatacagtcaagtgtaatgtccatgtgtgggtttgtaatcattattccgtttggctactgtgtggggacccagagttagaacctgttcttgctatttgaggacaaatattgacctctagcatttgtgccaaaaataacaaagcaaatttccctgaaattagccagacccatggctgccagcccctcagggaactactcgtcaacagctggtgactatgcaacccacacctgtatttccacacccctgctccagaatataaggtctgcagaacctaggcacactgcttggaagagctatgctattttgctctaggaggcactccacttaaagtcgtattgttgtacatttaataaaaggcattcatagacacatcaaacgtttggggtaatcatgatgatatatttgagtaaaacatgttcacagatgctgaaaaaaaaacaacgttaagtgtcttgtttaaatcataaactcctcgggtagagcattgactttcaggggcaatgggcatttaattttctgtctgaactttattccctcttccacacctggggaagtaaataaaggctcagcaacttgcttgtgggggtgtgtgtgtaatttatactcccacatctgtttcagctaaagagagtatggctttctactgagtccatgccagctacatacttctctttgagtgtctaaaatgacagaggtgtttttaatgagggcaattataacagtctgactttagctcagagctaaggctgagacactctgtgtgtgtgtgtgtgtgtgtgtgtgtgtgtgtgtgtgtgtgtgtgtgtgtgagggagagaggaggatggggaagaggagat

SEQ ID NO: 69362 - DNA, 764 bp, Homo sapiens
ccttcccttccagccatggtctccacctacctctccaggcccattgctcatcacttctacactatgctcctgcccgacaagcccctttggtctctgaacacattgcattgcttcatccctcaattcaggtttcacttccgtttgacattctccctggctaacccattctgagtgcccatcccctctgcaccttagcaactgtacatactgtggatgtaggacttgtcattcttggagccatgacttacaaagtaacagagcaagtcagaggaaatagtcttgacaactccaggagcaactgaaacactataaaggatgaattcctctgtttccaaaaagggtaaaacgaaataccaaatcacaaccaaagaatgcatagaatgaatggaatgtccctgaacagctgtgagtttcctgacatgagatgctgaccagtcatttgttcagaattttccagaagaatttctgccccagaaagtagtgcaatacaatgacctgtaagagctcttctaaaatggtttcagggatgtagtgatagttccagggaaagaaatccctgattccttttgtttttctttgtatgacgttctttcttttatttgatcagaggtaggttgcggggtgccaggggtcaggtgggactgatgataggggcaggatggcaggccccaaggtaaggctggttagttactctgacatataagggatacttagaacaggggtccccaaaccccaggccgtggaccaatactggtccgcggcct

SEQ ID NO: 69363 - DNA, 1843 bp, Homo sapiens
aaattagtcaatatttccagggcaattgtgaactacatctccactgggtacaatttgtttgagtttttatcggcaggaaccagttggatgacagtttttgtggaggtgtgaagtagctcaaagacaacaaaaggcagagcccatgcagaaggtaccaccccaccatccgcttgcccattttaacatctttcacaatttctgttaacagtttaaattatattttgatgttgatctcttttaaatacttgattagggaataattttctttattctctgatgttgctgacgcttggcttaataaagagtttttattttcttatttctctttaaaacgtgaaatcagtggagccatatgccagtgtcagttagatatgtctatggaaagtcagaccacactcctgttgggccccagctggcttacctcaattgctagcaaaatgcttgcaaggaaaatgtggagacagcctaagctacagaaaccatcttgctttttttctgataacataagttttcaaagcaatatttaaacaaaagacaacatgttttttccccaagtaaatatctacagccttcctcccagcctgtcttactcccaaatcatgtccttgttatttgcaggtatccaaatgtctgcatgtgggagcattccttgtggattagggtgttagtgtctaggagtctcctcttttatgaaatgcaaacattctttgagcacaattgcaacatcagctgtgatatttacctaaatgtttcccaaggataagtggcttacgtcagagccctgaggctacaggatgtagggtttgaccagcaagagatttgagggcaggtaggtatcccatgagaaaaaaagtatcagagacacaacagcattatcccaggacatgaggtcctggaggttagaggcagcccacaagaaagcagtgatcccaaaaagagacaggaaggtgctaacgacaaaactcatctttgtgtctactcccaggctgatccgtgattaccaaaatgatccagtccacaatttccaatgctgaagacagaggaaagatttggggctgagagtgatctatgttgtttgtttatatacaagacattaggtaccctgggccattgacctcatagagaacaggcagcatttgttgtctgccaactctggattctgcaggcatcaaaggattagactctcataatgaaatcagccctttaagctactcggaagacttacgatagggatcactacccagattaatttgctaccaaatagagaatgagaggccaagataaacaaaagagagcagccagctggtagggtttgaaaaaaaaaatgcaagccattcattttccttttgttcttgtatttccaattgaattatgatggctcatcttttctaacctgatatgagctgaattttttatgatttaaatttgctcattatatttctattgcagagtggttctctgaagaacgagcctgttgctggctgtcagggtgtcatgatggtattgcgcaaatcctcgaggcagctttccagggctgctgtcagcctgctcatgccctttagccactgggcagtaaatgaggatctctaggactgaatacataatttgagggggttctgtgcaaaatgaaaatgcaaggtaccttgtaaaaaataagactttcatcagagcaacagggagcttctgggtccaggcctcaggccacacacccatgaagttgaccctgggggtctcagtgatgggataagcaaatcctttcccacagcaattacataaactgtcttgccagggactgaaggcttacaacttgggagtcagatacactttgtagctcagaaagctg

SEQ ID NO: 69364 - DNA, 734 bp, Homo sapiens
cccttactcagagatatgaatagccagaaacacttaggatgtttggttttacaacccacaacctcctcccccaccttcgccaaaagataaactattttctttttttctggaacttacctaacataacataatctacataaatctacaaaataatgttgttcatgagaaaggcatattcgattcaagcttatccaccttaaactgcttctgcataaccaacctagacgtatacagagtcccttctgttagttcctttgatggatttttgctttttttctcctgaaagtaaaaagcaggaacatatactgtgatttattaggttttgcatctgtgacaaggaatgcagtcctagagagggcggtaattagctaatgcttctggaatgctgcttccttcccaccagcccctggaggtcagcaggccaggggcgaaggcagctttgtcctgcccctatgggaggttgtgtttctcgacccagtgtcttgagtttgcttcggggccggcatctatggagagcagggagcatttgcactccttggggaagaggcatgaggaggggcagcggtgtcctaagctcctagtgactcagtctattcttgacctgccatcacagggatgagtttggcctgaatgaaagtcacacaccctgagcaggctctgaggtttggtttagtccacagtttttcaacctcaggactattgacgttttgtcgtggggctactggatgcactgt

SEQ ID NO: 69365 - DNA, 1323 bp, Homo sapiens
tttgtgatttggaatcagtgtaaatattgacctttttgtctctcatcagcaaaagagcccttgttagggccattagctctgccttctgggctgatgctccggtgggcagaggctgagcctctatcactgagtccaacgttaccaccgcataacctgcccaacggaccccttccagtatgaaactgctcccatctgtgaactacttaacaactgggtccctgaggggttggtctgtaaggtctcccctactcaagaatacttcatctaccattttcacacagtcatggagtggggttcccagttcaatcaggagcaaggtggctgggttaagggtgtttactgtttctaaagctatgtggggatttttgcataggagtccctggtactgagtcattcctggatttgataaccagtgatgccctctctggttcattagagttataactgaatgtggtaactggatggtcagctgctgccctagagtcagtttgttagcttcttgtgccagtagggcagtgacagctagtgtcttaaagcaaggaggctaccttagtgccactgagtctagttgcttggataagtatgccaccaggcgatgccacaatcctatgaattgagtcaggactcctacagccattcctttttgttcatggacatatagaaagaaaggctcagttatgtcaggcagtcctaagactggggcctgtgttaaggcttctttgatttttttaaatgctttctcctggtcagcctcccagaggaggggttccttttctctccccttgaatctggccatgttcagtataatagaggggtccctgagtttcccggggaggcatctgcaaagcccaggcatggccagactggaggcagcaggcttgatcatcctgactttcctccttgacctggggcagtggttttgatttttctttttgaggcaaggcccagggttcgttaccatttgaatttgactcctcgggggctggccttagtaaaggcgggtagattggactgtagggaggattcctatctcctctggtgattcctgcagaactggtttttcctgtggctttccctttgtttctgtagctgacagcgaagctgatttttctttcactttaagcttggcttgagccacgagtgttttgccataagctgtcaggcagagctgcaaccacgcaggtcagttttggactatatgtagccatgagtcaatataaggaaattggtctggatgccctggctgtcctcccaacccagtcaccaccttaaatacatggccaattgtttccctatctatagttccttcgaccagccatctca

SEQ ID NO: 69366 - DNA, 2168 bp, Homo sapiens
tgctttgaaaagtgcctggacccttttaagttgtcccttcccaaatgaaagctatcaatgacctaatgacagtggtacctgggcggcccagtgtgtctatgtgattacagatcctgaggccactaggtccttaaacttgggcttcttgctccacaaaatattagaatgataggatatgatacccttacaactttccctaaaaagctatcttgtcatgataaatgtaaatattgactcagaagtaatcaaaagataattagtcaccttttctatgttgttcttagggataaggcaagccattcttgccattacaatcttgttgaatttgggttctttttgtattcagtgttgagtcatagaccaacattcagagtttacattaagactatttcacaactcagttgggtgcagtggctctcaactgtaatcccggcactttgggaggctgaggtgagcagatcacctgaggtcaggagttccagaccaagctggccaacatggtgaaaccccatctctactaaaaatacaaaaattagccaggcgtaatggcgggtgcctgtaatcccagctgcttggaaggctgaggcaggagagtcgcttgaacccaggaggcagagattgcagtgagccaagattgtgccactgcactccagcctgcgtgacagagtgagatgctgtctcaaaaaaaaaaaaaaaaaggaatatttcagaactttatatctttcctttaaatgcagtaccttttaggtcaggcatataatcctaagataaaaaaatatgtattaatcgtgaaaatgtctctgtggtcaggtttcactaggttttgccttgttaacaactctaagaactgtgtggcttacagcaacaagaattttttctcacctgtgtttcaagtcagctgtagttgaattatggctcagttccaagtttccttcttcccacttaccagaaggaaggaacagcccaatccatgacccacccacatgcaaggcaagccatgtgatgatcccgacacctctcttcaggcatggtgtgggttactgctgttcacactccattggccaaagcaggtgacagggccacacctgacacaagggagtaggaaacacacaccccacccccgctacgcccgggcagggaaagtcccagtgaaggatcctttgtggaaggacccagccgagaggcacagcaaatagttgggagcaacatacatcaaccacaacctcccaaattgtcacagctctaccaatagtttccaagttcaaacacatcttccaaacacaggtcactgagaggaaactagcttccaagtgtgctgtaatctcaactggtgcttcccctgaaatcctgataattcccctggaggagaatgagtgattcttcagcctccaaggagctgtcattctttctgggccatccttcagtcctcagtagtctaaggaaaaagtgcttttgcagaaggaaagtagaatttcctcaggagatacaaaccgaaggattgccctctggaatctgctgagaatccactttgtccaccttgcttgttttcaatgaacatgtctgtttctgaggccacttggcaaagctatctgtgcccttggctggtatggatgagttaaaagctggactttgtacagtcagaccagcctttaaagcggatccttcactgctgcgtagtgtagggaggaaaatggcccaaggccaaggccaaaggtcatggtgcatgtgctcctgtgaccacagtcgagggagcccagggaggagagctaagcctttattctcaattgttttaagcctcctgagctcagtgaaccccaagtagattcttgtcaagcattttttttctacttaatatttaaaacggtgatacttaaagtcaaatttaatccaggcattttttatttctggacaaagagatcattgaaaaattaatttgtcagaaatatatgacacgcaaaaaagcaaaaagctttttaagtaacttttcttacaaacaggaagctatgttttttcagagcttaaaagtgagatccaccacaagttaattttagtctagaaatccaaagttactatttgatttagatttcactctttatgcctcatcaccctggttaaaagacgtggaatgagctcgctgaaggcctagttgaggaaccccggttctgggg

SEQ ID NO: 69367 - DNA, 613 bp, Homo sapiens
cagaatggacagaaaaagctgacttctagcagacattctattatagtttgaccatagccacatgggaagttatgccagtggacattcctttggagacagtttctggttcttagtgcagagagcaaagaacattcttccttggaaattgcctccactattttgtaaacaggagaggacttttcaaacctggttttcaaacagccagagactaattgtgccctctccaagttaatcatatactgggcttcctctctcaactgctctcacaaagcttgctgatttctcaatagcactgagatacttgaaaataattgatttctagatgcctttcataattctggctctgccattgtcgtcattttgtgtctcctactataaaggttagggaaaacccttgcttggcaagccagcaactcaggtatgttgcctcaaggtgattctgcatccatcactggaccaccagctgaggtccccacacttgctttgctttgctgagtcaagtcgcaccccattgttttgagaataatgctcttatgtgttgcatttctccccaaacctctcctcatccagtgccggaaacgtgagagctacccttgctttctcccactccctc

SEQ ID NO: 69368 - DNA, 1442 bp, Homo sapiens
taggccccagttcaaaagcaccgatgtatggcattaatctcactgattattctagaaccttctctggcccacacttagaaaaaccacaggcagccaggggcttgaacctaagcaacatgcacacaagttcagacccaacaaagggaagaatttccaggagagatttgtgcataggctcaagaagccttttagaaaatgaacaaacaaaatatctcatcataagtcagggacacctaatattttggattctctgaacactgatgtagtctacagagatcctcctcagaaaaaaaaaaaaaaaaccacaaaacatttcttaggtctgtgtgtcctttagagatttctagcgacctgagaccatctgtgggtccctaagaatataaagattcccactgagatcctttgtgcaaaggtcccttgtagagggcatatgttttctttaaatgttttgagccaacgtctaaacattgagaaagttcacactgttgtctggatcctggagacttgacagctttggacctacatgatctcatggctccatggaggggaggagctgccgctgcccctgcagctgggattccctgtcccctctgccacaccacccccattcctccttcacagaacccgccggcccctgtggccgctgaactggtgacttgtcatgccattaggtcatcgtcggggacatcaggccctgacagtggccaagagccatctggagtccatgctagtcatcacgtgccccagctgaccttccacccagacctgctgcagggctgtggctggagaaaagctgggtcaaagaagcggaagaatctacagatacatccagtactaggagcattggttgcagtggaggagttcaattccccatatggggaatattctccccactccacttggaatggagccatgagggtgagtggagagtcagagtctgccgcagccttggggcagaaacagcttcccagacaacatcggcaccttcccttgggacggtggtggctgcagcaacaaattaacacaaatagggtgacttaaaacaacagaaatgtattgtctcacagttctagaggccagcaatctgaagtcaaagggtccacagggccatggcaccctctggagactcaagaggagaatctgccatttgccgcctccagcttctggtctctccaggcatccactggcttgcggctgtgtcactccaatctcttctttctgtctgtgttttctcttttgtctcttctgaagactcctgtcattggatttggggcccacctaatcaatccaggatgatctcatctgcagatccttcccttaattatatctgaaaagatgttttttttccagatgaagtcacattcacaggtactcgggattaggactcggacgtatcttttgggggtcaccattcaacccactacccagcttcttagccactg

SEQ ID NO: 69369 - DNA, 1644 bp, Homo sapiens
accctcatcccactcacttgttctccttttgatcatatactctcatgttcgccaatgcatcaaattggtgaccttcttctaatcacagacaagtacaataagattggaaggtgtcatgttttggcaggtgaacctgtttctataaggatcctgaaaagaccaaggtatatttattaccctcagtttctttccttgacttgctctttgcactctgatgggccagccttggaatatctccaagagcagctgttggcaggtctttcaccccaggaaaaaattatcagctctgtattactcaagttgtctctaaagatgttggtcattagccacttcactctctctcgcctgcttgtgaaatatgggttggattccttctgacatgttacatccccagttgatctcctaaagcaaataggaatttatggagacattcaacccaggagtttatgacctggctgggagggaaaatctcctgcacaaacatcttctctaatttttttgtatctttcccatctcaacattcccacttcccaaagactctaatgaaacagaagcacagtttttgattgagcacccagtctgtctactataatactctctggatcccttgttaccaatatatttataatcctatttctaactaaggagtttagttataagctaaactccagcatttcctcaggaggtgctggcctcataaatgtcctgcaagcaaggaaagtagatcttccaggaatggcaggaatcacgagaagactgaagggtcagctctttaattggaccacctcaatcgtttgggctgttaaacaatatttttgctcagtctttcccacattatagtaattaaatagttccttccacatcctcaacaaagtcaaacacagcagcttcactgggtgaaaaagaccactcttgatttgggtgaaaaatgttctttcccacccgtgaggaaggccaagcagcgaatcctcccactgctgagattagagcagttatttctgctaacactgccatcccttctctctccagaacactttctctgttatcaagttgagcaaagcaaggaaaaagtaagctggtcaaatgtttacttggttggtgagcgttgataaaatgttggcctctgtgtggttctggatgagacatgcaccccctgacccagccagccctgggctacaatgagaacgaaggagcaggtgatagctcttaaacaaccagccagtcccaggttttcagcccagtgtttgttcacttatcccagacgcttgactcacgagggaccgtgtttatactggctctgtcccagggtcactttggttgagtggtatccattggtgtggctcctacagcaaaagaccaagtcctgatgccaagagagattaggagtttgcaacgggaaagaagaggaataaacaaaaaagagtggctccaagtcaagtaagttgctgagctgacttgagcttgtttctacttgtgggaaactaaaatcaatctctggtctggttgaaataatcttcagactgtctgaacaccatagttggtggcacagatttacagacatctcagcagattggagtgcagaagagcagagagtaagtgggttatgagccagcttaaagcttcactcaatggaaactggagccc

SEQ ID NO: 69370 - DNA, 541 bp, Homo sapiens
tttctgagtggactggccatgataagccaaagaatattatagccgatagggataaatcatggttttcccactgcgcggttgcctggtggagattattccagcctttatttacagctacaaaaataatcctgcctcaaggattttaggaagcaaccacctcctgcctaaagaactacactgcattgttgacttgccagctagaaaccagacatgagtcgtgcagggaagttccctttgaacggcttgaattgttgtcactagagggtgctaaatgcccctcaaaaaggcctttagagagaatactagtgtgcctaattcttgatttaaattccttgaattgacattattttacaaagtggtctcattttttacttgttaaaattaagatctaacatttataatgcagaaatggtgtttttttttgaaaaatttggattgttcattattatagaacataaagaaatacacgttttaggagcaaacatgaattacacagatctgaatataagattaaaggcataaatctgggggggtgagattt

SEQ ID NO: 69371 - DNA, 1287 bp, Homo sapiens
tggtctcgaactcctgacctcgtgatccgcccgccttggcctcccaaagtgctgggattacaggtgtgagccactgtgccgggccagcctcagtatttttaaacccaaattattgccagagaaattggtatatttattcagatgaaaaatacttgcattagtaagcgaaaatatctgtcatcgtcactttacagaaaatggaaaaggatgaggattgcacaaaaactagaaattccatcccgggtgtttttcctcctcagcaacgggcacaggtcgttccagttttggccaggcggtggcgctcgaggcaaacggtgtcatgaaacggtcactggatgcactgaccctgaagatgctctcaaagcacgagtccgttcatcagagagtggacttgacacccatcagaaacattcccggagtgcgttggtgtgaaggtgcgaggagagtcggggaagcatcccgaagccctgctaggcgaatgggtactgctgagattacagggtcagcacaaagcagaatacaggacccgaaaataacagctgcaccggaagaatacttgaccactgtttaagaaggaatttgacgaagagcagtcaccgagtgcagccctgggccggctaaaggaaaagaaaaaaaatcactcaactgccgctcggcggcgggaatgccaggcgggtcagagaagggaaacagggtgctttgcagccgcggtgcaggcgcagggcaaccccctgcccagcactgaagtctagagcaggctctgcgggtaaataggagaaaatcctagtgagccttattgtgattcaacatttagaattttcccccagttctgaccttgagatttaataaaaggcgttttcaagttacactggttctcttttcatatggaaatgaatttggggtgattgttttcactggtgtcttattactttacgaaattatgagcacccctttgcaaggaaaaataccttctgtcctttggattgctggttaaatacgggtaattttcattcctatttaaatcaacttgaaaaaacaaaaggaggccacgtaggcaaaagttcgttttgaggaaggaagttctcctaaaagctagggtaagtagattttgcttcaatctgcatatttttcaaggaaagacttttaaaacgaaatgtttctaaaacctgaaattttaaaggcaaatacatagtctttttaataaagcaaagcatattctgcattcccaccttttacgagaataaaataaaatatctagagacaaatacatttggatttgtgaaagga

SEQ ID NO: 69372 - DNA, 1714 bp, Homo sapiens
caagactagcctgagcaacatggagaaaccctgtgtctacaaaaaaaaatatgtatatatatacaaaaattagctgggcatggtggcacacacctatagtcccagctactcaggaggctgaagtgggaggattgcttgagcctagaaggtaaaggctgcagtgagttgagatcgcaccactgcactccagcctgggcaacagagtgagaacctgtctcaaaaacaaaacaaaacaaaacaaaaaaaaaacaaagagtaattgcttttaaacccaaagctaggtgatagtgagtgtttgtgtgctaacttccggtgagcactcacatgcctatctcgctggagtcctatgttcccaggcttgcatctgtctgcctgttccccctacgtctccacccacagaggtagccgcggctctgcagctctggagcctcagggctggaagcaggtgaggggaggcctttgttgatcctgctcaaccaatgcccccgctgccacatagaagaaacggtggacgtgtttagaaaatgataccaagtttacccctgaaacgcaattgcatatcctgtgcaggctgagtgaggcaaggtgaaactattgactggtatcacttgagatagagccaactgttcaaactgaaactgaaagacagcgtggtccctctgaggaaaaaagggcagaagtaaaagcacgaaattgtcacttgtgtagtggcaaacaaaaaagaaagagaaaataggtttcacttatttaaattataaaagtagttagtatgtgctgattcaaaaaacttaaaagatacagaagtgtataagatagaaacagaactgcgtctgcctccacctcctcccctgcccacaagccagccctccactttcagactccacagaagcaactgttttaatgcgtggtaaacatatttagaagaactttctctgctgtgcataaaagcatgctctaacatcatttggtttcacttcattttattttaaaaccacagtattcaatgacttgcttttctactcactagtatattatgggcaacttttcatagcaatgaatacagatttatctcagaacgtaatcttgaatcaatttcagaataactctgtgggatacatgggtgattataaattcacaacgtgccttgggggaatataccacctgtttctatggacgcaatttgcagtacattaattcggcacaccacaaaggctggacagttatcaatagattgggtcaagaagagaagtatacaaaacattcagctagctttaaagctaaggtttgtcaccacaaatctatgaagtgtctcttccgtgagttggagaaagtgattattagagaagcctcaataaaggtcaacagttacagatgatttgaaattttgccaacgtagaaaacagttggaaaaccattggaaattatattttttatcttgagtcaagtaggaaataaacttaatttacatagtgtaagaatggttgatatacaatgtaatcctaaatcttaaaattgctggagataaatcacaaagaaaaccaaaaagatccaaaaaaaaaaaaggagttaaaagagaagatttcatcttctttcagaggataaacaatctcaagattccataattctttgaatgtctcagaaaaacaaaattcgttcaagctacttcagatatttggaagaacaaaattaattttccccacccagatgaatcatt

SEQ ID NO: 69373 - DNA, 3009 bp, Homo sapiens
ctgcagattctgggctgggggtcagtgggggcagcttacaaaatgtttttctgtgagggcctcggctgaaatagaggggaacactgctgagctctggcctctgtgtctgtatcttgactgactttttaaatttttttttctgaaatttctgtgtggcctgacaagtccgagactaccacaaagtggccacaaaatttgtttaaatgttgtctgtcaagttggaaattttattttaaaattcatggtgcaatggcattataataaaccttatttttccttctgcagtctgtttctggatgctggcagtcattcagaaacatttgctgagcacctcgtacctgctgaatgaacccacgtgaaggggagccaggagtgcggatcattaaaaagcctgtactttctcagtccccatttgacaccacagagagaaaatgcatgctcctgatttgggtagatctagaatgttcttatgaatatggtaggtggagcaagggatccaggttcttatgatacatgataagaaaggccctagcttggtcagacacaaataaaagccaagcttttcatctaaactcccttgcaccatcacccccttaccaaccagtacagagagcttaacatctctataccagatagtgaatgtttctaataagaatggcaaattcttattgtgagagagataagggcattcaagtgttaattcaagagaaatatgtatatggttctttaaatgatttatttactaacagcattaagtatggtgtaaaggaatttacataccctaattctcgtctatatatttttttggattttaaaatgacaacttgtctaagttcgcattagtattaagccctaacatgagacagtatttatagcataagatttttgccacctatttttaattgtagcgctgttttatcaataagatcaattaaagagttgaacatttgaaaagaagaaacatgaaaatgaatttctaactgtacggtattgaatacatgaaagttctcttaaacttagtccagagtctcaataaacatggtaagtatgtaataattcacatttacaaccgccataaaaactctatcaaccaaattattttatgacgtcaaaattatctgaaaaaaattgaggaactaaaatttttaaaaataggttctcagttagagctgtctattaaaaggataaattttaaactctccggagctggccttcctggttccaggagcagcctgttggccttctctcgcaaagctcagttcctttcctccattccagaagaccctcaagcctgtcccatgcacctggttttacatttttaaatgttaaaaggaagaccaccgtgaaagattggcatgttaatagtaggctaaggcgacaggtgctggggctccggcttagagatccccacagattccatgctcccagggctggctgcagccatctgcccccacccacccccacccggcccagccctcccctcctggaggtggaatcgtggcttgcacaatcccctctgggcccctgggggaggcgcaccatattgattttttggacttcgtttctgtgtgtctcaccagtctttgcccggcacagtgactcactggcgtccctttcaggactttctcccgcctgataacatctaaatgactcatgcctacaccacctggagagctcagggaaggcacggtttgttcaggccaccctcactccaagggccagcccttttttggaatagaaactaaaagttggtagcttccatttgtagttccatctaacagaagagccgacccactcacattagctggctcacgactaaggcaaccaatgcctcccagaacatagactcaactggcaaccccggcactgaaggtcaaggtgagtcaaagacactcatgcagaagggtggatgctcttccaagtgtgactggctggcctgcacggctcactgcctcccctcctcccgtcaagatgcagcttcagtttaaaccaccttcgttccattcatcaaagaggaatatttactgttattgtaatgactcttctcacagtacacaaggctacacctgaaacacacaggcctttcagaaagcacaaaggagcattgtgcaagcccctgcccagtgagatggatgggggcgtagacacgccagttaacagccgggctttgcaggccagcaagacttatctgtggccgcaccatggccactgagcttgtacctttcttcttttaaaaattgctccttcattataagcagagttaaatacctgcacatgtgatttgtgttgaaataataaagcaacaaacacacatcaagctgaggagagaatcttggctaaggtaggaagtcgtgggtctggtctcagtctgtgctgctgaccaactgtaagaactcagaactcactgtccactcaggaccacagtgtctcatctgaaaggacgaggagactggaacacaccagagccatggttctcaatgtgtggtccagaggccctcgggggtccctgagcctctttctggggatctgtgaggtcaaaactactttcacaagtatggtttgcctttttcactctcactctctcatgcttgaacaatggaatcttctaaaggcttcctgacacgtgatgctacaatggatggaatccagaggtggataggagaagccagctgccttctattaaaccagaaatgaagaacatttgcagaaatgtacaacaatgccatgcttcccattaattattttgttcttgctttagaatatgtcacttttcattgaaaaatgttactcatgattttatgtaaaaggtttattgttgttacttttaaatacatattttaagtgttttttagttttgatttctaatatggcaaaaattggtaaaatcacatacacaagggcttttggggatcctcaaaactttttaagagtgtaaagggatccagagaccaaaagtttgataaccactaaccaaaaactttgacaaccatcatcttgaagggtccttgg

SEQ ID NO: 69374 - DNA, 6917 bp, Homo sapiens
ggaccactgaccacagaccaccacaacagatagaataataataaatttgtgcaaataaataataaaaaaacattgtgaaaattaccaaaatgggacacagagataggaagtgagcccatgcctttggagacatggcaccagtggacctgctgtataccacaaccttcagtttataaagaacatggtatctgtaaagtacgataaggtaaagcacagtaaaacgaggtgtgccagtgttggggagcacatctggctgcctggcatagtattgactgaaagaaagataacagagggagggtatctgaaaagtaactgccagatgctatggtgcctgctcctttgcagtcagggagaagagaaagaagagactgattatcaaagaaatcccaaagctagaatccgcagacccccattccagattcattaaaagtggacaagagataggggagcctgaggattgtccctggttgactggaaggtcacccaggaggaaggggtgtacctcagagatggacagggatgggccttctgctcgtcctacaggcacccattctcagcacaggctcatccagccaaagactaaatttcccagcctcctttgcaactagatgatatcacgtgacaaaatccagaccaatgggcctgccatgtgcaattctgattagtgcccttaggaagatgagcctctgcttctctttcctcctttcctagggaggaatgcaaatgtggtagggagacatcttcaaccaggagaatgaggacacagcaaggtgggaggatcctaagtcccaaaactaccacaacatcaccaagccaacaaaccagcctagggtcaccttccccaagtgttatgggagtgaataataaacctctatttcttttttttttttttccttcgagacagggtcttgctctgtaacccaggctggagtgcagtggcacaatcttggctcactgcaacatccacctcccagcttcaagtaattctcatgcctcagcctcccaagttgctgggattataggtgcccgccaccacatcttgctaaattttgtaattttagtagagccagggttttgccaggttgcccaggctggtctcaaactcctgacctcaagtaatgcatctgccctggcttcccaaagtgctgggattacacaggagtgagccactgcacctggccaaacctctatttcatttaagcccctgtatgtgtggcctcctgttactgatgttattttcatgtgttattctacgcgaggggcagaacaacttgcttttgttgtatttcaagtgactgtatcgctgaaccaaccactctcggagccacacttcctctgcctacaggctctgtgttgacttgtggcatgaagaacacctgtgaggtatccacagcatacaccagcccagggacggaggccacatgggcctgagcctgcagctggcagtggcggacacagatgctccagcaggagtgaggggaaacactccaccaaatgaaggcctcagggtcattcggacctcgtggaaacaagttgtatcaggtttgctggcgaagcagctaggaggctgtggcagctgttatttattcttcagtaggacatttggcgcaatgtcttacatcttcatgggtaattagacaaaaagagctcaccacccctaggtgatgtcaatgcagagggagagtcctagtgacatactacgggcttggcctcagtcactgtttgttcaatgacttgcttatcagggttatatgtgggccaaagcagttactaatagaagagaccttggataacaaactcgagggtcataaagatctggagaggctggaatgatacactgaacctacacagactcattcattcctcccccatctgttcattcagtgaaagcatattcatcaacacccagaggacgccaggcactcaggaaggtgctgggacaccacaggtgaaaagggtccggttctcactgaccctgcgctttcgtatgtggagaaagacaatgaaatacaacagaccgaggcaggtggatcacctgaggtcaggagttcaagaccagcctggccaacaacgcaaaaccccgtctctactaaaaatacaaaaattagctgggcatggtggcacgtgcctgtaatcctagctacttgggaggctgaggcaggagaatcgcttgaacctgggaggcggaggttgcagtgagccgagattatactactgccctccagcctggggaggagagaaagactgtctcaaaaaaacaaaaacaaaaacaaaagacaaaaaaaaaacagataaagcaacaaaatcatttttggagagataatgctgggagcgcattattggcaggatgtgatagtgacatgaaagtaaggctctttccgcttgggatcggcaagaactgccctgagccagtgacatttgcccatttgcctcagatgatgaaaaggagccaggcttgagagccaggtggaaagaacgccagggagcagcgagtgcaaagtccccagggggcagcaacgggagttttccaggaacagacccaggcaggtacactggagtgtgaccagcaaagaggagaatgaggaagggggtggggaccaggtcacagagggcatggtgaggagttttggattctcttctctgcagggtgagaaaccttctgggaattttgaggagagaggtggcgtcataggattaacttctccaaaggctacattggctgctgtgtgcagggtggattctaggaggtagaacagaggagagctgggaggctcttgcatggtggtgatgaccagggcactagagaagagactgtgcttgagatgtgttctggaagcagagtccacggcatttgctgatggtttatgggagtaaaggaagaagagaaatccaggacaactccaggtcttttgctgagcaaccggtgggtggtggtaccggttcctgggacgagaagcccttttctccatctctgctaataactcgctggcctgagccagcctcgtcacttgcctttaatgctcctgtggtcacatggctggctgccctgctgccaccacgcctcttccccatggtctgggattgatcatgtgcagggcagcacctgaggtccacattaacactcccacacaccaacagatgagcttggaaggaagcccctgtgtggttcacacacaggaaataggcgggtggtcactgtgtgggactgtcttggatggcaggtcaatggcacatctctggtcgaggaggggaataaggacaccaggcaggggagatgcctgagttgaaggagtgagaccaaggcagaagcccacccagaggatgagggctgagggaaagagaaggttctcatgcacagtgaacaggaagcagggggctctccggacccggaagtgaccctgggccggccaggggacagaccagtctctactagaccatggggctggctctgggggtattttaggtctccaggttgatgtctgcaaggccagctttttttttttttttttttttttggagacaaggtcttgctctgttgcccaggctgcagtgcagtggctcaatgcaacctccacctcccaggctcaagcaattctcccacctcagcttcctgagtagctaggactacaggcacgcaccaccatgcctggctaattcttgcattttttgtaaaaatggggtctcaccatgttgttcgggctaaggccagctttttcttgctgatgcaggaagagggactggatcagactcaaatctgagaggccctggaggacccagctatgagaaactagcaatgaactagagcaggagggccaaaggcagcctgctggcttcttctcatttttccagcctctgacacctcacaccattatgaacatgtaattgacctgaatttgtaaattcttattcttttttttaatgatttctttcctgcatgaatggcagagggtgactcatccccagggacggggctcaacctttcaacatgaactcaccaccatgtaacgcgtgcggcccccactggctgaagccatttgataaatccctttttctcatttttacagagagaaggtctaagatccaagctacagcctaattcagccatttgccctttacccgagtttttcaatatactccacactttcttactcctgctgagagccccactttccttgaatgcattcctctcttggctccctccctgccgccggcctcctccctctctctcccttccaggtcacttctcgtgatgagattggacttgtttcctggggctctggtaacaagttagcttaaaacagagaaatggaccctttcacagttctggaggccagaagtctgaaatcaaggtgttggaagggccactctccctctgaagccccagtagaggatccttcgtggcctcttccagctccggggtccctgacaccccccggcttatgcccgcttctctcccctcactgcctccgtcctcacacggccatcttctcatctccttgtatctcttctctgtgtgtctcttataaggacacttgtcatttgactcaggacccagcaggataacccaggataatctcatcttgagatccatcacttactacaactgcaaagtcctttttttagatggaatttcgtgcttgtcacccaggctggagtgcaatggcacgatctaggctcgctgcaacctctgcatctgggttcaagtgattctcctgcctcagcctcctgagtagcagggattaaaggcacctgtcaccatacccgtctaatttttgtatgtttagtagagacggggtttcaccatgttggccagtctggtctcaaactcctgagctcagatgatctacccacctttgcctcccaaagtgcgtgagccaccgcacccagccagggctgctcttaaatgatgaaaccaatgggctctacagcctcaaatgctgagggtcaagctgtgtcctcttctgccaagaacaaggaagtggtatgtctgagtgatatgtcattgctcattgtctgccataaggttgggacaaagagcagaggtctgggcctggctctcagcttagccagccaggcccccgggccaggctgagtcactgtgtcctcactgcttaacccagggtagcagtgctcactctgcttattgcagggcaaggggcaatggagctgctatctgggaaacagtttgaaaactgtgaagggctccacaggtaaagtgccattctgtttgttttagtggggaatcactctaggaaaaaattaggaggattttggtcctgaatcctctagaagtgtgctctgcgactttgggcaaattatttaaactgaagatagtaatgctactcaaaatcagtagtgtcacagacgtgtccacctaggaaaggtataaagtactatataaatgtgaggttctatcattattatagtgtttaccatttcagcaaagtattgtaaaagacattacataatgcatttgcatctttttactgataaaacttctactgtaagcattagtacttactaaccagcattttacattttcctttgaaagggcgaaattccttccgcagaattaaatcgtgtaatttttccaacagatatttattgagtgctgtgcatcaggatttattctaagcattgcaggaaagtagtgaacaaagcagatataattccttccctaatggggtggaatttgtgctgtggagacagagaattattaaggtaaaaaagcaaaagataaagaacgtaacgataagggcttaagaaaaaaaaactcattcggtgtcagaaaggagttgttgaaattttaggtggggtggccagggaaggcttcaccaaaggtgactatttagtaaagatctggcagcggtgacagtaggagtcacacggactcctgggaagacccttctagggagagggaacagctcaggagggagttggcctggtgcccagagcaggaactgaacatggaggcagagactcagtcatgtaactgctggaggctgagtctcagggcctccaggggcgtggcgggcttgggctcaggcctttcttctgagtcacacaagagctgttggagggttttacctgaggacggacaggctgactgccgtttaaacaggatccctctggctgctgtgttgagaatgggtatcacgtttagaagccttttgaaataagtatttgaatgcacaagtcatactgaaagtcattttttaaatgtcaaatgcttgccttttcccctaaactagagcaggtcattcttgcagtgaaatagtccactcacttttctatagtaggatgaaaagaaagaaacgagaaggcacgacttgctgtatctagtcaaacattcttgctaccaagaaacattcacgctccgagtggagaaggggctgcctgcatctcgtgccctctgggtgagcccggctatgtcttccttcaccaccctctgctgggagggtgggagctgaggggacaaggacacctgagagaggcctgtgatgggctgcccagtgccacccaagcccctactgcacatcttccgccccagcccaggttggtccagaaaaagaacatcaagtgttgttacccaattctggtgtcaaagacaccctaagagtcctccattgctactgaccagcagtttcacatgtacctacaaacagaaatggggtaattgggtttaataaaaaaaaaaaatacattggccataaaaaggaatgaagttcatccatgcagtacatgctacagcacaaaagaaccttgagaatattatgttcagtgaaagaaggcagtcacgaatgaccacatattgtatgattccattcttatgaagtgtccagaacacttcataaatcataaggcaaatccatagtatcggaaggtagatccatggttgcttagggttgggggtcgga

SEQ ID NO: 69375 - DNA, 11003 bp, Homo sapiens
tgaatgatgcacttcggaccaaatgacgtctgtttaacttgcaactggaaaccaccacaaactgcctgttgactactgatttggattttaaggtaaatacagacatgtttctaaggagacgtttttgtgtgtgttttttttcaaaggatgacttcgtaagctagctaatcatttctcataattatgtctggattctaaagaattctttttctgcattttactctctagatatttcatgttcgtaacacatatattctactgtaatatcccttttcctcctctcttctgtgaatgtccctctttcttaaggggaaagtgttaacattgctcataactcagtctgccatagcgcatctgatcactccaccctgtgcaccttctgacttttaatttccttccaacaccctcgacttttgatctccaagcacaagggctatacttttatttattaggtttaatttactgtaaagctcattgttccctgtgaatcgcacgataacagtcaatgaataatcactggcttcagccagactgctttttaattctgctgagtaactggcaagccaactagtattaaggacaaaaatgtaaggaaccctgatattgccccagaactaggataagccattttattatgaacatgtgactgccctcgtgcagaggtggatcagctacagggcaggacccagggcaagggggctgcttggggcagcctcagactctttggaaggggaaatagggaggaccagggacctgggtgggaggcaggagcttaggcttacgatgaccccagcacacaggcccagcttcctcttcccacagcctccctgccgtcttagctctgccatttggtcttccggccgggatccctttcccaaggctttcacacatttaaacccgcgaggggcaggactttttttttttttttcgtgtatatgatagttttttcaaaatgttttctataaaatcctccctgaggagagcttggaaaaagattcttaatagctagatcattttgagtccttctctaccatgtactcaacactctaacatattctgcacatttggttctatgtcatttgccatagtcttaaggacgtaggttccataatcatcccttattctgtagaggaggcccaaggttagtgagcagaggaaggttccactgtcgggaaccggtggtcttcaaactcctgtgctcctcttttgatatctttctgctcatatatgttggaaacagcccagcatgagcaaagcaccacctcctagcccccagcctgtgccagccctgcaaagaggaaatatggctccactcagggagcccatcagcgactcagggagccctggagcacctggcactcagcacccatgaacacgagggcaggcatggtgggacaaggcagtctgcttggggcaagtgagcttcgggaagtagctgagctttggggagcagctgtctatacccagcttctcagggctgtgcaagtagcctgagggagaaagaccctatattagctgaaactgcagcccagatgagtcagtattttctgctacggttttttaaaaaaatagtaacatactcatgtctccatggtaacttactatggatctgtattccatttatggaactctttcttgacctatctgtgttctctaatctgggcctgaatatacactgagaagccatcagaatcaattcagtctccaagaaataatcacttcccctatacgtgattgtttcagccgtatagattctgactgtgactcatgccacggtgatacccggagaccttcggggacccagaaacattaaggtgcaccgatatctcaattatccggataactctagacctagagtcaccatggaaacctagaaccctgagtcacagagaagctgggccattcctctcccttcccggtggtgccgcagttcttgagatgtgagcagctttcagccccgtggcctcgcctaagctggggtttcctatttcatccacaacttcaggaatctaaactttcctgcaaaatattgagcatgtgacctgagtccaaacagccatggactcaagcaccttctgataaaaacggaaaccacagtgtagggggtggttttgaccagggtttcggagtcagataaactcaggtttccaccttgaatttctcatcaatctgacgtggcaggttattcatcctaaggttcagttcccacctgtgtaaagtgggagccgcaagtcctccgagagtgacgatgatgtgcgtggagtgcccagcccagattgaagcgcggccaaggcgggtcgctatctgggcaccgctcagctccagagggcgccactcccgcggagcctgcgggatcggggcttcccgggagcagcgcgatcagcaccacgactcggggacacagccagggcccggtttctacaggaagcgcctcatttggagcctttttgtgatagaatgatcattagtcctaagcccattcagaggttcaagaatggggtcggctcaatttcagggccttattacccaagcccggctgcccttcggtgccaccagcaccactgctccgtcgctgcggaattccaaaggcaggtttggcgttagggccttggccccagagaggacgccgagcgctccacggaaagtctccgcccggctcccagggcgcacactcgcgcgcacgtggggccgaggccctgctcccggggcctcagggccagccggcgagggacccagccgagtgacagcaggaggcggagggaaggttgggccggaaggtgtcagccccgccccgcgctccctcgccgcctccgccctcctcttctctcccctcgtgcgttccctctcctctccctccgctcccccaaccctcctgctgcccccttccctctcctcccgcttctccccatcctgcctacctcccttcccctcctcttctctctcctccccttccctcccctctctcttctctcctccctcgtttcctcccctcccctccactcggccgtccctccttcctcctccctcctccctcctcctcccgctcctgaagagcgcgccgcgtgggggacggcccggttacttcctccagagactgacgagtgcggtgtcgctccagctcagagctcccggagccgcccggccagcgtccggcctccctgatcgtctctggccggcgccctcgccctcgcccggcgcgcaccgagcagccgcgggcgccgagcagccaccgtcccgaccaagcgccggccctgcccgcagcggcagggtaagagctgggcccgcagagagcgcccggcgcgcggctccagtcccatggagggtcacccggggcctgggcgggggtcgcggggggcactgacacgcagatctcggggcgctgccgggggtgcaggtgggggtggcggctgctgcgaggactctaggggcgcgcgtctgagttccgcgccggctcgttttccggttatggagtggcctccggggctggcggggtcggccggggggttcctgcgtgctagggccgctgtcttcggggtcgcctagcggcgggcgcggccagggcgcgctggcttgtttcgctcgcttttgtttttaaaaggaaacgcaggcctggtagggggtcctgcccagtggatgtcccggcgaacatgatttcgcgaacgggagtgggggcacaggagagcgtgtccgaggtggcctggcgccccggctttgagggtgacttcctggagcggcgccgggcccggaggatctggggcgcccaagacacctgaaggctgcggcaccgcgggaacctgcggggcgcggggtgccatggtcacctgctcgccgcgtccagggcccgggctggggacccctcggtcgtgcgaggagagcgtggggaacctgtcggaaatgagatctggttgcgctgggctgcctttattttctcgttcctacagcatttgaatgaagaggtaactgagtgtttgcttgtgtgtgtttgggttgcgtgtgtgttatcctattttattttttacggcaggagaccttttatgttagcctgtacacaatttcagggtagcctaaaacagtagttgacgcgctagttatttagaaagtaaagaaatgagcagtcccctttggagacaggagtaatttattttaattcgccagtaagagattatatttgttccatacaatggaagcgcctgtgcgttatctgcctgcccacaccaccaccaatcagagagataaatctccacgttaagctttattaaaattctgagtagtagcgcagcacagtaaatgttagcaccgaccatccgcagggaaatgctcagatactcatttctgggattagtcattcatctctctaaactgatcgctttcaaagcgaaaaaagcaaactaccttcaaatgtgtgttacaaggttgtgttgtttcttttttttgtttgttttcaaatttatctaaataatcttacataagtgattacttgttccaataagggtactgttgtcaggcaaattctccttgtttttaaatgtaaccattctcagctgttacatttctgctctttatccttttttttttttttttttggtttaaaagcagcgatccatcagcaacaccaaacttgaaattgatttatgtggaaaaacttggcttgtctgccatctaacaagccctgttgagtaaaataagcaagcttaaatttgattagttgtgtgtctgcctgaaaccatttagtagagcactttaattctgcatggtttttacaaaactcattaaaagctggacaacaaaagaattctattctgtagctagtaattacagctctttatgtgggagtggtaggctgccttttctcctggtatttgtacacaaaagctggggagagcttttccactgccttccacattcattctctgtccatctcagagaagctgaaaaacagaatcaagtcagcaagcagtctgcaagcctaaggaagaaaaagagctgacccatccggctctggatggataactggcaacacccaagatgtctatgattttggccttctgtttgaggcttgtttatttctttaatcagcagctaccaggacttatttcatgcagagaaatgacataaagctctagaggaaggagcatttcacattggaaggagtagtgagaagggcctgatctgataatatcaggatgggtgggaagggtccattcctcatcattcatgttctcccggcacagaggactgtgtggaggactcaggatttaggaccatactcaactggggtttgatctccactttgccctgcggtggcccctctggtagctatgtggatcctgggcagattgtccatgttgctgggcctccgttgcttcactgtatgacgtctgcctctcagggatgcaggaagattcaattaggtaggagtggatggtcccccagcacggggcttagctcttagtaactaggcattctggcaatggcagccatcaataggagagactattgattgttgagtgaatataagtggcataatccaccaagtggagattctgagtgaatgtggccactttggacccaagactgctgcccctctctgtcctctcataggactattatttattgccagtgctgaccagcctttgttggctaccatgatcattacctgcactccgagtgttttaacagaattttctgatgcctctggcctcacctgctgccttttagccaagaggggtgtgtgtgtatgtgtgtgtgtgtgtgtgtgtgtgtgttgggtgtgtgttgggtagcagggttcttggaaggtctggtttagccataatgttgatcataaagagaaaacaagaaaataaatgcaaattaaatagttcggtgagcctttgttatttcgccacatccagtaagttctatcagttgaatgttgtctgaattacttaaaaagttctcagttgtaaacaggtaagagcacccagtggaggccatggagctaggcttagagctttgccaccagccttcagttccatagccatgaacctgggagggcaaggaatcaccctagaggtgaaggccattcatcggtgctaacccaaggtctctgaaaatgagttttagttactctattatctaagtatctttcttactgatatgtaacttacctggctgaacaattacattttagagctccaaataaattttcagcctattatgtcattgtccaattacaagcctcattgtaatagccatgttaaaaacaataaagccggtgaaattgatttcagtgtatttcaaattaacctaatatattcgaaatattatgtatgtataaaaattattgagcttttttcttttttccactaagtctttgagagctagtgtgtatgtgtggatttgtactagccactggttgagagctctgtagccacacatggcaagtgggtaccatattgcttagcccaggcctagtagaagattaagactcagtcagaggaagtaaggcagatccgtgcttggaatcagttcctcttgaagaagtgcacagccaagcaacacacaaagcagaaatattttgagctctgtattcaaagcaggaagatctgggaccatgtaagggggtttggtcttcagttctccctttgatcccttccctgggtgtgtgctttcttacagcctggagagtggaagggaagagagggggcttcctggactcctttcctgtctctagaaatgacccctgcagctgtcctgaagctctcaggttaagctgattgtgtccagagcagacaggaggcggcccactgccccactgtacccacccaagcactcacctaagctggccatggaaatgtgaatgaaaagcctgacccaggccctcttgccctgctaacccagcaaggaggctctgaccagccagccagcaagtgactttttctgtgacatctaagtggaattcagtgaggaatcagcattattattcaatcactgaaacagcatatcccattgtgatactgagaaatgctttcctcttgagacctttgggaggacagccatttaaacaagaattccctgcattcacttttgaattacctgttagctgtagaactcagccaggatcaagtcttgatgccaccaatgatgagtttagtgtacttaatcttttgcctctttgactttttttttttcttttttaagatgaatgatttcggaatcaagaatatggaccaggtagcccctgtggctaacagttacagagggacactcaaggtgagtgggcaagtcttaatttttttttttaattggaaaactcgatctctaggaggaaagaaaaaaaaggcctgggtcccagaaaactggttgtagccctagcttcttaatttattggccatgtgactatagactatttgcttacttgctctggtcctcagttttctggtctgcagaatgggtatcttgatgtgtgttgttcttctcctccacgatatgaaaccaaaggcctttatagcttgttttctgaggctccttccaggtgaaaatcctataactcccaataaaacagctggagaggctgtctctactgccttttctgtctacccaggagtttccttggttgatgggaagctgtttaagaactgaaatgagagagaagaggcagacagacccaaccgctacagctcctatcagaaagggcagcgcccgtggaattgtaggtagcctgttactggctcagagaacaagcaggcctacttatgttaaaccaaaaaccagatgaaaaatgaaagcgccctctctgctgcataaacattttatgtagcttctatcatcattccttttgggaacattctttagtagcacaaactggtaatctcccacttgtcttctccaaatatgacagcaagatttgattgttttcagtattatgtagtaaacatgtttcagaagcatgattttaaaattggcctcctcaaagtttagcgtcttgcataatgatgatgtacgtctctggcatattacattttcctttgtatatcattattgaggttatttgtctgatatgacccaaagaggcaaaactcagcacagtcctttctgcagtattctaaaggtcatcaaacttcagcctagtgagtctgcttgtttgatttggccggacattttaagcatggcagaagtggtacaagaaatcatggtattaagttgaaaccacaccccttagaaaaatccttctattaattcaaataatttgacgatgcttatgcggtttctgaaaagaagcagtcgttgctgaaattgatgtgttgaaataggaagcacagatttgtattgtcttttggcttcctggctttaaaaaaaaaaaaaaagaatttacggttaggaaaggcatttcttagtcacctgggcaatgcttgtgggaactttaaaagtttattggaggtttcaccaaaattagctctgctctaaagtagtttgtaaatccagatgagtaatttgcacttgcctgattgatcggttttcctcgtagatctcaggcagttggtcatcattgacttggatttttttgggctgggctccagcctctgcctgccctcttttgtaatgcgtcattcattgttctgcatttctaaaaagaaagcgggtaaccgattttatttgtaaatgtgttacacattttcttattgatgactcaacagatgggtcattgtattacacataacatgggatttccagcttatgttggaaaaatatagtctttcttcacgtgttcctcaacaatttaggcgatgatgaatccagatattatcggttactttcaaatgagtcttacattaaaaggtatttctttcataaatgttatgtaagatgctcagaaatcgagttagtgtaaggttttatctttctgtgtgtctcttcttttctgcagatagtttagtttaactttaaacctatttcctttggaaatctttccccttagtaggtgatttgggttttttttgttttgttttatttgttttttcgtttttggttttaagcaacagggtccttctctgttgcccaggcgggagtacagtggcttgatcgtagttcaccgcagacttgaactcctgggctcaagtgatcctctggcctcaacctcataaagcactggggttacaggcataagccaccccgcctggcctgggggcggggagggggttcatttttaagacactttacttgttataaaatgaaacgttaaggaattttgtcatgtattactattttccaaaccattggaattgatgtggaaaagcatctctagtttcagttaaattgtttcatggcaaacatttcaaaataaatgcttccaaagataaagtagtgtatttcattgtttgatttttcagtgtttatcgggtcatttgccttttaactgcattgtgctcagacggccttgtcaagggtcatttttcttacacacacagcctagttgaatttttctcaatgtaacaggagggtcaggtgtttggtaaaggggtctctgaggctcctctcgacaccattgtaagattctgttattttcagatttgtgtatttaatatattaacttaagtggattaggccactaaaacaaattcccagtcactccgactctgtgaggttacttaaataaatccacagtggccgggcaccgtggctcacgcctgtaatcccagcactttgggaggccaaggcgggtggattacacgaggtcaggagtttgagaccagcctggccaacatggtgaaaccctgtctgtactaaaaatgcaaaaattatccaggcgtggtggtgggcgcctgtagtcccagctactcgggaggctgaggcaggagaatcgcttgaacccaggagggggaggttgcagtgagccaagattgcaccactgcactctggcctgtgtgacagagtaagacctgtctcaaaataataataataataatccacagtaaaatacaatcatttcagtcactttgaccattttacgagtctgttttaaggactgactggttgattccatgtttgcttcaaaattgccagtttaatcagggactattggtaggattgcccacagaccacttttacaacaggtaattcaatcagtttaaatattgtatttccattttttttccatctgtttttgcagcgccagccagcctttgacacctttgatgggtccctgtttgctgtttttccttctctaaatgaagagcaaacactgcaagaagtgccaacaggcttggattccatttctcatggtaattggttcctcagacttgacaaattgtgcatgattttcctaagtagttcagttaataaagagatgacagttcctaagtgagaaatgttggtatctggaatctttgatatgaatagccagaagttctggacctgggagaaggcagtttttcatttgtatcaacttggtgattctgatgtggattctgatgtcttgagtgccagacgccccccagtgagccgctgttaggaaactgcaggggaacccctgagctgcccctcctggatgttttcaacattggcaagcaggtcctcatctccctgctctgccctggaaaacagacagaagagtagacattaaaacacacccaaacttgtaatttgggtttgcatcattagttaaatcatctcccctgccctgagttttggggcaacaaattgttctttgtaatccttacccatcggtagttctttctgtagttcttcgtgtcattgtttattcttcttaaaggaatagcacgtcagataatgttcatacaattactgtgacagagctattagttggaaacatgccagagatgactgtgtcatgtgaagtaggtgctgagaatacaggccagaaaattaattaaaacgcatacactggcgtaagcataaccctgcatggcagccatttatcattcttgaaattgctgagggtgtctggagaagattgtttttcaataaaaatggaaggtgtggttccattaccgtgctaagtg

SEQ ID NO: 69376 - DNA, 1790 bp, Homo sapiens
taaagctgtttttagaaacaggtatttccagtactttagcgaaaatactggggctttgttttcactgcttcgtgtatccttaaatgcgtttttgtttttgtttttttaaccatatggagccactgtggattgaaattacctaacttaaaaaaatctgataagtttaaaataaggatactgaggcattcattctttttctgtcatctaagaacaatcagccacgtaaacgtattaaaatacacggaaagagtgtgtgaaagccattatcggtttcattattgggagtttagggcctgagaagaataaacagccataacgttagtgtggttcattttaatagtaacataagtttctgtttattgactgccaactctgtagttaagtaggcatacagtctgtaggacagcctggcatgggggtggtatgaggccattttacagatggggaaattggctcacaggcagacagctatcggtgctcacacagctctggttctagaatgcctgtcccgtgctttacagcaaagctttattgataacggccattgcgtttctgaggaagagctatttggtagaaagaggttgggcttagggtcggaagatctaggctcttctcctgtttgctgtgatgggcgtgtgatccaggacaaggcacctggcctctgagccgcatcttatccctcctctttagaacagaaccacactgacacctgctttgcaaggtggtagttctaaatgtcaatcgaggacaggtggacgagaagctcttggcaaagcatgcttcaccagacagaggctgtgaggcaacgggtgtgaccccgcgtggctattgagtaaaccgggctcacattaagcaatttacacatggtcatttggcaggaaggtggcatgggatcccacgtatgacacgcctcattctgtgatgaaacaccccctcagccacccccatctctgccccactgggtgtttctagaaaaaaaccttgaaggtttttacataaggaacaattaaaccagatggggaattttaatgccaagagttggtggccctaaactttcttccagaaagaacaaacctagcaatcaaggggaagagtgtctcgcctagtgaccttattttctaggagtaggcagtgtggagcaggaactcacatttggtgccccgccccatcccgttaaagcacttagtactgtcaccaacaccttgagtgccaccctgagtgtaacatcggaaccccattcagagagttgggtctgcattcctaaatcagcatgtacaattaggatggttaaagacttgctgtattttacatctgtgaaagggtatgatccgtctccctccctctccccgcaggaagtggacctattcagctgtggcagtttctcctggagctgctatcagacaaatcctgccagtcattcatcagctggactggagacggatgggagtttaagctcgccgaccccgatgaggtatggccagagccctgggaaatctctgggcttgaaaacctgatttcctgcttgcattcaaaaactcagttctttgggcacaaaaaagggttcaccagtactgctgagaatctttccacgtgaggcatccttggctgttgggaaaatggaagtggagtcattgctttgttgataaacgtgtacagtgttttctgggtatgcttcatacaagggcgttgcacagatttcactgtcttgatcagttgtctgatcaagaggcccaagctgcaaactgaggttctctgctgaccatctgaaaatgccttaggaaggctgccct

SEQ ID NO: 69377 - DNA, 1538 bp, Homo sapiens
tttttggggggttttcttgccttggttgtctggcaaggactttgtacatttgggagtttttatgagaaacttaaatgttattatctgggcttatatctggcctctgctttctcctttaattgtaaagtaaaagctataaagcagtatttttcttgacaaatggcatatgttttccacttctttgcatgcgtttaagtcagtttatacacaaaatggattttattttttagtttaactgtgtttctccgacagctcacctctctctgaccacccagccatttccttcctgtgctccacgttcttctgtgtgattaaaataagaatattatttttggaaatatgcaactccttttcagagatcaggagggatttatgtagcagctatttttactgcaaaagtaattcactggaaaaaaaatgtaatttgtaagaaagctttatttttatctcagctctatgtaaagttaaagttactgtacagagctgaaggacggggggcggtaggggtcttgatgaaacctcttgaacgaagcacagtttgtcccatctttgttcactcgtgtgtctcaaccatcttaatagcatgctgctcctttttgctcagtgtccacagcaagatgacgtgattcttattttcttggacacagactattctgaggcacagagcggggacttaagatgggaaagagaaagcatcggagccattcattcggagaaaacgttttgatcaaaatggagacttttgtagtcgtttcaaaagagcacctgagtcatgtgtattcccggcctttataaatgacccggtcaagttggtttcaaagtccgacaggcttgtctgtttactagctgcgtggccttggacgggtggctgacatctgtaaagaatcctcctgtgatgaaactgaggaatcgggtggccgggcaagctgggaagagcaaagccagagctgcgctgcctcaatacccacaaaagaccattcccagtatacataagcacaggatgtttttctcaagagggatgtatttatcacttggacatctgtttataatataaacagacatgtgactgggaacatcttgctgccaaaagaatcctaggcagtggctcattgtatgtgaggttgaaccacgtgaaattgccaatattaggctggcttttatctacaaagaaggagtttcatggggttcagcctaacagttatggaaactacagtccttataaaccattggcatggtaataaacagatcttaagtataaaaattttgtaattgggcctttactctctcaataataaagtattttgtttatataaattctttgtgatagtcctcgttcttcctctccacacccagcatgaaggagttggaggaaggatgttaaccccagatccattctctactcaaaacattccatcatcaagcggcaagtctctgtttaactggtttatacacaagtcacttagaaaccacaacccaaattggaatcaactttgagcccttcctaaaagaattcccaaaaagtgctctctttcaaaaca

SEQ ID NO: 69378 - DNA, 2399 bp, Homo sapiens
gcatcacactacctgacttcaaactacactacaaggctacagtaaccaaaacagcatgatactggtaccaaaacagagatatagatcaatggaacagaacagagccctcagaaataacaccctaccagctttctttcctgatagggctccagaactccacatggtggacacttgtcactgggaatgattcaggctttaatggggctgctgggcgggagcacagggcttgagggccagaggaagtggagcaggaactgtggcaagaggtagagggagcaagctgccccatcacctctcctgaaatatcaagcaagttaacaggaggatttgttgtgatttggagatggaccttggattatcactgtcactgggtctgtcaggcactatttgtgaccttgggtatgcaatttaatcactctctgcctcagtttcccctccataaagccaggtcatttgtggctgttggggggattgatctattgggggtataagattgtgtaaagtcagtaacctgggatgggggtgctatttgaacagagcacgccaaggaaggtgtgtttgagccaggggatctgcaaagaaaatatggatcccagacaatcatgtctccattttcatcagaagaaatccaggggcagagttcagtgatgaaacaagtacttaactgaaccaagactcaaaccctggtcttctgttttctggtgttgtcctctggccaaaataaccctgtcatgtttggttgaagtcattataaatgctgccccagatgctacctagggctccttcaagtttctagttcctccttccacaaaccagaggccacagcccttgatttgaattttaaattatcaggaacctcctacccaaagaacacacagccctcatttacagcagctgctggcagctagctgagttcgaacagatgcaagaatctcataatctgggccagatattaatctgtcttttctgtaacagcaaaacagaagggtgagtcttgaagcagtgcagggggaaaccccttattgtgcaactcttttgtaactcctgggcggagtctggacatgtgacttctgcttgaaatttaacattaggggaaagaccatttttggtcatagctgaggtgatgacatcttggcaactggaatggacatgacctctgttccatgtactatgagtaactgccccctccccatttctcaaagtcatgttcagatggcaaaactgcctgggattaccacatctgactcttgctagctgtttctgtgtctatggcttcatactgtccagacatagacctggggctcagcacacatgtatgtttgagtggcataaggtcagaagcacagatccagcaaagactgtggcccggaggaaggtgggttggttggaggaaagaaagtggaggtgggagcaaacgaagataagtaaacaaaaaaatgagctcttaagcaaaaaagattgcctgtctgctgtagcctgtaaagctctgatgagaaacacttttatgatttgctggtaaactccacccaatttggttctggaagaggttatttttcattgcagtgtaagcatgtaattagttaattgggaaatatggcgccattttcaaagctcactttcatctgtcatctcacttacacctccctgtgaccctgggagattggttttattatgcccattttacagatgtggaaactgaagctcggagaggtgaaccccctaaaaagaaattggagaggcttatcctgactcatccgtggtccctgattccttgtgcctgagatgcagactgtggcttgggaataggggagggctcagagggctggagctcagctgagtggccggatgttccctcacagggtaccctcctttggcttcctgttgaccctagtagttgtcaatagtgctgcaggtgctccacgccttcccaccctctggatgaagctcatcctaaggaattagcatctcatttctaattctcaggtcctcaggaatcagacttgtattttgggtcaaatttgcataccttggggcttctgttttctcaagctatgtatggaccccagagcaaatcccaaccatggttcaatatcagcctctgggaatctgcagatcactggaagccaggctgcccacgctttctggaagccacttcctagtgaaggagccctggaggaaagaggcaatggtataggagtctccctaaagtgagaagtgtggagcccagcacttcaactatgtctgtgggtggagccaaaataaccagttgctcctgatcgctgcatgtcagcaattgtatcacaacaagaggccacagggcatcaccctacccaacactgtgatgggggccggggtcacatgtgcttaagtgtctctgtaaatcagcccttcagttggga

SEQ ID NO: 69379 - DNA, 1790 bp, Homo sapiens
ttgtggagagtaactagctgcacatcacatttatagaaagtatttttcccttttaattttgtacatgattataccaagttttatacatgctccatcctcatgacctaaacacctcccaaaaggcccaacaccccaacaaacagtgttacagtggggattaagcttccaatacatgaattctgggggacacattcagacaagagcaaatattaaaactataaattgtataaaattgtataaacacaatttacctattatctgttaggaagtgtcattgttctaaggtcatcctagtcctggtcagccagtctcacatgaaataaaatccacctggctgtgaagccacctccttcagcacagtgccatcatccctgccctctacttagtgaaaaacaatgggactgttaaagcgttgcattggaaagcattacctactcttccagcctgatctggaatagcctcagacgcccccagcccctctcagaatgaggggactttttccagctccgcaggactgtgcagggccccttcccagtgcagccttgactgtggggtgcggtccctctgcatgccactcacaggacaagtttaatcaagcccagtttaaggatcacaaccataatgtctacaaaaccatgatgaactacaaccatttgtagttcattagttcagaaaatcattactgaacttctgtgaacctccacagtgcaagagccctttttgaaatgcaaatttggatagattcccagttcaggcttacttatatgccaagataaatgaaaaggggattcttacatgtcagtcaaagatgatttctcatctagcacacaccctgagcttctggaagtcgcccagtcactcactacgttatttgccacacaggtattacacaaagaccacgagaaaaagtcatcgtccaaaccagagaaaggaaattgaccggtgacctgtcctgggcgcatagccgcatgtgatgacaggcaggaccctggcagggcagagaaaccagctctgttcagaggtttccagactgtaaatttaaagccctgtacaatttcaacaacaatgaaaatttaaggatcaagtgtactggcctttcaaccttccactttgccaaataagcaaattgaaaaaatagttacactcatttttgctatcattttataaaaggatatttttaacagaaaaaaagggtaaagaaagttatcttagaataaaagacagtttctcaattaagttcatttgaagtatgacaacttgctatacattccttatttttctactttcgtttgcagaccagtgcaaaggcttttatatggaccaaccccagtcagaaagcaggcacttggaaacctcgtgtctgtgaagaacaaggggtggaacctctgaaatcctcccctttgagatttcccatgcattcacacatccttctgtgtgccttgaaaatgtaagaaacagatgtgggcaagaggcagccagaagactccggcacaggccctgcaacctatctgctcacatcctgcttgggagacatgtcagcgataaactccaggagtagtcacgagggctgacaggggttcctgcccggctctgcatccaacagcctggtggagcctaggctaagtctacaaaaatacggagctcagagctcctacctagatttctttgctttattcaggcagaattgacaaattaaaaggtatgtatttaaggtgtactacttgattatttgaaatacatgtacacaattatgctaattaacatatccatcgcctcacagttaccttttt

SEQ ID NO: 69380 - DNA, 2472 bp, Homo sapiens
ccgagatcaggccactgtgctccagcctgggtgacaagagtgaaattccatcaccaaacaaacaaacaaacaaacaaacaaaaaagccccccaaaaaacaaagactcttctgcccatgcctgtcagatactgaaggaaaaacgcaaagcaccttccaggaaagctgagtcacagaggtgcacagagccaacccaggagcttctctttctcccacagcatgcacccatccctagcaagtcctgccagctctgctctaaacaggaccaggctcaaagctcatctcttcacctccttcactaccttccctaccattcgtctgggattcctgcaggcacctctgactagactgccctgctgtgtcctcttcagtctactctcagaaattagactcagctggagagattcctgttaaaacaaaagtcagataatatgaccccttcattctaaaccttccgacagcttcccatttcactcatgacaatatcctaaggccttaccatgaactgcagagtcaacacaatctttccatatcacctcctactcctggcctctttgcttaatctgcatcaggcacactgaaccccttgccatttctcacacacactgagtgtgttccagccccagggcctttgcacttgctgctcgatccccagatactcctatgatcatgtcttcacttacttccatgctcagctgaaatgttaccttatcagagagacctccattgttttatcaatccatttgcggcctgaaaaagtctgattgtgattcctgggttccaaacaccttgatccttcagctgctgatattacaatcagaaattaatactggttattggtattctgacttctatttggaatccacgaagatccctaggccaacacttctcaagctttaacgtgcatgtgaaccagaaagatgctagccagtgcttcttagacttttacatacaaaggaatcactttgagagcttgccaaatgcagattaagactcagcaagtttgggactagaccagaggtttgcatctgtaacacgcgcccaggtgatgttgagcctgctgctccccagcttaccttttgaacgacaaagtctagaccaaggtgaggatactgtccctctcatcccagacacacaagagaggctgggccttcatccctcccatccccacctgtgggcaagttactccatcagccagaagatggtcagctcttacagcctcagaggtctaatgacgcaacagctgcagcacctgctccctgggtgcccgcctgtggggtgagtcagcggctggactgagatgacagctcatgagcatgtctcctgggactgtgcctgtggcctgggcttgggccagactccgtcagcaactaaatgcacctggaaggctctcctcagctctgcaaatcccaccagctgcctgacctgctttccccaagccctaccactcctctcgcctactcttaactgccttcgtcaccccagttaggtcaaatggcattctcttcagaatgacctctaccatctgttgagactctgttatctgccaggcagtgttgcaggcatttcccttgcatcatttgatttaactctcataagtgtgctatgggatgactgttattaccttcttttaagatgaggaaatgacactgcagtgacaataactaatttgctcaggatcacaaagctgggaagtgatggaggtgggatcccaggctggctctctgattccatcttgggcaggggacatcacatctgtgccaccaccctacttgtggtctaccaggctccaccacctccattatcttagtggacaggtggagaagcaccacctcatctttgtggagggaaatgctgtacttcagcttccttcatcctaacacccagggaaaaggaaacatcccagtcccatctcagctagctttcctgtattacctaatataagatgggataataactgagactcccaggtgaaggtcacagcccagggacacaggctcactaaaaacctgaaacctaatcattggactctatatagaatgattcgcctcccccatttctgcccagcacatccgcagtgctcttttgtagtaactggaacacaatataagctatatgtcagtgagcttgaagatatatgaatagaaacttctcaaactgaaagacaaagggaagaaagactgaaaaaaaaatggagcaccatgtttaaaaatggcaggacaattacaaaaggtgtaacatatatgtaatgggaataccaaaaaagaagaaagggagaaaagaacagaaaaaatatttgaagtaataatgactgagaattttccaaaattaatgagacaccaaaccacagattcaggaaactaaagagaacaccaagcaggatggatattttaaaacgtatacctaggtatatagtatatattcaaattgcagaaaatcaaagatgcagagaaaataatgaaagaattcagagg

SEQ ID NO: 69381 - DNA, 3429 bp, Homo sapiens
ttaaaattaggttgtctttttaatttattcatacaagttctctgtaagttctaaattccagttttatattcttaatcatttatcatgttttgaaaattaaaaaaaaaaacagttattatgttggaccattcctatagcttttgccctgtgtttctaccatagtcccctaagagatgagatcactcttgtgaaaagagcttcctgctgttacccaagagagctgtctgctgccatctttgccccagcatgacagtgtggcagcccagcccagagcactgtggctctgcttgtagccttggggagtcccactgcctagaccaggctgggtgaaaatagcctgacttcttggaatggacacagttttcaaaaggagcataaatttagtctgccaattcatgtatatgccatgatggtcaaaattgagggatctgggcaaagattccttttccattcttagccaaatgctttctaggttgggcatcagttgatggtgcaattgagaggaaattgcccaattattttgttgcttcactaacaaaatgcttactgtctttgcattgtaaaatctttttttcatttataagctccccaagggagcaaaagccatgcacagtggtgtgccaggagccctcatgattgttttgcctgttatcttatttgagcaaatattagtatctcattttgcagcaaggaaactgagggtcagagtagttacatgaattgatcgggatcaagagattaaataattgaccaagccagaaatgttttactccaaagtccatgatcttccccatgggcccatactgtggtttccctttcatatagagatggggctggaagggccattattgaatatctggtcaagttccctcacttgatggatgaacgctgagatctggaaggagtcaaccaactcatcacccaaggttcccccaacaagctagcagcaaagcttggatgagaacccagatttctaagttcaaagtcttcctcacatcttcctttatttaaataattttgactgtactacatcaacccataacacaagctatataaaaacagcaatttgtttttctaagactatacctagtgtctgtaatagcatcaagcaattgagatgttccatttgttgaataaatggatcgtaagacaataagtagtaggtggtttgattacatcctgcaaagaagttttgatgctcttcctacttttcactccctcttaagtcttcattcaagacaaagaagctcattggatgcccaatatcagccaagaccaaaggccaaaaggaaatgcacaacatcaagcctttttttcttgttcagtaataaaatctatagcaatactataatttgtttcctttacagatactttaatcaaaaagaaacatatcaaaatatggtaaattctgcttgttcattcaagttatccaattggctttagaatgccacttatccttactttcaattgtattcatttccaaatatacagcttcttagaaatgtagggacactatcctcagcccttaaatgtggaatttatcaacccctgtattgtttatttttgtgcaattagcaacatcacttctggggaaaaaaaaggacttttgggactgataaatgtatttgtgacattttcctctaaatatcttgcttctttatgcatcctctcattttatactgagcttggtctaggggaagttcgggtaaacagatctcttatgagtaattagtgtccaattaagccaaggtttcatgtctgtgtgagtccagcctctttttccaacctctgggaagaattaagtaggtcaggtctctgtttacaaagcaagccccaatgctgttgactatccaggggattttacaagttattcccagtagctgaaccactagataaagctactcaaaaaatttgtataggcctttgctgctgtgcaaggggcaacgttgaccatccagtgatctaggtccttcctttctgcatttgtcctgtgggagtttccacagactgttacatcaccaagaagcttcatcctgaaacaaaaggaaggtcacaaccctgatctcatggtcaaaagatcatgacactatccttcccatcataagccctgtttcaaatgactcaacttgaacggcagctgctctactggcaatcttttgtgcatgatttattttttccaactttgtattccaaaaattttcaaatatacaaaaaagataaaagatgaatacgaggaacatttgtatactcaccacttagattcaaaaatcatcgacatttggctgaaccgtttgaaagtgagctgcactttaaatatttttgcatctatcgcctgagaataaaaacattctctctaatacgaagtaacactgtaacaaagaattatttaagttatcaaagtagtcaaaataaagttgttcataatattttcttattatcctcttaaagtctgtaggatctgtagtgatgtgtcactttcattcctgatgcgggaatttgtgtcttcgctctttttttctgcataaatctaattagaggtttattaattttattaatttttccccaaagaacctgctgtgggtttcatttatttttttagttttggtaaatttaattcatgtctgcttttatgtttattatttcccttttcctatttttggatttaatttgcttctttctagcatcttgaagtggaagttttgatctgtttgtagccatatcttacctattttaatatgctgcgtttttgttcttagttagttcaaaatatttttgatcctccttgttatttctgctttgacccatgggttatttagaaatatgttgtttaatttccacatatttgggggctttccagattcttctgttgttgacttcttattaaattctattataggcagaacataaactttttatgatttcaatccttttaaatttgttgaggcttggtctttggctcagcacatggcctatcttggcaaatgttccatgtgcactggaaaagagtgaacattctgttgctattacatggacatatttacatcaattagtcaagttggtaaatagtgttattcactattcagtaaatagtgttgctgagtttctgtttacttcttctgtaagttattaggaaaagaatgcagaaatttccaactatgattgttgatttacccattcttcccagtttatcagtttttgcttcatttattgtgtgcatacacatttaagattgttatatctttgtgatgcattgaccctttgtcagtataaaacgtccttcttcatccctgctaataatcatttttctgatttctgttttctctgatgttaatacagccagtcttactttatttttattatttgcatgaaatatctatttctatcttttacctatttttgttatcacatgtgaagtgaatttcttggata

SEQ ID NO: 69382 - DNA, 1701 bp, Homo sapiens
gtaaacctatgagattttaatagtaattatttttgtgagatcaatttttagatcaaccttattttctgtatgcattcatgctatattatctacaacaagcaagtattacttttgagatcagatcaggaaagaattttaatttgttgagttgacttgagataaaaaaattaaccaataaattcactggctacatatgattttcaagatttctgaatcaccctggggatgagagcttttctaaaacatggggttagcacacaggagccataggtctgaggcaaagttcaaatggatgagaatggaaacgttgctctggcttacccaagctggccagtctgtctagaactaatttaagaacataaagatgacatcattgcaggtgttctttcaaagtggagcacccatttataatgcttctggctgacaaaattggaaaggagacaaggtttaaaaagcctcagatattctttttgtcgatgctcaccatctttatcttcaaataaaactatttatatttcttctgtctgccccttgggctctggttcttggttaagaaatgtctcataaatttcagaagaggaggaaaacagaaggtgatggtacagaacattctattttcaagactataaatatttcaacttctcgaagagatcacctatcatgaaaacttcagatcttcctaagtaagtcttataaaaattaactataaagtttatgacagtttccacaatcaagtactgtatgccagattggcttaaagcatttagaaatgagcagcctgaatgttggcaaaaggtcacatactggaaaagagtaatgtccaattcaaaaagtgaaaagtaagagacgctgccaatccaaaaattgaatgcccaaactttactgaattctgttaataaaatcaacaagttgttccactgtacaggcagggttactactttatgctgataatccaataagtgtttattaagcacctgctatttacaaagcactgtgctggacgctgtagagagaattgataaaatatctcaaggaacttagaaggtaaccagggaaaaggacaagtacaaaaataaataatagaactcttaccaattaacgtgagcaaccaaataacctgattttaaacatgggcaaaagaacagacacttaacagaagaacatgtaggaatggtcaggaagcacatgacaggtcgctcagcaccattagtcatcagagaaacggaaattaaaactacatcaagatgccatttcacacccactagagtcgctcaaataaaaatgattgacaatgccaaatgttggccaagatgtagagaaaccggaactatcttatattactaggggagagtaatggtacaatcatgttaaaaaactgtttggcaattctcttaaagctaccctattgcccagcaattccatttctaggtatgaatacttaccccaaagaaatgaaaacctatgtctacagaaagcgtatgcaagaatgtttatagctgctttatttacaatagccttcttccccaaaatgacaaatgtccatcaacaggaggatgggtaaacaaactgtggtatagtcatacagtagaatactattgagcaattaaatagaacaagttactaataggtgcaacaacatgggcacatctcaaaaactccactttgagagacagaagtcacacacacaaagaatacatgttg

SEQ ID NO: 69383 - DNA, 2471 bp, Homo sapiens
ggtatacaggggtaggacagaacctaatgtattacaggctccatagaggatagacttgggaggttgttcaggactgaagctggctctgggctccttgttggcttgttgccccattaacatcaggaattcttggatcttcactatggcactcccattggtatggatctcctactgtctattgatttctgcttctctctaggcattttcttttttctcttcttgtaccatctgactgactccatccatgtctccaggaggaagaatgtgaccatacttgctaattaccatggtccacgcttagggctcttaccccatggcctcttgtaggtcatcagtcaacccacaaagtggctgcctgtggtttaggtaggaccattaatcaaggggaacacagcaggcttgtgtttcaccataatcatagccaacccctctttgagactattccccacaggacctctgggatcgtgtcaagctcaatacattgatccaggtacccagaacgccagtcactgtgtctttgtccccactcagaacacattacccctgatcttttcttaccagcattctaaccctctagccttcatcgtggggaagcgttgacagcttaatacgaaacagtctcaccacaaaacaacctgctggtttctggaaactccccagctcccagactaaggcattcaggacaatccaaactcccatttccacaaattccagaatggattttcataagcatcaggaacactgaaagggcctgtaggctccacagggcacctacatttcctggggcttccctcagaaagaaggtggagggtaaatgcggtggccgcgtataaggaaaggaaaatgaaggttttcaagcctgcatgaagcctagaaagtgccactgtgtgtagccacacccataaatatttttgctttggtaaaattacaggcagagggccctgccaattcagaaaacaatctattggctgccattgccttgtgttccacactctgtgcggtacccactgcatagagaaagtcacctggaattaataggattccttgatatttgttttcaacaaatacttcctgaatgcctactatgcaccaaactccacagtcaggaacaggcctaatcctgttggtgtttttatttcagtctcagctctgtcaacctgcttgaagctgcaaggaatttggtgctcggggacaggcctccacaagtccaatgaagttggctgcgtttctgattcacttctctatccaagaataaaaataggggctgatctactcaaacgatcctgggagattaaaagattttgaagccaaaacaaaacccgagataagctgcctacgtgtgcgtgaggaggcaagtcagttccaggagccagcagtgtccgggaagggctccccgcagcctgacaggacttgtcccagcgacctcttccctcccgaggtcctgttacctgtgtgcgtgtcaggacaaagccctctgtgccactggcctccctctcacgtggtgctgtcctgcccttttttgctcggtaatttccagttaaagctcagctgtgtgtgtgtgtgtgtgtgtgtgtgtgtgtgtgtttatgtctactccactcatcacaaatacctttaataagcaaatttacctcctccatttgctgaattttatgtcttctctattccttgatgagaattgaatgggatcattccatggctttgacattggtttcttgtcctctcaagggctcacagagcacggcccagaaaggactaatggtgccggtgctgtagcaggacctcctctatttgggacagcctagcacgtgaaatcctctaggacccccagcctgcagtgggtggtcagtgtgtgcagtgaaagagcagggattccaatgttgagctgaggtgaatgtaaagggggaagacctctcagaagatgcaggtaggaacgggagcaagagtccccctaagcaatctttccttctttgccttccaccagatgtttgctaaacatctggaagcaaacacctggaccacctgcaacttggcagagggaaggagcctggccaagagaataaaaaaggaccagccacacttcactgtaagccatatccccaggcttctcatttcccctacctggggaggcaatgacaataatagacttcagaagttaattgacttaatgagtggaactccttcaatccattgaaggcctcagtagaacaacaacaacaaaaagtggagggagagaaaattctttctctctgcctaattgcttgagctgggttattgtgttctcctgccctcagactgcgacttacacctttggttctccagtttcatttctgtggacttggactagaactcataccatcagttctggttctcaggccttcagaatcaaactggaacggcaccagcagccttcctgggtctccagcttgcagacagcagactgtggaacttctcagcctccataatcacat

SEQ ID NO: 69384 - DNA, 7661 bp, Homo sapiens
ggtggcctgtaccgctaagagcttctgtgctggccctccctagctgtctgcccttttttttttttttttttttttttgagacgaagtcttgctctgtcgcccaggctggagtgcagtggcgcgatctcggctccctgcaagctccacctcccgggttcacgccattctcctgcctcagcctcccgagtagctgggactacaggcgcccgctaccacgcccggctaatttttgtatttttagtagagacagggtttcaccatgttagccaggatggtctcaatctcctgacctcatgatccgcccgcctcggcctcccaaagtgctgggattacaggcgtgagccaccgcgccccaccgcgtctgccattctgctgagatatctatgtgcctcatcacacaaaaccccaccgtagccctgagcggtcctgggtgcataaatgccccgcttacttgggaagacgcatcttggtggggtaaggccttttccacttccccatggccaggaagacaaaggactaggcccagaagcccccgtgcctaacatggtgccgtgctgccactcatgaaggcatcagagcatgcatgccctcactgcacaggtggggacccagagcccccaagaggagaaacgatttgcccaggccaccctggcaatcagtgacctgagaccagttcctactcctagatcaaggtcccttggctactcagaccttctcaagaagaaattcttgttcaaatggacttttcccaagtgcagcctgctgtgtgctccagggcagccctcccacggtgattggttaaccccgggctcttcgtgtcaggtgatttaccccacagccagctaatctcacctttcctagactctccctttcttggcccacgtgctgcccgagtgacacactcagtgctgtaaatgaggatgtcacggtgtgttctcaggttttactggaagtgcagcccttaacaaacagtctagtaaacagccagcccaggcagtgcacacgtcagcagccctgctccagggctccaacgtcagcaaaggcggggcccaggcctggaagccaaagccctttccagcacccctcctgtcactgggccagccccgcctgcctgctgacttctggagctcccacactcaaaactgggatctgggagttgtgctcccaggcgaccacattcccttcaggggttgtgcagaaaaactgaaccagaatatggataaagatgcagaaaattgagactctaaactgaaattgcatgaatggcagccggaacgtttatttcgtgcctcagtaacacaggtctcctgtctacactggtcccatttaagatctccttgctaactcatgacaagtaagaatggtttgcttgtaaaaatcacagttcagcaacagtccataggaggactaaataatttattgaaagaaagaagtgaaaactcttcaatagaaatgtgaggatgggcactcaaattggcttctttaaaatatcagcgagaacgaaaatgatgacacttaagcaccgaagctactacaatgttttgataaggggtgaaaggagccttctcccttttatcaaaaagttccccatctgtcggccctgcagaggatcatgctgatgggaaacgggctactaagtaggacctgaaagtgaatgttgtcctgagttccaaatcaaaccaccaacaataaataacaagtaatcataacaattactattgatttagccttgttgagactcagaaaccaataccccaaaatagagggttttaacatgtcgaattgaggaagcctcaaggtctctctgaccttcccctatacacaccgtctttcccaaagaagctgaagtttctttatctgcctaagatccagaccttccaaggagagcaattattctttcttccccttcccacttatcttcttatctatggcagaaaagaagaccaaggtgtgacctgacccgagaagactccaagtatcatctgaattccaaagaaagctacttacaaggttatttctgttctcccatccaatcattctccctggcaatcatttattgcccctcaatcgaattcctcttcttcccattcccataacctgttttaccggaatccaaacccccatacgttctgtaaccccacaatggtacataagtttctgtaactcattgggaagttggggcttcattctgaaggcttctgtgcatacacgttaaataagttttatgccttttctcccattaatccatctgccttatgcctctcagcagaactttaggggtcaagagcctgtggcccctacagccttaacccactaaaatgtaagtactcagaaggcaaggactctgtcttgttcccaaaggggatctctagcccaagacaggccttggcacgtggcagctcagtgcatgttttgaacaggcgagtgcatgcatgatgttgttctgccagacactgtatttcacactatgtgtcattattaagtcttttatgccccatgaaacagatgtgcttcctgttttatagatgcagaaagggaggcttggggaggttaggaaacttgtccaagggttctcagctgtatagtgggagcgcttggctaggcagcatggccagtctccttccagagcttatgcaattaaccatggcatcaacctcccctccctacatgctaccatcttcagcctaggtctctggacaggtccatgggtccctaagtcctctctttgattgggaaggggatcccagcacccctggaattgcatgcacaatggcatgtgtctgggcttatggaggctgtgctggagagagggcccatggccttcagattttcagagaaacctgggatcaaaaaaagtttgagaatcactgtcctggtttcagcactgaaaatcccacatcctgggatgcctgctgttggtagcaggcagcatagagtccccagaggagaagattgagtttacattcctggcggttctcctatctcagcaggagggaaaaggctatgggaggtgggaacagggcacaaagctcagaaatggactggggaaaggctgaggaggaagtcctgggacagaatgaggtgattgtgacagcagcgcttcaacgttcggggcagaggttccaacgccagatccctgccgaaggtacctgccttcccgctttctctttagttgacgccactgtttctgggacaagttgaggaaggagcaccaggcagtagaggtttctgaggagtgaaagcgtggtcaggaagaccccctcacccaaaattctgtgctgatgtctgtttaggcgagtacctaggccatgcggggtgatgacatctgatattgtgctggcatcatccatagttcatgaccaattctccctccctcaaccactgggtggtccctggggtgggggtccccaggaacccccaagaacaggcccccttgcagaccagcagttctggacaggtcagactctgaggcccacagtgagtagcttgcaagaacatcctgaaagtgtcccaaagccaatagagtgtcccaaagccaacagagtcaggaacatgaactgtgtgtttgatgctcagaactgcattctgagcgagatatctggagtgtgctccggggccaagttctcccgtgacagatgaggggatggggctctgagatcacccaggtcgctgctacagctccagtctggcaactggaattgatcagcatttacagctagctccagcctgctaaatcaagaaagtgaggaagggctggcctgacacatttccttcacaggctcaacaatggctagaacctcccaggagagcctgggcttccttgagccatataccgtggcagccctatggccggcaccggcgtgagtcagtttttgagattacaagggggttgctggatgcttcctcctccacctgtcttttgtttcctaaattcagggtgcttttgtccctgaagccctttggaatgtgtggctccagcttccccagctgcttttcaccctaaggaccaggcagctgcagacttccagagacaacaacagggaattataggtgtgagtccttcgagaggcagttctcccaaagcaagccccacttcctaaaagcagccacacttgtcgctcaagcaaggcagggaggagcatggacaatggtgtcagagccactcccttttgaacatttgcctctacagaacctggccggggccatgggatgccctgtttggctacctgaggcctgaatctatcgggatctgtaagaagcgaccactgacattgagaatggcaccagccatctccagaaggagcaggtcatctgactcactggccacacacttcgcttgtggaagaaagcccgaggctacctggatgaagaaaggcatttgtgctaaattaggcagtttacagacctaacaccataaagcagccacagggctcccttctctcctctcaaaattcttaaggtgccaaagacgcccccacccaccagcctcttcaattccaggcagaacccagccctgtgcctggctgtcatcaagggcaccaggctggtgttttggcaacaaaccagctttcaaagtgacatcaaattgctgtgaatcacccgatctgattcaaatgagggcttaggtggatttagagatagctgattgcctcagatgaatgcacaattgcctcagaaagtaatttacctctgggagtttcaggtactaaacatttagagtttgcatttaaactctaaactggggcaggggcagctattcttttgctggcaggacccagtgaaggctgatcccaggtacctacgactcttctgtgattggtgcttccctacctccctgccccaccccatctaagcacaattcattttatttcaaagatgaaaaggaccctcgaagtcgtgacttggtctccccagtcacgcccctaatgagtggagccccgtgtctgtctgtgttcttcaccaggagttttttccatttcctgtgacttttgttgctgcgaagttcttcctggtcctgggtcacaattgatcatcttccagccccagtcaccctgcaggtccccatggtggaagtcaactccccttctcatgccatgttccttcacagatgtgaacagcactctctgtcttatcttttaaagacccaaaccctgagcccctcctactaccaaaccatggttctagagctcttcatgtcttatccatcctccctctggcttttcctattgggggcctccttctcagagggtagcagctacatacaccagggatggactcaataatgtcacctcccttgtttcagccagtagacctctattgatttaatctgaagtcacattggccttttggcagcctgtcccaatggtgactcataatgagattcatttagagtcaatcaaactcttataaaggacactgcctgaacatatccaacaaagcaggtagctgttctgttgaactttggagcaaaatgtccgacttttacatttgtccctgttaaatttctccattttaatctgccccatcattccttccctgtcattcctatagttttctgtcatctgggaacctgttgcaagtgccttctgtcgattgatccagatgattgtttacagcgcaattttgttatggaatcacctaactatgtcagcctacagcttgctttcctctgccttgttcagaaaggtcacagaaggctgcttcttcactgctttgctgaaacatcttaaagtgttgggccaggagaagtgttagagaccatctgcttcaagcccttcatttttcagatgaagaaactgaggccaggtgaggtaaagaggctgctaaaagatcatacagtgacctggtctgcagcagagccaaagatcaggactcagagattcccgtacccagggaccctctggttatttgcccagcaaggaaaccactggtacactccatcaagtctgctggaagactccaaaacagtggacaacagagcccctgcccttgggaagaaaggctaagtgggccctgaaaagtaagtaatcaactgatgactagagaaacagaatgtggtccagacatacaatgaaatacagtccagccatggaaaggaatgaagcgctgacgcatgctacaacgtgggtgaaccttgaaaaattatggtcagtgaaagaagccagtggcagaagaccacatattgtatgattccattcagaggatttgccacaataggaagatccctcgaaacagagaaagcaccttcgtgggtgccggggggctggggggtagggggaaatggggagtgactgctaatgggtacaagatttctttttggagtgacagaaatgttttggaattagaccatgctgatggttgcccaacaatgtaatgcactcaaaaccactgaactgtgcaccttaaaatggttaaaatggtgaattttatggcatgtgaattatgccttcatctttaacaagagcatcagcctgtcttcctgctctctggtggacagtggagaagaaaggaaaggaaggaggtcaagaacaaaccctttcctcctctcccagctgaagagctttgcagacggcggggagggcctggaggggccgctctctgggcagctgagggttgcttttccacctaaagggcctgtctgccatgtccttcctggcgcatcctgagtgtcccctgggctgtggtcctgggacctcccccactcttctgcccttctgccgcgatggaaactgggcctccctgggctgctgctctgccttggaaggaaatgggggacacttgcttggctcttcagcacccgccccgtgcttccgcgtttgtgtgaagggcaaaggttttagcgatctcctgccaggctcagatccgctcctctacacggcacgccttgctctggccaaggctccattcggaggaattcgggtgcggcacagcgtcagggtccagtgacagcagcagcaggagtcacctgggaggcccccagctggcctcagagcacgggcaggaagaggagccagaaactgaacagcggtggggagggggtttggataaagtatgcagaaatcaccgtggagaagagaagcaactggggctgtttgagaaagaaaaaaaaaaaaattaaatcctctgccagtttggaagcgcattgctttcatgtcggcctggctgattcccgcgtgggcgtgcggccctggctctggcggcctgccggggagcggggagcgtgggtggccttcccagaacaaaagttcaggctgcaggagtcacctgcgggagagccctgtcccctcccaccagggaccgctccgcccaccgcccagggcagtgagcaccgcagccaggtagccctgctgccagggagggagggcgaacatgcactgcgcacaacacacaacacatgcacacaacagacaaaagacaacacacacaacacatacaacacaaatacaacacacaacacatacaacacaaacacaacagacaacacaaacaacatacaacacatacacacaacacacacaacagaccacacacaatatacaacacacactacaaacaagcacaatatactagacacaatacacaacacatatacaacacacaatacacaacacacactacagacaacttacacacaccacataacatacaatatacaacacaac

SEQ ID NO: 69385 - DNA, 1403 bp, Homo sapiens
  modified_base (28)..(37): a, c, t, g, unknown or other
acacacaacaaaccacgcacgccacaannnnnnnnnnacaacataccacacaacacacaatatacaacatacacaacaaaccacacacaacacacaccacaaaccacacacaacatacaacacacatcacaactacacaatatacaccacatacaacacacaatatacacaacacacaccacataccacacacaacatgcaacacataccacacacaacacatacaaatgcataccacataccacacacatacaaacacatgccacataccacacaaaccacacagcgcacaccacatacacaacacacaacacaaaccacacactgcacacaccacacaaacacattacacaaaccacacactacacaaaacacatcacacacagcacacacatcacacacaacacatgcaccacatatacacccacatacacaccacacacaccacacttcacacacatcccacacacccctctctctctctccttccctgtctctctctgtctctctgtctctccctccctgtctctctctcctcatgcgttctcacccatggagaatgtaagtgagaggagctatttacgtcatccataaagaagaagggaggaaggaccacagaagcccactctctatcagaagggccagagctcagggagcgcctttgtcagcaagatgggaaccagcttttacggagcactttgtgtcttcaaagaacttcaccaacattgactcattaagccacccacacctctgaggcagctggggtggcttggttctccctgtcagagaggagagaggtcaacgctcacctcagggcacagggcaaattcaagagagggcaagggccagtgtgtcccagatgacccggccgaggaacctgcttctgtgtcagggaaggggtcaagtgaggtcggaagtcaaggaccagctctctaggtgctgaagggttaaggaaggaggaagagagggtggccggtggctggtggcatcatgttaccttctgcctgtcatccagagagccaagctgaacaggcatcagggtgcctgtgaggaggggtgggcccagccttcctggggcagcagcccctccactctcttttcctgtgctgacagagaagggagaagaggtctcagagaggctcttggaccgagttcctttgttcctcccttctaggagtggtgcatttttacaatatcaacagtcctcactcccaggcaagatctctgtaatgcatcacacagatgaatccttctgtatctcaaagttcacacacagtatgaacttaacagccaacagggagcttgtttttatgctaatggaatggcaaagggaaagttcttcccaaatgaaagagctttgatgtcctgtatttctatatgtgtgtgtatgtgtgtacacatat

SEQ ID NO: 69386 - DNA, 1367 bp, Homo sapiens
ttttgaagcggtacacgtacattacttagcaacctggggtggattgccagcagaactaaaagcagaaatagttacaagatttaatttaaaatggtgatttctgtgaagctagcctggggtggggtggccagggcagggaactcttgttttccacaagaaaatatttctatacgggttgatttttttcccagccatgtctaaatcacaaaagaaagttagactttgtattcgaaaagcatttgggctggttgagtcagtctctggggttggggatggtggcccatgaaggtgactccaaaagctcccaaatgagtctctgagctgctgctgaacctgggaccaggtaactttgtgaagtgaatgaaccaatgaataaataatgaaagaagaatcagagaagtcaacactggctgtttgatatgcacacggatatgccagtcttgcccagggacccaaatccaacctaaattgaaaggcaaaactgaatatagcttcacctcaaggcgcctcttcctctcctgcaccccttttttttaacctattctaatttcacaattaggaaataatacaagtattgaaagttacatcatacataaaccatttccccaaatgtccttggctggtgccatcacccaggaactcccagggtggctggtgatcacagaagactccatttagaccactcagcagggtacgccaaggacagtcctctcaacctgcagaactttctggtttaaaacaaaaaacaaaacaaaaaaccactgcttttaagacttaaatcaaggtcttcaacagaaaagccagagacaaacaaaaacaaacaaactgattctgttttccaccaagctcaaagagcctttgccaaagtaaatcaaagcactccagcagccagcttattaggtttaatcatcaactgtgcttatcagatccttcatttgtaagtcccttgaagaaaaaaagtgcaaaatgattccttttgtgctttggagattgatatcaaagcaggccttgaggtcaactacagaggtgctttaagtggaaattataagcaggaaacaaaatgcactcattcaatttcttcaagttgagtggagacctcctggatgccacgtgtcagctttacctgctagaaacacacgctcacctcgctgtccaagaccctggaaaggggaaccccttgaattgattggattttgctccccttggccaattcttcactatggtttagagatttgtggtcttccagtggcattctactcaatcaaggtgaccagccatctgttgaactgtcttttccaacctgatatacccaagtgttgtggttccaatttcaatattccctcctagggagagcaaatgagaagatc

SEQ ID NO: 69387 - DNA, 3479 bp, Homo sapiens
gtaggcactggggaagtagctgccaaatacaaaataaaacccaaaaaatcccttcttccctggagcttccactctacaggtggagacagagaggaaacagataaggaaactctaagagttatggggtaaagacagctgggggggcggtgcgggtggaggggttgccttggtggaaaggtgatcttagagcaaacagggagagaaggtgcagagggagctctgtggttacctggggggaaaatggtccttctacgcagagggagtgggaagggcctagggggaagtagggccagcttgatcctgggagccgtgtggctgtgggcatggagtaaatggggacgagcaggtgagaggtgaggcaggtacactgaggccaggtggccaccaggagcaccttgactttgcctctgagtgggatggcactcactgctctgtgcaaaggaaagtcatgactggacttgctttttgccagacacactttgaggccaagagggagcagggagaggaatgttgacatcattgaggtgtaggatgatggagtaagagatggacatggtggagtgggagcagaggccagggtctagctaggtgtcaatggggatgttactgacagaaagactctacgattcctccaggtggggcataccctcaacatcagcccatggatggatgttcccagaccccaggagtctcaccataaattctccctgggacagactgtgggtggcagtggtcgccatctgtccttggctgacaggtgcccagagctgtggcagtgtcattcccagcagccccaggattaggctgttatctctgtttaccaacaggaagagacactcggtggaggattcaagctgatacaggagccgtggattgccacctgcctcttctcctatgcctgtcatgagtacacacaccagtcctgtctgctggccaagcccccttgctcccaggtgggagaacaatgtgtagaagcacaaattataaactgattcttgtgttctctaaagacagtctgtttttcagatcatgattaggaatgagtaaacggtaagtctcaaagttttcaggggcttattatacagggcctatcagagtaaaaatagaaattacaacagcccaacatggaagaaagttttccttcctcactcccaaacttcaaacagagtccgagggttaggatgtgggcgtagctttttggggggccacaattcaacccattccagctaacttgattgagtattgatgccttttaaacaagcaatggagtgatcatcggagatgaagaagcaatttaagctcaaccctcaaatgcaaacccttccaaagcaaacatcctaggaggtgctacttgagttaacctcggagatgattaacctgggttttgcaccactgccctgagccattttccacagaacagaacagaacagaattctttattatgtttctcaagatgctacttttctacactgcagttatttcaggcatgactcatgttaaaatgagtgtgataagatttcttggtaaaacccctgggaggctttgagtagagagtttttaacagtagctaccccaagcaaggcagctggagtgggttgaatggttcctccccaaaagatcatccctgtcctaacccttggactctgactgtgaccttatttggaaaaagagagtttacagatgtaactaagtttgagatctcaaaatgaggtcaccctggattacacaatgggccctaaagtcaattacaggcatccttataagagacagcagagaagacacagacacagaggggaaggccatgtgaaggcagagaatggagtgacgcagccacaaaccaagcaatgcctggagccaccagaagctggaagaggcaaggaagggactcttcttcagagggagcagggccctgcccacaccttagcttcagacttctagcctccagaactgggagagaagaaatgtctgttgtttgaagccacccagctgtggcactttattacggcagcacgggaaatgcatacagcctccaaaagagaacgaagcccttctgagagcttgattccagacatgcaagaccctgagcccaccgcgcctgggtttctgcctacagaactgtgagataatccatggttgttttacgccactccaattgcaataagacagtgaggatgtcatgtgagtgaccagcaaggcatgtggcccaaccagacagccagggaaggcctttaacgagtaacttgaggctgagagtgaggtggtgagttgtggagaaagtcccagctcagggttcactgtggaccaacagctctttactgtggggtactaccttcctggagaatttcctggagagtataaggcctgacgtgggccttcaaatatctcaacaagaacaataaatccctccagaaaaccatattactccactttctttccaaaggaaattcaagtctgttgaaatgcttgctctaaaacagtttccagtgatattaaacaaattcgtggctctcagaataccttgggtgatgatcaataagagttgtatgtgctttacatgctgataatcacacctaacccacagcatttgtctgatgcctaagtgggctcagatttgcccaaggctctggtccaaggacctctgagggacacagcctcgtcactcagacaggagagcccaactcagtgacaaacaaaggccaagggattctgcacatgaagacaaaacagagtcttccttctcaactagagaatggcttatctaagaaaaaaatcaactggagagaaaaaaaaagtgaggatgtcagcatttaacaggaatcttgaaactttgacaggaagggtgacccttttcggtcaatctgaaatgtatgcagacaggtcacagatatattccaaatacatttttttaattgctaaatatgtttaaagaagatttttaaaataaaactcaatggaccagtttatacactgcaaattcattacatttttccaaccacgcagagctaggcttaaactcaactatactgaaggttaaactcaactattaccagtgttattctatcccaaagaatgagccaggtctaagctgatgtttcctcctgttgtgacaataagaactttccccattgtcttccacctttccccttctcgctccatttccacctctccatcgcgcagggaaggcagattagagttcactagaaacacaatacctgaaacataaaggcctcacacctacccgcctaggagtacagctcagatgatctttctaataaggagtggcaatggagcttgcaggccgaagaaactataacttgggtgtgattgacaagagcttaggctaacacatgcctgcttctataattatattgtttgtctagagagaaaaaacaaaaaaacaataaatcatccagcggtgcatgactggcttagttctctgtctctctctcactgggaaactcacgatgaagttcttccag

SEQ ID NO: 69388 - DNA, 930 bp, Homo sapiens
taattaatcaatcttaggcattcaacaaatatttattaaacagttaaatgaatggaggcaagggataggattggtgcatttaagttcacatgttaacaaacccccataataagcttcagcagttgtacaatttgttgttggcatcctaagttctgaaatgcaatatattctacattttctcccccttatttcctctcccaaagtttctaaaaaatgaaacaaaacatccgtgtgcatgagtgatccctggcaacctgccatagtccacattccttctctctgagactctctctgatattcagttcttggcctccacttgtccccagatcatgtccagacggctgcaggctccaaatgcccagaagtcagctaatcccaggatcggcaacaaaccttggctctgggcagacctcttaccttttcaagagctttttcattgggtctttgattttatttcaccaactctgtgagtcaggacaggcatgttctcgtattctcactctctttcatacagacacatacatgcacaaacatgaacacttaccccacatgctcatgctcacctcatccaaggaacccaaggccctggcgtccagagaatgagagctcccggggctagctgctgagggtcaaggccgaaaccagctcaagatttccttcccccaccagtgccgtccctgtccccatgcagggcaatggtccacccattcccaagaaaaggcctccaactcccttcgtccagttccctgcccctgggcctgtcctcattctcgctctgctgaagttgacacaggcctcgctcctgtgcaggggtgggacgcggtgggggagctacatttagacaaggaaagggcccccaggcttctgagtgcgcgtacacacagacaggcctctgggacatattctggatggctctgggcagatggctgt

SEQ ID NO: 69389 - DNA, 2056 bp, Homo sapiens
ttcaagatgaattttcatgttttctatacttttttgtcatttccagattttctacaacaaacatttaatcttttataataagaaaaagatacatgttttaaagatttttaaaggtattttactttttttaaaaaaagatattttaaaagactttcctattctgttttaaatcaggctccttggccctcccttattaactctttaaatgcatgcaggacattcgctcggcagccttcttctcctgggtcacctgtacttgggtttgtggtgaattgtcaagcatgtcagcggggtgggactcctgcttcaggggatgcctccctggaattcactcagagcggttgggaatatccagcaaagtctggggatgcaatgtgtggccaaatcccaggtctccatccagaagcccctgtggcccctgctcagagtccatggagtgacctttgtggccacagctttccaggaaacagacgtgtgtgccgggcacctccttctcagcccacccagctgtctggtggtcagcgagaggagaaaaggcagccccaacatcaaagacatagcaactgcctggtgacttcctccccggccagctggaggtgtcagctcgaggccggactctgtttcctgctgccagggcagctgcttccctcttcccttcaactcagaggtgaaaggttcgcaccatctgcaaacgccaccctccagcatttgactcccacaccctaaacaaaacagcaaccagacatcatgagcccaaactgaaacccaccccccaccccaaggatgggcaatgtggagagacctttgcccaccaacaacattttcccactacaccccaaaaggaagaagccatcctcccttaaacgccttccgatctgaccctggatgctcaggccgcttggctgttcccgggtgcagggtcagggaccctgggaggctccgagttgctcaatgcctctgagcacaggctgactctcttcacagcaatctggggaatttgggctgttctggggtggagctggggacaacggtgtgtgtcgggcaacagcagcggcctcgacttgttctggcttttggctctgcagggaaatccaggcagattgggactgaggaaggctgggtgggtgggcagggctggtggacatggggagcaaggtggtgggccaccccgttgacagacctctccgggagagaagcctgttggagctgggcctgggcgcaaagggggagagagggtgaggcgctctgggagggagccctgaacacaagctgcgggaggggggaagggaggaggaaaggggacgggcctgggtccccctgtggagggctgagctggggacaggcacagagcagaaaggaagccatctaccctttaaaatgccttcaaaaaaataatcccaggactcccttgtaccttccaacttgcctgtcggcatctattcagtgtttttcgtgtggcactcaaagaagagaaacacagtctgtgccacggcgggctggccagctgcggggaaccctcccatttggagggaaaatgaagactgcaggatggtggagagaaacgtgggggcctcctggccagccctcttttccccggctccagaaagcactatgagaattcctcgagccctctcatgtttatagcttctgacccacacctggctggtcttccaggtgggtccagttctttcctctctcctagcacccacccagcccccaacacgcatccccaggatcccccaataccacgcctccaactccgcctctggcgcccttaggttccatgcgagggttcctccggcatgcgccatggaagctgtggctcaggaaagcctcattcacatgcttggcaaccgcacactggaaagcagccagcagccccaggagccacacttcacctgatccatccacaaaatgggctgaacggacccaaggcgagagagccaggtccagccgcccagctggccagacctgtgcactcgctagggcacgatgtcagtcatagcctcgactgttgttaatcccacagacaggtggcttttggtcccaaatttgt

SEQ ID NO: 69390 - DNA, 1292 bp, Homo sapiens
gttgttgatgagatgccttggaaattcttgccaactgtaaaatcaaagagatggcaaggacaaaccacgtgccttcagaaagtgcttccccaggcacctgcatgctcactctcttacccatgtctccacccctaatccctccaatgccccaggagggggctgggtgagtgttgggtggcagtgagacccagtcacccagctggtgagcaggtgagccaagaccacacccagggccgccgtcctacctcccagtcaatcatgcatatgggagatagataaagccctaaatgctcatttggagctgcttgagaagagaatataattcatgggccaaagatacagaaatgtctttcccagtgggaggcaagccggtggcacctgctctccagggcctaacaccctcatttccgcctctccggtacctgatgctatcagaggattgactccctctaaaggccaacctgagaccttcactcagctcaaaatgtggttcagggagagaaactaacaaaagggaatgggagtggggggaagaaaaatcatctttttctgccaccaaagaacagctgcaaacatagagaacgtgaagtagccgggaagtcgtcgtggctggtgtgaattcagtcccaggggaatcggccgcactgaagtgctgagcgaacgctgcccagagaaaggcaagcccagcgaaaaggcaggcccctcccaaggtcaaggcttcctcgattcggaggcagccttccatcgcaaactgcacccccgcccacagtgtcaggctgcagcgtcaggaacaaaaccagcagcccagagttgatgaggcgcaggcggtgcccaggcccatgggagggttaattaaggccgccctgagctgcatacctgagtctcaacacttgggctgaactgcagacctgagtgccgaggacatggggccaaaagccgagaaggaatgtgaggctgcccacgcggccatcttggccggcagccacggctgacctggaggggtgaaggcctgggatgccattcctccacagaagactgcattagccagggctggaggaacgccaaggccatgacccacagaagcccatgagaggctgaggcccagcccggcccatcttctcaagcctggcttgacccccacctgtgacatcctgcttggtcccggaatcagtgtgatgtgatcaggaaaggcgaatttctgctgtgtatttgacagaatatcaactcagagtccctggggctgccacaacaaagtaacacaaaccaggaggcttaaaacaacggaaatgtat

SEQ ID NO: 69391 - DNA, 1793 bp, Homo sapiens
aatgactcatttcacggattagtaattgaagacattattttaacattaaaacaaatcagatcactttcaagaagaaagcaacattctcctgaaattctaagaaaaaggtgaaaacctcaaagcttctctttgggggatacactttggcaagatgttggagaatcactatccacaccaacagatctgagatatgcgccgagatttatttacaatgttcactgcagcataattgtgcaaaaaaatggacacaatctaaatatccaacagtagcaaattggctcaatcaattatgatatgatctcatatgatgaacggggtccattgaaactgtttccatgaaaataattttagttgcaatcacttttttcaacatctaatgtaatcatgagaacatattagaaaaagtatcgagcaggcagtcagctaaaaggttcccagtggcagaacagctgaaggcggttcttttctccttgatacttttctgaactttcatttgctccacagtgactttatgattttctactcagaagaagaaagtgtggggtttgtggctgctgtttggtttggcagctcgctttgtttttgaaagagaagtggagcggagggagcagcgctgttcgtgtagagggccttggggagacgcctgggaacggggccccttcatgccttgtctgcatgttaggaatagagacgtgaatatttttacatcagttttaacacctttgcaggcctgtaggttggaaatagctggtcaatgtctggtgcgtcccagcatgggaggcgcgtccctctccagccccatgcgacattctcggggttgacttggggtcacagttgtctgctcccagtgtttgatcagcttcatttccaaaatgggtcactcacagggcggtgtgtgatcatgtgtgcgacgtggctcttcaaagctgtttcctggttgggaaatcttcacacacacacaaaggtcgagtctgctgtctgtccagcgttgacggtgcctgccacacctcacgtctgcaccctctcctgtccccgcctccgggccttctgcccatagccaggtgtgacagccagggctgctgcctcccgatcaggcagtgcacagccctgggacccccagggacacagacctaagggaaagtgagcccccaaacctgccttccagccagcctgcttggaggaaatgccctagctttattgaacacttaattacttaataaatattagatgataccattctccacaaaaaaaaaaaaaaaaaaaaaagattgaaacccagagagagatgggcaagtcacgaaaacaagaataaaggggattattcttcaaggtaacaggatatgaagagaagtgcccccaggctggtccgctggagcatttaggacagcagaagagaggcctctttataatctcccgaccggaaattcaccctcatcgctcccagcttcacatacaacctggaactccgggggagatggggaaagccggggggcggcccctgtgacctggctgacccaggtctcatgacagaatgtgaaagactcctttatttgtaattctcagtactcccaagttgtaagccccgattttacctacaggtaccttttgagtatttaaagatgtgccaagcacacagtagagaagtatcataggtggagcccagggcaatgagctcaggcctgagtaaatcagcaccatctcccaccagctgtgtgacctcaggtaggagattcaacctctctgtgcttcagactacacagctcccaaacagacagaattgccaacctgcccca

SEQ ID NO: 69392 - DNA, 2227 bp, Homo sapiens
tggaaggagccaagagtaataaaaatggcaggttacctgccttagtttaaactgaataagcaaagccacgatctcatctgagtcccgtacaaggcacaccactcataagctaacttttctcagcttctctttacaggccgttggcgagtgggccctccaaccgtgggccacagctcgtgaatctgtttgttggggagtcatgttcaaacccaaagaacaaggcaaaccctacccccaaggaacccagataactccttatttcccctttttattcttaaaaagtacttctcccaggttccggcggagtgctgttctcattttagaaggctggctaactgtgggtgcaagtcatttctcaaagcagtgtctgttcttttctttaatggaattgttttgttcatttgtttcacttcctctttggggttcccaaggaacatgagttccttttttcctggtattagaagtgcgtcagttcaagtatgagtacatgaaaagtgaagaataagaggctggctccattaggtgatgacatgtacctgctatgagatttgggaagccatggcctgtcattgttgctcccgcattattgtccagcttgtccccagaatgagagccagtctctaaagacatgcccatgagccgggcagcacataacagagacagggaagaggtcgcttgggggctttgtcacctggaagaaatcccaaggcttatcctaaggacatggaaagctgaagaacagaaagtcactagtcaatggcaggaggagggcatccaagtccccatcagcctagaacgcagccgactgacaagaggtcagtgccaccatcatagtcctatgctttctctgcccccggtaggacttcgaactttctgaaggctttgggtgtgaatgatggatcctccctatgaagaggaccacatctgatgtagtagtttacaacatctcaacatgattcaaaaatagatcagcaagaacatatttagcaaaaaaaaaaaaaaaaaatgcaagtcatcagatgcaaatgatgacatagaattcttcccaggcctagatatgcaaacagaagcagtgcaagggccgtgtacacaatgacagtgtgggtgcagataagacagtaatttcccggagagctttggttgatggaattccacactccatgaccacacagcctacgagggagtagatcacaatctcacccagaaccacaaatgagcctcctggtgtcagttaccttctttttcaagaatgacgccaagctctaatccctcctcactgagtctttatgagcttaaagtaactgcattttaaaatctgtcacatttggacattttcccaaaacccttgctctctgttggacgaggcacgtttcatgttgactattcccatgtcccctggttcttcttttcaatccaaaagctgggaactttctactttgaccaccagagcttctctggcaggcgattttccactgctattttccttgctgtccttctctttaaaaaccaatagcatatgaattcaggatgcggggatatcttgtgcgatgcagtaacaggcagagtgaggggcagcagtgggctagcaaagaggtgaagggtgaaggaaggcctgggagccaggcagacccaccccttcctgagtgtttcctctgttttctcatctgggctgctgagattaaggagataaatgcatataaagcactgaccgtgctttctggcccagggcaggactctaaccattggttgtgcccatgctgaggactaaccttggcccgggaaaaggctggaggaggcccacccaaaagcagatgcttcccaaggcccggtcactgcacgagagccaaaagcacacatcagatgggacagtatgcaatcggaggggacctgctctcctggaaaagccaccctgaaagctttcattggccagatctgaaggtgttgaggtttgagccaactgcaaagaggtaaccgcagaccttggttgccagagaagtcactgtcttttccaagcagtagaaccacattcgaatcccttggagcttgtcaagagccctcaaaatcttactctatgcagagaccgccaacaaaaatgtgtcccctcaaattatggcacaaacttcagaggggaggtaatttaatgcacagaaccacccaccagggaaggacagtggataaaatgagaggttcaagagacacacggtgaaaagtgcccacagagaaattg

SEQ ID NO: 69393 - DNA, 2176 bp, Homo sapiens
aggaggttgctctaaatgaagtgacacgtctaaatgtaacctgtggaccctgttaggattctcattcacgcagaccactgtaaaatgtcatgtttgaaaaaactaggtaaacgtgagtgagcatggactacaaaatgatactggaaaattagtattagtgttgttaggggtgataatagcatatgtaagaaaatccctaaaacgtttgagatgtattctgaaaaatgtagaggtgaaaggccatgatgactggaattcgcttaggagtggcgggagagaaaataaacgtggcaaaatcttcctgttgaatttacccggttgtgtaggggtcagggctcacttgactattttctcccacttttttgtgtttggaaacaatttttttaaagcgtgttcatcggctactgacacatcatgctaattgaagtgttgggtgcaggtttaaaaagtttcgagggaattggtgtgtccgtgaacaatccacgacaaacgtggtggggcccgcgggagcgctgcggcccaagacagtgtgacaagcgggaagatcacgagtccgcaagacaccaagcctccagaaatgctccagaaacgctccagaaagcctttaaagaacggatttgaacccagccctcccacagcggcttcaccctggactccacgaaacgccagcagatccacgcgagaaccacacacacctggggctggcgccgctggacgccgcggcttcacggagacccagggcccaagcagagccaaggagcggcggcaaccgcgggggccactcggaagaccgcggagccccggccttaggcgccgtcgcggctgccaggcccgcgcaccttccagctgcggtgagcgcgctgcccttatcccggtgcctcacctcttccgcgccagctgcagacgcacctccctgtcctcgggcgtctccctccgcccctcctcctcctcctcttcgtcctcagtcccagctcggcacggcgccttcaccacctctccgaagaacgtggccgccatagccgccccgtgaccggctggacacaactgcagcgccgcgggaccgcacgccggcttgcgcgagaccacgctccctcaccgcgcgggcaataagtcccgccccgcacaggccacgccctccgcgcacagcccaagctcgcggccacacccccaccgcgcgggcgctacgtcccgccccgcacagggctcgctcccaggcacaccctgagctcgcggccacgccctctacaccgcccgcccgcgctgtcatgccctgggccagcagtccccgcagcttttttgtttttaaattacagattgggggagggggtctcgctatgttgcccagactggtctcgaactccaggactctagcgatcgtcctccttagacctcccaaagtgcttggattacaggcctcagccaccgcgtccggcccccaaaggctttcattcgcagcttgagccctgcgggcgccaggaggtgggaggactgcgggctagaggggcagggggcgagaggagggcggggcctccgttcgtggcggtagcggaaccaggggtgcaggggcggagccagcgccgctggccgtggcgtccgggagctgtggggccgtcccctcatcgtccgtttccattttccttctgcgttaggagagactggggtagcattagtgtactgagcacccgctccaaatttcgactgcccaggtaggtggcggcgcggtggtactgagggcccccgtagccaggcgcgccctcagacagcgggcacgggcggacgcaagggcagcaagaaatacagcgcttcgtggtggtataaaaacgagacctttactctggcaataggaattcacatttcaaaagctgatgattgtcaaggcgatttaaaaaacatttttatgagtgtaaaaaatagtgttttaaagttggccattttctaatacaaaatgtttctttttaaatagcctttaataagcagaatgtgtgattgttctttaattggttctctttaaaatgtgctggaagacaaagttcgaggagcactgtttcaagcaagagaaaaaggggacataatttaaatgaaaatgaaaatatgcagtaatgcaatgaaaaaaccgtttcctagatttagttgtaccgaaatacatgacatcgcctgcattttgtgactttgtcag

SEQ ID NO: 69394 - DNA, 2471 bp, Homo sapiens
ctattcctagggaacaagtggggggacagacccgggcggggcaagagcagcgaggccaatcagagcgcgagttacaagcgcggtggagcggggaagcgaatgaaaccgcccagttgaatggctggctgcgcacgccacacccccgcagaggcggccgcacctggagccccacccctgccgcaggacctccgcgagtcgcccccaccgctccgccccgcgccgcccccaatgactgtttcctgccaaaacaaacctggccgcctcaaaaacaaaacaaaatcttcagccgggaacgcagctatccccgggccgccccccagtgcgggtcacactttgcaccccacgggccggggtccccgcgaggggaaggggcgggggcggggggcggtgcacggaaaacccggggagcaaacgtgcccaatgctcaccaactcctcgtagctcctgttgtgctcgttgccctcccagtccaatctcttcggcaacaactggaaagacacgaaacgcacacgagtgaccacccctccggcgcggggggggcggggggcggggggccgggggcgggcggcgggcggcgggcggggggcgcgggcgagcatccctcagggcaaggtcggcaggaggaacccgagggagcgcggggacgggcgcgcacagacctggtactgctccagctcctgcaccagcacctgcggccgagagacgcgcggtcaggggtggggtcgggcccggggcgctcccgtttcacccccgcccaccacccgcgacccccggcggcggggacactggggacgccaagtccgcagccgcccgcgggcccgcactcacctgggccgctctccgacacgggcccgccgataggtaccgggcgataaggaagtacagctctgcgggaagacaaggagtcaggtcaagccccggcggggaggggagggggacggggccaggggagccgggggagcccggggagccggggaagccgaagcagccgggagcgccagggcgggggtggcacggcctcgcgtcttacccgactcgatgagaggcaccgggcgtcgggcggacgacggctccgccatggccgggcgcggggcgggaggcgggagcgagcgagcgagcggagcgtgtaggccgcgccgaggcctgaccgggctggcgtcccctcttctcaggcgcgcgccgccgccgccgccgccgccgccataccgtgcgcgccgcctggaccgacgcctccgcgggggaggaagtagttcctccgcgggagacgaaaagtagtccctccgcggggggcgggggtttgcgccaagagaggaccggagctcgtgtcccgcccggggaggcgaacctcgctcagctctctgcctccggggactcgatgaggagaaagtgacgcggaggcaaagacctgggcgccgcagcagcgagtgggggaggggagggcgcgtggtccgaatccctgcgcgcaatgaggcggctgcccgggctttgtgaggcggcagcgcgacgccgggtggcccagcagcgggcgggtgccgggggcggaagcgcggccacaagagggggcgattcaccgccgccccccgtgggacctgggtcctctacgcgggaccgcaggggccccgagtcgcgggttgggcaaggtcgcccgctccgggtcgctcggaagggtcatttcacggaccggtcgtctggggccagtgcgtcttgccccgcacggaagacccctcgcttcgaggacaggaaagcttttaaagtgaggattggctcgccgcgcctcccgcagaggggaacgccgcccggacccgcgctcctggggcgggggcctcgtatgctggcgttgccggagcgtctgcggcgctgaaggctgccgagacccagccacatcccccacaagccagcagcccggcagaaaattacataaaatgcagcgcttcgccgagggggtgcgagtcgggggagcagcgcgcagctgcggctgacggctcggctggatccatccaagcatggacaggaaaacgggactgtggggagagggtggtgcagacgggccgcagaccctccttaggaagagaagccggaaactagggagtcatgtgcagttagaatcctcttggaagactagtaggatgtgaggttggagaggtggacgacgaccagaaaattcccttgtcttgccaggcttctgacctaactatgagtttcctccgcgcatccagcctgccctgctctggcccctaaagtacagcagtaacactcagtggtgtccctgccttcctggaatgcgcgttaacaattctgattcttactcatggcaataacctacacaccacatagacgttaaatgtggttcgggtcagactctagggcaggactcactgcctgcaccttgtcttggctccaccagcttgaccttgagcaagtcacaacctgtgggtctcagtgttccttactagtaaaccgtaggtaattcc

SEQ ID NO: 69395 - DNA, 2355 bp, Homo sapiens
cctggcctcggtgctatcttgactcttttattgtcaaaaaaggaagtacaagcacgaattaaaagccaagcaccagccacaatgtacgcaacgcaaagaataaatttcctttgtagacttaatatttaatattttttgtcgtcctaagtctcctaacatctgcagcagcattagtgtgatatagttctataaaccaggatgaatatatccattacatttttgcctcgaccactagaaaaattatttaccgtaattattaaagtataaataaagctccaatagctaatcaaaatggaagccccgcattaagaagcagtgtagcctaaggccccgctgcatcccaatgcgcgtttcgaggcttaccttcgctgctgcctttttcggcttcgcttccacttttgcaggaggtttctgaaaggcaaaagcagcactgagcgtcctcacccgggacgacccgcggaaaacgaacggttacggggctcgctttacttacagctgacaaccgcgccgatctcctcttgggcttggagaaagaaaaaggagagtcagcgagaagagaaggcaggccagcggctcacgggaaacccaccaccccccgcagaaggcccgcactcacctcttccttggcggcgccttcggcggagctgacctgcggagacggagacgcacgaatagaggcgggccgcagtcccaggactcgcgggcccgcccggccccgagaacaatgcccggccgcgtgacgtcacggcttcccgccgccccgttcgaatagccccctcagctcccccggccgccaaacgttccagaacgcccgcccccgcggccgccgagcgctcgcctgcccgcccgccggtctccaagcgcctcccgggcccgtcgccaccgtgggtgcaacggggcctgggcctcgcggggcccggcggggcgccggcggcggctccagggggcgtgtgcgggccgcggccgccgctcaccttcctcttgggcatcgtggcggcggggaaggcgcgtgccgggtgcctgcggggaaggcgcgtgccgggtgcctgcgggccgcggcgcgccgacagccttcgcgaaactgggctgccttgccgctgccactcctcccgccgcccgagctgctgagacccacagcgggggcggtgggagaaccggatggaaccggattgggagcccgcctcctcctccccccgcgtccccggccgcgggctccccctccccgccggccgggccgccccccacccccgcccattggctacgggactcagcccgcgcccggaataggtgaggcgggcccttaattgatcccggaccccgcccccttccgggggccccccccccccccccgggcgcccccacccctttccgccgtctcgcggggccccagacccaggcgaagggggcggggtcccagtggcgctccggcctcacggtagtttgaagccgagccgcaaagtgcggtctgcgcgctgattggcggacgcacgtcacgggaccgcgggtccccacccacaattcttctggatacctgggcgccttcaggccactggtatctggcccctcccctccggggtgaattgggttcgaacatttatagttcgtatcttagactgggaagggagaaggataaggtatacaggaagtagcaaatttctcccgcctctgtcggcaagaaaggctatccaggggctccagcttcgcaggcctgcgtgaagcgggccctggtgcgcaggcgctgcaggagggcgtgggaaggagagccgacgcggcctttctgtgtaacttccttccttccttccttttatttgagacagggtctcgttgtgtcgtccaggctggagtgcagtggtgcgatcacggctcattgcagcctcgaccccttcggctccagcgaacctcccactccggcctcccgagtagctgggaccacagggcaccattttgcccagctaacttttgtattttttgtagagagggggtttcactatgttgcacagcatggtctccgactcctgggctcaagcgatcctcccgcctcggcctcccaaagtgctggggatccaagctgtggaactttcttcagatttccctggaggactgcaggtgcacgagggtcgtttctgggcccagagtagggcagctctcagattgcagctcctgagagccgtgcgcgaccgtctccagcactcgcggacccccagagggctgtttttttttctccatagcattgattgaatatatatccttatacattccatatatatctcaggaagaatacacaaggaagtggtaccagcggttgcctctggggaaaagtgggaagattgagggtaaaatttcccttttctcgtg

SEQ ID NO: 69396 - DNA, 1886 bp, Homo sapiens
tgtgtcatgggtgtttgttgtacagattatttcgtcacccagttattaagtctagtattcattagttatttttcctgattgtctccctcccaccccctatcctccaccctccaaaatagaaaaatttgtttttagaggccgggtcttgctctgtgactcaggacctgtggccacatcctgtgctgcctcatacaaccttatggcctctctaacctcaacccagttagctttcctaaacccatttccctatgattgttaacacttgttgttagccaggttcagaaggataacataattattatcccagcagagtacacccaccctgtaatcggtaagagagatgtttggcctggtcactgggtttgtggtgagagtctgtgaaaagctgtaaggaacgcgctggtcttcagtagggtcaaatgctgctccttcaccatcgtcagaggctacttcatcacagcctctctgatttgaggattcaagtgggaaagactcatgacaagcagcagaaagtcgaattgggaaaacagtgccctcagggatggggccgcgctcaggtacttagattataacctccgttgggatgtttctgaagctttcgtcttagcagaagttagggaggcagcaccccgatctcagcactcagtctaggccgcactggtccccgcactggtctcccccctccccccgcgtgaggccttaggaggtctgaagtatcagaagtccttgggccagttaagcctagcaaggtcctgggaggcgatctcagctgtccgctgcggtgggggtgggatgcctggtaaggacaccaagtccgtggtgttggcgtggttggaattttcctgggatcgctcccttctcttcaagctggtcacggggacgcatggttgagagcgcctagttcattcagtaggtggtccaggactttcttcagctatagaggggaacaaagacgcctttggtgagcaccggctctgcagctctgcgggtgcaggggaggtgtactgcgtaggtgccccaggactggcgggggctgagggtccatgcgaacggcactactacgcaggcgtcgcaggactggcccgggctcaaggtccgtgcaaactgcatgcactgcgcaggtgctccaggactcgcgcggggtcaaagtccatgcaagccgcacgcactgcacaggtgccccaggactggcacgggctcagagtccacgcataccgcacacactgcgcaggcgctccaggactggcgcgggctcagagtctatgcaaaccgcatacactgtgcaggcgccctaggactggcgctggctcagggtccctgcgagctgcacgcactgcgcaggcgccccagagctggtgtgggctgagtggccacacgagccacatgcactgcgcaggcgccaggaggcccttcctctcaatccgagctttgcagatgaaggactctgcgtgtgttgccttctgggcttacgggccgagtgccctttgagattcaactttttctaaattatccttcactttctgctgtaaagagtggccacctcctttttcctctaggggactgaagcgagaggaggatattgcagggtttgcctctgtggtcatcttcttagagagcaccccctccgcccccacacccttttcctcagagccgttgcttagtgagtccctgccatggaccaggcttgggaatggtccccaagtattagtttaggaggacgactctctgcttcacaggacctaccccagaatcctgtgactcagaagcgcgcttgtgaagtgcgcatgtgcgggcagggcctccagtggggctctcgtgggggcagcagccaaggactggggctggtggcctggagagctgcccgcttctccgcccttgccggtagg

SEQ ID NO: 69397 - DNA, 1581 bp, Homo sapiens
ggcaggcagctaaatgcagggatctggtgttcaggggaggggcgagggctgggaatgcacacttggggctcactggaattcagataggctctgagtacaggcgactggatgagttcatctagggattgagtgtagacagaaaaaaggctcaagctcacattcagccgtgaaaactggtctctgaaaaaagttaaccgttggcttaagtgtggcaacgaaacgttaacacgctgaggggagggtgtggataaagagccccgaggctgggtgagtgggggacaaacacagacagagaagacatttcaaaagatttagattcctacgagatagggagatgccagcgctaaggttagaaagaaaaactaatccaaagcaaaacagcaagtaagcagaggcaaaatcggaggtcagatagaagattcagatagaaaaaccccaaagttccctcggtggggcggcggtgagatcggcctccgccccctcgccagacccaggcgcggccccgggagcgctaggtcacctcggcccaggccgtccccctgcccagcgggcctgagagtacgtgtgtcgccggggcgcccggtcactgccgagccggggtagctgttccttggcaaactgtgccgcgaggaggaaacggcggggcgccagcgaggcaggcaggggcgaggactgagtgaccggcgatactggaagcccagaaagagcgtagcaggagggtccggaagggcccagagctggggctgtaacagggtaaccggctgagggggacgacggcagcagcggggccgttacctgctccgcgctgttcccacgactgcgccaacgccgcagcgccggcgcgtccccatggaaacccgcgcgcggggcctcctgggaagcgccggcctgcgggggctgggcgcgcgcatgcgcactcgggcagcaggagccgcggcggggaggggcgtcttgggcctggaggtcagtgtggcctcgcgtttgtcttcggtgacgggaagtgagtttcttgtgtagacgtctgtaaacgatcctcctgccgtccctgttcggcgcccgggaccctgccttcccgcgtggccgcaccgagacgagggagcctgtcacgcgctctggcgctctcctgacctcttaaggctctgtcagtcttaggtaacttgagtcagtaggtgggtgtagacgcctggtcaattcctgggaagcacagttcccctattaaccccttgtcataaagacgattttttttttttttttgtaaaacaaaatctgatgacaaaacaatgcatgtttggcatagagaatttagaaatgtacaggcaagtccaaagcaaaagtcaaaatcacctagatgatggagttatagatgttttttaatgacagcataggaatttggcataatttaggaagacttacattgtttccttttatttatttactttttttcctgcatcaaagccatgttgaatatccttgcagatgaatctttgaggtcacccctgactgtttccttaggataaattcctacaagcgaggttgcagggccaaagcatatgctcactttgaggctttctaaaggtagag

SEQ ID NO: 69398 - DNA, 639 bp, Homo sapiens
atcacagctgccagatacaggtacggacaacaatgacttaaatctgagtgggtctgatgagagcacagctctgcaaccacagagtctgctgagcatgtcctccagcgacctggggctgcaggctgtcacaggaagcatgggtgggagaatggagctccagaaacaagatctgggggtggggatcagaagaagataaagcaatcaatgaccttggattcatttaccttacaaagcacagtgaactccagcattctggctcttggccagggcaccagtacagagatcagcaaacacaaaccagtttccccaaagaatcccaaagctcgcagctccttcctgttgcaaagctgggagggtctagtgtgtccctgactccaaaatgtttggaccctgctgcctccgaagctcagatgcacacggcagtcccttctggtgaccacaaatagaggtgaagtgcctgcaacctgaaaggtcacaggtccctcagcccagccggcaacagtgcttttccaaggacttccttgtccataaatcaggcactgatgacaaaagcaggctgaagtcagccctgtgtgggtgtctgtgggcatgcagtccatcccggcccaagtgggaggtggtgaaggaggtacccacatg

SEQ ID NO: 69399 - DNA, 1305 bp, Homo sapiens
tttctatagcaggcaaatcacgtactctaatgtccatcttacatttgtgaatataacttgcatctacagctggatgtggtgactcacacctgtaatctctgcactttaggaggctgaggtgggcggatcactcgagctcaggagtttgagaccagcctggggaacatggtgaaacccctctctacaaaaaacacaaaagttagctgggcacggtgttgtgcacctgtagtcccagctactcgggaggctgaggcaggaggatctcttgagcctggaaggtggaggttgcagtgatcatgccactgcactacagcctgggtgacagagcacagcaagactctgtctcaaaaaaataaatgtataaataaaaataacttacattcacaggagactgttggagctgccctctggacagcctatcacagagcagctttctctgtaccccctcgcccctccactcctgcatacagacccttttcctgaactgctctcctagagcaccaatccctggacctttgtaaccaaaacccaccggtatttgctaaatgtacctgtggaaaaatgggtacagttgagtcacttttattttcctaagtggagccaccctacatggagagagtatgtttaatctggttgtagagaaggggatggagtatggacgcagtgtgggtcccagcagattccattctaggaatttcaacactgatttatttaatttctgactcacactgtcaggcagggaagaaaccatgaactgtgagtatttaccattctgagtcacttctatttgcgaaagcaaatcaccattgcttttgtaacttttagaaaagaaataaatcaataatgaaattactaaaatggaatatgctgacagccacactgcacccacactttaaatgggaatcaatatgctatttataaatcaaaaagagaagggaaaagatctcaaaagtctgtttttggattattagaataactctattatgtatttcaaatgcaaattgtaatggtaaaaagatcccaagcataggttaattgaaatcaaattaaaaatgttaactaaacagtttggcatttaaatatggagacaaacaacattttaaaattagtattgctgttgttgttatcatcattattattatttaaagatagagtcttgccctgtcgaccagactggaatgcagcggtgcagtcatcgctctcagtagcctcaaactcctgggctcaagggaaccacctacctcagcctcttgagtcactcagaccacaggtgcaaaccaccacacccggcaaatatatatatat

SEQ ID NO: 69400 - DNA, 806 bp, Homo sapiens
agtgtaaaaattgctggggggttacacaactttgagtggaagaggccatgcaatttgttttgaaaaaaaaaagtactattattttacaaaaccaaatatattgtttaattaaaatgtatagaatgcataacattctataagtggaatcacattatacatgccaaatttaaaaaaaaaatatccacaatatgctgtgggagctatttatactcataaacatagctctagaacgttctagaatatcatattgtatcagatttctatgcattctttttagcctatctataccttatggtctttaaagaaggctaatgcaagtaaatacctgctttcttttttcttcacttccttgaatgtttcttgcgttttctttgaaataagaagccattttcctcgagcatttattcacaccatagcctatgcaacaatgcaagacaccatggttttgtgggtccaggccattcctttatttggggggcctttgatgtcccagagcaagttctcaccagagctgacctcattgtttggacacaggatcctgccagacctaccttatactgacatctgctggtcatctcgaggtcatcttcagtaatagttaaaatggagaaagactttgagttgtttcccagagtatgctgaaatttttccctcagttttcaaggctttaaccaagacatgcaacaatttttctgggcagctatgtctgtaatagaatacatatctgttgggtcttgtttttctccatcttatgtcatctattgctgctacttgcaattggttagaccagctatcctcactcaaca

SEQ ID NO: 69401 - DNA, 908 bp, Homo sapiens
ctatcgttcctgtagttgtcagcactgtgttgtgttgctgtttgtggtggtggtggtggtggtgtttgagtcctgggatcactgcaaaccccagaattcttcagatccagagcttgctagaatttggaacaactgagtctgccatatccccttgttcccacagtatctagcatgtgcctgacacattgtgaatgaggattcattgagcaatgtccctgggggataaatatcattaaattggaagcaaataaaaaatggtagcagacatccaactcacctatttatgggtgactcccaggcatggaactggaaagccccaaattcccatggcatgcagagtatgcaccatgaggaactggacagagcaggaagtttaatgtgttggatgctgcccagcaggctgcatcctgcttggtgtgggtgagtgacacttgccactggaacttttcttgacccagaattcttcaaacattccattgtgggaatggctgcttttgatttcccttatggcttcagcctggattaaacccgggtgggggttgttatctgcacagggagccaagagtgtggggccacaggcagaggctgtgcaaggaattggaagttccttggccatcatctgtcggttgtggcttgcatggatgggctggccaggatgtggccccccttgtgccacagctccccaccctctgccaaagaaagtcaggttcacagaggcatttttttggtcttgtttcatttattgctgaattcctgggccctagaccagtgtctggctagcgcatgttgaataagtcattcaatcaatcaatcagtcaactggagacttagatgagctaagaattaagcagaccaaaatttttggctgcctacttaatattgcagaattaatcaaaactggtttttac

SEQ ID NO: 69402 - DNA, 958 bp, Homo sapiens
tctctctctttctctctctaccctccgccacccctctcacaaaaacaaaaacactacccattcactccttgaattataggaggatatgggaattgggatgaaaaattccccaatacttataaattccttcctgttctagtaccaccatctccaaacatctcattgggggcaaaaaaaataaaatttaaaattgtgtctgcatatgaaacctctcaaaaccgaaaagagaaaacaaggatttttccctctctctattttgaaattggcttaaaaaggagtttgagaaaatcttgtccatctgctgcccagccttcactctgctgagcattgctcagtcagggttacatgaagctgaagaaataatggaaaggcacagaaaacctcatcccaacccacaccgctaagcattttccaaaacagcactcttgccaaatgggcttttggcttcatccactcgaacaactttcttgctcactgctaagaggaggcgttttggcagggaaaggaatgcatggtgcgagtctgacattccattccagtggagacacagggtaagagacaggtgacgctacctagtgtcctctgtgcagagcgttcctcctgccacacactcatcctcctgtcagccagttccagcaggcagctgcctctctgccccacactgcccctagcagctgcttgctgatggattcatttcacggattgtgtgtttagggcatgcggtccgccaggcactgtggtaagtgcttgatgtatatgaactctatacaacctacaaggtcggtattactgttctgcctgttttacagatgaggaggctgaggtccaagtcagggaccttgcccaaggccacacggctgggagatgtcagagccaggatccctcctggggccttttggttccagctgtgggcttcccccgcacatggtgctctccctcctgtggccgcacctgcccg

SEQ ID NO: 69403 - DNA, 1741 bp, Homo sapiens
aagtcaggagttcaagaccagcctggccaacatggtgagaccttgtatctactaaaaatacaaaaactagccgggcttggtggcgcatgcctgtagtcccagctactcaggaggctgaggcaggagaatcgcttgaacccaggaggtaaatgttgcagtaagccgagattgccccactgcactccagcctggatgacaagagtgagactccatctcaaaaaaaaaaaaaaaaaaagattttaggggtaaaatattttgctttccttcagtggctgggccacctgtacacaatgcctgaacccaggtcctgcagcccccagcttggctctccaaagctcaccagtatcaaaggatttcagcttctgctcctctccgcagggctctctggtgggccccagacagagatgaaggaaaagtctggccttgaccttgaggaccaaaagcgaccacgtcagacgccagcagtctcgtgcccagttgccaagggatcacctgaggaaggcccttaaaatacaggtggtaatgcaggggtcttgggatggccccggaccgttcatttctaataatttcccaggtgaagccaatgctgctgttccaggaaccaccctttgagaagcacgggtctataccacacgcacagaagaggaaacgaaacgaggcaaaggaaaccagtccctttactcgcgcccaggcaggacaaagcgggcaagggtgggggcgggggcgcgggcgcgggcgcgggcaggcggacggacttgcaggaaatgcagccgggaggatgggcaggttgtgggatgctccgccgttccgcgaccacccgcctccccggcccagcagaaccgggtccaggctgggggaggtgctagcggtgtatgtgagtaacactgccccctcgtcgtggcaccgcccccttcttccctgcccccttccccgccccctggattctgaagtctgaagtcatgcaatttgacttttcctttctggaaaccagcgagcagaaatgaaaccgaaactgaattgtccgggaaattcgcggtgggggcggagagcgcagggagaagtaagcccagtgcaggatcctgaggcccgtgtttgcaggaccagggccggccttccgattccccattcattccagaagcaccgaaccacgctgtgcccggatcccaagtgcagcggcacccagcgtgggcctggggttgccggttgacccggtcctcagcctggtagcagaggccaggccagtgccacaaggtcaggctccactgggccctgcccgcccaggagcctgtggtgtcaggcacctgaaggggtgggttgcccctccacacctgtgggtgtttctcgttaggtggaaggagagacttggaaaagaaaaagacacagagacaaagtatagagaaagaaataaggggacccagggaaccagcgttcagcatatggaggatcccgccagcctctgagttcccttagtatttattgatcatttgtgggtgtttctccgagagggggatgtgtcagggtcacaagacaatagtggggagagagtcagcagacaaacacgtgaacaaaggtctttgcatcatagacagggtaaagaatcaagtgctgtgcttttagatatgcatacacataaacgtctcaatgctttacaaagcagtattgctgcctgcatgtcccacctccagccttaaagtggtttttccctatctcagtagatggaacgtacaatcgggttttatac

SEQ ID NO: 69404 - DNA, 1832 bp, Homo sapiens
caaagtacattgatcagttagggtggggcaggaacaaatcacaatggtggaatgtcatcagttaaggctgtttttacttcttttgtggatcttcagttactttaggccatctggatgtatacctgcaagtcacaggggatgcgatggcctggcctgggatgcgatggcctggcctgacaactattacctatgttatgtttattattttaagctttattattactattttatttattttattttattttccttccacacacccgtttccaccctggagaggccagatgagccagactccagggaggcctagaagtgggcaaggggaaacgggaaaggaggaagatggtatgggtgtgcctggttaggggtgggagtgctggacggagttcgggacaagaggggctctgcagccattggcacacaatgcctgggagtccctgctggtgctgggatcatcccagtgagccctgggagggaactgaagacccccaattaccaatgcatctgttttcaaaaccgacggggggaaggacatgcctaggttcaaggatacgtgcaggcttggatgactccgggccattagggagcctccggagcaccttgatcctcagacgggcctgatgaaacgagcatctgattcagcaggcctgggttcgggcccgagaacctgcgtctcccgcgagttcccgcgaggcaagtgctgcaggtgcggggccaggagctaggtttcgtttctgcgcccggagccgccctcagcacagggtctgtgagtttcatttcttcgcggcgcggggcggggctgggcgcggggtgaaagaggcgaagcgagagcggaggccgcactccagcactgcgcagggaccggtgagtgtcgcttctgggggcagcgcccagtaaccgcgctaggagcgcggagaagggcattgggagagcggcgttcgtggcggagactagcgctccggagcacgggcacgacgggggcaccttctcggctgctagtaactaacaataataataatcataatcatagcaagggcgctgatgggcgggctcggagcacgcctgattctggttcccaccaggctgcccaggctcctgatgacgcatcagaaacatccccctaacccgcggccttcctgcaggagaggttgggaaggggtgggggacggggctcgggggaggtctccgagggactctagtaagcggggaagggcgccgggaaagtttcagatccacggctgcgcgggccacgagcccacccgaacgccgaccactgctttccgtcgacttctatttcctgggaacgcgcgaaagcaaacccaagtcagactgcggaggtcgctggggagggaaggttcaaggagttctcgccgatcctgctgaataaagggggttccgagctgggccgagatggggcatgcgcgggaagacccctgcccgctgttcccccccaccgccccagtggatgccatgcctggggcctccccggcgcgtggggctgacgcaccctcggggtccatcgtagttggccgggatcgtggagtgggtgcggtggacgaagggaggcaggacagtcccgggggtggcagaaggagcccgggcacagctgagacctgcgctcccatcccaccaacactcacagcaggtgctgccgagctgggcaattgggatggcccaagttatttggttaaattttaaatcacgtttgttactgggaagtagagtccagtgatgctaaccgcgcctctacctccaccaccggtgtcagtcccaaagggctcctaaaatggctgtgtcatctttcagccttggaccgcagttgccggccagga

SEQ ID NO: 69405 - DNA, 598 bp, Homo sapiens
tgggcgtggtggcgcatgcctgtagtcccagctacttgggaggctgaggcaggagaatcacttgaacccaggaggcaaaggttgcagtgagtcgagattgtgccactgcactccagcctgggcgacacagtgagactccatctcaaaaaaaaaaaaaaaaagtttgatgtgaggtggcctgggtggaacagctgagtcagctgagccagaacgaagtgtggttggcagagcaccaaggaatttcacacaagctgagccccagcgcttttcatccaaacaccaggggaaatatgcaagtgaagccagtgagaggcaatgggcaatgggtggacactggggggatggggctgtggctggaggaagcagagtttgcttcatgctgaccagtggtcaccagtcagcttccagcagcagaaccacgcctaacagatgtctggctttggctcgaggaatcggagaacacagtcagaaggaggacaggatagttaccctcatttgtcgataaatccagtccgtgaataccatcacattcccgtacactcctggtctgtaagctttggcacagccagaaccccagcttgtatcccctatcagccac

SEQ ID NO: 69406 - DNA, 1589 bp, Homo sapiens
ctacaataataggtccttcctgacaccttcttactaaggcacaccccccgggttctcagtgactacaggtgcattccaggtggactctggctctggggcactgacacggccaagtgaagacatgtcccctttaagagaagacatttcctaagaatcctaaggtcggtagggatagccctgtgtggtcacagcgccagggcacatgtggttattcacagaagcccgacagaaaacaagccaagaactcaggcatcaaagggcaactgctgcacagaaagaggaaaagaagtgcgcctccccccaccaccaccaccgagatagaatagagcctaccagacaatggccttctcttctttcttccaagccctccagcctccttgtgagttcccaaggctcttgccaagggacggcagcacctcctcccctccccccgtccctgcccggctggacttggctccctgattccgtgtgtaacccagaaagacaaagaaccactcagcatttacaaagtgcccaggcagctgtgtttagcttctccacagggacaaaccgcagccctgctgttttgatgggtgcacctggccgtgcacagccctccccactgggcttgccctgccacattccccaggacagcaggctgcagtggaagtcaggcccccagacccctccaccagcggcctccaggaatgcaaacctgccccaggctcccactcagaggaaaggtggcgcggggtgattagttcatcctcccccgaaatgcagcacctggcacctggcaggcagggaggtgatgcctagacaccaggcataagccctggggacctgggaggcaaggagagctcatgggcaaaggacactgtgtatctttcacatcagaaaacacataacagcaacaatcatagcaagtctgcaaacatcctaaatatgtgcaaagcaaaaggaagagcctaagtccatcccctcttctgccctcccagccaggtcagccactcatcatgtgacctgtggcttgtacccacttctaccccctggaaacaccacaactcattcccaggccgccagaatgctgcccatccctcacagagcaccctctggcactgctgtcccggggttggggctaacgggaccagccagcccagctgcctggaatggagcaggacttcccttgctcaagccagtgaagtccctggcaaactggaatgagccggtcaccctggctgggacactgagacattatcttggattcctagaaccacgccctgacaaaataggtacacctctaaatgtctgaagaggaaagaaaactaaatagagttgaatgtcgatgttgcaagtgtgagccgctaccaacaagggcagacggtagaggctgaaaatgaaatagcagagaaacctcagccacttcctatgaataaaccaagggctgcttagagtaaccaggcctggtcagactctaatctcctcccaatgcaaaacccatccagaccgagtattgcagctcagagaaatcagactcaggacaacgattccccatggtgtctcctagttgatttcattccaaaatttttcaagaagaaattgctgcatac

SEQ ID NO: 69407 - DNA, 728 bp, Homo sapiens
cccccgatgcctgagggctgccgcatctccccaggcagtgctggtaaatggtaaccaccgccccacccccgttaggaatcactgtcaggcgacacacaccctgttaagccttcccaccttccctcagagctacgagcaggaatgacattttttaagtatcagtctgattgattgattctctccccagctcaaaaggcttccatggctcccgaatgaagtgaaactggcacaggatttgtctctgctgctctccccagcccaaccctcctcgccagctgttctggtccaacctctacccagggaggtgaatggaccctggctgagaggcaccttggaaaaagaggcacctaacgccctcagcctacccctctgaccagatgaccacagcactgggcactcccgagcaaccaggagtctatagaggccaaggaggaggcagggcaaggtggcagtgagccaaggtctgtgtgctgggcacagccctagcaggacaaattccacctgctggttatagggctcagcttttggaaggtgacaattgtccccagcactcatgtgccggtgctttcacagggaggcagagagagggtcttctcgtgtttctgctgtctgttactgtcactcggcgggtgctgccccatactcacttatagcccatgtccctgcaggccgcccgcccgtagttctcgttccagtcgtcttggcacacagggtgccaggacttcctc

SEQ ID NO: 69408 - DNA, 2534 bp, Homo sapiens
gaactggttgctgaatcattaaactataaaaccccaacagcctgccatgaatgaaaatgagtatatggctttttagtctcgagaaacctcacccaacaggttacaacaaacatgcaccaatcatttatttactcttcaattacagataaaaatacaagaaccaggtcatgttgtagctttgggactttttctaggattaaaactaaagttcacaccttcctgggtataaggaaaggaaagtgactaatgtacaggtgggaaggatcaccatttaaaatgtatcaaaaacgtttaagccttttagccacatcttaacagaccttgcctatgtctgctttgtgaagagagaggatcctcaggcttgacaacacaataaatcccgcattcttgtctcataagcaggacagaactcagtaccatcctaagattgctttcaaagagtcctgcctaaccaaacacatcctcatgcctctggtttctcggctgtcctatctccccagttacaggtttggttgaagtttcaggaagtgaaaattcgatcccattggcagctctcccagctcagaagccctctgaaaggagtgaagaatcaatactcaaaacccacacttgctattcattcacgatccctaacaaggaagccagggaaggaaggaacaccgggagccaccaccattaattgtcaaataaaagccatgggacccagaggcagtcacaggataatcctatctcttccagcaatcagaacatgataaacaaaaatattccgtgtgcccaagtcagttaccatggactttggaatggaagaccagagtgatgctgccagtaacattctccagctgggccgggcacggcggctcctgcctataattccagcactttgggaggccaaggcgggcagatcacctgaggtcaggagttcaagaccagcctggccaacatagtgaaaccccatctctactaaaaatacaaaaattagctgggtatgatggtgggtgcctgtaatcccagctacttgggaggctgaggcaggagaatcacttgaacctgggaggcagaggttgcagtcagccaagattaggccactgcactccagcctgggtgacagagagagactctgtctcaaaaaaaaaaaaaaaaaaaaaaaaaaaagaaacaacaacaacattctccaattgaaaataaaacaagggggggaatgtcccgctctgacattagatctgcaaggggaagcactgctgtcccgaaaagaccaggaaatcacattcagtcctgttcatcttcaaaacaggcatttcctcattcacacaagcttgtacatcgcattaactcatttctgaaaggagcaagacgtaaagtagatggcgagagacaatgctgtttagcgaatgcttgctcctgtcatttaaaggaccgggatgatggctctcaattctggaaagccagccaccatgagcacttggggaaattttcctttaagtgtgaaagagcaacagtgggtggcactcaggctccattcctggctggcagggagctcttccttcaatacagacagtgtcacccacttgaatctcacaatggcacacagctgtcctcgcactgttttggtccatcctggactgagagctgagtcagcccatgagtcacctgcctggccaccatgcagcaggacgatgctgtggcatcgtatccgcatcccatgacatgatgaagttactgccaaaacaagaatcttttctcctagtttctctcctctggagatctcaggacacgtttactggagacttactttccaaacaaccaagccaacgcgaatgaagttaggcttgtagacactgactcccacccaagatccaggggtattctctgcaatgaagtctccactgacctcaccgtgcaccattgtgcacacaccttctccttctcgaagcccccacctgtgactggtacggttcgagttgctggaggtgtgagagggaacagacagcctcagactcagtgccccttcttcaaaatccagacagcaccaccaccaccatccacggacacatcccagccaatgaccaaatcatcaaaaagagccctttatgccaaaataaccgcactaatatcacattatacaacgagatgttctatcctcctaaggatagaatgcatgactaaatgagttagccaacagtggatttcagtggctgttcagcagaaacttgtttatgtataatcaggtaaattgcatacacaatgattggcacaagagttctactgagagagaaaggttgagcgagaaacagaaagatcaccttaggagaggtattgcctgcatcatccaagtttcttttcctgtgaatgactcattgtcccaaagagattacaaactttttagggcagatatcaggtctggttctctctctttctgtttgttttttaaatctcactttgtagcttacaaagacagtatttaaatgtttttatggagttcttaccacctgtaccccaaaaactattggggaaaaattaataagcatgtttggcaa

SEQ ID NO: 69409 - DNA, 2587 bp, Homo sapiens
cttcaggggaggctggctgcatccccacttcctggagtaccttcccagatctcctgggacaggtcaacaaacttagtctcactttaggttttccaaatgccttgtaactgggctgcgtagcctttgtaattttccatgattcgggaggttctcgcggctgggagctccgtgaggtcaggcattgccttgggcgcgatgcgctcatctttcccgcgggaccactgcacaggttcgcacggagggaagggctgcgcagcctcgaaggcgagccctgggtgctccctgcccacagggctcacctcgggccgccgtgctatcctttccttcccaaacaagccaccaggattcctcgtgattagggctgccaccagggcgttctgaacaggattcagggccaccgcgctgtgctctacggcggagcgggcgaaggccctcctctgccacaagcgctcagggctctcggcgcacaaactttctggacatggggcagtttttcagctggacccgtgctcgagcagagcgcccactgccagactggagcacttgaccactcagggtgccactgtgccgagccgggcaggacaggatgaggtggaccgaagcgcccaggtgccccgccttccccccaacccggcacggagcgcaagcggaggagccagaccggctcctcccgggcgggttcctgccggtgccgggtgtccaggaggccccggccctgatcgccgccagcgggtcgccgcaacggggcctgagtcgcgagcagtccctccccgagactgactggccgttcgcacctcgcccgggggccctccagcagcctggcccagcggtccccgccgcgccggccgtatcgttcccggcatctcagcgagtttccagtttctccctacctcagtagggaaccaagaagcagaaggagttcaggtaacactgcgggactgcagagatttcccccaaacaaagaagccaaccgacagcactcccagtcctcctccccaaagagaaaaggcgcaccggtgctcccaggcgggggccgtggagggcaggcggactaggagccagctttggggaccccgggggactctcttccaccaactggctagggactcgcaggaccacctgccccaacctcgcgatgccaagccaacaggggcggcgagggctctcggccgtgcgcaaggggtcccaggcgcccagcactctcccagcaccccgggaggcgccctgcccggctggccccagcgctcgaccctcgggcgcactcacctgccgcgccgcgctcctcacacccgctttcacctccgggcggggcagggggcatcggcgggtcccaggcgcccaggttcccctccccagcccggaccccgagccgggaccctggtaccggcgccgctcacctgccgcgctccaggcggcgctccccgcccctcgccctccgcctccgcctccgcctcctgcttagctcgcgcctactcggcccggcccgccctggctctcgctttaatctcaggaggcggtgtcccagggtccagggcgacacccccaagcgggtcgcgggtcaccctgggcgggcgggggcgggggcggcgggaggaggcgtttcccaagggaagtccgggacgggttccctgcctggctcaaccccggctgcggagggacccataagggactctggggcgcttcccgggcccggccacagcggccaacctgcccctctccggtccgcggcgcagcgctgcccgagggctcgagtttgggttaaggaaggggattctggggagcgctcctggagtcctgggtgagcccccggagctgctacctcacgagctcctgtaggcggccggccccgtcttggcctccggggaacccactgtagcctctgggcaaggacccagggtaggccttggggactgctggcccaagcacgagtggcggggacacagcgccggacgcccaagaccctccccagtccgcctaggctggcatttcttggcccccaccagcgtccggtggaaagtgctcccccggatggtcccaggtctctcggcaccaccggccagggcgggagtgaggaagtggtgggacacacctcagccaggaagacgtggctgttcccgggcacttgagaggttctttctaatgtttgcaattgtgggggctcagaattcaccagaatttaataggaccgtagaccagaattcatcaccccaagtaggactggaggagaccagaatctgctaccccaacatagtcctctttggcacattgatgatttggaactggttatgttgaggaactgcagacaccagagtacctctgagaaaatgcccttttgtaaaggaaatttgcacctataaaggaaatgtttgttagtcagcagatctgtaccaggaagagagctgttcccggacaacttttatcacctgggaaacttttatctgcctcacacggcaacctgcgttcaccagacacctcctctcctcacgctcccctcactcctccaccgctccccagaagcctcaaacccccatttctttctgtcactcagagtgacagataagcctcaatcatcgggctgctgcacctt

SEQ ID NO: 69410 - DNA, 858 bp, Homo sapiens
cagagaaacagaaacaataggagaaatacaaatatatacacacatatacatatgcacacacatgtatatacacacatctatatttctatatattatttataaatattataaatatcttatatattataaatacatataaatatatacataaacatgtattttatatgcataatataatacagatatgatatatattatacacagcttatatgtaataaatattatttataatatatataaagatttactataagaaattgactcatacaattatggagggtgagaagctctacaatctgccatctacagactggagacccaggaaagctggtgttgtagctttcaaagtcctgagagccagagaactagagagcagatggaacagattccagtccaggtctgaaggcctgagaaccaggagtgctgagggcaggagaggatcaaagtccagctcacacagtcaggcagagagcaaattcaaccttcctccccttttctgttctattcaggctctcaaccgattgcccaaattgaaggcaatcagcattacacagtcttttcaaacattaatctcttccaaaaacaccctcacacgcagacacccagaaataatgtttaaccagttacctgggcatcccatgaccaagtcagcttgacacataaaattaaccatggctggatgcagtggctcccacctgtaatcccaccatttagaaggctgaagtgggaggatctcttgagcccaggagtttgagactagcctggacaccatagcaagatcctgcctctacaaaaagtttattaaaaattagccaagtgtggtggtgcgcacccgtagcccaaggtacttgggaggct

SEQ ID NO: 69411 - DNA, 1351 bp, Homo sapiens
tcccagctactcgggaggctgagggaggagaatccttaaaccttgcaggcagaggttgcagtgagcagagattgcgccactgcactccagcctgggtgacagagtgagactctgtctcaaaaaaaaaaaaaacaaaaccagaaatgaaagcttaaaccacctgtgcctcacaccgcaaacagctccctgtgtaattaaggagagactttgctcttccaccgtttccattcacgtgactggcaaagtcgttccaggagactccagccccagtaaatggaatggggcaaatttctcatggaaacctccagaaagacccatcagctcttcaatggaaagcagcaactttgtgctctaagattctttgaatctctcacttaaaccccttgcctggctgtttccaccaagcttgggctggtgcaacatggtccacactcactcctcatcaacccctcgacccctcgacccctcgacagggaatgttccactttatcccaactccaatcttcagggggttccaaccttgccctcctgcctcccaggcactgcgtggcttccgttatcaccgtgactaataagctcattttgtgttggtgtgttagggatctggagagcctatatctgccaataaccaatgtcatatgtaaatatacagtgataaactactcaataaaactaacaaagaaaataaaactggctatgttcctggttgtaaaagtcttccaatcatgggaacaaaatgtctgctgtaaaatagtaaagaattctactataaaaagaaagcggggcgtggggaaggtacttccttctttacctactctgtccttcaaaaatcacctgcaaccccttaggctaatggcagtttgaaaattgttttaatatctgagatcctaaaaaaatggtcaagaatttcaagattcctgcacaagtttgagttagagcttttagatgatgaggtcgtcacaggtgacaggaggtcacaggcgacaggaggtcacaggcatgtgtgtagtgattatgctcgcctcctgggtgtcacccagccccgtgtgtgagatgcacgtggaaggcgaaagcacctgtgctcagcgcctgtgagctggctcagccaggcctttaactgctcgctggaacactgattcctggtcaccccaggcagcacactgggagggactggagcttacccccagggtggactgtaggtgctggggtaggggtgaggatacccacctgcccaaaggataaggaagatgcaccaaatcatgcagggtggagcgtatcagctccagggaccccttaggtcagagcacagatttgcctttcacggtacctgtaactacttctgtaatctcat

SEQ ID NO: 69412 - DNA, 1853 bp, Homo sapiens
attggatgtgcctgaagcctgcctctatggccctagagcagtgtggaggggaccccagctttctccccacctggggcaggatcacttgcctgacttgcagggggatggacggctggtgcgcactctgttgcgctctctctctctctctctcacacacacacacacagacacacacacacacacacacacacacacacacacacaccctcacagattaagagcaccattggattggtctgctcaggccaagatcacagtcagaggagagaaagaagcatgacccatgatagcatcaccatcaaccatgaggcatcatcactgcccccaaaataacacagacaagggagggccagggactcagctttggggtcaccaccatgggggccagaatgagccttcatcacccgggtttgcaaggtgtgggccagaggagcactagcaggcaaaggctgcagtaggaccgcccagggagcagtggcttgagccgcccagacacagagacacgtggcaggcagcatgttgaattttaaccagaatttaatgtaggcagttttaacttttgccttaaaagtaagaaaataaactaaaaaaaaaaatgaaaacaaaacaaactaccactctacagaataggagaagcgccacacgggccttcgggctccacaaatgtggcctggcccggctcctccagcctcccggagggggacagctggcaggcagatcctggcctggaaggttctggaggcagctctcctaaaggagtcatctgttctgccattgagtggccgtgtaatgctccccagccctgcggtcacccggggaaatcccctagcagggagctgcggctgctgttccccttcggcctggaagtttgtccaggttggggcagcaatggggtgaatggcctggaacctgaatgtccgagggcctcgcccagctgtacttcctcctctcacgtggcctctctgaggagtgaattatgaagtcatcctcactgcggccctccaccactccagctcctaaagggctggcttggtcaagctgcctcggagggtcaccagccttgggatacgacacctgcaggcggtgggcgctgccctggagccacgccattccatctgctccgactctgtctcacactgtctccttcctccccttcctggccaaacttctcaaaatagcatctgctgcttaaagcttctcaccacctcctcatctgtagtgccctgtagcctggagtccacctagaactctacaaccagtgctctaagaaggcccatgccctcccgttttcacccactggccctggtgttgttctcaccctcagattttggcaacacatgccccttcttcagatgggcaccttcttttgccttctctcccaccgggacactcattccccctccgtgcccccaagtacacacacctgagaagtttccagttctttgctccgcatctcttcccctttggcactctgcgtgctgctgtctgccccttctgaggtgtccagatgagcgatgctccatctaccctctctcctaagctccatccaacagccttgggaccaggaagttggtcctgctgggtcatttgcagagttgctggggcacctcagagagaaacaagatggcgcagggggccatcagcagtgcacagccaagtcttcaggtgacagtgctgaacaggggtctcaggggagctggaagaaaagtctgtcctttaggccacttggcacagctccaaccagaggtgacccgcctcccacctcctgttcttcatcctcccctttgcttcttgacctgcctgaagaagacccctgggtctggacagctgggcctctggctgccccagcagga

SEQ ID NO: 69413 - DNA, 5087 bp, Homo sapiens
  modified_base (4954)..(5087): a, c, t, g, unknown or other
caggtgcctggagataccatcaatctgggattaccttaatacaatttcagtggtgatattttttagggccactcaggtgtcttgaagctgagacaagtatatgggagaacaggtttacctttagttcctccttactcctcactcaaaagagttgggatcccaactcagtttcagggttttatgaaggccttaatcttggcagaacttggactcctgcacttgacttcctgcctcatgagggagccaaaagtgttgctcggcttcccagcctcctcttcctgaaaaagcagaaacccccagacacagccagcacccgatgccagctgcacttctctagatttctttcttttcctagatcttcatccagacagtgttaccaccttgttacagctccaattcctttaaacacttttaaaagacattttattcagctttagagttgttttcatttggattattgatccaaattatctagtcagtccaaataactagaggtggaaatcacttaaaactctgatgaataaagatgagtgatgtgtcctttttccatgaatacatttctccaagcctcagttttaaaatgttccatactttaaatatttacacttcagtttacaatctataaccacccactttaataaactcaaagtccaaagtgttaattaggactcacaccacagcagtttttttttccttgccattcattcaacattcttgcccataagctgaacatcctcaaacaagaaatggggttcattcctaacaagaaaaacacttagatggataaacagttgtgtctattcagatgggacacagctcagagttttaagagagggtttgtaatatgaacacactcatgcacagctctgctgttagatgtgggttgtgtaggatcatgaggaggtctttggcttttagcatggcacagttagtctttaccagatgtggggagtggggaagagagggcttgaagtggatgtatctgatggtaagagatggtcacaggccatgcctctccctaatctccctcctctctgcttacagaaaacccatgcctgctccatgaacccagcttttcttcaccagccattggcagcatgaatccatggcatgcaaagctaaagggggtcaaaggttggaactgagatctggggtggggtacaataaaagggcttggctgccagagtaaatgctcttctgaagtggcgaacagccatattaggaggcggtctgtttctgtgatgtcaggagaatagctttagcagctgtgattgtgcggtcagacaaagctaggagagattcctgtattcaacggcatttcattttacaatctataaggtgtggggccctaaaagggaaaatataaaaatgtgggattgccattcaattcaagggtctttaggactcatgctaaagcaaagcccaatctagtgaaagaagcacagagcaggtggagagctcagacttccacaagaagacagaggaatcaatcaagtctctttcctgaggactttggctgacgacttgccctttgcttaacttttggggtccatgacatggtgcctccatgaagaggtttagaagaaggccagcacagccagcagctggaggagggacaggggggattttggggagtcttcgagccagatactgagagggagaaagagaatttggattttaagtagtttttctgtgtgctatggaatagcttgttctgttttatgagaatgtataaagacatacagagcttcttcctttcttcctgtttacttttagtcatctgccagtgttttctgaataccaaaccttgtgaagatgagcgttgggaaaggagtaggaaggtcccaatttggaattttgacatcctaaaagccttgggtgccgcagaatgagtaagctggagggtactgtgtaaagacctcggctactgcagcagagaaacagatcaaaaaagtcaagaccggcgagaggaaagtgattgaaaggccatcactgaaagaggtgacaagcttggatttggcagggcaggagggatgcagagagggacggatgtgagagtccacaggaagaagccttctgattgaaagggtgcttggctgtggatgtgagggacagaaaggggtcgaggctgtcactgagatcctcagcttcagcaaggggatgcatggtgccttaatttactgtaagaacatggaagaggcacaggtttagggggcgatatggagccccattgtggaaatgcagggtctgaggagtgcctggccttctgctggcgctgcccaggagagcactggaggagcagacgtggcctccgggagatgctgagccagggctgaggacatgagatgcgcagggagggcagacactcccaccaggtcagaggagagacagggaggccagccctgccaaagccaggcctcagtttatttgtagagtgagagcttgaatttcaggatcacaaaaggttttttccaagagccaaaaggacttagtttctaactgttctcctccctcctttttgtggctgacaatgaacaacctaatccccttcctttttgaataattctccctgcccagtgactcacccaggtgcagatgagacacagagctcatggttgcctcctgtgaagtgcaggaaggatggagcagacagacccaaaagcactggcctcccagatgaatcaggagggatgtgcaggctgggtgacgtctgccccggaaccaggaaagtgcggctgcttcctccacaccccgcccgccgcccaggacccagggcccttctgaaaagtgagcattgtgttgttctttagacttattttatatgaaagcacatcacgctctaagaagagtcacccaggctttctgttctcaggtggagcctccctacaccctacgcacacggcggctgttccccacgacacagcggggggcaaatgaccaccaggagccagggagtcccagggaaaggacgcagatggctcgtgtcctggaatttcatgggagccatttgaaatcatcagcaaatgacgcccgagtctataagggacctcagcgcaggggctggatgagacagggtgggcagccacaaaacagggtggtgaaggcccgaggccaggagggctgggttagcactcggccaccagagggaagcaagcaagctccctccctctctctctttctctctgtctatgtgtctttctctctccctctctgtctctctccatctctctctccacccacacctcctgaggattgttgggttttcccatggactagggttagacagccagcgagtctgaacggaaggcgccaggtgtggcagtggggaagtgaggtggggcctggaacacaagggcaagggcctctgggaggaccgcgcaggctcggcacactgagcggactgactgcagaccctcctcccacaccagggggaccacctctctgtgcaaagatgtcctcacttgatattctcaattctttgaggtcaaggttttattaacactccctgaaaagtgggagagcttagtgataagactgtatcatttttgcaagacacaaagcaagcacagctggatggcatgtgccagctccctcaccatgctgagcacttttactcacatctcacccctgcagacagatgccagtgtcctcactcacccactggggcagacattattagttgccaatgcaagacccatttcctcacgtcctaactaatagaaccccaactgtgtccaggcaggtgacgtgcccagctaaaaatactcaccttttcagactcccttgaagttagtagcggccacgtgatacttccaacaaataagacatacacagagatctgctggggcttctgtgaaaacttttacttccctgaaacgggtaccaccttccttctcccattctttcttcctccttgaagcacagaagcaatgcctggagctgcagcggccattttgtgattgtgaagcaatgacctgaggaatgaaggccaacatcaaggatggcaaaacagagagaggaaaagagcaattgtcccctgatggcatggctgggccactgccccaaccctgtgaggccatgtgactccttattacatgagcacaggctagtcggggtttgtgctatctgcaggtgaatgcttggagattgtacaaaagtttatactggaggctttggaattcaatagaagtagacctgggttaaagtcaggaggatattttggctgtcattggtattgttattgccgataaggacccacaaggccaccactaatggggcctccagaccagagccgtgttgggagttttcccttgtccctagagcctacgcttgtggccacattcctgatcatgaatgtgacatgatcatggagttctgtggggtttgctgatgagttgggcaccgtggaggcagaatctcggcttctctggaccccagctgttgtttatttgtttgatgtccttttgtttttactaaacattaggatgtcttccgggtctaaacttctctactcccagctcagggtggcacgatggccattagatggagttggaatgaggaggaagagatatcccactggaaaactttttctgactctgataacatgaccttgtatcattggggttgtggggaggacttccacatacatagaacactattttgatcagagaagtgttttatttttcttcctgttttacaagaatgcacactcagtataactggtatttgtatgaactcagtcaccctgaacccaaatattgacattccaggtgaattagtcctgcactcgggtctgttggctcacctcaggtgccagcatgtactcgggaaagagtgccaggcccaggtgaagagggcctggggctccctgaggacggctgcccaaagcccatgaccctgctcggcggggccccagataaattactggcgattctgtccgtggccctccctctgnnnnnnnnnnnnnnnnnnnnnnnnnnnnnnnnnnnnnnnnnnnnnnnnnnnnnnnnnnnnnnnnnnnnnnnnnnnnnnnnnnnnnnnnnnnnnnnnnnnnnnnnnnnnnnnnnnnnnnnnnnnnnnnnnnnnnn

SEQ ID NO: 69414 - DNA, 1574 bp, Homo sapiens
tatacgacggtgtgttttattgcactgtgttttatatcaccttaatttttcaatcacatctggaggcactctgcgtcctgtgcaaagggggttgggagtctcagtgtaaggcggaaggtgcaatggccacaggcaagatggaggccctgggcatggcaccttctctccagctttggcaacaagtgccagttcctcaagactgtgaggtgcagcccagcagctggggctccatcacatcagttacacatggcagctggggctccaccacatacatgttatgcatggcagtgggggctctgccaccacatattatgcgtggactggtctggttctctgcattgtgaagatgcaccgacatgcactcatgaccgctcacatcaaccggaaggtaagtgtctctctgtgattcctgtttgctagaaaccagcatatcctgagtgcaggacaaacacctgggctcagaactgaagcttccagaggagggagctctctcccccgtcttgactggtgtagccacacctgccacatctgcctaagaaggaggtcatgcagtctgctgtggacatccagaaacacagatcctgaagacaaggcaacgccccttctcagggaataaagggggcaggcggtagaactcccgacgcccacctctcatcccatttagacatgtgctcagtatccttaggtattcctgagggtgacatgaactgttctctgcctttgtctggggcattgcaacaataaaagaggcattttcttttcttttcttagcaaaactggcccctgccaaatgccttgagttcagttgttcaaatccctgccttcctgaagtgctgaaggggctgagtgtgagcaaagcaaggattggaggtcgagctctctagggctgcggacatttgggagaatatttgggtgggaagaatgaacagcgtcactcagaactaacggcagggggcagtgtggctccacagtccatcacagggcacccccccgccccaccgaccccgacagtgcccacagcccctgccatccaaccagggctgggcctcagcctgggggacagcttctgtgtagtttggttcagaatgtgtcctcataagaaaggcggcacctcccagattccttccctgccctctgccgggaagtcttactgccaaaacacccaggaatgtgtgtctgcctccagcaactttagctgcaggggctggacctggctttgatgctgcggcagctgatgggatcctggagcacagtgtgggaagctggctccttaggcctgggaacaagcccaggcaaccgggctgggactcgctctgcctggctgcctctcctacagcgtgcgtgaacgggaggccaggatggccacaggccccaggaaacgcagatctcatgggaagaggttgcagtttcagcttctggctgtggatgctccgggcaatttcatgcatttccatgagttcagagaatggaagctcccctggcccctccctaccactctttgtaaatcagctcgctccttctgttcattcatccgctcattcatccattccgcacacgtgccttattgaatccct

SEQ ID NO: 69415 - DNA, 580 bp, Homo sapiens
aagtccgaggcttggatggcacctgcccaggtacctctccccggctgcggccaccctgagccttgcagctgtcagtcactggctttgccaagggttagagtctttctccttccctttagtcttggtgatgtctgcagggcccagctgaggagatggcagtgggcaggggcagcatttggggccagtggtctatctactcaaatattcacgtgcatgtttagcaacaaatcaataaagaagtggtaagcccaagggacgtttcagtgtgtgaggaacaaggtcaattcctcttcttgtccccgttcttttaatctgcttccagattccattaggaaatcgatgatgaggtcttataaaaagaatttaaaacatattgcgcaaattaataacctctgttactttgtgaggaatcctttaaaaagcaacctttggctgggcgctcacccctgcaatcccagcactttgggaggccaaggctggcagatcacttgatgtcaggagctcaagaccagcctggccaacgtagtgaaaccccgtctttactaaaaatacaaaaaattagcctggcatggtggcgcac

SEQ ID NO: 69416 - DNA, 1144 bp, Homo sapiens
gccctttttagggtcaaaatggcaaccggtgaccaggaccccagaccctctgtattttcctcatgccccagttccacctggatggagcctgccctcccactcctgagactaaggtgtggcaccacacgtgaatgcacagggaacaggcagtgtccacacagctccttcaggagcaggcgcctgtcctcttttcctttcctgacttcttccagctggagctgtacccatgcctggggccacaggacggaggccacaagcccaccagagagggccacagcgcgggtggagttagagtggcttccctctggacctcgaacattctgacagctttgtctggctgcacatttacaacactaaagttgtgtggactgcaagaccaatgggctggaaacccaaagcaaatgcattccaagggagggtgatgtctccgtggatgtgtgaagctgaagataaggcacagcagcagggtggcaggaagagcagagaagtgttcatggctcaagatggccagtgaccagctgggccccgggggaggcagagggaagcaaagcgcagacccgtgtcccgtgtccggaggcagctgctgcacccagacgtccctgtccctcctgggaccaaaagtgtctcctagctgtgagtgggagctcaacataactccacaagatgaaacctgcattggggcaccagaatgactcatgtatgggacttgccgttattatgtcatcttttatctaattcagccaaaatcctgacttctttccaaaaatgtcttggttttttcaaaagtcccaagttaagccaggcgtggtggcttacgcctgtaatccctacactttaggaggccaaggcagtaggattatttgagcctagaagttcaacaccagcctgggcaacaaagtgagaccctgtctctaccaaaaaaaaaaaaaaaaatagccaggcatggtggcacctgtctgcagtcccagcttcttggaaggctggggtgggaggattgcattgagcccaggaggccgaggctgcagtgaaccatgatcacaccactgcactccagcctgggcaacagagcaagacttcatcaaaaaaaaaaaaaaaaaagtaccaaattaaaggaccacattcagaaattgttgaagtaagatga

SEQ ID NO: 69417 - DNA, 1108 bp, Homo sapiens
gcgcgaatatgtcctatgggtagatgctctgtttctaccaaggcccagcaggctgcccagggaaggggccctgtgaatggagtgcaattctctgctgcacctgtgctggccttgctccaggtctctagccgtcggccctgcaacaccctcgttggtcgtgctggaggccccccctgacatcttcctcttcctcaactacctctagggacgaggaacctgccaagtcctatggtcctggcaatagggttgcttgtgccagagcctcaacctgccacacatttcctttctttgagctctgctcaaagctagcagccttccacttcgcctgattggtgggtcagagaggtattccaaggtgcagcacatgctgccttcaaaatccaaaaaggctgccaagcactgtgcttccttcttaatggtaggaggtgcaaggtgcaatagcttgtactttactttggaaggaatgttctggcaggtcccaaaccattctaaaaaattaaccaatgcagctggcccctgaagcaatacagagtttatctactcccctttggaatgcacatgtcttgccaaggaattcagaatacaggacttgtcccttcctgctccttaggtctaatcaacatggggttcatataatgggccactgtggtgttctgcagactgtccgggtggtctgggtcaccaccagctatattgcaacagagcagaattaatggagtcctggggagagatggtgcatgtgtattgttgtctatctcatgtaaataaaaactgcctctgatccttctctctggtgggtattgaagccagatggttacaaatgtcataccagaggctagagtgatctctggcatagaccccacacccagcccaacagctgtgattggaagggtctactgtcgcggacatgacccacccagcttcggcaaaggctgggctggtgaattggatggtgtattagtccgtttccatgctgctgataaacacatacccgaaactgggcaacttacaaaagaaagaggtttaatggacttacggttccacgtggcttgggaggcctcacaatcatggcagaaagcaaaggcacttcttacatggtggcggcaac

SEQ ID NO: 69418 - DNA, 918 bp, Homo sapiens
gttgtaggctgggagtaagtggtcacttctggaggctgccattaggcccagaacactgctccaggtacagggatccgggtggggccacctcggcacgcacctgccctcatgtgggcagccctgattcctgggacagggctgaggttcagctttacggcagttggaggagctgcccccctctgcccccactccccaccagctattgcaaagctgaacgcctacagggccaggcaggaagtacagagtgcgccagcccccggggactctgtgaactgcagtgtgagcaactcccctacactgggaaggcttggcccagggcactggactggtcagatccggctgactcacaggtcaccagtctgcaacctttgccaaacactctcactccatcccgctacccggagccagttggcatcaccttggccatgccaacattccagggtagaagttagcatttccaaacccagttcatcggcagaattgcttgagacactttctttagactgtctggattttcttctctttttttttctggaattttttaaatttcagaagtaacgcatagttgatttcagaaggtcaagcgtgaaggaagaagcagctacgggaacattttgcagctgaaagcctgtcccccacaacctctgtagggcagctgcagatgcctcacacaagtcagtccattccgaagcaggacttttgggatgcggccgtgctcttggatggtccactcagtgctctctctcaccctctccaggatgtgctgagaaatggtagccttgggagacacccactgtgaggacctgtggctctagagccaggtgctctgaaggaaaacagcagaaagggatgcaagagtggcacgggctgggtgggcacggccgtccctttggggctgcctctttaggaggtgggaga

SEQ ID NO: 69419 - DNA, 1733 bp, Homo sapiens
ctgtaatcccagcactttgggaggccaaaatgggaggatcacttgaggtcaggagttcgagaccagcctggccaacatggtgaaaccctgtctctactaaaaatacaaaaatcagcccggggtggtgataggcacctgtaatcccaggtactcagaaggatgaggcaagagaatcgcttgaacctgggaggcagaggttgcagtgagccgagatcgcaccactacactccagcctaggtgacagggtgagactctgtctcaacaacaacaacaaaaagatgcaattgtaatgagctctgtgtagtctatgagcccccaaacactcacgtttgccaggtgtgtgtgtcaccacaagatggggcacaggggctgccctggcaggagggtcacttggagaaggagtaagccctgtggaggatccagtgttcatccaccctggggctaggcatgagagggtcctccaggagaggctgcacacagaggaggaaaacctgcagggctgacttgaagccgggacacttaaggagaagccccagtgttcacactgtaaaaccagccaggacactggcaggaacactgtctgggtgttcgggaacttcgcatttccagccagcatgtgaaggcgcgttcttccactttaaggtccgctgcagaagtggcaaagccatgtgccttgagctctgctcacaggaaagaacacgacaaagctaaggggacttcacaagggctgtgtcaaaagaggttcacttcccttctgtcagacgcggggcaaaggtcgggaaagtgtgctgctgtgactcactgcatgtctgtagctgatgcccaagccctcttgtttgtttcaatgtcttcatgcagagattgactttttaaaatcaaagggaccaacatgtcttctctgaaatccgcagggccaaggtgggtataattgcttacgggggaacctgacagtgcccctcagcagttctgattctaaaaactgtcacacgctgggggtgtcacccgcagagggagggggttcttgtttatccagcaagcgtgtgagtacgggcttaaatcgtgacgaccacctctccagcagcttgacagtcccccactggcaaactccttgaattttctggaggtcaggtaagtctataaaatatcacagaaacagcaggtgctaaatcagaggaggtgacaagaggccggaagggtttctggctctttaactcccttccagcaaaagggtcttgcgatccctccaccaacttcaagatatgaagataactcctcagaaggaagcccctgggtccggtcgtggaggcccagtgtgctgaagctgtgtagtaagccactcagacgggagatttccaacgccaggttcagctgcggctcagacgacccatgtctaacccgaccgggtgctgtcagcccctcccagcccaatctgctccttctccttcctggatccaccctggagctccgttgtttgattgtttttggcaggggacagccaaacagctctgtgaatgaggcatatcctgaacattttcagttttgtgggccatgctgcgctctgtcacgcgcctctgctgttgtcgtgggaaagcagtcctcaacaatgtgtcaatgaaccgtggggctggctttcaacccaatgctatgttcagaaaggggcagcgcccggacccaggcttacaggattaaactgactcatctggggccggcatggaatgtgagagggaacttgc

SEQ ID NO: 69420 - DNA, 2045 bp, Homo sapiens
gcagaagaacctcttcactttgacaaagtccaatttatggttttagtttttgtttttaaacatcgaatacttttgatgttgtctctaagaaatctttgctggccgggtaccatggctcacgtctagaatcccaacactttgggaggccgaggcaggaggatggcttgagcccaagaataccagcctgggcaaaagggcgaaaccccatctctacaaaaaatacaaaagaaattagctcggtgtggtggcaagaccatgagggaggggccgtagggagacgcaggggcataatggcaagtggttaattctagcagcctaagaggtaaagtaaacaggaaaccgttgaggtggtgttcagggccacaggagagactggaacactggccaaatgcttggctctgttagagtgagcagaataaaagcaggccggaaaaagcaagtcagaactttggcgatttctgtcactatcaggaggcactggactgcaagtcacagaataaactcatccaccgtgacttaaacacgtagggactgtccttctcccatcacaagaagactagagccatgtctctgctgggggcttctgaggttcacgttgtcagagccaggatgtcagcagttcttggatcttttgtcaaggccatctctgagtcacctctgtctgcaggggactgtgggatggtgagtgtttagctctccatcctctggatggaagcaggcaggggagaagaaggttggggagggtgctgggttagccacccatgtccaccctgagcatgctgggggccaggcacgcagcttctgcaagacaagcgtggtcccgagcccacctggaaatctgggagctggcaagtgttccctgaattcctgcctccctgcttctccatcggcagcattgctcaccgcattcttgttgtaacctgtctcggctgtgagctctgggcgtttgcttccttcctgggtagctgccagtctgaattatttatgaacctaaggtacacactgatggcattccaacaaaggccaccaaagggagcagcctgtctgtaaccctgaagcttagcacacagcgaaaaggactcagataaaactgtaagcttcctctgcagggaagaggaaggactggacttctccagggcaggcggaggcaccagaagcaaacctgttcctgcttccctccgttttccaggtgccttagggtgactgcggtaactgggagctgagcactgatgggcaatggggcaagaactgggccatgtgcctcggggtcccagcacacaggccagcccctgagggtaggaacgagagcccagactctggaggcaggcagaccagggtttatgccctggcaattcctgatggggccgaggatcttcacctctttgtgcttcagtttctctatctggccagtggggttgctgtgaggattaaatgcagccgtccctgtgtggtagattgtttgcaacaacaacaaaaaaatggccacaattgttccactccctgagttcacacccccttgcaatgtgacttaacagcaactctcacggagaggcggagtctcttccacaccctggaatctgggcgggcctgtgactcacgatggccaatagaatgccctgcaagtgacgtcatgcccttccgagccttgcagcttctgctggtgggaaggccgatggcagagcccagggaagttatgtaacgggcccagctaatgagtggcagaggccagagggcttggcctgcagaactgtctaaggccagaggccgtccatacactccgtctcctgaaggggaagcgggctcttctcagatgcacagggacaatgtgaaaatcctgtcctcagattgagaggctgtttcgtgggcaccgaattcggggtcaggaaagcagcctgcatccacgagtatcctcgggttactaagtggggccagtggctccaggtgtaacccatttaagtttgccagacagccgggatgtaaggaatgccctaatgattcccctttcccccccacggaaagtgggcagtggggtctgggaaggggtt

SEQ ID NO: 69421 - DNA, 654 bp, Homo sapiens
tgcttcagccacagaggccagtgctcagactccagccagctggaggcccccaggcaggcgaatgggcttgggtttctaagaccaacacagaaatgcccaggtacactgtgctgcttttctctggagaagagagaacgtccctttcaccaagttattatttcttccttttaaaatttgattgttataacattgttttaatagtcaagtagtgctgcaaggcttgtgataataaacagttgttatcactgcacctcttcccacctccagctccctcccctgtgagtcatcggccttcaagtctctcagctgtttctcttgaccttgaccttcacacttccaacatgattacagtactattcctttcggttttatctcacttacaccaccacctcccacacactcccacctattccacctacccagcatcttcacaacttacacagttacacaattcgcaacctttggccaagtcaatatttagttctgatattactatgaccaccataaatgttgtcacaactaaaccacttagggaactaggatggtcttttctttttagtacaactttttgattttcctggggttaacaattgcctcattttttcataaacttaatttttttgtctactacttaccaattatcccccccccaat

SEQ ID NO: 69422 - DNA, 1281 bp, Homo sapiens
tgaggggcaaggctgagctccttctcaggaacggacacaagactgagggctgggtcactcagatactttgcccctcgggccccacggattgatttaggggtgaactgtgaatccctgggagattccttcctgccacgcattcctgctgatgggaaacaaagcggtctttgagggatgctggaggaggcagcagtttgtgataaagagctgtgagaggagaagcccctttgccacctgccctcctttgtgcattggatgttgtcctcaatggacgtgatgcctggagtccctgcagccatcttgcctccatggggcaagccaggaaaacctcaccgacttaatggcttccctccagcctttccaaagccttgctctggtctcagagagttaggaattctgtcacttaaggcccagagcatcctgctgctcccttcactccagaaccagagccacacggctaacaggcaaagggtcaggaacatagcccgtgttttctgctctcggcacttggtcattctgcatagaatttggctccaaggcctggcctgacaccttcgcaccaaggtgccgtaaatgaaacctttactcctgagacttcctcacctctgcgttcccagggatccacaatcttctatttgtaaaatgattcccggttgtcatggagaccagggcaccgcagtggagctggaatgttaggtggggtccaaggttcagtcctgggggtagggagtggggcaggcagcttcactgggccctttatctgcctgattctcatctttcttacacaatagtctactcattattccttccctaagggccaggacacaggcctgcctggggttacagtccctgtctttacaagtcctctccttctggctcttgggcgtgcctgagctcaaaggagcctccaagcaaacttggcagggggtgtcccccagggcagaggtggggccctggctcagcacccccagaaaccacaaggtgggggcggaggatcctgcacctgaccttcaccttcgtgtggatcagatcagagcagaagttctatttctggaactgtcagacctgctgacctccagtcaatggcagaggcaggaaggcaggcagaaatacaagatgcagctcttgttacacctcctgcacagaccaacctagtctcggctccacacagccactcactctttcactcaacacgtgtttccgagcatcttctatgtgccttttctctatcatcagatgggggcccctgcggtgggcagaataacggccactgcaaagatg

SEQ ID NO: 69423 - DNA, 717 bp, Homo sapiens
cggcggcagtgaccaaaaggcagagctcacatgcggggtccgagtcacagtgctgctggataacagccacaatgggaggcttagtgcctgctcacacgctcccacccacttttcttctccaagaagtctgtgtgattaagacctttacaatttgaaaaaggaagggactaggtgacttggggattgatctctgaccaacaaaggttaagtgccatgaagaagatgagctgctcgcctcacaaaatcagagtgaatttcggaaagtacaaacacacatgcgtacagaccactgaaagcagcaggttcttccaacagacaagccataaagcccacgggtcatgaaatcaccaaggctctgacagggcagggctgtcagcctggcccaaatgtggacctgggaacacccttcctccttggctagcaacactcacagcaaagaaatccctgaactctacaagcacccaccccttctatgtggacttagccccctttctgtttgtttgttttttagacagggtcgcgctctgttgcccaggctggaatgcagtggtgcaatcatgacttactgcaatctccacctcccgggctcaagcaatcccccaacctcagtcccgagtagctgggactacaggtgcacgccaccaagctgggctaatttttgtattttttgtagagatgaggtttcaccatgttgcccaggctggtctcaaactcctg

SEQ ID NO: 69424 - DNA, 2056 bp, Homo sapiens
aggcggaggttacagtgagccgagatcgcgccattgcactccagcctgggcgacacagagagactccataacaaaaaaaaaaaaaaaaaaaaaaaatatatatatatatatatatagagagagagagagagagagagagagagagagagaaaatgtagtcaaatagacataacatagtatttattattttagccattcacaggtgtacaattccctgacattacccacattcacaatgtggtacaaccatcaccactatctacacccaaaacttttccatcatcctcaacaaaaattctgcacccattaaccaataactccttccctcatccccatcctcagtaacctcttttctacattctaggcaaattcatataagcataagcatataaaatttgcccttctgtgtctggcttatttcattaagcatgttttcagggtctattcacactgtaacatatatcaaaacttccttttcatggctgaataatattctgctgcacgaatgtactgcgttttgttcatctgttcgtgggtgcaggccatttccaccttttggctctcgtggataatgctgcacatctgcacacattgggggacaaacgcctggagtcgtggctttcaattcttttcgatacatacctaggagcagaattgcttggtcacagtctatgtgtcacattttgagaaactgccaaatggttgcccacagcgtgccaccaccttgtttgtataaataaacttttactggaagaaagtctcactcattcatttaaacactggctgtggctgcttttgcacttcaaaggggagaggagtccttgcaacagaggccctgcggcctgcaaagcctaaaatgttgcctctctaggccttcgtggagaaagctgaccaacctctggtctaaggtcacttccctggtgcagcctgtgttttcacagactagaatcccagtgcaatggtctgtattggcatcatgggtcaaaagtctcagaatgcgttcagagtaagaggctgaatcccacggacgcacgctggccatgcaggatcgagatcagcagccccaaacacagacatggtagaaagcacccaggaagctggctggaatgctggttcccaggcctcactccttgagaatgcattccaggttggggctggaaaatctgtttttttgtttgtttttcttttttgaaacagagtctcgctctgttgcccaggctggagtgcagtggcatgatcctagctcactgcaacctctacctcccaggttcaagtgagtctcatgcctcagcctccagggtagctgggattacaggtgtgccacactcagctaattttttgtatttttagtaaagatgggattttgctgtttgccagggtggtcttgaactcctaggctcaagtgatttgcctgcctcagctcccaaagtgctaggattacaggcatgagtcaccgtgcccagccaatctgctttctaataatataataagctccctaaaggaaatgttcagaaccacactaggagagatccgacctcctatagcaggaaacccagcagctccatgtccacacacaggccacgcaaggcagctggctggggtggcctccagacaattcccccagaatccagcgtccagcccaagtccctgcctataacccagtgtccgctgccacagcagggggctcttctggagctcggacacaggcctgctcctcccagtgacaaacccgggagcaggtgctgggaaatcactcagtggctcccatttcctcgcctgctggtgaatccaaaacagtgccaacagaacgcatccatttcttaatgatctgaccgcccctgcgagagttcagcccctcctaggcttcccttaccatagtgaaaacactttccctgcaggaaaggccagcaggaacccctggatcctactgtttagctcttgctgtggaaattcccatacatcggacaggtaccaaaggctcggagatctcagcctgtctgccccccaacaatgcaagccctgcagctagggctctgcgtctcaggacatagcccac

SEQ ID NO: 69425 - DNA, 1630 bp, Homo sapiens
catcaagggatggggggtgcagatcagatcgtgggactctcaaccctgtccccagtctcagtgagcattgggaaaaaaggaagacgaggacctgatgccaacgtcaagcatcagctaaaatgaaaccggtcaccaaagaaggaaaatgacacctctcagctcccagcctttctcctcctctgggaacaccggttggctgaggccctcatttgttatttaaaggaataccagcacaacttccaacccggcaactgccactaacttccaaaccatcggactgggacatggtaccagctgctgcttctcttttatgtcttgttaagaatcagagttatgatttgtctgtttccgattgctcaaatgtggccagcttgccgcccctcccctaccagtgtggcctccctcctccggacactctgccccggggcgctggcgaaagtccttccgtaggactcagacccacatccactgtgcaaccgtgtgaggcacaccctcctcgccggagggttttgaggaaatgacaattcgggtgtttagaggccagccattcgcaagggtcatttttccacattaagtagacattctgagagtgaactctctaagccaaagctgactgataataaacacgtattctgagaacaatgtcaatcaaaggaaggctgagtagcttattaagtggaagctctgagccactccacaaatagtgttttcttttatttgcccaaagggcttaatacataaaaccccggtgacttctgattgcagagtgagctcattggcgactctaacagctacgggctggcagcagtgcacacccctccccagcgcaccgagttcagcaagtactttactctccctgccccgggctctttctgcagaacggagaccccatttaccttactttaaaagaaacaacaaacaaacaaaaaagggccactgctgctagttggctcctgaaagcggatcccggctagaatttcctaacggagtccaccccagctttgcgcaactgcctgaagggagcccggcacgacttcccccttccatgggccacacatttgagggcactttctcgaggaaaatcagctgtcctggaaaaaaaaagtcattgtttccgtggacaaaagtgttgtgacagcatgatccaaactggcttggggtagacaggattccagctgaggaagggggtcccgggaccgccctgtgggagatctgaggcccaggagtgggggtggggcggctcccttgcctaccagcctggatttcgctcagaagcaccagcatgtcctcagaaactttccacactgtttaccatccagtaaccactgggccaaaacccacacgaccccgccttccagcccctctccaggtgctccctaggcgcacatctgggaaactccagcggctttaggaagctccagcccttctggggtcgggtgtcgcccggcggcatttgcaattcaataagcctgaaagggcctctttgcaacaagctgcaagaagaggcttttctgatcagggaggttaagaagtgctcaggtactcgaagcacagaaagaacccaccaattgcttttgagcaatggcactattttttttaatacatttttttctcctaagcagtgtttctg

SEQ ID NO: 69426 - DNA, 5516 bp, Homo sapiens
ctggggtgggaggcagctcgtcagaaaagcactgagaaatgtggcagggcaagtggcacagcgactacttcaaggcctaggtacaaccttgtgagactgcaatgcaaccagctcctggagcacagtgggactgatgtacattcctaacaagaacctcaggctcaatacagtcaataattaacctaaaggaatcagcttcacaaagagccagggtttgaccaacttctcagaaagatcagccactgctgcacatggcaaagccccaacctactctaccaggcccagcagagcacaggaggtgaaatgcttcctgctaggcgatgctgacctcgacctagccacctgacatgccaccacctgtctgctttgggcagggtaggaaaggcttccagttaaagtacaaaacacttttcaaccaagctatgcaatatcctaagtgatccaccttaagtggagaaagcctccctccaaccaggccacccaagaaataagggactggtcgctagaaataacagaagatcctaaggatgtgagctggtgagtcagtccaggtaggtgcttgtttactttgctcttccaatataagaaagtggtgtgaaaattttcactgatgattaaagctcacacacatccccaagagataaaacgaatgcccctatggagagggttccctttcagaacctaaccactggctggtattcaaagtggtttggatttcatcaaaataaccacagcacccctcctggcctgagaagttcccagaatctgaggcaggggagaaaaagtgcacagcctgggccagcatctcacctttgaactagtggtgatttgatgacactcgtcaccactctactggtgtttccaagaaacactggatttgagggttacggcaaaaagccaccactatctctgctgtgtagtctcctagccaaggacgaaaatgcaaagggagaggacaggcctctcatccacagaggcgtcacagtcacggtatggggctgcagcacgcactgccaccccagacacaggcatcacaacgattctgcagaaaagctggggcttagcggccccatcactcaatcagccgagcattcgaaaccaggtctgccaggcagcaaaggctaaatggtattttaaaaaggtgtcgcttctgagtgtatgtgttcaaggaatctctaggtaaaatacaagcatagcttccatgtagaaggtaagcttcattaaaggataaataattaaaacgtgctaaattgagccttacatatgaaccatcaaaatcaactgtaaacagtgaaatctacaacaacaaagaggtactgttcaagaacattctccctacctctcaaattatgcacagacgacaaccgacccaccgaatttaacacgggcggctctgcgtccttcccattcgtctttgttaccttgaacactcctgctaggtaggtacaggcaggttccattctgacttttggactgggaaactggggtgcaggagggccccatggcacggccacagaacttgaatgcaaggcccttccctagcgggtcggtctcgaaattaagtcagctaaaacgagagtgtgcggcgaggaagcgctgggcggacggatcaacaccccgggccccgtgccggaccccactgccaggcccgagccccggagctccaccgcgcaagcgccgggcgcccgggaagcctcgcccgagccaagccgaagcttccgaccgaaataattacagtcttacaccaatttgtgttccaacgtaaattactaagtaagtcgaacggaggctaactccactcacaaagcccagaggcccacatggcaatttttctaagccctgcgcagaccgcagcgccccggtgggtcccgggcgggccggacgcgcctcccaagggcgcgggtccgaggcgcaaggcgagctggagaccccgaaaaccagggccactcggggagtgtcaggaagcacgactgggcgccttaggacgtccgggcagacgcggcccccgaggagccccagaggagccccagaggagccgcctgacccggccccgacgtgcgcgatcgagcccgggctcgccaaagcccccgcgcccctccggcccggacaggccgagtggacattgtcggagccccgcggcctcgccggcaattggtttcccccccgaagctgctccgggggtgagttcgggagagagaggcaggaccccgggaccagagcaccccgaccccgaccccagcccgggccccagccgccccagcgccccgcccgggccgctcacctgtcgtcgacgtgcaggctgggcgagcacttgatggccagccaggtcttccagtggacatggcgcaccttgtacacctgcccgaagccgcccgagcccaccttctcccagcccgtgaactcgcccgcgtcgaaggtgcgcagcagcgccagggcccatggggtcccgccgtcgccctccatcgcgcacgtctagccagcgccgcggcggctgcccaggtgcccaggtgcgcgctccgccctgttacgtcacttccgtaggtcgtcccgcccccaggccccgcccacttacccgccccccgggcgccctctctgccagcgcccggtgactgcggacggatgaatagacgctgcgggtcactgcgctctcccctgggtgagcagagcttctcacgcttctcacgggtctcgacgtgcgcatcagctgccctgcttttctttgctttttttttttccttaattgcggagtcacatgcagttgtaagaaatcattcactttgcctagtttcccccagtgttaccactttgcaaaactttgccaaaaaaaaaagtccaatctcacaaccaggatattgactttgatacagtcaccgatcttattcagttttgccgttttactcgtcttcctttgcatgtattagttttacacaatgtaatcatctgtgtaccttcccgtatccacccccacctggccactcctgtggcgattttacagccgcaccccggagccctggcatcactaatctttcctctatttctaaaattgttttatttcagaaatgttatgtttagatacaggaatcatacagcgcctaattttttgaaattggctttcttcactcgttagtctaattccctgcaggttcacgtcttgcttttttacacgagtttcctctcagaaagtaactttttttaaaaaattacccaacagcaaatctaaagtccatttcaaatgcaagagttccctcatcctttcctaaataacagcctctttttacaggtagaacagatggtttgaaaaggaaagatttttttttcacatatggggaaaaaaaattcccagccttggaaggatatttgggttagaggccgaagtgcatcacagatcacgcacgcgtccacacctcagaaaacactcactcattcctgagacgcaacggtgagtgaaggcttatttttggccacaggagattaataatgaagacaggagggcggagctaaaggagagggtattttaacgacattaactgtgtttttgtgttagtaactcggaaagagagaggctgccccaagtcagcgcattgaaagccgcagacctagtgtctccaggctcccccttccaaacgggcgcggaccttctttcatagcctgtagcggggagccgcgtctccccactgcctccccactcccatccggccgctctttggagggaactcacacatcccaacatgacgatgcttgctcggggggcctcctggggggaccagggagccacttcctttcccacatactccggaaattaaagttggtctccttaaggctggagtggcaaatagttgttttaagcttgtcacaaatgtaacttacatttggactaatgttttaaaaaataattggagttttgaatctacgaagataccttggaagtaaacatagttattattttggtgggaaaaaaatgaatggacttgaaagtgagtcacctgtcctgttcccggggctcagctctagcaaagtacctttctccatctacagtctccggcacacagctccgcagctgggggtgactaagagcccacaccacgcaagtaataaaacgctccaatttcatttatttaatcatctgtgtgcttcatttgacaaatatttatggagtgtctgctgctagctcagtgcctggtgcctgggactgaagaccagagccccctggagaccaaaagagccagctcccagctgtgagcagatcgggtccaaagatcacgggctcggcggcaggaacctggtttggtatccggctcctctgcggactttgaagtgctttaccgattcacatgacaactggtaaaacgaaaacaaacacctttccaggaattgtgaattcgagttccagaccctctgggattccgggagcgcagctgctatttatgttaacagtcattggtcccaggctggtgaggttagaatttccaagtataaaagtaatttagtttcgttttaaatacattttagggccaaagaaaagtggaacgatttaaagaaaaagatgaaatgaataatagggcaagttgggaggtggctgtcctgaggtttcatgggacaacattaattaacctcatgaagtgcctgcatggacaacgtgcccggtgtggttacaaacaaaccaatcagcacagatcctgggtggaaagcagggcgcagccacggaggcacagtaggggtgcagacttgaaggtttttaggaggtaagccccgagggcacgaagctccacggagagactgttgacccgcctgggagtgcagtgcaggtgaggaggggagggacgacgaggggagacaatggggggtgggaggtgggaaggaggagttggggaagggggctgtctgctgacatttgcaagcccccactcccccactaccctgtgttcctcctggccccttccccagaagaattccaagccagtttcctcctatactggatgtcctgacagcgaatctaaataggtgatcccttgagctccaggtccccaagctgtgcccttcttcatagggggccatttagcactgacccacccagcaggcagcccaaggtccctggtctggaagtgccaggaagctgcctttaacatcctaccgcagggaacaatgaaggttgccggccagggagaagacaggatagagacgtctctgggtttgcagccagcctgcctcagatggggtcccaggctgtgaccatggtgcatttgcctgtccctgacatgtgggatagagggacctgcttcgagatgtcggtggggatccacgcagatgataattatatgtgtgtggcacatgccaggccatgggtgaatagtgagattttcaattgagtcattttcgtctttgtccttctcagggtcctggagcaactcaacccttgtaagtgcatggctcagtgagatcgtggagctgacatagggctgacctggctctcagaggccccagaataaagctggagcccctggggtccacctgctggc

SEQ ID NO: 69427 - DNA, 2113 bp, Homo sapiens
acacaggtccacgtgtctctgatcacacacttgtttctaccgttttaaactccctttggggacttgggggtgaggggcaatttctgagcatttgtgggggaaaaaaccatccactacattagggggttaagaaaggtaaatgggtgataactctaaccaccagataggagtgtttatttccatgagttttcatttctattttctcaaggctaacccctgcgtgaacacctcccctctagcaggacgctgcgcgtggcccccgtccccacctgtccacgcgaggcgggcctcacctgagcggccgggcacgccccgtccccgaacggccacccaccccgggtaggcacgcgtcacctgtccatccacctcgctaccttctctctgccaccaaaaggcttacgaaaataaggcgcagggggtctgggagaccccatcaccaggactcagcttctctaaacgcggggttgggggtccagggacccccccgtgcgacccgcatgggctgtacccgagggcgggggataacgacatcccctggggcctcggcgacgacgccgcccggcggcgggggccgcggggccgcgggccggggcggcgaagaccctgcgccgcgcccacgggcgagcgcggcccggcagccccgcggccccgcgctgggcctggccgcgggcgggcggggggcgcgaggcaggggacgggggcgcggagcccggccaggagcgcccgcggcggcgggacccggcgggcgggcggcgcgcagggcgatcccggagcggctccgggaaatccagccgggttttgactccgatcgccaacggtgcccgcagccggcgaatgtaacaaagaacagtcggcatggcggctggaccggggcggcgcgcggctgccgggcgcggggggcggggggcagcgggcccagggcgcgccggggctcgcgggggcagcgggtgcggcccggggccggcggggcgcacgccggggcgggcggcgggcgcagggcccggagctttacctgcctttggaatgtgcagagcgggatcggatccggactccgggttgcgatccgctccggaaactgcgcagcaccggaagccggggggcggcggcggggcatggcgggacttgtagtccgcgggcgggcgcggggggcgcaggcgagaccctggcgcggccgggggtcctgcgggtgggactgcggggcgcgggcggcgtggacggggcagcgggcgcgcgcggggcgggtctggccggagggaattccgcgcgcggcccccctcccacgtggcacggccctgccgcccacgcgcgcgggcagctccctctccacctctcctcggacgcgtttcttgcggagttggggagtggtggcggtgggtgggtcgagtttttctctagaacaggcctgggacttgcccccactcacggtgacctctggatttggccggcggggccctgggacacgagctctgtgcccgcgaggggagtctggcctggcgggctccgccacgctaccggtgagcaccgggccagccgcggacctggctctccattcttccccgggggcctgtgtggcctctcttgaccccctccaccaagtgtgtgtgccatcacaaaacgtgagacggagaagggacagacttttcaccttagtcctggccgcccatattcagagaggccgactgtcttgttcattgctgcctggcaaaaacctacattcataaagagaagtgatgaaccggggaaaatgattttaaattgatgccacaaaagggctcgtttccctcatgtacgtgaaactcttgtgaaccaataaaaatatatatgtatatagaaaaatgagcaaagtgtgtggatggacagttcgtaggaaattcaatggttcttaagcatatgagaagctattcaactacgctgcaataagagaaaaaaagtcgcagtgggatcatttttattagattagcaaagattttttaaaacgtttaatacaacctgggcaacatagccagaccttgtctctaaaaaacttagctgggctcggtggcacgtgcccgtagtctcagctactcaggaggctgaggcaggagggtcacttgagtcccacagtttgaggctg

SEQ ID NO: 69428 - DNA, 1585 bp, Homo sapiens
gggccaagtcctcttccagcgccagcccctgcctctgccaccctaacaaataatgccccatttgccaaatggacggggacaaaatggagaggagattttaaaaacaagtaatcttcttttagtgtattaaggtgttatccacaatggggattaaattctcccaacccatgccaacagtggcagggcccccacgggctgaaaggggttcctcgcatcacagcagaagtcaggatcgcctgacacaggtaagcagctcctcctctctagttagccttcctaagtggccagatgtcaagggttaacatctacctaaatacccacgagtgggtagagaccctgattttgaccctagatcctccctcccacaatcagccatggtcatgagagcctcttcttagctttccaagtgagctcttcggggaattccagttctattcaattgacagactgggccctgagtgtttccctctgaaacagtctgctattaatacaggattttaaaaagttaaatagaagcaattatttggcataggcggcagtgacagtgaactcctcagaggacaggagtgaacccccagccccagggaagaactccacagagcccaggtctgcatctgcaggagcgagctccctcgacaacaaccaaccatcccccaacctgcatttttttgacattttttttccccaaaacaagcaaagattatttacataaagcatttgaaaatcaagcaacagaagggtgaactttgtattccaaataaacagcttcctctctgtataagtgacagagtgtttttcggagtggggggctattcacggtaagtcagggtctccacatggaaaggccaaggggggactcacggttggcaggtgagggtttgggtcggggagccctgggcagcagatggaagcaccacggggaggggaaaacaagactgaaggctgaagagcaggctgagcggggaggccttcattcaccttctcggtgctctctccagcctcaacaccttgacctcatgtagtcacatacctatgcaaacagcgcttatctggaaactattcctttgtttagacttggggccaaaaaattccaggcacagttactccagattttgctactgttcaccaacaagagagcccctgagtcttcagatctcactgtgccctttcactttccttttcaattaagcttcctgtacagctgcctcggctccttctcttagaacactctagagaactggaaatcatgtaattacttttgtctccaaagaaactagcaatgcagctgaggaaatgtatacaaaaggtttagatactcgaataattttcactttcatcacattctgtaacacccaaggaaagaactcccaaataaaaggaaggcaaagacccttcagtaatcatctggatttcctagtcagatgtctttccccactctgcaagcgagtctcacctctgtaaatatcctttaagacagtatgaactggatataaaatactatttctactctggaactgggactcaatttaaaaagtaaactccattagagctaaagattatcccaacatctacaacatttaatcct

SEQ ID NO: 69429 - DNA, 1161 bp, Homo sapiens
agggagggcagaggggctagaggtcgcattcaatcacctatggccaatgatgtaatccatcatgcctagcgaatgaatcctccataaaaaccctgaaaggatgggtttggggagcttccaaggtggtgaatacatcaaggtgccgggcgggtggctcgtccaggcagggcatgaagctgctggagtccctgccctccccctccgcccgcctaagcatcccttcgatgtggccgatcctgagtcatatccttcacaataaactagtaatagttagtaaactgttttcctgagttctgtgctatgagccgctctagtaaaatatgtgaacctcagtggggtgggttggggaagtctgccatctacagatagtcagaagaacgggggcaacccggagcttacgcctggtgtctgaagtgggggccgtcttgcgggacctagccctgggcctttgggatctgtgttaagtctgagtaatgtcagaatggagttgaactgtaggacacccagttggcaccagagttgaagaactgataatcggtgtgagaaaaacccccacacatttggtgtccaaagtgttgtgagtaaacatagttgagactgctcctggccgcagccgcggctgggccgggtgtggactctgcacttatctatcgttggtcctgtgggatgactcaagctgctccaagttctggaagaccgcactctgtgtagactatgcagagagggttttgcagatgaaccagatatttgcaaaggtgatgacttggacacaccgaggccttcagggtggcaggagaaagtccaagaaaaaggcatccagtgggcacggcagccagtttcattgggagagggacccacagggagactccagatggaacaccagtcaggggtttgtcggcggagaggaggtggggagctcaggccagccagtcctcggccttatccttccgatcagagatggcattacataacagacaggctgggttccggcggccttgtccctgtcttggctcaaatgccaaccacatgtcccttgtcaaggctgagttagaaagataggaagaggcaacctgacaccaaagtgtgagctttgaaagggaggggcgatgccctggaatgagaagttcctgtttcttttctacctcttatttgtcacaggtc

SEQ ID NO: 69430 - DNA, 1572 bp, Homo sapiens
actggctggcgcggatgagcacttctgacggtccctccaactgccagcctgtccctcgcggagcccagggcctggagcacctgccgtttggagaataaaatcaatcactttgtcttgtctctccgtcaaggggcctcgctcccccgtctctctcctaactctcgaggatggtctgcgctggggggaggactcccttagcctgggtcaggggctgcagcgacgcctccaggaaagacctcggcccggaccgcccgccccggcatctgccgccccccggcccgcagtcccggaaactcacccctttcctctcggcctcctcgttcagggcggtcacccaggccgcctgccactggctcctccagctgcccagcgtcaggatccaggagagcagcgcgtcggaccccgggcgcggcccctctccaggctccaccgcccgccgctggggctggggtcgcgccctggccagcgcccactgcgccaggtacaggcctaccgtggccagggccgcgacgaagagcgacaccagcgcgagccactgcgcctccccgagccacgagcccagccgggccatggccatggcgcatccccggcccgcctcgccccaacttccccggcagccccgggccggaacggcggactcaggacacgcgctggctgcggccacagcgcgctgggggcgtggagggggcgcggcggggtcggagcccggcgaggagcgtggccgggggcctctgggcgggcaagcggggaggaaacgcgcggcggccgcggcccgggctgggcgcaagccccgcacacctgcggaacaggggcgcgagcggaccccgcggcccgcgctcccgactcggcgtctgggaagttcctgggccgctgcgggccgcgcttcctcctgcgcgcgccgccccgggcgtcccgcccgcggcccagcggtggccggaggaggctctggccgcggggcggggcggggcgggggcggtgcccgagggagggggcgcggccgggcctgcgggggccgcagtcctcccccctgctcccaacgcggcgtgcccccgcccccctaaaggcccggccttcccggccccgccacgtgcgcgcgtcgcccgcccctccggcgcctgcccgcgggccgcgaggtgacccgggcctccggattcatcagcccaaccccggcggctgctgtgcggctgcttggcttggctcgtgtgcgcgcttgcacaagtgcgtgtgtgtgcacatgtgtgagtgtgcgtgtgcacagcgcgcagtcagggtgatttcgaggactgccatttgctcgccagcgagacaggatccaggctcagtcctcggaaagtccctggaaatccgtggctgcccctggagccaggggctgggcctgccttagggggcgtgcttctcagaggcaaggaggggctcagcaccaggcccaggccctgccttctgtgtggctgtgtcattcattcagtgtgcgggtggggcgggggtgcatgtggtgtgatgtgtgtggcgcatgtggtgtgatgtgttgtgggtgtggtgtgtggtgcacaggatggtgtgagtgtgtatgtg

SEQ ID NO: 69431 - DNA, 1012 bp, Homo sapiens
tgagaccagcaccttgggggccccggggagctgtgatggtcacttcacaggccctaccagggacctctagcaagtggaaatacacagcttccccccagcagcacttgggggcagacgtttcgagaattccctcttagcaaaatgcttttagcacttggctcagtgccctcggcagctgctgtgggaagcgagatttctggagaccagagaggctgtggagacatttgacccaatctccttggctccatctcactggcttagtcatttccaccacctggaggctggaatgtgcttcgagtctatttcctgtactgctcacagggtcaataccggagccggcggacccaaccaaaggtcacccgtggccagagcctggcccggcgccagacagggctttccccccgaagaggggccgtgagttcttctagtaatcatttgcatgacttatggagatgctgttcatgatgccttccccaggaggaaagcagcaatgctgagtaactgcactaactccccaggtgagcctcagatgccgcgtgaacagtctctgagagtgaagaccagactgcacgtctgccgtccctcccaggaccgactgatggaaatggtagtgccatcggctgagcccctgccaccctcttgctccctcccgggtccccacagatgcaccaggcaccctaagtcaccttacgggcgttcagaaagtcatggctgtgtgtaccgagcatttcccaccatcagataccacctgggtactcaacttcatggactcgcttcattttcacagcaacacgcaaacgagagcatcgccccattttaaaaataaggaaactgagttcagagaagctcagtaactatccaaggccacccagcaagaaagtggctgaggcagggtttgaccccaggggccgtgttctctccatctcctttcataaaggtcaaggcaaacaaattctccaaaaagagaaaaatgttaaaagctggaaatagaggccccattgctaacattcat

SEQ ID NO: 69432 - DNA, 2952 bp, Homo sapiens
ctcatttccatcgagagaccttcttaacttaaccccaattttgttatttacaatttttccttcagagtgtacacatctaatattcaacagtgtaagttcctcgagggcaggggttatatcttcttcaacttctatttcaacagaatgaagcacattatactttcaataaagtgttaaaaaggaaaaataaacaaaaagttacttttaagtaaaccagcacttcaaattttgactttctttttaacatcaatatttaggggtgcttaaatttaaacttaatgactactagtccttagagatcatcatttactccaagtacacgaggaaagctttaaaagataattttccatgagaaatctttctaaaatggattaacccactttcttgtcttcttaaacaaggtatgaggaccgtaatgtaagctgcttaattgaggactcagggtcatcgtgtgaacaatcgctggactattttgtaacacacgcgtgccctcggaggctcggtgccagggctgtgagcgcttgcacgaaaggaaaaaccccaggccgtgtgaagtctaactttccccgtcctctcggtcaggcaatcccaccggggcacctgtctaaaaacaccccgcctccgaacgcgcgctcttgcggaattctcccgaaccgcagagccctcgtggctgggaccgcatagcaaccgggggcagagtgcgagcccccagcggtgtgctgggatggaaaagcaggagccgctgaggatggactacggggcgtgttcccgaaaagccgggaagagatgtggcggggctgccgcgggcgtctctaaggccggcacgggtggcgtcttgactccctgcccctccagccgcggacctcggacggggggaagggggctcctccaagcggggagacggtcgccggccgagcagcagggctcctggccggcggagggtgctatgctctgcgggaccgccgggaagtcccagacaaggtctgcgggggctctggaggaaaaaaaacgcgctgtgaggtccaggcgtccgcgggaggggccgggggcggggagggagcgtccagcgggcaccgagcggtcacgctccggccaccgggccgaggacggggcggcggggctaggtcccggaccgtgaagggagcggcgggtcgcggcaggtgcggggtccccaaggccgccggccagcttccgcgcacaccccgcggcccgggccgccggcccccaacccctgcccggaacaggagaacgcgcccttctccacgaggcgtttcaaccgctccgcgcgaggggcgcgcgcctgggccaggcgtgtcccctaccccaggggcagctcggccagggtgaagagtgaagcccgtgagggaatggagcatgcgcattcgcgagggcgaggccaagtgctggcagggagcgtgcgcagtgtgaaggtacaatcggctacgtgggaacccgggacatgctcggtgagcgcccaggtcccgcgcacgcgcagaagcgctcggagcccgcaacccgctggtggagaaaaaagaggagagaaatcacctcagagttacgtcaggaaaggccgcgttttgcggggaggctgtagcctcccaaggagccccgcagttctcctagagctaggggcgtgacagttactcaccggtcttcagtctcgaggcagacgccgggcccctttccgctcacactcggctcgcgcgcgccgcagccgccgctgccgctgtgattccatccatcttgaatttgacgtcatcccacaccagggatgaggtcatcgcaggcatcgctcgtcacgtgcgcggcactctgattgggcgccgggcgccggagggcggggcggggggggggcctcgcggcgcagggggacgggggagggcgggcctgcccggagccgcgcgccgaacggacgctgccgcgctgcaagcccgcgctctcggtccatgaggggagcctgcggcggccgttaggggaggcggccgggctgggggccacggcgaggaggctgagcgccccggccgggtggagtccgtcgcggcgaggagcgcgccgattctcaggggactttgccgcctgccggaggcgcccttgctgcggggtcgccccgggtcattcggccgcggtcctgcccagctgggccgccagtagtccccgcttccggcgcggcgggatgcgtggcgcgagcgcttagtccctcggaggggaggacgcgctcccgttcaccggtggacggcgggcgactccccgagccgacgaccccgacagcgacgggagcgacgcgcggctttctgacgggcgcgggcggcgagcggggccctgcggtcctcgggtcggcggcagacgctcccggcccgcgaggaaagcccgcgggaggcggctcctgccgctcgctagtcgctcagagcgcttccatttcctcctcccgacgcaacctggccacctggcccctgggcggggacccggcggccgcggccagggcgtccgggctcgttcgccgcgcagatgggggtcggtcctgacccccgccggggcgtccacagcggcccgcaggcagccggagacttcgcatagtgcccggctcatcggagggctgtgatcttttttttttttgcagaaatattacaactccactgatgagaaaactcacttcgctttcagtcaaaaccagaaattagataacagaaatgccacactgtcaacaccgaccgggaggaaagcctcgctggcggagaccgctcaagggagccctccgcgcgttctcccagcccgggtcgcaggtggagggggagtgcctcctgcagggacggttctcccgcagacactcaaactccgggatgtaaaacccctgttaataattgtcaggggtctgttaattgccaaatacagtttttgaaagttgtatgcactaggtaaaataatttatgtaatgtttggaagtatgtgaaagac

SEQ ID NO: 69433 - DNA, 603 bp, Homo sapiens
ggtcacacaactccatgctaaaaagtgaattgtacactttaaatgggtgaattgaatagcatgtgcggtatatcgcaataaagccattacaacagaaagaatcaaggaacaaacaaaagtggcagggttgggaggacgggtctggaggtagcagggagggtcacagtccccagggcccaactgggagctctcctgttccccggaagacatgctgccacggcccctcccaccagttgtcacttaatctcaggaagagtctgccacaaatgccccgttgcgacggctcttcccagcagaaggggagaaaaagaggcccgagtccccgggagctgatcaaaggtctgagctgtgctggcagtgaccattgtgcaactgaacaaatgcgtggcaggaatataaacagactccacctttcagcatcgagcttggttaggaacatggcttgacagccagcttcgtcttcctaagccgatgttaaactccatccatcactttcattctttgcatgaatcttgttctttctatttggagccatgtactctgggtcttagagaatggaaacaggcccgaaagcctgtcagatgcacttaggataaatgagaa

SEQ ID NO: 69434 - DNA, 782 bp, Homo sapiens
ggcgagggccacttcctggtttatagctggcatcttctcactgtgtccccacatggtggagggggtgaaaagtctctttctagggtcccttttataagggcattaatgccgttcatgagagcctcatccctatgaactaatcacctcccaaaggctccatctcctaataccagcaccttgggggttaagatttcaacacgtgaatttgggtgggacacactcagtctgtagcaggtaataagcatatgtcctgcaagcccttgagcttgtgtgctttgttacagcagtgacgggaaactgacacatgggttttacccttggcaaaggcagggaaacaggcaaggtttcacaagaaaggaagctgtaagatcccgaaagtcactagttctggaggacactgtccttcccacagtatcaacagacccaggtctgttttccacggttcttctctgactctctggttgaaacttatccagggagtttcccaattcttgtgtgtgtgggggggtcatcttgcccaaccctggccaggttggagcttgggccaggtgccctgggctggctgcagggcggctgctgggggtgtcctggccactagttctgatggagctccagcctctcctcacctgtcatgagcaggtgaggagacctgcccacatgacctgcccctccccatcctgagacgctggatgcccacgttttctttttgccgccatttcggagtctgctggggaggagggcggatgccgtggccccccttgtcaggcggccctgcttatctc

SEQ ID NO: 69435 - DNA, 649 bp, Homo sapiens
gcactgggattacaggcgtgggtcaccgcgccaggccctgactcctccctttgtgctgcccatcacctatcagggcaggggagaccttcactcacattgtcacagaataaagggaccaatgacctcagagaagcgacagcgaagtgctgttttaggtgtcgggaagtgggatggcagtgggccgaggactgaagggcagcagggaggaatgagaatttgaattggcgctgagtgggatgagtgtttgaattggcactgattggaatgagtatttggattggcgctgaatgggtcaatattggttctccccttttgggttgatgctgatttgtggccctagcgtcccccaggcagggccccaattgtgttgcttgaacttggcctctgaccccaggctgacgtggaccctgggtttagctgctgctgctcgtgggtttagctgctgccgctcggctctgcttctgttgcattctggttctggtcatctgctcagtggctcagcccctctggggatggctcttgccatgtttagtcccagtgtcaggagtttctggtcctggagtcagccctgccactccctggaggaccttcccgaggccagctgcctaatccccagccccgatcccctgtctgtggccttgtgtcgttg

SEQ ID NO: 69436 - DNA, 439 bp, Homo sapiens
atataattcttactgcccagacacttgctgtacagccagaatgtttttaaccaaaaaagagcttcgatgctatttgagcactagaatatatataggttggtacatcagagctttgctctctgaggcatggatttcaataggaaagcataaaaagggcaataaaggaagctcagcctgatttctgagtccggcttcctgatgaggccattgtttatggagtgatgagtcagcccagtgcagaagttctcgtgcaaatgatcaagtgcttgtcatgaatcagagcagcccagggcctcaggagaggctggcaaggcagtatttgtagatgtggcacagaaaccttacactgtcgtggccattgctacaaatgttttctgtacgatgactgtatacgggtccccagagagactgttctgactttctagtaaccaccgattcc

SEQ ID NO: 69437 - DNA, 371 bp, Homo sapiens
tgcggtgctcatctgttgagctgcatccactccctctgatctcaacagtcctacagaggacttggctttcaggaaggacatcaacagacaatcggcagtcacatggatgatctgtgagcagcctgccagagcctggggccacaaagtaaagaattgagcaataatgaatcaaacatagactccactgcgttccagctggacagtgacaatattacacatatttggatgaaattcctcttttcttttcattagcatcgctacctgggtattttcttatgtgtaccttacctgggtagtcaagagcgtgtctgatgttgcaagctggttttcacgccatgggcagcttcccaagcgttgatagcagtggtctg

SEQ ID NO: 69438 - DNA, 1338 bp, Homo sapiens
aaaaaaagggcagcttctggagccacacccacctgttttgactctggaattgggtactttcttgctgtgaccttgagcaagtaaaataatctgtgccttacttccccactgtgaataataacagtgtctggctcatggagctgtgatggggattaagtgagttaatggatagacttctcagcacagagcacctaatacagccttcattccattcgtccttgttaccaggtttctgctaagctcccttccagggctgagatctcagaggcttcaccagctcactttcccccactttgctgcaataatcattggctagaggtattgtgatatgatgtcattaaagttaatctagacgaaaatttgatttacctaaaactattacactgtagacctggaggaatttcagtttttgccgtaattgttttcaatgtgtgttataaaaaataaattccactatgttcacgaatgtacaacttataatctgaccaaaagtgagagatgggtagattttcctacttgggtccttctgtggacaggtactaggtgctgctttacgcccagtgacttgtgagggaacagaactgccctttagtaaccctgctcacttcctgttttctgcagtaacaattacattaggcaatattattacacatggaattgcatcatgctgattttaaaacaatcctccctgtagcattacacagacactgaatcatcatttgtagtttggggggctttacatgcctgcagtggtgaaaactgaaattttgtcccacttaagggagtttcttcttccctttattaattgcaaaataaatatatgtcacttcagagggcagcagctggactacctatgtttgtgggtaagtcactgacaaaatgctttctagtaagaaaatatctttaaatataaatgtatggaataagtgtaattaactagatgtagattaagaaaaatgtaagccacatctcctagttcaggcagcaatcatttgtgacttaaactgtgatgtaaagtatctgtgacctataccagtcagacaccaaatattggtgagctgcctggatttgggagatgcagtgagaatgagtcagagcccacgacatgagggagagaaagggggaccctgaggacttggggtccggtgtgaggatcctgcactcggtttctgtgatggtgtgtgcaggggagtcacaagttcaggtgggcctgtggcagggctgcccatggcccctggtgagcatgtgcggccagccgggccatgggggtgaggccggcttggtggcttggattgcctactcctctgcagggtcccaacgggtttctagatccctcca

SEQ ID NO: 69439 - DNA, 1954 bp, Homo sapiens
ccgtgctggcccagcccccgcgagttcgggacccggggtttccggggtggcagggggttcccatgccgcctgcgaggcctcggctcgggccgctcccggaacctgcacttcaggggtcctggtccgccgcccccagcaggagcaaaacaagagcacgcgcacctgccggcccgcccgcccccttggtgccggccaatcgcgcgctcggggcggggtcgggcgcgctggaaccagagccggagccggatcccagccggagcccaagcgcagcccgcaccccgcgcagcggctgagccgggagccagcgcagcctcggccccgcagctcaagcctcgtccccgccgccgccgccgccgccgccgccgccgcccccggggcatggcctgtctgatggccgctttctcggtcggcaccgccatggtgagtgagcgcatccttcgtccgccgggaacggttttattttcaaggagagcaggaaacacacaaagactcgcaagctcgacctgacacccctcccaggagcgcgtcctctgggcgctgacccagggcaccctagagtggcgcccggctccgatcgctgcccctgcccctccgccagggccacctggagcctcgggatgccccttgcaccggcagagagcacggactaggtggaggggccgggagtggggcgggggcagcgagttgccctacaagttggaccgatggccttgacctgatggcttctgggcggggggcgtggggagctggggacccggagcgcactggggactggggaggggccgcagcttgggccggagggaagaggggacttgaagaaggggagccccgcgcgcgcggctgtgggcttggggaccggggacttctcgcgccatccccaggaacgccaggcaaggtctgggggaacaaaagaggaagctgcccccagagagccggagcctgcgactgcactcccggggacaccctctcccggacccactcggggaggcggcggcgaaggcccggggagacccgcgaggggcaagcccggattcctgccggccgcctttctgcgcgcgccggagagagagacgcggtggggacagggatgcgcatttcacttccccgagctccggagagggatggcggggtgtcggcgagttcactgctggacacagttactgtaagtgctgtttccaggggtggtcaggaatctccctttctggttttctggcattaggaacaaacaacaaaccaatcatcaggcccccagccacccacctcaccttatcctagcgcccttcatgtctacgcccagcacaccaacatcgtagaggtagctaaagtacaaatggaaagtcttccgtattccacgccgtgtatctgtgtagttactaccctgatattacttccccgaggctgtaagcccacagtgcatggcacgctccggggctcaccccgcccctcccctgtatttcatttttagcatcctgtatttgaagtcagcagggctcagcaggatttgaccgacagttacctcttgccttgagctcaagagaaaaaaaaaaaatagccaggtttctgcgcatgctccgctgtgacaactgcatcctatgattccaaacaggttactgtagaacatacggagcctcgccagctcattatataatgattttgtgtaaacgatagaatggggccgcagacatggccaggcggtgggtggaggaggggagagcccgagcgggagacccgcaggctgactcgcctctctgggctgccctgccttccctgcgtggcttctacgtagaagaggcagtgaacaaaacggaaaagccgtttccctcccggtgacacttgcttttctctggttgaatctttgggcaacacttgggaattctgccttttgcacttgttcatctattaggatttctaaatgaggttgaccatggaaaattaaggaggttattgatgttag

SEQ ID NO: 69440 - DNA, 824 bp, Homo sapiens
gtgaggggagagagagagagagagcataaaagaacccacacacatttagaacattagatctcatgagaactccctcactatcatgagaacagcatgagggaaccgcccccaggatccaatcacacctctcgcccagtccctcccttgacacgtggggattacaattcaagatgagatttgggtggggacacagagccaaaccacatcacccagtatgtgacttgtcacccctatattctctaagtgtttaaactgatcacatgaatcatcacagttagccagctggtaatggcttgtagtgagggaggagccccaactgtccattcttaggagcgcagcccgggcggggtggccaccagatagagacttgccctacagtaaccttgtgtgctcaggcaggggaagagcctgcaatgggccgccgagggacctgcccatgactcagaaatgggtggagccagaggggttgacagacaggatatgtctgctgtgttccagctgctggtttctgcaggggccaagggtagttttgctgtctggcttcctacccactgccctccccagccacagcagcacctgcgtctgtcttccctctccctgctcctcctcccctgcctgccccatcctttcctttgttcctggtgcctacaattcagagtctagatggtttatcactccagcacacagaatagaaaggaaactgagacaaaggtggttaagggacttgcccatgctcctgggcttgaaaggggcagggctgggatgaggacagcaatttctagctctgtgcactccgacacagtggccatgccttgtctagcaca

SEQ ID NO: 69441 - DNA, 2680 bp, Homo sapiens
gactaaaccgtaaaactagggatttgtcatggaggtgcattcatcaaactcagttgatgaagttccaacacctgcataggaaacttactctcaaatacaatgtacccagtgccgactgtttttgctcacattgtgaaaaaacgcaaaaagatgggttttcagtcatgagtggtggcgggtgggcctgcagggatccagtctgacctgcagccaagagtttcacttcccactttgtcagctgtgtgctgtttgtcacctccgtgctctgtggggtaaatggcatttggtgtcaaaagtaagacacaccagggtgacttcagggctgtgattacatccagctgagacctatatttagagtccaaatcttggagccaaaaggagtcgtgctgccgtagcccgccctcctgccccgtggagggagccttcttgcaccatttctgacaagggacagccagcttctgtctgagcacttccagcaaccaggaactgacacctcccaggcagccgggctatgtttgcacaaccctcattcttagaaaatgcttctgtctgttgagctgcaatctgtatttgagcaatgttcatttgtggatccaggttctgttttttgaaactccgtagaccaagttaatcttggtcttgaaataagctcacaaatcaaggggaaaagcccagccaagtacagaacaataaccaaatacattacaatccagagctaccttgagaggaggaaataagaagcacatggcccttgcaggaaatgaggtcagagtcctgctttgggaggtgggcatcactgcggcatccgcagggtgcaggtcagtgggcaggcgcccctgctggaaggttcttgctgtctgtaaactgataagggtggaacccgctggaagggcagaacctgagtcacgttctttctgtttcttttactgttataaggcaacttggtgccttccaaccaaaaaagtccccctctctgatatctcaactgcctgtcttgaaagtgaaccttttggcaggagtttttatgggatttctcagttgttatttctctcctcccactgttttgggagaagtgtttttttttgttgttgttgttttaattaaaaataactggtgtttactgagcaaatcgtgtttgctttatttggcgctttgcctcattaagcctttggggagcagcatgggacacacatcagtatgggcatcttctccagaagggaaggagggtggagggggaacgagggcctgcccaggaccgctggcaggtagggggcaggtccaggactggacttaacacctggagtcccaactccctgcctctataagcgccactgagaactcatctctttgcaatcgctcagacccagataataaaataagctgggttgagttttccttacccaagacataaaccccaaaccctgctgacaatgaggagctacaaaaggcctctcctcctcctggggcacgtgttccgggaattctttcatggatgcaggtatgggggcatctttggcctctgtcctttgtctggagctccccgcacctggctgggggctgcactggacacctctgcccaccctggccctggggttatcaggccacctggcctccacccagacgttccctcccagggcgggattcatcctggcccgtggtgatgtgcaggctcccggaaggccgggctctgcccactaagtgtcagctctaacgcaggctctccatactgagtaaaaaagcccgtcctttctctggctggtgcaggtgctgactctgcaggcctgtggacgcagggtgacgttcgcgctcttgcccgagctcaacgcccgggagaaaacagcgctgccggagcccctcgcgcgcgcaggtgcgggcggggcgggtgcgcgctgccgcgcgtgtgcagcgcccgcccatccgccgccaccgcccgcgccggggttactaccggtcaacgctcgctagtaacctccgcggcggagcggcggcgcggggagcggcgcgattggctgcgggcgccccgcgctgttgccaagcgcgaggaggcagctgcagccccgagcggggtcgcagcctccctgggacaggggcggccctatgcataggggatcacccgggccatgcaaatcccggcgccccgcgcgtgctggtgttctcctccccaggtccaggaacaccggtccaggaagcctgagagcgctggcagtaggaagggtcgccagtgtggacctgagggtggaggtgttgccacccggggcggcctgcgctccattcaggcttgagcggtgactgggagaccccgggaatggaaatggcgctcaaatgctggtgtggtgtccgcaggggaacggcccgcgggtgtgtggagtctgcgcccctgtggcttcagctgcgtcgggggactgcgggaatcttccagactccagtttaaatcagagaggtgtgtccacgaaaagagtcaaactaaaacatttaaagagatttatcctgagtgaccatggcccgtgacacagcctcaggagaccaggagaacacgtgcccaaaggggtcgggaacagcttggtttcatacttttagggagacgtaagacagtgatcaatatttaagatgtacattggttccgtctagaaaggtgggacagcccaaagggggacttccaggttataggtaaatttaaatt

SEQ ID NO: 69442 - DNA, 603 bp, Homo sapiens
tgattcatttaaaatgggtgagttttattgtatgtgaattatacctccgagaaactaatttttaaaaaaatctcaaggcatgagcattgccatcatcagcgttactaatgtgaacacagtgaactgatgaaatgacggggcaatttgcaacgtgtgataggcactgagatctctctctggacatcaggaagctgcgtgttgtcagatgccgaagccgaacccacttgcccattgggctgcaggaaggctgagagtctgtccccagcatggatagcagagggcgctgtggagcatcattagcctgtagggttctttaggggaaaacaccttaatgagccctgtgcgctcggaaggttgaatagagggcccttccttcctctaagccacatttctggttgcgccacattaagtcaaacaattattaagtgctgagcagtctttggatcacagaaaacaaacacagaggctgcagccactgggccctgtggaaaactggcggccgtcctgcgatggtgtcagctcatccgtgtccgcgctgctggaggcctggcaggagctgagatcagagcccttcagcgggagtggggctactcctccctcccc

SEQ ID NO: 69443 - DNA, 605 bp, Homo sapiens
agcgattccacgaacaccagagcccagctcatttttacagtgccaggacacaggtcttctggagaacagtggtgaaagtgatgcaactttttaaagaagaatcacatgtttggagagtcacaagatggaagatggtgaataaacagccatgttctccttcccttgtgaaatgaacaaaacacagtacagtaggcttgttttcatagtgaacacaccagcttatcaacaggatttcttcagcttactgtaaatgctatgggggtgtgtatgtagaatacaaagttcagtcaactttgagttttgaggaaaatgtaatcaaggcggcgggcacgaccttcgcagcccttccagggattgctcaatgcacggattccgctggcactggcatgaaagagccgatggttgctgggatggcttggccccagtgcaggtggcggggcttgtgccaggcaaggggaccccagtgctgcaactggagccccatgaactgtccaagtctcaaaatggtaacaatgacagccacaaccacacactcgcccagtgtgctcttgcccaccaagcccttccacactcacagcgtcagcggaacttcagttcccctccaa

SEQ ID NO: 69444 - DNA, 1258 bp, Homo sapiens
acctcaccccatattccacacagactctgctcccatcaggacctgaccttgccccacatccttgtcctctcctgagctctgccctctgcccccagagtgatcacagctgaagtgtcaatgacagcaaaatacctaaatggagtgtcttgacattttagagggggatcacagatgcctttgagaacacaatgaaattgatggactttctctctgattttaaaactgcctttcccaagagctaatgttggcattgaataaacacctctaaaatgcagtgttcaaacaagagtctctgcccatggaaatcccagggagggagtcttcagaaaactcctatatggaaactaaaatgcaggcatgaaaaattgccccccgctgacccctgctgccccccactgccccctgactctgggtttgtgcaaggctgtgggccaggatgaaggggcctggcatattctggggtgcaaagggcagggcctgctatgtatggcagagcaggtctcaggaaggtcagtgtggctgctggaacctcctaataaccaggaggcttggggtccctttggagaatgtgaaggcaaaccagagtgcactggagggagcagtgtgtcgtggtgtcctgtgtgaggataatcagtcatccctgacgtggtgacatgagaccagtgccccgactcgttgaccactccctcttgagtcagactctgggctatgggtgttacctcactgacacctcgcaatcgctactctttccctgttttttactgataagagagatgaagtcatttatttctggctgcacagtgaggagatggtgatgccaggatttgctaccagactgtcagatcttagaactcaaggtcaaactccacgtgaaccctggcaccgggcagcctctggtgggagacagtcccagtgagcccacttccagcctggcttcaagcaattgactaaagaatgcacaacacaggcatctccagctcaagcactctgtcccctgagcaagaaggatacgtttaaagctagggggatggatcattgatgccaacttcagattcttaccgagttacactaaactagtcatagagacactttatcaggttcttcatcaggaaaatgtaagagtgaatcttcatggggcattttgggaggacaaagagggttgcatagttcctggggctgaaacctaagttgtctgcatttgagaaaatgttgtgtgcacagctgagcagcactttcttctcaaattgaagccacgttg

SEQ ID NO: 69445 - DNA, 690 bp, Homo sapiens
atcctgctgggctgctcacaggttttgcaaggagaatgagatgggtttgaaactcagatctccagatctccagatctagtgtgcaagaaatagcattttctcgatattctatgcttctggttctgtcagaccctcattccacccccaaggcagaggaccccagttcagtggttctgttcctccagaaggaaccattcgctgtatggactgagccttgcggacagagctgggctggaaaagggcagagacggaaatgcctggtgggattatcatgattgggtgtaaactgtctactctatgaaccaataggaaatcccaaaaaaagaaaacaaaagacactcttttttccttcctctccctgggtgggtcgctttggtgtttgtgagccaagtctgacccctgctgacaccgtctggaagtggacgtcctgtcaccaacgccatcccaacccatgccccacccacattctcttgttgacttcctcactgtgtgcttgaaaaaaaaaacaagcctgggccaggcatggtgactcatgcctgtaatcctggcactttgggaggccaaggcgggcagatcacgaggccaggagatcgacaccaccctggccaacatggtgaaaccccgtctctactacaatacaaaaacgtagccaggcgtggtggcgcatacctgtagttccagctactcagg

SEQ ID NO: 69446 - DNA, 861 bp, Homo sapiens
cagagctcaaagactcaaggaaatagaaatgtagaaaggtgcctactatttgcaactgactcagaccttccctaatatgcttcttccccaaggggcccggaggaagagaggaaatgcattggtgagtccttcaccagctctgtgggccgtcctctgtgggctggaggcagcgccactctaagcaccagagtaggggcggctcttaaccatcagagacaaggcaggtctcaatgccccaaggagcgagggatcgcaggtaacagtattttgacccataattgtctatggcaatgggtccttggtcacaggcaccccagacatgagacagagacctactaagtgctgcttgacatatttaggtggggaaagcccaggtctgctaggaagaatcctgcctcatggctaaatcccaggtaccagacttaaggcggtttgccacctttatcacagggttccaacatgagggcccttgaactctcctatggcgagaggccatctgtttcctgctgggatcctgactgagaggatggtgccttcacagacctcacatttcagtgagggggagggtcagcacaaaggtaattatgcaaattaacacagcaggaagttctccttatcaggagataaacagtacaaagtcatgcacagcatatcctgttaaaccaaaatacaaagtaaatagtgagaagtagggtttgatttagagtctatcttgatcaattaaaaattatgaacattggtccattttaccttgtattttgaaaaggtaaattaggcaaaattgcaactatgcccaaattcttaaaataatagtaagtcaacattaatggtggcagtagagttcttatacattttctgact

SEQ ID NO: 69447 - DNA, 1063 bp, Homo sapiens
aagaggttgagggtatagtgggctgtgattgcaccactgcactccagcctggggaacagagtgagaccccatctcttaaaaaaaaaaaaaaaaaagaaaagaaaagaaagaaaagcattctcatagtgtgattcccttgtacctgtaataggtccattgcctgatgcactctgcaaatcaatatgctaagaccctgggctgcagcagagaaagaggcttaatcatggggctaccagaagaggaaatggcaggaaacctcaactgtatctccccaaggagtgtggggctagggtttttaagggttttggcgtaggctgcagtgtggagatggttgataggttggagagtggaatgaagccgtggacagggagatggaaaaatggtgttctcatgctgactcggttcctgttgtggggatcttcaaaccggttggcaacagctgttctgctggaattcaggatctgcttaagcaattcttaaacagaagccttacgattctaacagcagggaagttcctgtctagaggaacagtggggtgcagatggttggtatctcatgctatgggactttcccttacaaggaagtgggtcaaagtgtagcctgattaatgtttaattgtaacgatatttctgtccagaactattcttaaccctgaaccatggctccaccatgatttcagatagcagcagcagcagctcccttcaccctccgcctttctttctttctgcacccttttctaccttctgtcccttccctgcctccctctattaatggtgccctgaccacagttcctcccctttctccactatctacttgcccactcaaaaccaccaccataaccacaaaatgctgtgtgcagtcccaacaagagtgtcctctgaggctgcgatctcagggcaggagaacagagaagtcatccagggtcagggccagccctcataccagctgggggaagagcaggtggagttgaagggtttctccaaggtggaggtcccaaaaccccctctcaggaaggcattgatgcagggcggtgctagacatcccctagacaggctccggtgaa

SEQ ID NO: 69448 - DNA, 1105 bp, Homo sapiens
ttaaagaacaagagagcccagacaagcccagaagatgagatattctgccaggcagcccgcccagtcccttcaaagccagcaacatgaaagggactgcactgaatgaaaagaatggggtgcagggatttccatgaagctgacagcctccagcttcagactctgcacaggcacaggccccttgcaaggtccagacagggtgtccacctggccctgtgtttcatctattttgcattagtgaaggattttaaccataatcgtgcctctgccactttcccctctaatttcaatcagacatgtgtcccctcaggtggaagggcattgaagtggccacaggcacttttagaatctgtttcaggggcactaattgaattgaatcaagggtggatgtggtggtttgggttccagagagtatttgtgtatgccactggtttgcagtaattttcatatgtagtacagtttctgccacctgtcctggagtagtatcacttccagaaatacttctaacactcattttgctacttacctagaattgagacacgtaagtgcagggtcaaacttcaaatcccagtatgaacctgtcctccagctccagcaccattgcgtgtgggagtgcagaagaaattaggttcaaagtgcactgagtcagaagctgggctatggagatcatttcaatcatcagaagtggaaaactgtaagagtgcgctgatgcctgcttctaaccagaatatctcctgtcaggggcgtaatgatatatcatatatatttttttctttttttgagactgggtctcaactctattgcccaggctggagtgcagtggtgcgatcacagctcactacagcctcaacctcctgggctcaagtgatcatcctgcctcagcctcctgagtagccagaataccaggctaatctttgtattttttgtagagatggggtcttgctatgttgcccagctggtcttgaactcctggtgctcaagtaatcctccactcagccttccaaagtgctaggattacagaagtaaaccaccatgaccagcccatcatatataatttttttttttttttgagattgagtctcgctctgtcacccaggctagagtgcag

SEQ ID NO: 69449 - DNA, 1312 bp, Homo sapiens
aaagaagaaattagcagggtaaatctccaatgtaatgtgggattcatgatgaatacatgctgaacttgcattattttgataaatgttctgccgactaagcctattttgtattactcccttttcacttagggccctcctgacactgtggcctgggtgaccctttgctgggggctgttctgtgccctgcagggtattcagcaccgtccccggcctccacccaggaagatgccagcagcacctccctcaccagcctcccaagtctccagacattgccaaatgtcccctggagccccaaaaccactgagttaagggggtgttccctctgtccaaggctggtgcatgaacccacagtctcagacgcccgctggtactgggcatcgtccactcggccccatctctcccagtccggttttcaggattcctcctgctccatcccctccgttatctcccccaccaagtttctggggcctcctgccttgcctggctccagggcacccatcctcattgccccagagaagctcagagagcaagcctgatacaggcaatccccacagctcccagaggtcccgcctactgggctcaggatcaagttcaaaggccatctggttccaagggaaaggggccacctccccacccccacactcttctgctgtcagactctgctctctgcctggaatttccttcctggtttcacccattccttgccacctccctcccagctaacccggagtttcctggtcctgccccaggtgagtcatcacctctcctgggtacatggtaacacgtccctgtcactgcagggaactcactgattcctttattccagcttcccattaggtgctagagggcgagagcccagcccctcactcccacactgcctatcaaacccagtgtctccccctccagctgtgctccacagtgactaaggactgacatctgtgggcacagctagatgctgctgtaacactgtgcatactctagccactcagtcctaacagaatcctgtggactccctacctaccagggctcactctatccaccctccctgtgcaagtcagagaagcagagacgatgctcacttgtaaagccaggtttccacctgaccccacgtcccacctcagcactgcgtcactgggtgcattgctacagcgctcaggggaattaccgatcacgaaagtctatgccagcgctcaggggaattaccgatcacgaaagtctatgtgtgcttcaagcatctaagagaaaactgctttatgtgatttcattatttcaggtattattttcaaaggaatgggaagtatattcttaattt

SEQ ID NO: 69450 - DNA, 2110 bp, Homo sapiens
cctaaggagaagagttgtttctggggtgacgtgggagcctgtgtgccagggcactggcccgcaagggtaagaacccggcgggctcccgcagcctaacagggagctgcctctgtcacgtgcctgcgaggtgggacacaagttggcttacaagttggttcgacatagccaaatccgcgtgccgcatttccacgctatggagtgctagtcttcatgattgtgccccttgacatgacacaataggaatagaagccgggaggccaagcaaaggccctctttgggggtgggggcgcggcggcatgtgaccctcgccgcctgtggggaagacctgccttgaggacagagcgccaggggtgcagaggccgcctgggactgcccggaggccggtggggagcgcgccagcgaaagcccgtgcgccctcggagccggggaaggcgcgggccatgacccgggttcgcccgcaaaggccgggcagtgccgcaaggcgtgggggcgcccccgcccggtggccccggggctggtgcgaccctgggcacgccggggccggggccggagccgggggtcgcggcggccggggagggggaggagccgcgcggctccgccggcgccccgcgggccagggaaagtgaaagggcggcggggcctcccgcgcgccgctccaggaagtcgcgagcaggaagcgcccgcggcggccgggccgggctgggctgcggagcgcgggcctcggcggcgcaggtgaggcgcggggccggggccggaccgggaggcggggaccccccgcccccccgcccgcacctgcggggcagccggcgctcaggcgccgcagccgctcagcacctgcggcgccctcagggagccgggcgcggggccctgcgcactcggagctcggctcctctccttccttttcttttttttcggggggaggtgggggctggtttggatgttttccgagagccggggacggtctcaagctattttcgcggagggaagtctttgaaatacgacatctagaagagtggccctcggcgacaatgccgggcgttcccggaccggggcaacgctgggattccggggaagtggaggcagagggagcgggcacggggccggcagccgctccacggagtccccggcaggggcgagcttagctgtccagccgggtcccctgcccaccccggcccgggccgcggtgacagctgagggtccagagagccggcaggaggggaccctgcgcattgtctgccgcgatggggacgtgggcgtgcccgcggaattcacctcctccggggaccagccgcccagggaggagccggcacagaacgctggctcggagcgccggcaccctgggcctttgcgttgtttgtcggctgagcagctggttcccggagcccgtgggcctcctggccaatgcgagtgacagcgaccttctgggtttataataaagggcttgacgcgccggaaagtcccctcgccgctggccaccagccttccagcccttacggcccacgccgtaatcctggtgaccgagaaggtacgttcagtctaaggatttgcatttgaacgaaggatactggccaagccccttaccacccccactccccgctaacaccccagcccgcggccccaggtttgaatttccaaaggaggaattgctaaagcctgccctttccgggtctcccttagctctttgcctggaaggtgcctgcctgcctgcctgccggcccttgaacttaaatcgtctgaagttgtgtaagtggataaatattttagacttcccccgttgtttttttattaatcccctttgagagcaagcttgaaaacacctggccccagacctgtgattcaccaagtcattttggacctgcatttacacgttctgtttcatgcagcccacctgtgatgttctctttgttgggggttggaggcaggtaagggaggtggtgcaaatggaattcaggttccttgtacttcagccaaggggaaagagatagtgaccattttcattcatctttaatatggaaagcgcctttaaaagcaaaaagccatagaaagagcacactctggacaggaagttgtattctatctcgtaatttaaaaaaaagaaaagaaaaaatgc

SEQ ID NO: 69451 - DNA, 960 bp, Homo sapiens
tttaaatgttttttggatttatactttcagaggtagtagacttttagttttattagttgacatttccagaatttgaaagcttagctaaatatttattttatcttgtgtgactgttccttccaaatgtatccagtcttaagtggttccccaaattccagctcttcgtgcgatccaaccctaggtctggctgcggaggtggctctccattgttcttggaacgctgcatttttgtctgagtgatgggtgggcaggaagttgttaagcaggtgttctactagactttgagaaaagaagattaaagcagacaagcctacataatcaccagttataacctggagaaaagcaggaataattttcttaccctcattgggattacgtcacccggcctgtagaccatcaggggcctgagaggcattagagtctctatcgtagaagaacgaggaaatcatccactgccagagacagtgcattcacagcccagtggcccctcgctcactctccgggagttggcagggacccagctccaggactgcaattctgtgacctttggagctgtgcttcctccactcctgccggtggctgagccctgggtggctgccctctgcagccctggtcggcagaggcaatgcagaggctggctgttttgtgacggtcctaggttccccactctccagcagctttcaggggatgttaaacattcatttacccaaaagattctaaaattcccccttggcccctgataagcaagaaacttccatgcctctcaagttgttgactgtggaaaacgtttgcagacctttgaaaatgtggtttttaagagagaagaatatgaaaagaggtggtgggccttaaacactcatccgcttgacaagaaactctcaaatcagtaccagtaaccagtcattataaatctgaatactactacttcttgtctttctggttagagaaatatacaaacag

SEQ ID NO: 69452 - DNA, 1291 bp, Homo sapiens
gtaggggaagaaaaacagctttacaggtgggagaactgccttgagtgctacgtgcagggatgggcatctccatgaaggcaccacctgttgggctggggggctgttggggcagatgtagcgtgtaaggtgggctggcctttgggggaatctttgtcaggccacagctgttggggtccacctgatgactatgagggcccctgtgagccaggagcaagtgggagccctgtcccggtccctctcccggctttcctggtggtccatctcaaagcccccgcccctgactctcgtgtgtagtggtgtccaggccactcaagacttagggcttctgaggaggcggcgtcagggtcagctcttagttcagtgtcataagtaacaatataaataactgccgcttacagagccctggggtatgacaaactgccacatacattacccctgtgatcctcacagcaaccctgcgagtgcccctgtgaggaaattgaggctcgggtcttcgttccccaggcagggctgccacacactcgagaattccctgtgggtcaggctgcctccagggcccctactcatcctctctgtgcctcagggtttgtccgggtttaattacctgagtacagtcccagcatcaccctcagagcctcctaaacgcacagatttcctgacctagcagctgcgatgtgcctgggcatggattggcttgacgctgaatcctgtgggtttctttacctttcaagatagatcagaacatcacaccacatcaaaactaaactttatagtgccttctgaagcgcccgtgtgcttgagctcatgatataaatggcatcaacgaaactgaaagtagtagtgattctgttgacccacaaaacagttgagtgattatttatagcctgcatttcccagaatattgtaagcaaaaccaaagcaaaatgtatttgcttacttgaaattgaaccagaggctgtgaattagaaagtgagtcttattctgttatgtcatttatagaatgacacggcacaccaggtcacatttaagttagttaaatggaatgtttagacttacctttgatcactgctgattaattgtatttttctcgatgatgatgataaaaccagggctgggaggatagtggtgttataagtgcaaccctgtcccttctatctgctgctccagctgtggcctagcctcaggactcaaggcaagcgtctgcccaagctggtagacaggtgagtctgactcccagcagagatcttagtgcgagctcttttcacctggactgggccagaaaagaaacctg

SEQ ID NO: 69453 - DNA, 539 bp, Homo sapiens
tgctgaagtgcacaggcgcgcgggattgaggcccccgcttgccactggcttccctgctgttcccttcccaaagacgaggccaagcttaggagagagcaagtgcgtgtgctgtgcccacaacacaggacctcgaggcagaggatttccgtgtcccgggcactgtgccaattgacacaggctgccctcagctttcctggccctgaagtttaggacctaccatgaatcctgccaatcctgggacgtggtcattcaggaacagaggactagtttcctgttcagcagagcccaacctctcctgtggttcagaggttgccatctgtttatatgccccaaataacgaatttcacctgatgatcgaaacagttgacacaggatgtgctgaacagctctacctggatgcccagcttggccccagaactctgagcacagcagaggcagccatgcatggcgggtggggaactccagagagagaccggctcggatctgagtcccagctctgagtacagcagaggcagctctgcgtggtgggcagggaactc

SEQ ID NO: 69454 - DNA, 949 bp, Homo sapiens
gacttgctcagggtcataagtgatctcatgacatttggtgtagtttgacaactggaattttaagacactatatacatttactggatatggtttatgtgaaagcaggattaactagcaagacgagttcctgtttcctttcattggcagctatcatagataagtcctagtgtttgaattttattatttgacagataggacttctactagaaataaaatcttctaagatgttgccagtctctggtttctggtgagtaagcgctccatagggaaataagtgtatgaaatcttcctggaaattgtaaggcttgagagttccccaagctcagagaacagcatgaaagcatccggcaagaaacagccacgaggttgctaacattcgggcgtgtttgttattcctatttgtctttccttctctccacctcagtggcatcattggggagcgcctgccgattaggtattacctaactttcgggatgctcgccagcggagccttcaccgccctgttcggcttagggtatttctacaacatccacagtttcggattctacgtggtaactcaggtaagggtttggatccgtggctcaccatgtacggggtttccttggtgaatagggtggagtgtttatgtcacgtcacctctgtcaaggtgttgggaaggggcagaagtgcgtcctgtcggaagtcagggtcagctgacgtaacaaagtccttccctttctcttctgcttagaaattccagcaaccaggaggttttccttaatttcaggagttgcctcgtaaaaaatgctgtctgtcagtgccccggcagggaaactgacatgcagagcccttgggagtcactctgtcttcatgtggataagtttgaaatgttttatcttgcgaaagatttgaccacttaggggttggagggtgtgtcctccagctgaagccccagctgcagtcaccctaa

SEQ ID NO: 69455 - DNA, 496 bp, Homo sapiens
cctgtgtaggcagagacgccccaggcagtgccggagctgagcttcccaggcagaccctgttgccctggatctcaccccgggtctagccctgctggcagacctgtgaggtgttcctgaattgggttcagatgtccccccagaccagccctcttacaggcaaagcctgtcccaatgctggcccgtacctgttgtcacaggacctgagctttaggggatttcgcaatttcagatgaggaagctgattaatgagtggctcagaacatggaggacgctgggagcagagccgagcaaggcaacctgcagcccgttcctgccccatcagatgcgcctcggggcttggggctgcacgtagtcacacgcagtacacacacacaccacacatacatcacacaccacacacacactacacacacatcacacaccacacaccacatacacacaccacataccacatacaccacacaccacacacagtacacacacaccacacaccaca

SEQ ID NO: 69456 - DNA, 794 bp, Homo sapiens
tcttgtaccagcctgccagtgactgaacttggtgcaggatgggtcactgccatatcagagatgccagctggcctcccctgtctacctggtcatcacacagggcaggaggaatccgtcagcgtctggtgccacgtgcctctcattagaaggctgagcccatctactgcccagacactgctgccttttttcacgacttcctttaaaacaaatgaattcctatgatgtgtctggcatcatgctgggtgctgcagcgattacagagggaaaaaagatatacttccagtcctcaaggagtttgcggtccagtagggggataaccacatctagatcatgtaaaccaaaagtaaaatcctaaggccctcccccacctccacccaaccatctaaacggacttcctcctcagccagggcagtgttaaaatttaacctgaaagcctggttcaggccatgaaggacgtggggatcggacatgcctgattatgtttacctctccagcattaacgtcaacacagaccttaagaaacatttcacagcgtgttctccctgaagcctgacagctagaagcttcatctgcatgaataaactttggtctttgcagtgtcttatcgcagcccaaacattcctttctattgatcccaggtctttagacaaactcaaccaattgtcaaccagaaaatgtttaaattcacctatagcctggaagccccctactctgagttgcctcacctttctgaaccaaaccaatgtctttcttaaatgtacttgattgatgtctcatgcctctctaaaatgtat

SEQ ID NO: 69457 - DNA, 478 bp, Homo sapiens
tgtgaaaacttccactctacaatggaattctgttgcacgtatccaagtttatggttcaggtctcatgatcacttggtgatctcctctgtttggggttgcagcactccctttgctataaaacgtgtccccgttggagatgatgggatgtgaacaccacagtgactggtgagtgagctgttctgcaaatcccagaacagcagtgccagcagaggtgcggaggccagggaggacacatcgatttgtccctgtgaggatgaagggctgtcccctccacagtgggaggggctcagcataattaatctgccaccaggtcatcggtttgtcccaccagggaaacgctggtgactcagcgtttgtccaagacctggcactcagtgggtttggcaggcagagcggctgtagtgaactcaagcacagcctccgacattccacacatgcaaactgcttggggtcttcattattttaaaaattttttttt

SEQ ID NO: 69458 - DNA, 1205 bp, Homo sapiens
aggggcgggcgggcggccgggaggaggagcgcgcgagccggagtcggagcccgagcccgagcgcgagccgagcggaggagaccctgcggcgcgcggcggcggctcccgggcgtcccgggcccggtggcggcgcggctgtggttggctgagcgccgcgggccgccccccgcccgccccctcccctgctcccctcccccgcctcccgcggcggctggcgtcgggaaagtacagtaaaaagtccgagtgcagccgccgggcgcaggatgggatccggctcctccagctaccggcccaaggccatctacctggacatcgatggacgcattcagaaggtagcccctcccccacccagacaccccctcctccccccgggtgacagcgccggggccgggcgcggcggggcgggactgtccgtgcgtctgccggtccaggctgcggcctccgtgcgctccgccagctctggtcgggggcgggggtccccacgcgccggctccccggggaaaggggcgactcgccctggggggtggggggtgggggggcgggctagtgtttccgtttcacaggcagagcttttctttttgaaaatctgattaggctgagtttttacattcaagggctggcacatgaagcctttaatttccggtggatcggcccgccgggcagccccggggtcgtggtccgcggagggggcgagcagccgccgcttcctgtcgcgcgggggcaggtgcggggggcgccggcggggacactgctcccccgcaggtgagtagctccgactgcagagggggactcgggccgctgcacctccggggccccgcggagagcctggggggcagcgggtccggctctcccctgctgtgcggagataggaagtccctcgaatgtccagcgttcctagcggacttgagttacacgggagaggggttcagaatagaccccctttgttcgtggccccctctgacgggcagggagggacaatgagcgcgccggcttggaaggggctctcatgagctccccctaaagtccccagggaaaagccattgtgaggaaatccctcaaacctcagctgggcgtttcaggaagcccttgcagctgcttctcacctttctgcccacggagtactccactgaaggaggccagggagagatgccccagccaggcacagagcaggtgccggccaggcttgagtctttcctgttcccaga

SEQ ID NO: 69459 - DNA, 673 bp, Homo sapiens
tcaaaaaaaaaaaaaaaaaaaaaagaaatattccttcgttcttttataggagcatagtacttcattttgtagatgtactattgtgtatcctactgatagatacttgtgttgcttccagtcttgtttttacagcgatcagatggttcttcttaatttctcttgctacaaatgttgctgctgtgtacaacctgttaaagtccacagatggaataaaagctttggtttgcaaaaatgactcaatctttacaaacattctgtcatttgtaccataatcaattagtttattggatcaccgaattgcctgacagaatccttcctggaactagtctatggggtcatttggcatagagtcaaagcctcagacacgatgagccagagttgatttcctttggcttcacataattaaactttcccagaggattatcaggttacagtgacacacacacaggctgtcagataatggacaaagtcccagcagcgtgtacaaccagctggtggctcccaaattcaaattcccccagcggcatccgttcggttattcgtacccacaccctcccttagaagtttacccctccgccaggcgcagtgactcacgcctgtaatcccagcactttgggaggccaaggcgggcggatcacctgaggttgggagttcgagaccagcctgaccaaca

SEQ ID NO: 69460 - DNA, 701 bp, Homo sapiens
cgaaggtgtctgtgcccatcaggggaaggtgcggggactggaccatctcaactgcatgagcagagagagggccatgtgtccaccccagagagcttgggtccactgctcaggcccgaagaagtaaatatgcccaaccagcccagaaaatacacctcatgatactttggtgattctttcctccccatgggacatgatgatttctgaaaagcaagtcctagcatgttggcacctcagaccctcaccagcccacctagaggccttgcccatgcccacagcagggactcagtaggtgtttgcttaaccggttttggctctgagaattttaagggtcatatttactctctcttttctttttcattcctagagcattcaaaatcaatgaactgaaagctgaagttgcaaatcacttggctgtcctagagaaacgcgtggaatgtgagtgacgtttctgtttcctttttgcttctctgtcctttaacctctattcaaattaaccacttggaacggggaggagttcagtgccgaaggtaaatacaaataaatgtcttttctttgtgaaatacttgaaaattacctttgatgttaacaaaggctagcacagtgactaactaagcattttatttctattttaaaagaagcacagctcatggtataaagcattctttcagccccaaagaataaaaatgaacacacgaagcctt

SEQ ID NO: 69461 - DNA, 960 bp, Homo sapiens
ccaagagccaagcagatgccggcaccaggcttcctgtaaagcccacagaactgggagccaatcaaacctcttttgcttataaattgcccagcctcaggtatctctttatagcaacagaagaacagcctactacagcctccaatcaccaccaaaggaaaagcagaaaaaggactagggagccaaggagtgtcgattcaagtcctgattcaatgatcacaaagctcaaattctgggaagaaaacagcttcaagtcacccaccctttttgtcctcatccataatatcaagatcaatgcttgaattccataggcctcacaattctgtgttccactcacagcttgacaagtgaactctttgtcaatgacaaggcaaaggttaatgattaacaggcactgtatttaccaacttaggaactaaataaacagaatccagacaggataccattaagagttgcagcatcaccaaaaatatctggctgattgactgaatgtcgtcgcttttctttttctttttttgagagacagagtcttgctctgttgtccaggctggagtgcaatagcacaatcttggctcaatgcaaccttcgcctcctgggttcaagtgattctcctgaaacatgatttacatagtcagatttatacttttcaaagtgtgttgacatttctaaaaatgtatgtggtcactggatcttcaagacagtttcattttccccattgtcaacgaggaagccacagagaggttaggtaacctcaagttcactcagcaaattagaaaaataaataaagctgggactggcacccagggtcctggccgggctgctgtcacggcctgctacctgcccttctggaacgagtcacttccctgcacacctggctgaagaggaccaggcactccatgaggattccttgataacgcaggttagaaagctaaagctgcaagcaacagaaactgatcgtggctg

SEQ ID NO: 69462 - DNA, 1131 bp, Homo sapiens
tttctgcctcttgagttaaaggattcatccactagaactggccaccttaaggccatattatattgtggtggacttgtcttaaatggaatttcctgcttcttcttaaatgtataattcctctgaattgaatataaatttcttcatttctcctcattgactttcaaagctcttcttccttttgatatacaaagtttagccttgttcgagagatctgggatttcccttacgttacggattattttgtaaacagaacacccaggctcctcccctcatgtcctggctggaggtgaaacattaaaaagagattttaaagcagggccctttactcccttccttcctggtttgtggccagggcacagggcagctctgctccatccaccctttgtccctgtgctctgggcttggaccaaaacctaaacacagcgtgggccgtggcaggagctgaccggctggggcaaagtttaacacaggccatacaaacagcccagagcctggatgctagaaccaagccttgcttttctctgtcactccggaagtgtgctctacgcgggctctttagtgaggctcctggaggaagtgttgaaacacaactctattcatacatgtctttaaacagctttcactagctctgtagccaaaggactgggcctgccaggttcccggcctcttgctggagcacagtgaggctggggaaggagcacagcacagagcctcctgagcctcggctcagctctccccgacccccagctcggctctccccaccctccggctcggctctctctgacccccagctcagctcttccccacctgccaggacgatttccccaaagccagcgtctgtcagaaaatcacccttagtttttcctgcaggtggcctgtgacttgtagaagctcacaaaaatctctttcaaagcccttttttgttgctgttttgttttgttttgagacagagtctcactttaatgcagtggagtgcagtggtgtgatcttggcccactgcaacctccacctcccgggttcaagtgattctcccgcctcagcccccagagtagctggaattacaggcagcctgtgaccacgcctggctaatttttgtatttttagtggagacggggtttcattatgttggct

SEQ ID NO: 69463 - DNA, 2160 bp, Homo sapiens
ttttccatactgaacctaaacttcggtttatcccatcctcaccccctggcacgtatcttgtacatatttatagcctttaaagcgagtgcaccaaaaaactttccatatggaaccgtggacttgtcttccaagtcagaaactccaccagccactagaatttcctcaaaatgcaaagactgaaggtaagcaaatcatgtctaatatatccacagctcactctggcagatattagaccgtgagtctctaaaacaaaatcatctgggatatgtgacgggtttctgagtacaatttttgtgagacctaacttaacatcgaattggctttctaaaaccaaacgaacaaaaaatatacagtatatctgacagacacgtcgtccgtttcaaatatgaaatcacaaataacctgggaaaggaaacgaggggctgaaactgacagcactactaattgctccgagagtcctgagttaggactgttccatcaacaaacatttactaagttaaaaatcccctgcgtcgtcctagcactggcgatacactaaggaaggagaataaaattacggaaagcaaaacccgagccgtgcgaagggccactagggaggtgcgcactgcgagctccacgtgcacccttgggttgggtaagtgtcggagatgacttggagccctaaggagcaattaaggccaggtgagtggatgcaggccgggaagagggaacagacaaccctgcaaaaagagggagcgcgcttggaggtcagtgagctcgcagtgagtaagcccctcccttctcaccagggagacccgagacccgcttcttcccagttctgcagagcgtgttcggccgggccttgctgactggtcagcgtcgccccacgtgctctacctacccggtccccgccggcgccgcggagaccggaagcgacccggcggcgctaaccgggcaagaacaccgcagaccagccatctagtgcaaggagcgcgccggagccggggagcggacgccgagagcggacggcgaaagcggaccctccaggcgcagagacgcggccaggccgagactgcggcggaggactcgtgggctggagcggagttccccggggtcaccccagagtgggtgcgaccaggcggtgcgggagaagcggggtcgccaggacccgacgcgcgcccgcagcctggtctccctgttccaagaccaaggccccctcacctgcttgctatggaggtggccaggaatcggctgccgccccgcaccaccaacgtctgcccgcacaacgccagtcccacagagcccgccatgtacccgcccgcctcaccgccatacacatgtgccagcccagagcctcttcctgtccgcaccggtcggtgacgccaggcgcagacgccgagagatgacgtataccccacgtaccgcgcatgctcaaggacgagcctgccttgagcatgcgtgaaaggtgctgtgaccgccctccgggttgtggctggtggccttcggtgtttcgggtttggcagttcactcaccaaggtgatctgatggagtgcacttcgcacgattccaagtacttgcctaatgttcatcctttcctctagacggggtagggctggttctggatctttttccgcggtagctggagagacgtaggacctgatgatggctactagatgcctggtaaatgatccttcaagaagtgaatgaaccgggggccgtggctcacatgaagtcagcagttcgagagcagcctgaccaatatggtgaaaccccgtttctactaaaagtacaaaaatttgttgggcgtggtggcgtgcgactgtagccccaactacttgggaggctgagacagaagaattgcctgaacccgggaggcggaggttgcagtgagtcgagatcgcccccgctgcactccagccagggcgacagagcgagactctctctcaaaaaaaaaaaaaatgtccaagatgtggtcatgggtgagggtgtctcgggtggcgtcaagtctgaggtcgctagaagtaagcctactgaatctttgcacttagacaagccacagatgccttaaaatctccgaactgtagtgatattttcaacccaaactatggttagtttccagtgttcatcccaagatccccaaaagcctcttacaatcccagcatcaggcacaaaatctaggat

SEQ ID NO: 69464 - DNA, 2243 bp, Homo sapiens
caatgagccaagatggcgccactgcacgccagcctgggctacagagcaagactccgtctcaaaaaaaaaaaaaaaatttaaacaaaaaaaaaatcttttggcatttttttttctccctttagggacaaaggatcccttctcatgattatcctaagatctaaggttattctttttgcctcccagggtggatggtggcagatgcccttgcatttacttgatagcagactcctctttgataaaggcctttgataaaggcctcattccgccagtttatcttgccacctcaatgaatcgctagctgtgtcaggaatccctacacaatccatttaaatgactgtggcagggcctcttcccctgtggaagctgaaggtggcacgtccatctccgatgaaatgcgaatggggctctgggcacgcggcggaaggcagagaagaggcagagaaagaagctaataactaattacaccgactccacaattacgactaacgttggggacgaactctttgctaaataaacatttaggtgaaacaaagcttccatttccaatcggcctaactctggtattagcgttggcaggggccatgcaggaggggcagtgagcagtggtggccgcgttgccgacagagggtgagggagctgggcgcgtggtgtgggcgccgaggtcccgagctgaagagctttaaaacctctcaaaacacagaactatcaatcaagtaggaccagactgtgcccccagggaaggtcgcagatttaaggctgcgaggacaagggcaaagaagtgcgaagcgttcgggtggacatgcaagccggcccagcgcagacgcctgagaggggtgcccagcagcccccgcaggtctccgccgcgcccccgccacagcgcccaggcgcccgcagggcacagggatcggcaccagccggtgacgtgtccctcacgctgctgcctgtgattggtggtcccgatccggggcgtggccccaagggaggcacttagccctactggggatgcgcgcgcagacccacggcctctgctccgcccccagctggcctgtaattggcgcagtcggcccaaggggcggctgttcaggcgcgggtgcgcgcgcagctgctgtggccctgcttggtgcgcccgctgtcaccgccatggctgccccgtgtttgctgcggcaaggacgagccggggcgctgaaggtaaaggaggagccagcctgggctggctgcgcggccccgagcctacgtaggggatggggtgagggggcgcggtgctggtcaggtccgggcctgtccgcgacctctagccgtcctagttgggccgctgaccccgctccctgggcccaggactgaccgccacggggccaggcccggatgtggccagcgagcgtcccgcggttcccccgagccggtccgccgccgccgctgcccgaggcccaggccgaggctggcgtgccccgtgccgacgggcgctcccgagggctgcatgcctgggcggcagactcgggtggacgttcccaggtgatgctgccgcgcggctggggtcagccgctgtgcggctcccgcacggcttctctgaaggacagtgacttctccatttagccaagagaggaaatgagggaactttcagggacctggttaacttggtaacttactgacagccgttgagaagccagctgacatgacctgacctgtgaaaaggagaagaagggctttcttttcggcaaataaaaagctaaggccaaggccgggcgcggacactttgggattttgcctgtaatcccagtactttggaaggccgagccaggcggatcgcttgagttcaggagttcgagactagcctggccaacatgtcgaaaccccgtctctaaaaaatacaaaaaattagtctggcgtggtggtgcattcctgtaatcccagctactcgggaggctgaggtgggaggatcccatgaacccgggacgcggaggttgcagtgagccgagatcataccactgcactccagcctgggggacagaataaataaataaataaaataaggctaagaccacttcactctcttacaaattttaaaatggctgttattacaaaagcagtaactattccctgcagaatatatatgcgtgtgtgtatatatatatataaatacatattatatatattatatataaatatatattatatatatatttatataatatgtaaatatatattatatatttatataatatataatatattatataaatatatat

SEQ ID NO: 69465 - DNA, 351 bp, Homo sapiens
gcaattgaagacatgttaggttaatatataatgtatgagtctgtgtaacggatagtttttattcatcataaaattctcaaaagactcacagatgtgtggcccttgcagctgttcttcccttgctaacagcgttaggctctgactcagaggagttttgtgccaaagaattctggcagcgtctacagttcttgtgaaattcccagtgaggaaatcgttcactgtgagcaggggcgatgatgacaagacgatccaggggatggggaaggagcccaggaagaaagaatacagagccccgggcatgtgaaatgtatcagcctcaaaattcttatctttctttacatctttctattt

SEQ ID NO: 69466 - DNA, 3034 bp, Homo sapiens
ctctgaagacacaggagggatgtcctccgagctgttcatgcctagacctacccccaggctccctctagcaatcagctccagtcctgggcctgtctgccttccgggaggagtgggggcccacagagctgcccttcccgcgctgtgtatggactcaaggcactgatggccttcggtgggccactgcataaatggatgtttctgcagtattgaaggccagtcaggcaaaccgtgtgctttcctacgcagtggggaatgtgtcgccctttccttacatcttggagaccaaagccaccatctgcacttgtgggtacattgtggcagtggtcggttagggtggtctttcaaagcagtttgaaatgcagacacttgtgggcgtcccctaaggcaggtgccctttacctggaggccgcattggtcacctagacccgcaaggctcacctgggccggaaggtgtggtcaagcgaggccaagtagcccagaggccacccctaagcacctgtggacatcatgagtccttgctggggtcctcacagagggaagacagcccccagggtaaagcctcaggtgctaagcactcgcgctgccgcagggggggaggcacgtgagcatccactgtgccgcccaggacgggcccacccgggctccagagcctggggaggaaggctgcgaggctcccacgggcttacattcaaaccgggcacacacagaacggaggccttcggctacgggacgcccggcggtggggttacggatggtacagccctccctccccgcctgctcgaggcaaatggtttcgcccggctacacacacctctcctgggcggcaaccgagggcgcggagggggcaagacgtgcgctgaggccacgcccctactgcatagtcataaggcgggaggctctgccttcggggcggggcagacagctcctcgcgctcgggcgcggccggttgggggcacggcctagctccgggtgcgggcggggctggaggcggggccggccaccgcccggttcccgccctcgctctcctcccccagcgatcaggccccgccccgcgcccgccgccgcgcagggaggggcggggcccgtctccggcaggccccgccccctctctgaatattgatgcggcgcgcgtcggcgtcgccctcctcccattgagcgaggctgtgtcgcgtggcccagcgtcggcgtgacggttggacgcgggcgcggcactgcgggtcccgattgctgcagccgcttgtcagtgtgatgaagattggcacccaggtaagctgtcactcaaccgctccgccgccgccgccgccgctctcgccgccgccgtccctatcaatcacaccggcccgcggccgccgcccgccgccgccgctgccgcccgggtctggagggccggcgctgccctcgagggcccgcatttgacccgccgcccggggcagggggcggggagggggcgcgggtgggggaggggagcgggcacccgcgggggagggggcgccttcagcccaaccggcgcgggggcgcgcccagttggtttcttagtgtgggttgagggacgcggaaatttctggaaggcgccgccgccgccgcgctgggcctgatcgaagcgcgcgctcctaaccgtccctttcggagtgcggcgcgcgccccggcgcggggcgggggcgcgcggagcccggcgcgggcggggcggcgggcgtgagggtcgggggcgcgcggcggggcggggccggggcgggcggcgcgcgtggggccggtcgggtccgcggcctcgcggagtcctcagggccggcggggctgctcggagggtgcggggcgcgcggcggcgcaggcgggaagatggcggccgcgaccccggccccggcctcggccgtggcgagcgggtgggtcggggtcctgggggcggtgggcgtgatggggctcgtggccctcagccgggcgccggcgcgggagcagcccagggccgctcgctgacggcagtgtttggggccgggtgctggggaagcggttccggcgtcccgggaattggtgggaagagccgcttctgtcacacgggtcgtggtaatggatgacaggaagtgccgggcagggtctgggcgccctgtgggtttgcaccttccttgtgagggaaatcgtgtcacttaacgaaaaatgaagaaacgcggagtctgctttatgtcatcctcgtggctctcgaaatgccttatttggacagtggctctgcgacgggaccagttagggcctccgttccgatggcggattcctgacgggaggcccgagggtccgggaatggcggcgtcctgaggtcgggcccagggcaggccaggctgagcgccacggcggggccgcagccctggggggtgttccacctgtgtgtggggttctcttccaactctacgagagtttgctttttaaaacagtagatgatttttccttaggaagtggttcctcttcaggatgaaagaaacccccagctttagttaggtctactttcatgatttttcctggcatactgaaaaataggctttctctaaacataaggaagaatcgaggtgaaatgtgaacctctgccagtatagttattggtgatgctcttgcatttagtcataatttggaagatggcaggctgaccccaatgagcctttcatcactctgcttaatttacttagagtgatttgtgaatcctgtccttgtacacaggcgtacctcagataattcgagttctaatccagaccaccgcagtaaaataagtattgcagtaaagcaagtgacgcaacagttttaggtttttcagtgcatatgaaagttgtaattacagtatactacttaaagtgtgcaatagcaagcattatatctataaaaatgtgcttacgttaattaaaaaatattttagtgctaaaaatactaatgatcatctgagcctttagtgagtcctgcttgttttatactttgacaatctggcctcagtgtggatggctgctgactgatcagggtggtggtggctgtgtcagttacttaaaataagacaacagtgaaattt

SEQ ID NO: 69467 - DNA, 2851 bp, Homo sapiens
gccaccccacactggggtggatggggccgtgccctgccctccctgaggctcactcactgtgcccctctcctggcttctctcctgcctccctgatcagcaagttcctaggggctccccgaatatcatcactccctggagccacagagaccctcacagctccctgcttggggctcctccgcatcccgcacaagctcccccttcagttcctgacgtgtacccctgccctctgcaggtgctatgtaggggccccgccagcctccgaggcccacaagggcttctggttcaggaaggctctgtggttacctcaactccaaaccctctccacccccacccccaggcagcatgctggcaccctagccccgggcaccctgagaacaccaagtgccgtttcctggaagaggaaatgtttctgccaagaagtttccacgcctctggcctatgattgactgacttgcttttgaaacccgttcaggagaggtcatgcctatccccttcctctacccgctggcctgccctggctcacttggctgcatagtgggaaacaggaacttttccactggccctaagcaaagcctactctccagagactggcagaaaaccaagtgcctgaggagagttgggtgcggggaaagccggaggctcccgtggggccctgtagcgggagtgccttcccagtcgctctgggaagccctgccctctcctcctcccacctgcctccctgccagtgtcctcccccagcagacctgcaggaacaacaccgtcatgggggcccgagagtcggggacctcccaagccagcactacagcccagcacagatgccaccaacctgtggagaaaagcctttgttcgtgtccacagcggctctgtctccatcctttaggtagcttgataccagggcataattcaagccattgctgagatgcccagagaccaagaacatgaagctggccaggcttggtcattaggaaagccctgggcaccaagacctgccccctcacagctgctacagctggctggctggctggctggatccttcagggtggggctgcagtcatcgtttcatgagccacagccaagaggtgtcataagcagctgcagaggtttgtggaggacatatgaacagccacccatctgcagtcggggctgctgtggacaggtgtgcaggttgtgaacggcacaactccatgcctccatgccctcagagtctacgcctggatgggcacgtgcagcaccccgtgtggacttctcagctcccctccgttttcagtgttcctggctgggcaggacgagcagatcctgcacaaagagcagccctcacccccatctgcagtctgatctgctcccctccgtcctcagcaggcccctgcacccccgtcctcaccctccacacctccccagccctcccacctgcacctggactgcaccagccacactcctgactcaggcgtttgcccacctgtgccttcagccaggcatgcttttccccagggcccgctgggcacccctgagcctctgcccagcctccgctcagataccacgtcttcagtgagggctgcccccacctacgcactgtggtaaaatgtaccatcttaaccatttttttttttttgagacggagtctcactctgtcgcccaggctggagtgcagtggcgggatctcggctcactgcaagctctgcctcctgggttcacgccattctcctgcctcagcctctggagtagctgggactacaggcgcccgccaccacgcccagctaatttttttctatttttagtagagatggggtttcaccgtgttagccagcatggtctcgatctcctgaccttgtgatccgcccacctcggcctcccaaagtgctgggattccaggcgtgagcagccgcgcccggccccatcttaaccatttgtaaatgcatagttgagtagggttaagtacgttcatgttgtgtaaccatcaccaccatccatctccagaactttctcactttcccgaactgaaactgttctcagccaacaatgattcctcatccccctcctcagcccctggcaaccactgttctcgttgcctctctgagttcagctgttctagattctttacataagtggggtcacgcaggattcgtggggtcatgcagggtttgtgctgttgtagcacgtggcgtggtttcattcctttttaagctgaatcattgtccgttgcccggatagtccacattttgcttctccattcatctgcatgaggtagatcttatctccatgtctagatcttatctccattttgtagacatggaaattgggacatattgcccaagaacccccaactgataagtggcagagtttggattcaaacccagatcaaactgggtccagagttgtggcttttttccaggctcgtccagcaagtgccaaggctgggaggtgctcgtcaacaggcactccatgttggccaggctggtctcgaactcctgactcaggtgatccacctgcctcggcctcccaaagtgctaggattacaggcgtgagccatcacatccggcctaacaggcactctgtgcacggtgtgtgtgtgttgggggtggggagtgctatgggctagattgtgtcccctcaaaactgacatgttgcagacctaacccccactacctcagaatataaccttatttggagacagggtctttaaagaggtgattaaagctaaatgaggccattagaccctaacccagtgactggtgtccttacacaaagggtaatgtggatgcagatgcggagggagaatgccctgctaggatgaaagtggagaacaagggggtgcttctccaagctaaggaccaccaagcagggccagcaaccc

SEQ ID NO: 69468 - DNA, 686 bp, Homo sapiens
agttctcacacataaagcccaaacaaccaaatgcctggaccttacagcccggctcctgggcacggactgagggtgtactccagcccatgccaacaccggattcccaataggaagccagggcgccaacctcttggcaacttatctctaaagggatctcttgggaaaacctcagtaccaacccccacaggccttggcaccgagtccctggaaaagggcccaaggagccggcctcatgcttgtaacagagagtgagctcatcgcagatgtcaccagctctgttctgcagatgaatttgatgccgagtcagggcatgatcccaaatgaagtccaagctgtgagcccagcaccagcctgggccctgaacagactcgctgtctgcattatctgcaggaggagcccctgcagacctgcagagattgctgggtaaacaaatacagccatgccctgtgtttgctattacaggtaaaccacaggcggaggccaagagggcacaacggagggaggaaattgttctagagaaatgctctagaaaagcatttcacagagggaacatttgagctgggttctgaagggtgaataggagttcaccaaggagagggcaagagatgtgtacactcccaggcagccagggataaatgcaatcaagatggacagagggacgcaccatcacactgctgcaggatctc

SEQ ID NO: 69469 - DNA, 1303 bp, Homo sapiens
agctccgagatctccttccctagaggggggcagaggagggccaggctcccacgaggcccctcctgtgaatcggcgatcggttcccaacgcaccgacccctgacttccttcccccagcgcctgccccagctctcacaggtcccccggctgggacattagagcatctcaggatgaaaaagtcccaagccatgttactggttccctctccttcccactcgaactccaccccctccatctggccctgtcgcggggttctccgcggcacccttcctgcctccctccgaactcacttggccttggtcatctgaaatacgaaattccgtccccgccttgtccccaaggcctctgcacccacagctttctctgtgacgatgctgaggtctaccagggctctgcgctcttggtgaagagcgacccttaggaattccctccacgttcttgagcctggaaactgcgtcctgcaaagaaatgcccttccccggaggcctcagaccacacctcaggtgaccccctgcgcacccaggacgaggccagccacagaccctccaaattcccattctctgtctcataaatgatgagctgaactatctgtccccacgaagctggcaagacagaggtaaccgctccctggacagcgggtggctcacagcacgtgctaggacccgtccactgctccttagcaggcatgacgctaaccctccccacctgcttgcttctgcctttgaccctcacccggcccttcacaccctcgctgcttccactccggcctcagttcaaaggtcacctgttcgttccctggtccatctgctggggagtcactttggtcaccctctgacacaatgccctgttgtgtgtttttcccaaacttaagctgatatgttcttggccactcattaaccagcgagttttctgatcccagggccttgcctaagggatccatcccaggaccccccaggaccccccaggcccacggagcccagtgtagatggaggaagcccctctccaaagccagggcactcacagagctcacacttcaggccgaacttcttcccaatcttgttgattctgaccataggggtgtccccgattttcttcagaatatctggcaagatttttggagattttgccctgaaacagaggagtccacaattattcaggaaaaaaaaaaaaaatagtaccagccctggcagacattgtcttacacaaatcaacactcgaagaactggaaaaaaaaaaaaaaaaaaaaaaaaagaactggctttatctgggtggtggttacacaaatctgtacacagatacaccta

SEQ ID NO: 69470 - DNA, 1421 bp, Homo sapiens
gcaggaggaccacttgagtccacgaggtcaagaccagcctgggctccagccccatctctatttaaaaaataaaacaacaacaacaaaacagatgcttgcacacccatgctcactgctgcactattcacaagtcaaaacgtggaggcagcccacgtatccgcagacggatgaacacacacagtaggctcatacacacactagaatattactcagccctaagagaaatgaattctggcacacgctacaacacggacgaaccttcaggacattatgccaagcgaaatgagccagacacaaaaggacaaatactgtgtgattccacttccacgatgaggcacctgggactctcgaacgcccctctatgtctggcaaattcatagagatagaaagtagaatagaagcggccagcggctgaggtgagtggggaagggagggtgattgtttaatgggtgcagaggttgtgctggggatgatgaaaacgttctgggtggagatagtcacggtggttgcctcacacttagaaatggttacagtgatcagtgttacgtgtattttacccaggattaaaaacacacacacgcacctgaaatagatgagacagaaaaaaaaaagaagaaagcaaaaagaaagccaggcgaggtcccatctgctgcccctcctctggggggacaaggaacccacgaccacctcccaccttgccttcttcagagggcccaggactgggctcagccccgcttcaccctcctttgattccccacattcaacaggaagactaagtccacagccgtcactcaccggacagatggtgctgacagttcagcaccgctcaaactctgtaaggagacgtgacaacagaatctgtcatgggatcctggaatagaaaagggcagtgaggagaaaactctgcaaatctgactcaagcgcggactttggttaatgtcaacaatggttatgtgatcgtggaattggctcattaattgtaacaaataggccgggcgcggtggctcacgcctgtaatcccagcactttgggaggccgaggcgggcggatcatgaggtcaagagatcgagaccatcctggccaacatggtgaaaccccgtttctactaaaactacaaaaattagccaagcatggtggcgcacacctgtagtcccagctactcgggaagctgaggcaggagaatcgcttgaacccgggagggggaggtcagtgagccgagatcgcgccactgcactccagcctggcaacagagcgagactccgtctcaaaaaataaaaataaaaataaaaataaaagaaaataaataaagtaacaaatatacgacatcagtttaagatcttaataacaggggaaactgggggaactctatctattttttcaatttttctaaatctaaaactgctcttttttaaattttcgag

SEQ ID NO: 69471 - DNA, 3114 bp, Homo sapiens
acctcccgggttcaagcagttctcctgtctcagcctcctgagtaggattacagacgcccgccaccacatccggctaatttttgtatttttagtagagacgaagtttcaccatgttggccaggctggtctcgaactcctgacctcaggtgattcgcccgcctagcctctcaaagtgctgggattataggagtgagccaccccgcccggcctaaaactgctttttttttaaaaagcctattaaaaaagaaaaagttgcggaagccggctgcctttggaagcccttggagtatgctgttcaggtggtctctgcgcacaggccctacccaggcctcagcttggcctcctggacttcccagcctcccctccacctttgcaattcaccagactgggggccaaagcggcttcaaacgaccctggagggtggtgctttcaaggtcttgggaccacggacttgtctgaaaatccgaaggcgttggatcttctcttccccagaaaaatgcacccgctttcagaggttcgtgtcccacgcttttctttctatcccaaccttgtaagaagccgccgccgtgagcggagcagcaccttcctccgcgggtcgcgggagtcacctacgggaagggactctccgtctggcacaggccctgtctggcctggggcgcgcatgctccgccgccgaatcttccagaaagccgtggacccgaggccccggcagacgcaggcggcccagcgccttgcttttggcccctcgcctcgccctggagccctctctcgcaaggtaagggactgccgggaacgcagatcgcaagccgtcggggctctgtagaactcagaggcgctcggcggaaagctcgccaggcgacccagacccgaacccgcgggctccccaagacaacagcgccgggcggccggatgcacgtgcgtcccgggaaggcgggttcagctggcatcgcctggccggttccgttcgctccttaaaccacaagacccccttggggtcacgacgttcccggggcacccctgcactcgcgcgccagcactcccggaggggcctggggaaggccacgcgcacggagagcgggaaactcctctaggtttccaggtgggagatccagaccctactgagacccggaaaccgccggccactccgcctccggaagcgacactttgggacaaagctggggacaagtaagcccagaagatcctcgggaagccgagaatttcgcgctccgctctcccacccacgctccgcctcccgcttgcatcctacagctcagctgcggtctcgcctggggctcagggaagtgaggtcccaggaaaacctccatcccccgaacgcaacctgggcagagccccgcgtccctcccccagcgggcacccacctcgcgtgccgcccgcgcaacgacagcgtttaccgccaccccacacggtccgccaaaaagggcgatttgcaaacagccatttcccatccacaatgcagcgaactcaatgctgggcaccgaaacgtgcatctcccccggattcccaccccgcgtccctgctccacgctccaggactcgccgccagtggggtccactccgccggcgcgggggctggggtgggagcccggggccacgtgcacggccagcccccatcttctgggcggtcaagaccgcaggcgtgggcgccggtggggcgggggtcttgggagaccctgtctcgccgcctttcggtgcagatgatgcaactctgggcggaggcgcggagagggaaaccgggacccagttgagatcctctgtccagagaggggagcgagtctcggtggggccggatctcacctggacggatacatggaaaagaggggcgagcggctgccccgactgcggcgaggcggagacggcgaccccggggtggcggcctcgcggggacccacggcgaggggagcaggcgggcggtgattggcggagaggcgggggcggaggccggcgccggccaatgtctcgtggcagagcacccgcccccccagcccctcctccaccccacccagcccgggcccctcccccccaccccttccccaccccgccgcagcctgggaccctccggcctgcccgacccccgccctccccgggaccccggcatgcccccaccccagtccgcccgccccattcccacgccctgttgattcaaccgcagacccgggtcgccgccccctcccccgccttcctcttcgcctgagcccgcccgccccgggttccagccacccccacccgcggaccccggtggtgtcttctacctggtgttccgatgctgttttacttggttaacttcttgcccttcgggaatttaaggaacctttactgatgagcttgaaacgtgcgtcctggtgggtggggggccctgcgcgtcctcgaggaccgaccccgagggcgtgtgtcgcgggcccgggagggggcgccgcgccggggcgggactcgatggccgcgctctgtggccgccggacgccgtgcgcagcgccccgcgtgaccgcgcccagagccgggtccgaaccccgagccgaggcgcagaacagtcgccttgcgcggctccggtgcggcccacggccaggggctgccgggcgctctcggggacggggccgactccgcgcagggtggtagcaggggcgccccgcggggctccttcgccaggtcccggaggccgcgggcggggccgtttcccaaacatcgtgctctggactttcagaggctgaacctgatccccccgccctatggctaaatgggggatcccaggcccccgagtctccccccggacctgcagcgaaagacacggacggtgcccatcagctctgggcagaggaacgtgctgcgcctccgcagcgtccccggctcaggtcagagcgatgctccgcagcctcctccggcccgcgcagctccgccgcggtctctgccacgtggggctcacagtaggggagggagtgagacgtgaattagaattaaatgtccactggcaggaactgacacgaagaacaataaagccggcgatgtggggaggggacagggatggagttacatcatgaaggctctggaaggtggcattggaggccgggatcgcgccactgtcctccagcctgtgcgactgagc

SEQ ID NO: 69472 - DNA, 2258 bp, Homo sapiens
catttagtctaaactacagccaactcactggaaattagtacgtgccaaggtggcaattaaagctgaaattaaatgttttgcttttaacctaacgattgattagggaaggcatgcaaccttaaggaaaaaatcaaaacatctttttccttatatcagaattgtgtcttcaagaacagtcaccgacttacaaattttcaacttagatgatgggtttatcggggtattaaaggcattttcgattcatgatgggtttatcggaacgcaatcccatggtaaatccaggagcacctgtatgttaagagcggatcacgtctcttgtggttagatagttaatccagtagtctccaccatactttttctcgtcatatctccttactgccggcccagcggtcgcttaaacaggcaagaggctggctaagtggataaaacaccaacgcttaggaccctaagttagataagcgactgaatactggcgaggctggtaccagagcttgctcgacaggacattcacagccgaaagttggaacaaacgtgtccacgtccaaaaggcccggatgctccaggcaactttcagcgcggctcgaggcggcttccgggagtcggcgactcggaggcccggacgtcgggcgatcagccagtccggaccccaaggccggagaaagctcggccgcggcgccccgaaaagagaccccattcattctgcccgctccagttttccgccgcgcggcccacgaggcggcggctccggagggcgcgcaaggggccggaagggccaccgctccttcccgccgcgcgcccctcccccgccaccgccgcgccggcccgcctgggcctccccggtcgccctcccaccgcctcaaccaccctgcgccccgatcgcgcccaacccccggcggggggctcccactcacttgtctttctcggtgccgaagatggaggccagatactccgccatttcccacccgccgccgccgctgccgtcgacactgctgccgacgccgccgaccctgccgacgccctcgggagacgtcacccggacgcgacgacgctcttccccgccccgacgtggcagcgctacccagtcaggcgaggtgctgcctgcgcgtgggcgggacgcatgcgcgtagggagcacgtagtgcgcgtgggaggctccgccttttcggtcctgggaacccgcgccccctgccggtgccctccccgcccggccctagctctctcgccttctcgcccgcccggcgctggccctgctggatcctgcgcgccggggactgggggctggcagtgcagaccgaacccggggccgaggggcttctccacagagccgcctggggctcggtggggggcgctcagctcgaccccagctaagggagcactaggaagtgcgggcgtccccttccctgcacccttgcggggcgggaaccgtcgacctagaagaaaaaaaaagctgaggcaaacttgatataagtagagaggttatttgggccaagtttgaagattgcaacccgggagcatagcttcaagttgccctgaacataggatttgcaacagtgacaagtgggtttataaagcttaagaggggggcagttcttaaatagctcaccaagaatttacatgaaaataacaagctattaattggctgtacgttgttctttatatcataattccaggaaaggaagttcatgggtgaaggcagcgggtccggagcaatagtgcctttaaacaattgccaggcatgggtggggaccgctgaagccgcatagacctgtctctccgggccggattaacctcgcacgcctcacatagctcggacgctctgtgttgtttttctcttctcacacccctctccgctttaccctccctcagcgcttgccaggtgcgacctccccggggccctgcactcttgcagttgcctggccaaggccacccacaggtggagctggaaggccagtgacctgcctctgggataccctttcagtctcctcatgtcacaaggctggaaccattccgttggaagggttctattcctctcctgcgttttaaccccatcaagcagccattttcatctggtttcccacattcatcaactcacctgcgatttacctaatttccaacgcaactatcaactctgattaggtagaagtcagagagacagggcctattttacttacctcctccacaagatgagccccagactgtggggcaggaccatgggatcctcttagctcggctagagctgaatgctgagctctagtgttt

SEQ ID NO: 69473 - DNA, 979 bp, Homo sapiens
cacctagtcccacaggcgcctacctgccctacataagaggctccctgccatttctctagtctgccccttcaacagcacaccaaataagcccaagaatgaggaccagatgtggccttcaagaagacaacaggaaccgtccctgtcgacttcacacgggtactaacgtgaaggcagccaccttgggccttaaaatttctaatcttgtagctaatttgttactcctacaaaggcagactggttcctaggcaagaaggggatctttctgggaaatggctattatcaattttgtttcagagtcaaactataagctaaattccttcccaaggttagttggcctgtgcccaggcatgaacaaagacagcctaaaggttagaagcaagatggagtcaggtaggtctgatctctttcactgtcatcatttcctcagttgtaatttttgcagaggcagtttcactttcatctttctcctgtgctggatgcctcctccgttccccctgcccttggacatcagactccaggttctttggcctttggactcttggacttaagccagtggtttgcttgggactctcgggccttcagccacagattgaagcctgcactgttggcttccctacttttgaggcttttggactccgactgagccactcctggcttccttcttctgcagcttgcagacggtgtatcatgggacttcaccctgtgatggtgtgaactagttctccctaatatactccctttcatatatatgtctattctgttagttctgcccctctggagaaccctaactaatgcagacccttgtgtaactttgatatccaaaatatggctttctagcatttagctggctattttgaaactctttgtaaaaaaaatttatatatatgaaggaaatctccatttgtaagggtgtctccctccctgcacccaaactgctagaaactgaagatggggaagacattggctgaagacactgtct

SEQ ID NO: 69474 - DNA, 577 bp, Homo sapiens
atcttgtgcacaggtgactgcacatgtgcgactctgtatttgcagcatacagttctagaggtggcatggctgcatcaaatggaacgtgcgtttgtaatttggttaccccatgtctctaaggcattttagtttggcagctgttagaagctggtttcggatcaaatcttgcaagtggcgggagggttgtgggtgtctttatcaggctagagtcatggaaagaatgtgcccctttcagaccttgacctccgttggggttacatctttaaaggcaccgtctttccactttggaaatggaagtgtcccacttgctgtgctgacggacactagagggcggagttccccatctttcaggcaatgtgaaggctcagtccacttctccacttctgcaactacagaggtgattatttgggaccactggattggggggagaaagtcagtgtctcccaaggggtacggcacaggacagagaaccagtattggagctcagacaggctcgggggactgggagatggaagccatcgcctttaccttgggcatttcatcttaggtcccatggaaacaggggccatgggttggt

SEQ ID NO: 69475 - DNA, 527 bp, Homo sapiens
agcaggccctcaagaagggttccctagatgtggtctattcccacgggagactatcattcagccgtcgaaaggaagggaattctgatgcaggctagacaggaatgaggacattaggctgagtcaaagaggccagtcacagacgcacaagtacggtgacctcccctttgatgaggccctggaggagtcagattcacagagacagaaagcagaatggtggcaccggggctgggggatggggaacgggggcggagtgttgaacggggacagagtttgctttgcacgatgaagagttctgtggctggatgtcagggatggttgcacaagactggaatgtacttgatgccactgaactgtgcacttaaaaatggtcatgatggtaaattttacgttatacatgtttcaccatagttcgaaaaatactttaaaaaaagcaccatgtcccttggatttagtgataccgacccctctttgtccctctgcttcccagtggtttcttcttgcccctgggatttgtagggatgggttgc

SEQ ID NO: 69476 - DNA, 1146 bp, Homo sapiens
gactgagggcagcgccaaagggctccaggcctcccgaaacagcctcggtctgctcacacttggagggctgtcagaggccactggacgccagcaagaaggttgaggagccccaggccggcggtgcccccaaggtatctgacaccagagtgagtcacagttttgaatattccatcctccataccgcaaaattattttcaggatagttatgtaataatcacggataatcatgattttcttgattcattctttaaagcaattaacagaaaaagaatgcatttcaatgttaaagatattcaaattcagtgacttctttcatgcatgagctaacatctcagcttcagcaccacatctccgttttcgctctggtttcacagtctcacatttgaaacacagaataaaaacaccaagaggtcatgcagaatgacagaactgaaatacttccagctcggtttctttgtgagtgctgttgttgttatgtgaaatttctcgtttaagcacagaaatatgttgaaccacgggctggagatgagaacccctcccccagtgcacctgcacccgcccttcaaagccgctccaagccaatgcaggtggctgcgtctgcagtgtcgggagtggccccatgactggaagttcactggaaaatttccactcagtaaatgtttagaacaagaaataaaactgtgctaatgtgaagattacagaaatatagtctatcctcatgactcatgcattccagatttgggaattccctgtgatgtcagtgtgccagggaccacagactggatggcttaaacaacagacatttgttgtctcacagtcctggagcctggaagtccaagatcgcagggtcggtggggccggttccttcctgtgcttgcagacgggcctcttcttgttgtgccctcatgtggactttcctctgtgtgcatgtgttcttggtgtctctttttggaatttgtccagatttcctcctcttttttttttttttttttaagacagagtgagactctgtcgccaggcaggagtgcagtggtgcaatctcggctcactgcagcctccgttttccgggttcaagtgattctcctgcctcagcctcccgagtagctgggactacaggtgcatgccaccatgcctggctattttttt

SEQ ID NO: 69477 - DNA, 5290 bp, Homo sapiens
cctcctctggcgaccatgaggaccaccccggcaggacaaggtgtgcagagaactagcatggtccctggcacgtagcccctgcccagtgactggcagatgagaagctccattgtcgccccaggcgagtatggggcacaggcgcctccttgggttgtctgccctcccgggagccccagggtgcccaggcgggcctcagctgagtccaggcctcggggacagtccgtgcagcccctcctggggctgggggcgggcacttgtcccagccacgtttctgctgactgagcagccttcttcatgagctcacgcctttccagagaaatcccttaatgcctccattctgctggtggcatatatagggagggctcggccttggctccacactgcgctgcccagaggccccgctgactcctgccagcctccaggtccccgtggtaccaaagctgaacatggacgtgaccatccagcacccctggttcaagcgcaccctggggcccttctaccccagccggctgttcgaccagtttttcggcgagggcctttttgagtatgacctgctgcccttcctgtcgtccaccatcagcccctactaccgccagtccctcttccgcaccgtgctggactccggcatctctgaggtaagacgtggcccgtggtgctggcctctcctcgctgctcagagggtggtggcctcggtgggtggagagcgatggactctggtcttgctccgtcaggcaggtggcctcgtcccacttcatccccttgcagaggctgggcgagagcctgtgtccccactgcagccacgtggcagagcttcccctggcactggggagagggtggacaagggagcagcctgaatccacctttgctttcctccatcagctcatgacccatgtgtgctttgtaaggcaccagccacatactggaaaccccaagagcagcccatccaggcatgcgtggtggcgaatgccagctcccgggttcctctggtctcctgagtcccggagacctgggagcaggtgggggtcatagtcctgaaagccagagagcagggcgttcctagcacctcctccaatgagctcggcctgcccacggctagcaaagctcttggcaagtttacttaggtgccctgccaaggctaaaaggacaggcaatggacgcccccccccccacccaaccacaggcctcctctctgagccacgggtgagcggtgcaggttctgctgttctggagggcctgagtcccacccagcacctcataaacagggtcctccccagggctgctgcagtaggcatcaacgccagggtgcaaaatgcctcagggagccaaggctgagccaggggagtgagaaggagcatgtggaagtgcgttttggagaggcagctgcgcaggctgtcagcaggctccggccgcttctatagacagcatgacaccaagggcagtgacctcattccacaggctgagtccagccagccagccaagcatcaccagccagacgattgaccctaacggaccaaccaacccgtaacgacccctcctaccataaccagtagccagccagcccataaccagccaacttatctataaccagccacctgaccatagccaaacaaccagccggcccaccagtagcattcagcccctcagctggccctgagggtttggagacaggtcgagggtcatgcctgtctgtccaggagacagtcacaggcccccgaaagctctgccccacttggtgtgtgggagaagaggccggcaggtgaccgaagcatctctgttctgataaccgggacccgccctgtctctgccaaccccagcagggacggcaccctctgggcagctccacatggcacgtttggatttcaggttcgatccgaccgggacaagttcgtcatcttcctcgatgtgaagcacttctccccggaggacctcaccgtgaaggtgcaggacgactttgtggagatccacggaaagcacaacgagcgccaggtgagcccaggcactgagaggtgggagaggggggcgagttgggcgcgaggacaagggggtcacggcgggcacgaccgggcctgcacacctgcaccatgccttcaaccctgggagagggacgctctccaggggaccccgaatcaggcctggcttttccccaagggaggggccgtgcccacctgagcacagccagcccctcccggtgacagaggtcaccattcccgagctaatgtggctcagggatccaggttagggtcccttcccgggctgcacccagccgtcgccagctccatccctgtcacctggatgccagggtggtcttagaaagaaccccaggaagtgggagtgccccgggtggccgcctcctagccagtgtacatcttcacatgaaccctacctgaggaagccagtccccgacggcatagctgcatccgcttggaatgctttacaggcattgacaccttcgcctcacagcagcactttggaaccagtgtcctcattattccagggcacggctggggaacaagggggtcctcagcctgctgggtcccacagctagtaccgggcaggtggacgggagcttctccccacagtcaccctgatgccccgctcttgctcggctggaggcctcggatctccgtggtgttgagggagccggggcactggagccctggtgacctgcatctcctggcggagccgggaagagctcatggactgtcacagatggacagtgccccgcgggggctggagagcagagtggggctggaaggtggaactcttagccaaagtcttggtttcttttggccagggtcctctttcaatggctggagaaggtggtgctggggggtgaacgctgacctcctcatgtgctgcccctccctcgcctgggcccggtaaagcccccacgtagccccagccagcctggaacatgcttcctgagctcccagctcttggtctttgcacccagtggaggaggaggtcagcccagggagctgagtctgcggtttagggcgtccaggggacgtggaagcatgtgggtcgtctggccacattaggtagggctgcagagacctgggctagagcagtcctgcggggtctggaaggggaagactggctgaggtgcggggcctggtctggaatgatcctgcgattttggagtgaagccatggagcgggaagagacaaccccccgcggggaatagcccggcaagtggccacgaggccaggctgaggtccagagaagcaggggcatgaatccataaatcccagggggcctggccatgggatgtgctggctgcacccggcccctgtgagagcccccgcaggctggcccccttctgcagtcagtggggctggggcagcttctctggcatggggcgaggcagccgcctgcacagtggcccccctgactgtgcgcccccaccctctccaggacgaccacggctacatttcccgtgagttccaccgccgctaccgcctgccgtccaacgtggaccagtcggccctctcttgctccctgtctgccgatggcatgctgaccttctgtggccccaagatccagactggcctggatgccacccacgccgagcgagccatccccgtgtcgcgggaggagaagcccacctcggctccctcgtcctaagcaggcattgcctcggctggctcccctgcagccctggcccatcatggggggagcaccctgagggcggggtgtctgtcttcctttgcttcccttttttcctttccaccttctcacatggaatgagggtttgagagagcagccaggagagcttagggtctcagggtgtcccagaccccgacaccggccagtggcggaagtgaccgcacctcacactcctttagatagcagcctggctcccctggggtgcaggcgcctcaactctgctgagggtccagaaggagggggtgacctccggccaggtgcctcctgacacacctgcagcctccctccgcggcgggccctgcccacacctcctggggcgcgtgaggcccgtggggccggggcttctgtgcacctgggctctcgcggcctcttctctcagaccgtcttcctccaacccctctatgtagtgccgctcttggggacatgggtcgcccatgagagcgcagcccgcggcaatcaataaacagcaggtgatacaagcaacccgccgtctgctggtgctgtctccatcaggggcgcgaggggcaggagggcggcgccgggagggaggacagcggggtctcctgctcgcgttggacccggtggcctcggaacgatggggtcgcctgcgtcccttccttctcctgagctcaagcgcctccctccacactgggctggaaggagaggttttgggggcagagcctctgatgggaaagggactggggagcacttccgagagctgggggcggggagggacctggaaggggctgcagggaatggagggaggccgggctcctttctctgtccgcgccggcaccggggcgggacgccagccctggcctccttctgcggggccgtccggttctctcggggtctgctgggtcgtcctgttctctcgggggtcctgctgccttcggggctgggctttaagggcactcgtgcttttgaggaggtggaactcggcagcttcccctgggcaacccatcatggccccgagctggaggcggaagctcgctctgtcccctcccgggaccagacactgggcggccatgccagaccccgccacggggagggagactcggcctggggggccctggctgcctgctgcgctcaccgaggggcatccggggggccagagggcacccaaggggaagcagacgccacggcgggtgggccctgccagcgccctcagccaagtaaagcgccctcgaccccggaggccgaaggcaccgggaccctgaggcactgggacccccatggcaccagcaggacgaccacaggggcgcagcctccacccgggagaacacagacactgacaccaacgggttttcaaaaagtcagcaacaggcattagcgtgggcggccatagtgacgcccagtgacatcacgtgccacggacactgaacagcacacacaccacacactccacacacacacaccacacactccacacacaacacactccacacacaccacagacacacacacacccctcaacacaccatgccctttgtctctctttgtattcctctggccaggccgtggtgtgacgggttctgagtcctgggagtggctcccctagactccccccctcctcctccctccagcaggacctgcccggctgttgtgccatcgagtcccc

SEQ ID NO: 69478 - DNA, 1728 bp, Homo sapiens
tccagggaggctctccctcatcccactgctggggacgctggactctggagtgaaaatgacccacgctctcctctgctcccgttttcaccttgggcatcattgtcatcatcattatgagcagcagccggaaaagcattaatggagcacctgctgtatgccaggccttgcgcctgctgcgcttgtaacggcaattctcatgcagcctgcacagcagcctgtagcctgtttctattgttagctgaggacacccaggcttagaaatggagtcacctgcctggtgtccccagctggtgagggcttgggccaggtgcaccctgtctgtttgaccccaaagccagggctcagcaccgctgggcagatgattactgcaatgtcacacataatgtgaaaattgggaggcgctgaggaagcctgaggcactggtccctttcttctggtgacatgctgggtgactttggacagatctatcaacccctctgagtattcgatgtccgtctttgccagtcggctgaagctgggagaccgagtgcctgcggggagcctccagcccccagttcctttcaatcatcaccagcgtgcctcacacttaccaccaggtggcagcagaggacttgcctggccgccgagaccttggccgcaggagacttgccgaacctcagccttaaaggtcaccttcactcttcaagacagtgggaagcggccgcagcaaacatccgcagagggcctggctccgggagcctctggactgcgtgctgccaagctgtgggagacccaccctgacccccggggagctagtgtccagcaggggagactgagatgggaagacacaaaagccgtgctggaagccagcggtgtttctttaccatgagcagttttggggtttcatttgcttgtgtgtaaaatcacttgaaaaaggaggcgtcactgtctggaaggccagggctgtgctggggtccctgggggctctggcggggtttcctccgcgcagaatgacgtcactccccggcttccggcccaggtcagctcttcctaggaagcctcttgtgaagagcagcccccgtcccgcccacatccgcagaggcctgtgagtggggcagggcggtaagtgtccctggcaggcagcctcagctgacgcggtgttggggtcacagggtcagaggtcctgccagccaaggctgcatgtggctgtctgagaaggggctgagacagagatgcaggcacaggtgccagacagtgccagcttggaaggaggaggcatcaggagagccgaggggttgagggacaaggagctgcttgctgggggcagggcggccttctctctacagggcaggcacctgcctcccgctctgcccttggcctccaggatgggagctgggaaaggagtctcccttcaggggagggacccttggcaggggctagtgaaggctccgtcagcgttagctcccaggctgctggggaggccagaaggccctgctctgtgggatttcctctgagaccctgggctaaggactgagtttgcaggggcaggaaatgtgggcgggctccaaacctgctgtgcaggctgctgccattagaacagaacagaaggaaagatacacatgcatccatgcacacacacacacagtgtgcccatatgcacagaacacacatgcacatagaagcacaatgtttgcacagtgtgcacccatgcacaacacaccatgcacactcgtgcacaacacacaaaac

SEQ ID NO: 69479 - DNA, 1972 bp, Homo sapiens
accttgctccctgatcttggcacacacgaggcaaatctgagtcacccacccagtccccaaggtgtcagccccaggacaaatggaaagccagtggtgacctgaggaacaggagcaaggcaggctggaccaggtcagggcatggagagagctggcccaggataggaggggccctccccaggtgtcacaggaggggtgctgtttactatgtggacaactggtgctaattcgttgttcactgtttttgatatacattgcttggaatcaaggcttggcaaaggcctctgagttctggccctgcccctggccaggtctgggagagggaactcttccctctctgagcctgctccatgccagcctgttccccgagccaagagagctgtgggttgtcacacaccgagggtgggcctgggctagtctgctttctgtggccatggaactggagggcccaggcattcacccatctccaggctgttctgaccttggagagtgggcagagatgctgtgcttggggtgtgggcctcccaggaaacgtacgtgttggtgacctgtgcaataggacagcgtggtaactaaaaagaaatgcatttttaatggtgaaattgtggcccactgcccagtgggattcctctgttcactccgggaggcagggtttggctttgcttgcagtgcccagggcccagtctcatggcctgtgactgcctgtctccccccggccgctacccagcgagagctcacacctcatccagctccaggagcacagagtgtggcagctgggcggagtagaggagtagaggtgtggcaggtgtggctccctgtgaccttggataagtcacaagtggcctccaagccttcttgccttgggcttacaatgggatgttcctgccaccaggtggagcggagcccccgagagccggcacagcatttctgcccagctctttagcatacaacctcacccgccactgtgcagcgttcagaggtcactgccgctggcctctgtccagctcacttgtgaccttccctgggatgtgcgagaggagggcgtgagcagggtggcgtgagcagggtggcggccgtgcgtcacctgccaggagttcccggtgggtgctggagcctgcggagcagccctgggcagcaggcagtttgcatggctttttgcgttttttgttcatttgtttttgatagggaaaaagaaaggaaggaagaaagagagggagggaaggagagaggcaagagagagagaggaggggaagaagggaggagtcgggggagagaaaggcatttcagaggggagagaagtccctacaggcaagccaagtcccctaagtgctgtgggaggggcactccttagccgactggctgccaggtctcccgggcagggctcccctcggccaccctcctcccaccttggtgccacgggcagcctgccaatgtcagctggccttggggagctggggaggggctggtgctaccctgggctgctggtggagccctcgtccagagaggatgtgctggtctacccggggggcagccaagtccacagcacagctctgccacgtggcctgtgttacccaaggctagagtagcctcctcaccttggttctgctgttcatccttgccctgatctggcttgggacagtcactgcagggagctgagggaagcccctctctcacctgaggcttcaggccctggagttaagcccctctcaccacagacacactcaccccgtgctgttaggcttccggaagtaagaagggctgtgtgcagggaccacacctgggcttcaatcctgactcctcccaacctctagttgtgtggccttcagaaaattattccctcatccccagcttctgatgagacctgcaatgaccaaactgcagagttgttcagaggatcgaagcaactaataagagggacagtgcccagcagggtggctggcagagaggcactggcaaatgttagtttctgcttttc

SEQ ID NO: 69480 - DNA, 1261 bp, Homo sapiens
cctcgaaaagcacccttcaccaacggtgctccgagggttcacagtagctcagggtattggagaacttcctgagggccggctctggaggagctgtcattctcccatgtgggcctggagtgcctgtgtggcaggaacagaccctggagatgccacagtcaggctcagctctgttatctggagagcttcctccctggtttctggcccctctcacctcggcatgcttgcctagcgctgttttgtttacagctgtcttttgcccaggggaaaacccaacgccagcagacgcctcctctctccttagatgagaagaaagccctggtggaatgggacctgctgacctgccctgcatgcggcgttttgcggtagatgctggaaagccgggtggaagggaatgggacctgctcacctgccctgcatgtggtgttttgtggcagatactggaaagccgggtggaaggggatgggacctgctgacctgccctgcatgcggcgttttgtggtagatgctggaaagccaggtggaagggaatcggactttgctctgtgcacggtgttttgtggtagatactggaaagccaggtcaaaggggattggacctgctgacctgccctgcatgcggcgttttgtggtagatgctggaaaacagggtggaaggggttgggacctgctgacctgctctgcatgtggcatttcgtagtagatgctggaaagccgggtctcgccccgtccttcccctttgcacaccctcccgggctcccctcccctccccaggttggaaatgcaaggagaaggaaatgaaagactaggggagtgggtttcctttttgtgcctctggtctttccagggttttctccagtttggggaattgcaagcccgtgacagctcaatgcaccacagaccccaagggccgtggtctgtgccagagagcacagcgaaccgtggcccggccagtgtggcctgtgtaagttggactctggtctgggggactgcccaggcagggctgggggtaaaagtccactcagagtctctgcatgtggctggagtttagcagctggctggggtgagccgctgcttgcggagtttcctgaagagcctgggctgctgatgctgggacactctcagctcctggttcctcagggctccagtcccacagatccatccactgcagggcccagggcccagtgagcctttgggactgccctccctccatcctgtgtgagaagagggttagatgggcggccttgtgggggcaacgggacact

SEQ ID NO: 69481 - DNA, 1127 bp, Homo sapiens
caggaggtgtcattttacattcccagaagcaggatatgagtctgttctgtaatgcacagatactactgatattattttgcttgcgatcaaattgtacctgctgttttataatgggcttgtgtcccttgatatgatcttatgagcatttctcacacgtattttcctacagctcctttaaaattgctgaataaggcagcacgtgggtaaacagccccagggcccagtcccacagggcttacttaagcgcgtgtccactccatggccgcacccgtgcatctgctgcggaacctggcgggcacaatgctaggggtggggctggagtcaccgagacttggtcctgctccatgggacttagagctggtccacagatgaacacgttgatcacagaccaggagtgctgtgggcgagactacacagagtcccgagtataagccgtgttaggtcagggagagtgcccacccatgtgatgtctgggctgaggtctggagaaaatgcaagcgttcaataggctggggcaggggagggctggctgtgcgcgctctatcttcgtcaaatctattttatctaatcatttgcaaaagcaaataacacgagctctctgtcccgggacaggcacacagctgttgactttgttcactgttttgtgcccctcacaagcatgaactgggcatgactcaggcatttgcagaaagaatgtcaaatgtcacccagaatatcactgtatacaagaggtctttgcacacagctccaatattttgcttagaggtcaatctctggaagttaaatggcttgttgctgaatgctgcatacatttccaaggtctagatactgttctaaaccttagtgactgctcatttacactctggaccctagacttcggcgagcaccctctctagatggccacaccatgagtgtctcaccagggctcaggggctgcctatccccttccctcctgagctgggcccccaaatcctaaggctgggtgtatatggccaagtgcagatggaggcaggctctgttttcaggagcaggacctgatccaagtttattaccaaattaaatactcctcccccctcctcatcgtagaccaaggcacaggatttgtttggagcttggggtggggaggg

SEQ ID NO: 69482 - DNA, 976 bp, Homo sapiens
cagggcagccggggcagaacctgtggctctggggtaaatgccggggccagcttaaaggagtcagctctctgcagcctgcctcggctgggtgggaacgagtccaggcttccaggcatttggaacccgagcagctgcagggacaggctggagcctcagccttccctccccgaccccagaccctctctggcccctcttaacccagccagatgagctgtttgcgaaacctggcctgtcgcagactgcggagagatctgaggaggaaggaaaccgtttcttagcacctccagcagttcaagcccacttcgagccctccacgtccgggctttctcctcctttgcaaatctgctcctgtttctgcgcttccaggagcctggctggggctggaaatagaaatgcattccatgcattcattctctcaacaaatatttactaagcacctcctcagggcaggccggggctgggcacagcgtcatcctccgcctcctcgtcctcctcctcaccagtgagcaaaacagacaaagcctgcacctacgcggagtggatgccctagtgggggagcaaagggagggggaagaagtgcatctcgtagtatagggaagcctgagagctttgacagggcagccgggagccgggggtcacagttccacctggctgttggcggcatttgatcaggagacagtcgctggaggccgtgagcccagcagcgtggagctccctcgactgctgtgacttccgcgtggagcacagacggcggcgggggtggatgggaaactgtaggagtctcgtgcagtcatccaggccagcgaggcagggaagtgggcagattccggatgcattccgatgacagagctcatggggttcctggaaaccaggagaacgcgattcactctgagcaactggaaggatggctctgtcaccacccaagagggggatggccgtgtgcagggatgggaggcgggagcggctgtgcactcag

SEQ ID NO: 69483 - DNA, 1197 bp, Homo sapiens
cagcacatatgtgtgtatgcaatgcaagcacacgttcacatgcataacggcagagagcgtgtctcaggattttgaccgtttctctgtcccctccacgacacacacactgtgcagctggggctgagaccctctgccctgcactcagttggcatgaaggatcagggtgtccacgggctgagaatggccacctgggggctgacaatggggcagctgttcagggtcagggtgggtccaggtgggtgggacgagactggggttgaggacgatgatgtgaggcccccccccagggcacctttgcccccgacaggcagcccggggtgagaactggctccagccacctttatccgatacgtgaggcagacagtcacgggacacggtggacatgacgctctgctgtgcagagaaaccgctctgtgtgcacagcccaagttcactgggcggtcacagctgggtaaggatggggaacacagcagcctgtgacctctcagccactgcagaggccacctgtgtgggtggccttcagagggcagaaccctccctggggacgcacctgcctcaggcgcggcctgtgcattcctgcctggagacaggagctaccagtccccggcgctgtttaccttccgtctggcggcccagcagagagccaccgccctcccctctcctggcctatatataaggccttgtcctggctttgccctgggcggggacgctgctgtactgtgctgaccctctgctcccagaaacccagggccactggcagcttcagggacaaccctgcctctgaattggggccacggacacccaggttactcacaaaataggtgcccttttccatgcagatagctgaagtgcagacccagagctcgtgggattgctggtggaaacttccagaagcatgcagcaggattgccatggggttaggaagccaaacaatcagcagacaggcaggtgcatctcggtaggaccccgctctggggaggtccctgaactgcatctcctgctggggtcaggaccagcctgcttcccagagcgccccgtgtgctcccatagcagggccgggctggcactcctgggcaggaccggcactcctgggccaggctggcactcctgggccgggctggtgtcagcgggccccaaagacaggccccaggcctgggtgaactcaggggctccagctgcagctcaccagcccaggaa

SEQ ID NO: 69484 - DNA, 846 bp, Homo sapiens
actgcctgactcagacacgcagactgctgggctgtcatgcctatttcaggaaaattaattataccccatgccgagagggaactcgcccatttaacgtcttcaacgcacctgcccagaatgccatggcacagcctgcctgcacccctgggcatgggaaagggtgggcagagcccccagtttctccaggtgtcaggcgggcttgcagggtggtggccagcagggctccaggcccttctagccaggcccgaccccgtcaccactgatactggaaactgcaacctttgcccagggagtcccctttgaaagccaagcctttgatccagctgagtgccagaaaaggccttgggccggccctggggctggcccgaggacctggctcagggacctggctggccctactgtggcattagaaagctccgcaccagtaagccgaccgttgcccacatgggaaggctgccctatgccctctggacagctggccctgctggcaagcccgtttccttctcctacttgctctatggggcctgctaagatggacagcaggcacgtccaggaccaggggctgggagctgggcttagctgccctgggctgaaattcagcccaggcctctgggccccgagctttacctttccctggcaagagttgatgtacacgttggcgtaaccaggctgcacacatcccaggacaagcttcccaactgtgactagccatggctcacgtttgcctgggttcccccaccaggctcgccccaggcctgcccttgctatgtcctcagacacccgggggcaggcacagctgtcaccctcctggcagctggaaaagaagggcttgagcagttctacagc

SEQ ID NO: 69485 - DNA, 541 bp, Homo sapiens
ggaggctgaggtgggcagatcacctgaggtcaggggatcgtgaacagcctggacaatatggtgaaaccccgtctctaagaatacaaaaattagctgggtgtgttggcagccacctgtaatcccagctactctggaggctgaggcaggaaaaccgcttgaacctgggaggtggagtttgcagtgagccgagagcgccccactgcactctagctcgtgcgacagagcaagcaagactccatctcaaaaaaaaaagagagagagagagagaatattgtggactttacaccaacagacctgacaacccggaggacaggagcatgtgccgtgacagacgcgaactttcaaactcactcgaaaacgaaatcccagatctgaatggttctcaacctactaaagaaactgaatttgggattcaaaaccttctgattaagaaactaggcccacatgccttccgtgatttaaagaagcatttagggactcaaacattcaaggaacaaataataacaattctacacaagtagacagtcaatacaaggtgcag

SEQ ID NO: 69486 - DNA, 8320 bp, Homo sapiens
ccagactatcctggctaacacggtgaaaccctgtctctactaaaaatacaaaaaattagctgggtgttgtggcgggcgcctgtagtcccagctacttgggaggctgaggcagaagaattgcttgaacccaggaggcggcagttgcagtgagccgaaatcgcgccactgcactccagcctgggtgacggacagagactccgtctcaaaaaagaaaaaaaaaaaaaagacaggaagaaagaaagaaaagaaagaaaattagacattagcatcaaaaccagaggagtaaaagtcattgctacaccactgaattctatcatctcccaacagttaagaatcacatacagcagcagtaagaaaatgcacctccagaaaagacctcagcagcaaacacatgggcaatttgtttctttaacggagctaattccacacaatgggcaaaggagaagaacaggaagaaaaggaaggtactaccattagggttcagcccttgagcaaagtcaaaaacaaaaccagctcagcccactcctgaggaaatgggctgggcacgctgcacaggcagtacaccagtggccatggagcacacaacttaaaaatgacaacagaaacaaaacacaaaccaggcgcacacggcatgaattctgtgcttaaagacactgagcaaactgtcgtaagctccaccaatactgctacttttattttcaatctagtgcagaggcttttgggggataatttcgaatcataattctctctcctaccacactgtacaccgagctgtcctaattgcacaaacacacacaacaacatcccagagtcatctcacattccatttcataagaatcattacgaggaacttcaacccaacacaaatggatgaaatagcacctgcaaagaacttcttctgcaagaagacttgatttcaccttgcaaaagtggtcatttgtcattagggaggtgtaaatgattgctttgctgttctaattaaattagtacttatttcctgatgatataatttattaatttcaacatgagaacaaaaattaagtcacaaaataaaccaacagagagacagggcaagccatgttcctagcatggattaaatgacaagctccttgctcttactatggaaaagtattttcatctctccgtttttcatggaagagtttaaatagggaaaacaaatgctcactactgtccttgcaaaaataaactaatgaaaaccagtaagagcagctggctttaaagtttaataattatctgcaaaggcagaagtttccagtttcactcaaatttgtccttttatactaaatgcgtgacctgtggcaatacctacagataagtttgtctgttttcatagtaaagcaaatttacaacagacttctacacatttaaaactggatcaggttaggatactaaataaaattctaatgaagcaaatctcaattatgatccaaaagcaataaaataattgtaaatatatctgcacagcctataaaaatcaatctatttaccttatacaaccaaatgcccaacttccacacactccccaaaagggaagccaccttcagaaattgcagacttatgctgttggaaataaaatataacacatttgccaggattagcagagaaaggcaagctgaccccttacctggtaaagctttatgatgtgtggatggttcagaagcttcatcagctgaacctcacgatagattttctccaaattgcttgaatctaatcgtgttttatcaattatttttattgcaacctacaaatttaaaaagaaaaaggatattctgtgggtttttttaaaaaaagaaaagaaaccctcaacctaatttacacatttcattttttgcaagttaatttctcaacactctgtctccagaaggtcacaagaagttgggaaaacataaccaaagtaaccactaatgttatttaaaataatcagagttaagtaagtgacttaagtatttgcaggctcactttacagggtttagctctgagtccatgaaccactgcaatcttaggttggtccttttttttgctattatcctctctgctttctcccaatatatgtccaaattatgcagcaacataatataaagcattatttttctttaccgaactaaaaacggttactatttacccaccacgacaatcaagcctggagcagtgaatctgcatggggtccacccgccaaaggtcgggtcgccccgggtccagtggggaggccccgccggctgggtcccaccgcccccacgcacctgcgttttggtgactcgatgccgcgccagcttcaccaccgcgaagttgcctttgcccagggtccgctcgatgtcgtaaaaacccacccggaggggcttctgctggccctgaccctggcccgcggggtccgcgctgaactccgacatgataaccatggctccgcgcgcacctgcggggccgcacagagctcagagcccaccagcgcccccgccgcccgcggtcggctccatccgtgcccgcggagcccccagtccccacgggacgcagggacctgctcccacgcctgtcgcccccactctatccacgggcccctccagccccgtgggaggtgtggacccgcccccgccgcccgctccacccggacccccgaccctcttgagccccgcggggcgcacggacccgctctcatagaggcccctgccgcccgagtccggttccgtcccgatcccgggaccccctgagccgggattccacactcgcctcccgccgcccgctgtcggttccgtccccaccctcgacccctttagcacctctgggcgcggacccgctcccacacctggccctgccacccgaggtcggctcgatccggatcccaggaccgtcccctgccccgctcccacaccctgcccccgccgcccgcgatccgtccggtccccacccccgacatcccaggcacctcggggatcgcggacccgccccccacacccggtatctccgcccgcggtcggctccaacctgacccccggctccccagcccctgagccccgcggactcactcctaccccggccccccaacaaaggggagcccgagggcggccaggccgccaaccccgcccgcgaaccccgcgcgcgcaaggccagggaccctgcgcggtggctgcaaccccgagccccggcccggcgcccgcgcggagcccccacggcggccacctccgcccgcccggagcccgccgctgccgccgctgccgccgctgccgccgcctcacctccgccgccaccggagcgcccaggccaggaagccgcccgctcggccgctggcgctgctcgggtgcctactgctccggctgccgccgccgctgctgctgcctccggggccgcgccgcatgtcagcccggagccgccgcgctccgccgcacgcggcgcccggccccgccccggcccgccccggcccgccccccgtagtccccgccccctgccccgcccccgccgcccgggcgggggccgcccattgacgtcgctttgacgccagagcgacgcgcggccgagcgccgggcggagggagagcgggagatcgggcggttgccaagagactggcggctctgacgcgcgcgggatgaggccgttgccctggcgaccgcgggccggtgacgtcaggggcgcccgccgcccgaggcccgcccgcctgcgctccgccgggcgccccctcccgggcgctgggggcactgcgggcggccccaccgccgagggcgcgcccgcccctccacgctcgggcactcgggccgggtcccgcgggcgccttgtgctcgctccctccaggaggggacggctctcgggcaggggtcgccggcccctccacgcggcctgcgttcgtccagactcagagcctcgggacgtgcgggggcccgggggcctcgcgggctcgcgcgtggggctggcggcgcggatgccctggggcgctgcagaccccgagaggccgcttgcccgcggggacgtcagccgcttttgctgttaaaatctgaaatgttcagcaagttagaaacttgaaacctaaggaagcgtgaccggccgctctggaagcccccgccgcgcggccggtcccggccccggccctcagcggcgctggcgtctgcgcgtcccggggctgcccccgcagcatgtggggctgggaccctcttcccgcgcgggccccgggcggacgctgcgggcggtgacggagccaggccggccgcctgggtaggggacgggggcgcgggaccacttgcttgcccgtggccgatgcctcatccgaacggaaaacgttttcttcaggggagacagaggctgtgggcgaaggtattttttaagcctgaggacccatttgggagttagattctggatcgagcctagggtcagttttccttgtgttaaataacactacttcacagaagggggaacgagaattcaggggagttggcacaaaacttggaacccttctcgggaggctttcctgcctggacggacgcctgggaggagggcccggagaaacgaggatgagcttctcctcattcgcccgagggtctgaccacagatttcccaatcgccacacacacacacacacacacacacacacacacacacacacgggttgtttgggagtcagttggttttcaaaggctttcaaggaaatgaagagtcccaaagttttccttaatcgttcagagtgtttttctttgtcccaggtttatataccaagaatacgggggaatatttttagttcctttcagctgaacagtgtacaactgccttttttccttttggaggtcccaacaccctgttaatccgctcctaggagaactaaacaaaaacaaggctggacgtcgtgtctcccgcctgtaatcccagtgctttgggaggctgaggcaggaggatcagttgagctcaggagtttgagaccggcttggttaacatagcaagacctcacctctataaaatacttttaaaatagccaggtgtggtggcacacgcctgtggggccggctacttgggagcctgaggtgggaggatggcgtgagcctgggaggttgaggctgcagtgagctgtcattgcaccactgcactccagcctgagcaagagaacaaggccctgtctcaaaaaagaacaaagataaaaggcggggtgggggagaaaccaggcccctgatcacactcaccattcagtccctcagcctgtgacttgaaatactgccccccgcatccaggaagcaggcttccccacccctcccaccctagccagagtcttccaaaaggtcttaggtatttgcaaacacctggctggctgtttggaaacattgcatcagcaccaaataaaaactgcagccaaaactgcctccgcagaacaggtccccaaactcaggtgcacttgacctttcaccctgacccagccctgagcttccaaaacccagaacagccctgtgccaaccatggccatcctgttttcccttccctgggcccgtgggcaaggagctcgctctgcagagaaaggcaggaagcacagaggaaaaggccaagcttggaacggctgtcccgtctccccactgggggaacccctggcaccctcataactaagtctgtgcttcaacctggtctctgttacccaatgtcttttgttgttgtttgtgtccttgaccccccgaggctgtatttcctctcagaagctttgatttcttttctgttttctggtcttccgtgcctttaacacgaggaaaaataaaacacatggtgtgagtgtaaggatggtacaagcaaatgattggagaagctcctcactgaacataatggaaggaatgctcccaaagtctgcaggaacggtactttattattatggtttgcatattattacagatttgtggaaaacggcaagtcagttttcctttccacatggactttcttcagcttgtcttatgattgccgtgtttctggagttcatcttgttttttaggccttaagactggaaaccccaacaggaaatgggtccatttattattcatagttgtaacgctggccactggcatgtcacaaaactctcaaaatcaattgataaacacagagaatggagcgtggggcagcatttttgcaaagggatgggtgcccagctggccccagtgccgccctctgtgaggaaggaatctcccagtgcagccaggagtcagacgagttcctcttcccgaccctaccctcccatcttcgacgcctaaggcccttccctgtcttcctggctttgcttcaggtggttttgtactttttaaattttgttttggtttgtttaggcttcagcctagcggctttaggtgccagaaaatcagattaaccactgcagcggcatccttctcagggacccgggggccacgttggtcattttgccccattgtatctggagagcttgacagacagacatgtgtgcactaggtcaggaagccacggccctggcctgggaagagggcaggtaggagaaaagcccccagccccctccaccctcagggaatggcccagttgtccacaggttaagtcaagaatcccccgcgaacaggtcaaaccagagactgcccagtcccagcgtccgcccccagggcattgcttccttcacctcctacacttggctccctgtggttccgtggctgccacagttgtgtggatcctaccgggcccagggcccctccccatctcagacagcacccactttcaggctaggccttccacgggctgcttaaatggaccacgaaggccggcaaagcagcagaaacgtgcctgttcacgggccagtcggccctccccgctccagccctctagggtttctggttccggtttctgtcgctgccgttagtgaggaattattcatgtggccaatgcgttttcttgacatttaagcagggctgtggccgatatcaaggctgaggacccaagaggcctttgggtgtctgtgtccctgagccatatgctgaggtcggacggcgggggaggggggtgcaggaaggggccagccccagcgagagtcagccaggccccaaacagagccaggggttcccccgggggggagtgctcacttaggaagagcaccatggacagcctggcaggaggtcaccctgtgctgagcaggcagcgctggagtaaaccacctgcctctctgtaggaagaaggaaaccgcatccgcaaacggagcaaaggtccccagaggcagagcagaagcctctgggatgctgcagctttgtgcagacactggggaccaggactggagcaggtgctggccgtgctctttatcctgggcactctgccagggccacacggagcgtggctcccgggagatggagacgtctgagtgtcagctcaggtctcggtgtttccaggtgacatgctggctgctagtgtagagcatggtaaaccatcttttttttttttggttactatttacttatgcaaaataatgtgagtttctgccatttgcaacaagtgtgccagctgcaatgagtcagcgggtggacacaggtgagcatggccagactgtgccagaacatggtgacagacagacatgcttcgaagttcactgtgggaagggacaggtccccagagagaggtgagacggtgcaacgcgagggtgagttcggagtcatcctccagatgtccacaaaggctcgagaggccctgctgtgtgtcaggcactgcgtgaaggttgtgggcacagtaggagggacacaagacaccttctctcgaggaccgttggttccagttgcggagacagtaacagcataagatgatgagtaagaaaagaatgctggcaggaaagtggccatggagggaactgcttccgggcctctccgtgggatttgccaggcgtggactgagcgaggaccttccctgagaacaccaactgctccaggagagagaagaggtggagccccggcggggggcatggggcaggaggcagccacccacaccttccctctctgaatgctgagcagaggctctcagcagaggggaagaagagcagaggccacgattgggaagacagacccagtgggggtccttggcgccgtccacatccatctgcaacctgctgcccagcgcctgcctgcccggggtgtgcacagagcagtgtggtctgtcccggcttcacggcctgacacggccaggcgaggatgacagggaaagggaggcagggacttggggctgttggagccaagctgaggagcaaggagctgcgatgggaagcgggtggcaggaaggagcgtgaggcctgtgggtggaaggtctctggccttggagattgaagcgtttcacttgtgcatctcacagcccagagaagcca

SEQ ID NO: 69487 - DNA, 4403 bp, Homo sapiens
agagaattccatgtatcatatataatttaaatacattattcttaatatctaatatctcatgtttaacatgtaacattcccatttatttaacatttctatttgtagacattattgtttctacacgttactataaacagtgttattgtgagcatctttcccaaaactcttaattcctatgtgaaatttttccctaggataaaggcttaaaaatggaattaccaagtgaaagaggataaagtgtcttaaagcctttgatatatgttgccaaactgctggggcacccctgaccttaaactgtgccaacatttaagaattttcattttaaaaatattttgctaagttcagaagtggaaaataatatctgtattagtttcctagggcagccataacaaagtataaaaaacaagcagttctaaacaacagaaatgtgtcctcccacagttctggagccagatgtctgaaatctgtgtgggcaaggccatgttccctcttcagcctcctggcgagattcctttcatgcctcttccagcttctggaggttctcagggacacctgtcagtcgttggcttacagatccctcatccagtctccgccaccatcttcagatgggccggcttttcctggggcctccctctcttcttataaggacaccaggcattctgtatttaggacccagcctactccagtatggtctcactctaactagttaatctgcaaccaccctatttccaaataaggccatgttcttaggtacaggaggtgaggacttaacatacctttcagtagggggacacagttcaatccgtaatagcatgcatttattgtaatgggcacttcttggatttccttatggaaagtgattcttctcttcatgttcattggccatttgtgtttgagtgtcagttcttattttctgctccattttctattagtgggtctcagtcaaggctccctttattgtgagaggcagaaatgcaactgaaactggttcaagctaaaaggagagttggtggttaacataactaaagggcccaggatactacaggcttcaggttgagctcgacccaggctcacacaatgtttatctgttctattcccttttttcagcagcatccctcagttctacttccctgccttggctttgttctcaggcaggctcattccagtttgtagcaaagatggtgctatgctttgaaagtgccccccaaagttcatgtgtcagaagcttgatccccatcatggcaatggtgggaggtggggcctaatgggaggtgcttgggtcataggggtacgaccctcacaagtggattaataccattatctcaagagtgcgttccttataaaaggacaagtttggccccatcttgcgcgctctctctctctctctccccctctctttgtgtgtgtgtgtgtgtgtgtgtgtgtgtgtgtgtgtgtgtgtgtgctctcactttctcactcttgcccttctgccttccaccttgggatgccgcagcaagaaggccctaactagatgccagtgccatgctcttggacttcccagcctccccaggacatctctgttcattatagattacccagacttgatattttgttatagctgcacaaagcagactaagacaggtagctaacatcctactagttcaccgtctacagagaaagcatatcttttccctgatagtcccagccacggtcccaggcaagcccttcattggccaggtttatgtcatgtttaatctctggaggtgaagaatttaggtcagcacacccaaatcacctggactaagggcaggagggggtggtttactgggggctattacaaaggaaggagccacagattcctttgcacgggcaaaatcaaaagatgggcccctagtaaggaaatgcttatttattctgagaactctttttatattaaaggcatgaatcctttacctctttcttccatggttttttcttagttatttgtctctgtgggttttttttacaggaggccaaacgctgccttgtgagtgtggcattcctggggcacatttgccatatagcatcactgcataataacgtccaacaggagcatattgccaagacacattctctgggcgtgaacaaaaaaacaaacctgtggctagtacttcagtcagtgaattggcattcgaaagcgtgtcgtcattagtacagacgtcagcggtgaatgagaaagcaaagaacccgtggctgcacctaataaaaggccggcagggagataaaagctaccgtggttgtgcaatgatgggacaaaatgcccagggtcactggtccaggtgcaggttttgagtcctcactcaaaaatgagataaggaatgtgactttgaactcattagccttttgatcaggctatgaactaaaggcaaatagaacaggtggcctgacccctgccagagactggcactgcctgcgaggtaggagctcccaggtgggcagggaccagaggtcagtgacttggtgcaccctccactcatggggccgggccggcagttctccctccttcctcttctcctccccctccacgggggagattctaaaacccccaggaggatgtccctggtaacactgcttctcccttttcacgtcaggccccaagccctgtttagatcccagggtaacagcactgagcagtggaagagcccttgctacgtggccacccagccgtgggcccagggaggacgcgttcctttttgcacagctggccggagaagctgctgtgcgtcagggccaggcctgtggctgggagagcaacaaagtgtagggagggtcacggggcaactgtggcccacgttactgcccagacggtgccccctgtcctggaaggaggcgtcccctcacaacccctgcccaggaaggaggtgtcggggctgacagcagcacctgggaggtgacttggagggtctggggttggggggttgacaagggcgtgaacagttgggagatgggtgaattagaaaggggcaaccaaacaagtcaagcatcttcccaaatgtttcaaggtttaagagggcgttgtaacacacaatggtgtgtgagtgtgtgtgtgtgcacatccctctatgtgcatacatctctgtgcacacgtgtgcatctgtgtgtgatgtacacgctcacacatgtgctagcagaggaagcacagggagaggctcacaggcctgagtgacgtcagagacaggtatggcccacagggcggtctggcagaagctggcctggtacttgcctggctccccggcctcaccccctaacccagggtgcaggttccagccgccctctctccagggcagggcgggacaccctgagtgctcagtgggcttcttggccctcagtccccagaaggtgagggtccccatcctcctgggtgccccctaccccagctcctgagccacatggtcatggactggggaagcagagtccagactctaaggaggggtttctttgtcatcttccaactcaggacccttgggccaatcggagcagctcagcctcagtttctctcttcttcatctcctgtgtacttgaggggcctcccgagggctgctcccttcccagatgaggctgaagtaaaccctgtcatacaggtgggtgggtccctggaggggacaggccatgctaaagccaccaagcccccaaaagtgcgaaaggatgaacaggagggcggcggggcagagctgggtgccttggagtggggtgggggctggattcgggggtgggaagagcagagcaccttccctgcacggggagggtgccccttcctctgcacagacccgcctgccccctccactccgcgtggcccaggggagccaggcctggaaggatgtcgtgggcgacgctagcttggagtgactccttttatggggaaactttggaacttcatctgagaaagccttgtgctaacccagggccccgcctctggccagggcaagacaaggaagccatccacagtcttcaagactgttgctcccgggacggtgccatttcctgtgggagcttcaacactcagaactcaccctggcatgcaggaggctcacatgacgcccttgtcaaagaagctgatgggtgatttagtgaacaaatgattcacgagcaaagaaccaaaatctctccgtgtgtgcctgcatctgtgcttgcgtgtgtgcgtgtttgtgtatgcttgtgtgcactacacgcaagtgtgtgtatctgtgtatatgttttcttgtgcacgcctatggatttggttatgtgcagatatttgctttgtgcacgtgggcatgcgtaggtgtgtgcatgtgggtttgccgtatgcatgtgtgtttgtgttgtcaggtgaatgcaggcatgtactcgtgtgtatgagttactgtgtgcatgtgtgtgattttgtgagtgcttgtgtttgt

SEQ ID NO: 69488 - DNA, 2689 bp, Homo sapiens
gggagatgctcggcctcgcaccgagaaagggggggcgctggggccaagtgcccactgcccggagagcagggctgggtcctcaagggccccctgcttttggatgttgtgcagccactgaagctgaagcccagtcgccccggctccacggtccagactcccagcaggtggccacccctgaccacctactctgaaatccaggcacatcctggcaccacccggccaagagcccacatggccccggggcattcatctcactgggcaggggcagcctccgacctcatcccagctcagtaggtgctcgcggtgccctcctaaacgccagccatgagcttgagcgaacgccagtgtgtcgtgaggctgagcacagcctggcccctccactccggctcctggtggctgtctgctgtgtcccctatcggggaagaggtttctctttggcccaagcccacctgcccctgcctgagggagccctcagccactacgctcagcccgtcagaaacctgagagctcatgtccacgacagggccagccagtggggagaggacccggggctcccttggaggcagggcactgctcgttcccgcggccgctcggccccgcccgctccctccaccccgatttcccacagggcttgcaggcatcgccccaaacagactctgtcacccaagccatgtgcctgggcctgcctttgggtgtggatggggggtgcctggcggggggtgcctggcggggagtgctctgagtgcaggagcggacacccaggctgcccgaggagggcagggcgtgaggactgggacagccgcacccctgctgcttggcacgacccagtgaaggaatgacgtccgcaagggccacgtgagcttggggcgggcggtgccggtggagggagaggcagaggctgtcagcctctccccacccctgcctcacgtggccacgcccgacgtcaccgtgtctttctttgtgagagctgagtccaccgaccccaccttgtttagattaggttggaagtcacctgggctgagctgatggctgattccgtcagcaaaaagaactgtggaacatactggcacttgggccggtgtgaagccacccccctgccatgaaaaatggctcttccctgccacagccggcccagcgggagccaggtcagggcctggagacacagcgccccccaccggagccactgcccggcccagcagcacctgcggagaatcccaccagctcccacgcctcccgccgcgccaccgccccggctttctgcaaatccaccttatggaagccggataaggtgaagtccacatataactaaaagcgagttactgagggttactttctttgcagagtggttcccctaaaggattcctttaaacatgatccggtcagccagtgctcacttacgttcaccaagtcacgtcggtttgtggcggcaggagcccagcgtgccaggcacctgcgggaggggaagatgctgggtggggccctgctttcgacactttgcatcttaagcaggtgagcagacaggcacacatttgctcactcagttccttggggtagctctgatgggcagggaaaacacaccaagggccaatcgtgtggcaccgactcgccgtctctctattgtattttatagaaacggtctcacattcgcccaggctggagtgcagtggtgcaagcatagctcattgtagccttgaactcctgggttcaagccatcctcccaccttagcctcccaaagcgctgggattacaggcatgagccaacacacctggccggcaccaactctcagccacgctgtcgcagacagcggggcccctgcttgctgctggatgtcacctcccagccctgagaggctggggatgggagccggcagcactcctttgcacagagcaccgcaggaagcactggaatccggaaagagagagggtgccgtgagcagacttcccggcaggcgtcaacctcctgtgtggtcaggagtgcaggcgctggggccggaaccctgggcactcgaccacaaccgcctgggcaacgtggccaagtgggcgcgtgtcctggggctcttgcaacaagccaggtggcctcaacaacagatactgattcccttacagctctggggaccagaagccccaaattaagctgtgggcagggctgcactccctccagaggcgctagagggggatcttccttgtctctggcagcttctggtggcccaggcgttccttggcttgtggctgcctccctccagtccctgcctggccctcccacggcctcggcccctctccatgtggctctccctgggttttctcttctcttcatgaaggcgcttgtccttcacaccaggcgctgtggtccagcctgacagcccaggacgatcacgctgccaggtcttgacctgattatatctgcaaagacccttttttcaaataaggtcatctttacaggttctgggacacagacagatctttctgtggggacaccattcaacaaagaggggaagccacagccagacccccctccgctcaaaggcttgctgtttcctatgttgcccgccacactccgtgtctatagagctgggacagtggcagtgcccacctcagaggtcaccgtgcagattaaattcatccctagacacgaagtgctgggtgcaggcacagagaactggaaggaaaggtttcctgtgaccgtgtgctc

SEQ ID NO: 69489 - DNA, 5292 bp, Homo sapiens
tcttaaacaggaaatattcaaacgccctttctctaactgaagtaggttttcagattacttttacgtttataagatattgtggctactgacggtttattttttgcaattataaccggcccactttcccggggtctccctacacgtgcggggcgggggagagactccagagggggctgcgggaaacacaggggagggaggcctggggctggagacggcggccgctcctcatgcgtcaggggcctctttcgggccgccattgccttagcagcgccaagttctttctggggcaatcgccgctgttggtttcatctcccagcactgcccattggccgcagcacctcctgcccccacggtgcactcccttctgcggtcatttccttccctggggtggaagcaagtgtagagccagctcttagagagaggcaggccagccatctgcagagtgggaaccctcctgggcccccttgccctccccacgtccgaacctgtcccgtcccccatgggcccgcgcccccgccagcaacggcatcccacactgtgcgcctggccgtctcacacaccccacactctgggctgaccttcaaagggaagctgctgtttaaatatttaatcgtccttggagtgcctggacttaatcattaagaccctgaatcaaaagaggaaaaaaagcattttaaagatgactgaaggccgggtgcagtggctcacgcctgtaatcccagaactttgggaggtcaaggtgggcagatcacaaggtcaggagttcgagaccagcctggccaacatggtgaaaccccgtctctactaaaaatattaaaattagcctggcatggttgtggatgcctgtaatcccagctacttgggagggtgaggcaggagaatcacttgaaccccggaggcagaggttacagtgagccgagatcacaccactgaactccagcccggccaacagagcaagactctgtctcaaaaaaaaaaaaagcaaaaaaaacaaaaactaaaaaactaaaaaaaaaagatggctgaagcctgtgaaaacactgggttagtgatgcttgtattctcagccctgcagggctgcggcacctccacctccggcttggcctcacactgctcccggggtgttccctttgctctggaggcagggctgtgcaccagccaggcctgagaccctgtctgccctccaggacctgctgaccctgctagatcttcggtcctgccttgcccagcggccgactgaacagagcccctgtgggccctgcatggccaccagggggctactccacggtggggtcagggggcgagcgtccccctccccgtctcggggagggacgcagctcctggcctgcatgcgcccaccatggacggggaaggaaggggcgcccccttcagtgtgtgaacccccagcaatcccctctgcggggaccgcatgttttctatacagaaagaacttagctcaccagggacattttgctgaaacagcttgtaaaggatggcgcctggctggtgcctctgcctgctatggggtgcgggaggcaatgtgggaagctccgtactctctgatcgatgtatcggtaaaatgaaaactgctctaaaaagtagtcttttaacttaaaagaaaaaaggagaataattaggccaagggcttggccattttctgaacaagtctagttttgtgggtttccagctgcctctctgagtctccttctgggcccctgcagacacagccccctcctggggtaggggcgacctgccctgagcagtctgtgccccgggctcccagagctgccagtgtgtccaggctctccccagctatccgactcctggggagcctgccaggccggcagtgggtgggtatttgcttgcatttgctttgacaaatcgccactctgtgtggaggtgccaggagcgtgatttactgggtgtgtgatgactacggctcccgtagccaggcctgcccatcaagcagtgcttttggctttcagtgaggggtggactttgccgcgggggattgccggctagctgatcaggaccccaagtcctaagaggcaccgtgtccactccacctgcccacgggagctccgtgcccagcggtgggcccagagggacgacgacctcctgtagagggggcccccaccagtcctagcagccaaaggtgctcgaagagtgaaaggacatgccacactgtcctcctaacagcagtgaccagggcaggagagctgctatttctggcctacggcccatttttcagagtcaattcattttctaggcagacacacacattcctacaactcttttctccagatcattccttcagccagctggttctccaccgggattccaggaaagaatgaggccttgcaaaatgctctgaatggctgttcccaccaaaggtggtgggagccaagccctttccaggtacagagggaaagaaggtggtttcgtggggtcttggcgtcagctccactccctcccagatcactagtgcgaagggacatgccaggcctctcctctaggacaaaaactagtgtttctcttggattcactgaaacaagctgggctgccccttcttacagatggggcttggggcccgtggaggggaagggcctgcgaggtcctgttggtgataaccaggccagccgagagcccgggaaagggcctgtcctcagtctgtgccttggtgtcctcccacccagccacaaagggactcactcaaggtcacagggctgcagcgggctgcgttcaacccagtggcccccacacactccttcaaggaccagcatcccatgcccagcttctgccacttcctctctgggcctgtgcccagcagcaggacaacccttgccacaggcagagcagccccgcactctagtccattgaaaagcctggtgagatgccaggccaggccatgagcgcggagcctggtggcgcgtgtcaggaggcggcggtggcaaccttgacggtggtggtcctgactcaggagtctgactcacaaggactccagaggaagcaactgacaaaacgtgtctcccgacgggagggtggcccagctgtgagggcgtctccaccacctcaccatcatcgtcagagccacaggatttgggggacagaggaacatggtagacgacactacagagacagccagcagaacccagagtgtcggaaattctacaggacaaacaaaggaccaggtttcttcaacagataaacgatgagtgatgtgtgtgtgttgggggggggtgggggggacggaagctctgggcattccggagggacttcagagtcacagagagccttggacttcgtactcaaacaaaccaactctgaaaagacaggagacaaccagggaaatttcaacactgctagcagattatcacaaagaattcaagggtcgtgttttaggtgtgataacggtagcacagttattttttttggaagagtccctattctgtacagccacgcactgaggtatttctctgatgaaataaggtcagggattgctttaaaagactccagggagaggaggggtaaggggcagtggatcgggggagggaagaaggcttataggtcagatggggctgccatgatactgctccctctcaagttcttgatgtttagaaaaaatgtatgataaaaagttaaaggtatatggccaaaaattaacaataatcacaaaaacaagcctgtccttacagtgaggccaaactctttcctgtcttctaactctagcccaggggtcaaaaacaaagggaggaccacaggccccagggaggcgcaggaggaaaatattaatactgtcctttcaaaatctcatcttttaaaagtatttaaaatgcccatattctataatctatgtaatattttactattagctagtccatttgacaagtgttaaaaaatcaatgtatcaggctaggcgtaatggctcacacctataatcccagcactttgggaggctgaggcgggcggatcacctgaggtcaggagtttgagaccagcctggtcaacatggtgaaacccccgtctttactaaaaatacaccaattagctgggcaaggtggtgtgtgcctgtaactccagctactcaggagggaggcaggagaatcacttgaacccaggaggcagaggttgcagtgagccaagatcgcgccactgcactccagcctgcgtgacagagtgagactccgcctcaaaaaaaaaaaaaaaaaaaatcaatgtgtgtacatgtatcgggagtgtgcactcaaacttttgattgttaaaggagggttttcacaaaagctgggagaccacccttctagaaccctgcccttgtaggtccaaggctacgcgccctggcagacttccatgagctgcgactaccagccaccaagacggtgtgcccagccaaccctggtccccagctagctctgacccctgccctgccagcatcaccctgagattcttctgcaaattacagtcttctcagactgtctgtcgaccctggggtctcaatgctgggttctcaacaggcagaaccacagggctgcattgcgggttgtctttgaaaaatgacctgccaatagaaagttggggacgaaagccctccaacagtctgtccaagcgacccccaagagaaaccacagtggggtgctggagggtccccaacgaggcacccccccccctccgaccaccctgctgttacttccacccacatcgaagtcctagggtctcttctaatttcctacttggccgtgcctgaaatgccacttccaaaacccgcattcctatggttgcagaggccacaagggagggccctcgtggtattttttcaggacccaaaaccacgaagatgccaagaatcacaactttcacacaaaggacacactttctttgatggaatcttcagatcacacatcacaaaggcagcacgccatcagtctttgaaatgtcccaaaacacgtaaagaatgttccgctgcagatccggcttgtttcacgggtgtgtggcctcctcttccgaagtcatttcattcttcggggtctttgacacgctctggcaacaagcgcggagaggtgaacggggcagcgtttgtgctgagagtgggctgagagcgccgccctgcccactccggcctggggcatcccatctctgccaggttctgggctttgcattttcttttcatttcattcttcccaggcaagagcacaaggaaacaagcagaaggaattcagagaaacagctccaggctccagctcaaaggccgacaccaaaagcgaacacctctgggcgctcttgccttcaagaaggtgg

SEQ ID NO: 69490 - DNA, 3991 bp, Homo sapiens
actcgaagtcacaaagcaggatctgcagaaactgtgaaaggctaggtttagtatattgtaatctctaagcaatcacttagaaaagatatacagtaaaataaaactgaaaagagatttagccaaaaaagacaacagatacattaaaatggaaaatggtaaaatattaaaataagaaaagggagcagaagggacaatcaaaaccaaccgtaaggccagacctcaatgttacagttcacaacaatagcacatatgcatcataaccatcccaggacagaccacagtcgcgtatcaagagcggcaggacataagccaccaggagcaggaggaaggcagagaagccatggtgaagacatgaagagacagccaccttcacccctaaccctgtacctgtggggtcaagcatgacatctgagcctctgtccctggactagggtaaacaaggggatctctgggcccaggaaggctgggggcaggggctgtgaggagctgaggggcctgcaggccacgctgccctggcaccccatctggcacctctaggtgggttccctctcactcccggtcagggagcagcatctgacaaaacactctgctgcaggcctcggtctccccctctgctgaacgtcaggcgggtgctgtctggggcctccagatgctccaaggggaagacacggcgctggaaggctctgggcggtggagggctgtacaggaggggccatgggcctcctggaactcccctgggaatgctagaagggggcagagacagctcagatgaagccctgagagattccaatggcatcccaggcccctctcccatctctctccctcccccatcatcactgcctctgaggccagggtaccccaggctctccaaccccacatatggaggcgggcaggctcagcttctgtccagcaccagagcagttggagaatgaagtggaacccaaacgtggctccgtcccccagggagacaaacctgcagacaccctcctgagactgggacagggggacggggaagcctggcccagacagaagcacgaattggtggcgtgggcctggtgttgagaacagggtccaacatcacaaccccgctcgggaggccagcgtccggggcctctgccagctctgtcccagacggaatttgttctcactctggacacccccaggggacccctgtgctcacaggcagatccagggggcaggaggggggccttcccatgccaagtgcagttggatgatgaacgacacccccaaaagatttgtccaggtcctaacccgaggaactggagaatgggacctgatttagaaaaggggtctttgcagatagatgggattaagttaaggattttgagatgaaagcctcctggatgagggtggacttgagatccaaggacacgttctgagaagggggaaaggtgcagagacacagtcacgtgagacggaggcagagaactggagcgatgcggacacaagccaaggactgcctgggccaccggaagctaggagcggcaggaagggttttctcctggagccttcagcaggaggtggccctgccgacaccttgattttgaagtctggccccaggactcagagagtccacttctgctgcatgaggccccccgcatgcagtatcctgtcatggcagcccctgcctcatgcggcctggatctcatgaggggtccactcccctcgtctccccggtggggcgcggcatcttcatgctgccctctaaggacaagcgcatgagaggccagcctcccccaccagcaggacagaatgcacgaggcctttaccaggccacactggcgcctggcgtggctaggacagcagtgctgctgccccgctgtggggccgaaagaagccagggatgagggtgcgggcgcatctgtgggtcccggaggctccagacccccaggccaactgcacagcctgcaggcagcactgcctggccagccctgtcatccctctgtccgtacatctaaccactttctctctggggccgccccgcccagagtccctttcctgccggaggctggggctttcctggcagctactcaccactctcccggtgtttgttcatcgaggtttcccgctgctgacggttgttttgacttgctcagagttgtcatgcacctttgccctggctatgtaaggagaaggagcctttatgcaatccaggaagcccgcgtcaggcccaggaggtgcgccagctctctaggatgctggccaaggtcccccgcacttggccggatccaggcagggagtgacggacctgctggcatcctcctgaccccggtttccagctctcccctccccctgtcgacaacccagggtcagaggacaggcagccacctggccaaggggcaggcccccttgtgccctggatggtgatggcctctggggccagaaagaacaaggtggtgaggggaccatggaagacggcctggactttagtgagggtggatggcttgctgggcgggttcctcaggggcagaggctgggacaggattcagggttacatggcatgtgacccctggccaccccaggagaagagagggaaggagcaggggtcaggacaaaggggcaggtgccccctgggggactcagggggcaggcacccatggggtactggggaggctgcagagacacctgcagagttgcccccgccggcaggagacacttggctacttatcccccacctgccgtcagtcgctgtcaaggggctcccagggaccctgactgcccagcatgtctggcctggctggagggagtccccaggtagcgctgagccattgtacaggctggagggacgaggctgttactggcgcccaggcttggggccatgctgcagcagcctgggagaggcagagagagagagacaccgggccttccccatggcagagccggccactagctgagcctggctgagaggcggtaagggggctgggcctggccctggagcgagctctacgagggggtctggggctcacagacaggccagcaccatgcctccaagagtcagagaagtgaggcatcagacaggctgtggcccagtcccacagaagaggtgccgtcttgagcctccagtgtgctctgcacggcctggaggcccggacacgttttgggtggagggtgggggtctcagcctgggccaggctccccatctcacccctaagagtggcatcggcccagggtccggccaggccctactgatgtgttctcaggggccaggacatcagtgcaacagggcagccgcttgcgacaggacccggccgactgtccccgtccccagagcacttttggctgcatctgggagccgcatcccctgtttgttctctggaaccaggaagccagggctttccacttcctggctgctgcagaggccatgctctttttactctccaaataggaaagctcctgcaagcctcctgccaagtgagtgtggagagctgatctcagtgtggctgaggttaatggacaggaagtgccattacctaaatgggccaataagctgatgagaagcccgagaagaaagcctttccaggccttgacccagagagccggcaggaaagcggcaggcgtcgcggccccagcagggaagaccagctcctgagctcgagccccagctccatctgcagcctggcctcaccgcagtgccctcggacctctgctcacccttctctggcctcctctggcctcctcagggctcctgcacacacacctgtgggtctacaaggggcaaaaaagatcccggaacatcggagcaagagccccccacccgaccccgtgtgcaagcccccatttacgtgttgcactcccaggggcccctgaagccctccctctcggcctcaaaattcccattgcagacatggtccagcaaggccagctgtctggctttccggccgacgatcaaaacagcaagtcggaatgatgatgggctgatggacgcgggccaccgacaaccaggtgaccactgagagcaaggaagaagcca

SEQ ID NO: 69491 - DNA, 7626 bp, Homo sapiens
ctccccaaggctgcgagccagggcttccctgtgccccccactgttgccccttctatgcccctagcccttctgatgagtcagctggtgccaggtaggaggggggataatttacaaccaacatttgcattttaacaggaacgtccttgagacaatttcctaaagcaaaagagcgactgtggtgttatcagtagccaccatgtaggcgtcagctccttagtccaactgccagcccctgagccactgttttcccctttcgtggaagaggaaactgaggctgaaggttgagcagcatgccaagattccacgagagggcagccggagcccagccaccctcctccagtggctgccacaccctgggggacctcaccaatccctgccactacccctacccactgcagcctagcccttgggtggcaagagagggcagggtcagcagcatagctggataaaccgaccatcagcagagaccctgggacccctcagccatcgcctgagggaggctcctccggatgggaccagctggcctagtggctctggccagggctgcagggaacaggatgctccctctcagaagccgactcagctctgccacgcggctcagctctgccatgtgactcagctctgctacgtggctcagctctgccacagggcacaggatggaatgccccaagatgccgcaatgctcctcctggtcctccagttacgcggcctccccttggatgtttctaacagtatacgtgtgcttgtttctggggctcccccgagtgggagcctgggaaggaccagccgtccacagggccctcggtctctgccccagccggtggtaaagtgtggctgcggctgtgctaccacctccaggtgaggggccagccacaggtggtcttttgtgtgatgggctgtctagggaggccctgctgcccatgggtgccatcgatttgcagtgcaggggcccatatgaccctggaggaaggacgtcctgtgagccttgagcctgtgcagcagcccagatcagaaccacacactggaaacccccttcagctaaggtggtctctcccccaacacaatccccctgaccaagacttcctgacgtcctgagggtgcgtctgccttccaaggcgaacatctcacaccaactctgcagccagcaagtttgcgttagaagctggaagcctgctgttgggggagcagaccaggactcctcacaccccaagagtggctgctagacactccctagcatgccccgtgcctgtctgaccccatgaagcctgaccctgatcgccgagtgtggctgactttctgagcccctaaggaaaaactccagagtgacccttaaactttgtaaagggcaaagaggcctgtgggcggagacgggggaggggtttctgctgggtcctgcctgaacaggtctgaggccaaaggatccctagggccgtcctgggtcagagtgagggggggcacacaagccctcaggacccaccaggcgagtccagggaaggcccatgaaggtggccaccgtgagccttgtggtccacagggccaggctggcacatgctgtgttctcacccagaaaggccgttccagctccttctggactcctcctcctcctccccagtgttctctgtctctctgcccaccccgctctctgtctccctcacacacagagtatagaattgtggggagatgactctgtatttcctcatcgtgcatttatcacagtgactcatccatctgtggctgctgggtgactggcagggtttgcgttgagcttccgagtgaggttgattcggaagaggaaggcatgactgcctggctattagcagaatgtccggcgtgggcagtgccacccagctgtcgacactgacacccaggcaaccctgacaggtggccacagggggatgtgtgtgtacgcagagtttctcaggactcaaccttcttaaaaaggaggtttgcagtgaagagcacaggggtacccatcgggagaggacggaaatgcttccatcaacccactgggtttggggaacaaagcagaagtgtgttagggcaggtgtcagaccacctgcgaaccctgggctgctggaggcctggcctcttgcacgagcctctatccactcagattcacggcaggatctgcccccgacaaaggacttcacctggaccgagctcctgggccccaagcagctgacatttgattctcgcaacaactgtgcagtaagtgtggttacagcccccactccgtgcccagaaagttccaccatctgaccaggcaggcgcagagacccatggcggggcagggcagaaccccccgcccgtgaacatctcccgccccagcttccctttgcggggcgccgcagcactcctgggttctccccctccgcggggcgccacagcactcctgggttctccctccaaaggggaagaatgatggagacggcgagaatctgcatgtgcccgtggctggcaactgcttgtgagaaggagaccaaagtcatcggctcatatcaggacttccacctggcctctcccggaggccacctcgcttggacaaactcaagtttccaactgaactaggagaagagcagatgcttgcttgaaagagggatctgtcccaggcagactggcccacatttcagtggcagggcagcagcccttcctgagattctctctgaaatgattttttgactaggatgtggagaagacacacagaaagagaggtctttccgaagcagtgaaattttacaacaattcaaagctgctaccacttgctttggctgggatccagctactgaaatccagagacatctatgaaaacacccctaatgtgaacctgctgcccgaactccagctcactcccttgtcctgtggagcacggactcccaggagtggtgctctatagccccagagagcacccaggccagccagctgatttcacccatctctctctcaaacacacgtgcacacacacacacacacacacacacgcacacagcactcccctgccacacactatcactcacacatgctgacacacaaaggcatccaaattggaaaagaagtaaaatcctctgtttgtacaccgaaaactaaagattacacacacacacacatctgctaaaactaataaatgaattcagcaaagttgcagcatacaaactcaacctgcaaaaatcaagctcatttctatacgctaacaaatggcaacccaagaacaaatgaagaaagcaagtccatttgtagcatcaaagtgaatgacacacttagaaattaaacaaggaggtgaacgatttctacaataaaaactacaaaatgttgctgaaagacattaaaaaagacattaaaagacatcccatgttcatgaattggaaaacctaatattgagatgttaatactactcaaagcaatctatagattcaacgcaataactacctacctaaatccaacagcactttttaaagaaattttaaaatccattctacaattcatatggaattgcaagggactctgaatagtcaagacaatctttttttatttaaaaaacttttttccatctttttttagagacagggccttgctctgtcacccagtctgaagtgtaatggcatgatcatagctcgctgtagcctcgaccttctgggctcaattgatcctcctgcctcagcttcctgagtagtgcgatctcagctcactgcaacctccgcctcccaggctcaagcaattctcctacctgagcctcccaagtagctgggactacaggtgcacaccaccacatccagctagacggggtttcaccatgttggtcaggatggtcttgatctcttgacctcgtgatctgcccacctctgcctcccaaagtgctgggattacaggtgtgagccactgtgactggccaatttttttaaaattgtttattgtagaaacaaggtctctatgttgcccaagctgctctcaaactcctggcctcaagcaatgttcccacctcagcctcccaaagccctgggatgacaggagtgagccaccacgcccggcaatcaaggcaatctggaaagaataaagttggaagactcacactttcatatttcaaaacttactacaaagctacagtaatcaatggagtgtgatacaggcatgaagacagacatatggaccagtggaatacaacagtccagaaataaaccctggcatgtatggccagatgatttttgatgagagtatgaacaccatttaatggggaaaggacagtccttccatcaaatagtgctgggaaaattggaaatccagttaaattttttaaaaaagtgaagttggatctttaccttacaccgtatacaaaaattaactcagccaggcatggtggctcacacttgtaatcctaacactttgggaggctgaggtgggaggatcacttgaggccaggaatttgagaccagcttgggcaacatagtaagaccccatctctgtctgtagtcctaggtactcacctgaacacatgtggtccatccacaaaatgggatattactccgtttttaaaagtagggaaattctgacacatgctacaacatggatgagccttaaggtttaagatggtaacatttttttttttttgagatggagtcttgttctgccgcccaggcttgagtgcagtggcacgatctcagttcactgcaacctccacctcctaggttcaagcgattctcctgcctcagccccctaagtagccaggactacatgtagccatcaacacgcccaattaattttttgtatatttagtagagatggggtttcatcatcttgcccagtctggtgtcaaactcttgacctcaagtcatccgcccgccttggcctcccaaagtgctgggaatacaggcatgagccaccgcacccagccacaatggtaaaatttgtattgtgtattttacagtaataaatatgccaaaggctaaaaaaaataaaggtacagtggccagaggaagaagggcccaacctggaattggagcagagctgtgggtgggtgaagaccccgtggtaggcaatgcattttagctgatggggtgcagtagtgtgtgccgggcaaagcggacagttccagctcccacatccaggctgcagggccttcatccacccagctgggaatgcctgctcactctgcaggaatgtgcagctgctactcaccccgtcttgtgaccaccagcaaatggtttgttggtgttaagctgtggcctcagccacctcaacagggccctgtctggccatggagacgttccccaagttccagtcattgtcagctgctgggacactgcggtactgaatcagcccgttggagtcatccaagtgtgaaaaggtacctgaatgagggcagcctggggacaggagagctttctggaacatggggcaggaaggtagcctggacttctgagacacagccactggccctggccctggccctggcccagtgcccgggagcagcctagcctcctcctcccaacacccctgctcccaggcgccaggacaaggggccagaggagacccagatggcccagatccaatccttccatggtcccctgggtggggccagtgcagggacctcccggaagccactgctgtctccatcgccacccagactcaggccagtctgagaacccaggattaggaagtcatctctgagatgatcgggttaacactttcacgtggtgggttaacatctgctgttataaacttcaccgtaaacacacactgtgccttaagacgttagctaatgagaatacaacaaacacataattttaaatgtacacacacacacacaaatagctgggtgtgcaaacattttttacactttacacaaaagaactcggtggcttctaggctggaagacgaggccctctgagtcctgttgggagcgtggggtgtgatcctgggacagaagccttcagctgaaggggtgggcaggatggaggcccttccaccaacagaaccctgaaagggacttgggacaaatggccagcctgcccgcagagggcctggaagggcaggccgggagcagaggaggctgctgtctaaatatgaggcgctattcctggcggccacatgttcacattgcccacagagcccagagggcagctccggacacagccaggcctgggggaggggcgagcctggtattatgggagagggtggtcagaatgccaccagccaggactgatgcagggtgaggacaggggaccaggcctcctcccacctgtgactctccctgtcctgcccacccacccacggaaccacaggaatgtgctagggattgcaggggatgttgtgcccactctgctaccttccatccctgtgcactgccctaccagccccctccccgcacctgctgcaggggccccgggggtgccagggcctgcccaggtcccagatccagactttcaaggtgtgcaaatcacaggatttgtcctaacaagagggagggaagcttccaatgtcatctccctgcatttctgagccaccgaggacttcagaatcacttaaaggtagtgcaattcacccccaaatcacttacttttccaaaaattggggccagctagggggtgtctgggatgcagcggaaatcacctatggggaagtcagtgctgtaacaacaatgctggcttgatcccttcctgccccccacctgctcacacaccacacactcataccacacacttataccacactcacagcacacaccacacttataccacacacgctcacaccacacatgcacactcacaccaaactcatcacagccacatcacacaccatacatgcatacacgccacactacatgcacacatatcacacacagcacacatgtataccacacgtgatcacacttataccacgctcaccccacacactccacgcaccatacatgcacacacatcacacatataccacacacacacccacacaccacattcacaccctacacagcccacacacacgctgacaccacacacaccccaaacacaccatacatgcgcagacaccacacaacatacatgcacacaccacacactgcattcacactacacacatataccacacacataccctcacaccacacacgcgcacacacactctacataccacacatgcaccccccacccctcacacacacatgcataccacctcccaccaccctacacacataacaggttattcattctgggtgacgggaatatgggggttgctcttattcactgtactttttgactttccatacttctccaaatagaaataaaagaggagggcggaagaggaggagcaaattgggagtaaaagagcaggtgctgggagcttcccgtggctcaggggtggcttctggaacgggagagagcaggtgacagcgatgaggtaggtctgcagaggagccgtgtgcaggagcagagatggaagggccagcgcgcaggcagccttcggactcggctgcccagctgggagggctgtgtctgcactgacacgggtgtcaacagcaggggcgacctagagcgagtctgtaagaaggaaggccgcgacgcctgcagggacccaggccctcccagccttagcacagcagcgctcctggccaaaaacccaagtgcctgctgctcactgtct

SEQ ID NO: 69492 - DNA, 4214 bp, Homo sapiens
ttcaattgcctgccattctgaatggcgtaatgaaatcccctgccgtcctgctctgtcccaccagggacgtgtagcatcctttatccagcatctccacagtgtctatttgacctgcctgctagtcactctgtagctgtcttttttttttttttttttttttttgagacggagtcttgctctgtacccaggctggagcacagtggcacgatctcggctcactgcaacctctgcctcccaggttcaagtgattctcctgcctcagcctccagagcagctgggattacaggcgcacgccaccacacctagataattttagtatttttagtagagatggggtttcactatgttggccaggctggtctcaaactcctgacctcaagtaatctgcctgcctcagcctcctaaagtgctgggattacgggattatgggtgtgagccaccgcgcccagctgtagctgtcctgatgatcagaacaagtgttgtggtatcacagcacctgtgttcaagtaaccctcatcctagttaataacagccccaaatcagaagagcagtgatgctggcttattgttctaattgttctactattagctattgttgttagtctcttactgtgcctaatttataaattaaactttaccacacatacgcatgcagaggacaaaacatggtctatctagggttctgtctagggttcaatgctatctgcggattcaggcatccaccggggatcttggaatgcatcccctgaggataagggagggcactgcacctgggcactgtggctccaactgctgttcgtctgtcatgtagtgactgacagggctgacctcatcttaacctgcttacgtcggtaaagaccctctttctaaacaaggtcacatttacaggcactgcgggttaggaattcagtatcaaggggatacagttcgatccataagtaagtaaattcccaagtaaatatgtaacctcagattgagaagtgctctggagaaaataggggaattcaccaaggcaacctaattatgttccaaaatattcagaacacattgctattggaagaccgttctctatccttccacctggactgggctctgtccctctatcctcaaacatcccctgaggactcagcgtttcattccttgctgcccacgtacagccctggggctctttgctctgcttctggggtctcacgcggaactctgaggaacatggacggccgtcacaggaacctcagtgagccccgagcaggctggacagcaagggcaggggactgaggctcaacaaccagcccctcccccaacaggccatggcagctcagcagacactcccatgctgcctcccaaggccaaaagaggacgtgtttgcaaagggtgttgtccttccccttgcctgcagtgattcagccagctgaacgagaactcgtggtcaccttaggcagccacgctggacaaaaaaaacaacatgcaaccaaaagtcccctttgtcctcgttcacaatgcttcttgcctaaattacccacgtctgctggaagactcgggcgcatttcgtctgtaccgagagcaatcaggaagtttggggtctgtggtgctccccagcacagcaagccccagggctacaggggagtcgttagctcccaggccagggctctgtggacactgcgaagaccggtgcctgctgcaggtggagcagctgtgagacctcctggctcgtcttcccagggatgcgggctttaattttccatcctggctgccgtccccttccatgacctgcgcttatgaatggccatgtccaacaagtggcatcaccccctcccactgtctccaaggagcctgctctggggaacgctatcttgtttttctaaagagccacgtctacaagcaaagaggaaggtgtgtggtgccttccaaagtgctagctgccgggaaaggacacatccctcacacctcctttttgagctgcagaaaatgcagctcagagatgccaagtgagcatcgcactcaggaatgcgctgtgccctccgtggagtcagactttggcctcttaagcaagagcaggagaagacgagggggtgggcagcagccaggggcaggcgctggcacaaacagatgaggatctaaatccacctgctggtcacacagccctgagctggtgcctcgcccctcacagcccctgctgcaggtatataaagctgggcacgggtggacaggacgcaaagcagtgatatgtgcctccagtcagccctgaaggccagggtggcagcttcccctaagaacagagggcgcctgggtggctgccccaagagaacaaagcagtgcagacctgcagctccccctgcagtgaacagagctctctgcaaacgttctctgacagcaatgtaccgaaatctcttcctaactcaagtttacaaaaattttgttttcttctagaaatttaatagtgttagatcacatatgtgggtctacgatctgttaaggttctgtatgcagtgaaaagtatgcagttccacttttgtgccagtggatacccaattgtctctgctccattgttaaaaagacttcccttttccactgaattgtctttgaatctttgttggaaatgtgtgtctgtatctgtgggtctatttgtggactcattgtgttccactgatacactgtctatcctaatttcaacaccacactgggattatggtaggtttatggtagggaggccttcgcctctggcctggggtgttgacggaagctgctcccaggcagtggttcctggggacagtaggggcagcaggaccccgctggcccgctctgcaccttgggccgcctgcctctgcttccgcttcccgccacctttgctccacaaggtcacagcccaggagacgaggcagactcctccagatttatgtccaacacccaatctgggtttctgaagaaacttctctcggaaacgcccagcttccccggtttcctttgttcccagaaccggcagggagcagagacaagaatcatgagcctcccagcagcctgggccctgggggaacgccaccaccctgctgtgcttcacattccccagccacaaacggggacaagtctcccttcccctcctggatcctgcactctgtcctggaaccttccagagagaacaggcccagagcctgcagaacctgtgtcacccagaacccccactggctgcacgggagactcgctggggcttttgaaggcctacacagttctctggctgtggtgtgaggagtggtggaggctgcaggaggactgagggcctccgctgcggagaaaccaaggaaggaggggtgctgcctgccatgaggtggcgctcagcctgccagcgcccacatcacaggggctcccatccgcccgcctgccccggagctcgcccggcctccatctccccgtctcgggacatggtgactgcgccctcacctagttgctctgaggatagaaagcaatccaccgaagcctcatgcaggcacacagggtggacacgctcagaacataggcctggcaggcagcccctaccagagccaggcattcgttcacacgcatcagccattctgggggaggaaggaggagaggccccaactttacaagccccgtgcccgcagatgaggggaagaagtaaagatggaggctgtgggtccccatgtggcggggccctctgtactcctgccccgccgtggcggataatgggaaaccgcaaaggaacacactgtggccgtttcttcgggatggacccgcgcgtcctcactgcctttctctcgggatcctggggctcaagtgaactgatgccatccttggttcatcgtttgttcatgtaaggctcccttgtattttcatccgttcattttaataacgtgatgagcacttgtgaacctaccccactccaagaagtggacagcagagaaagcaatcaacatgcttctttctctcccattcccaccctgcctggcaacctccatctggagttttctccttctcctttttcttaaaagttttaacacatatacacacacttgctgaaaaacacacggcttgttgtgcttgtttccaagctgtatgggacggagtcacacagagtcttcgggacttgtcattttcactcagtcttaacgctatgcagcactggtgctgtcgctgtggccttcgctcaccgtggccagagctgtgtggggtttccgcgtgcagcacgccatgaagtgctcctta

SEQ ID NO: 69493 - DNA, 12103 bp, Homo sapiens
ccctgtactgtcccctgggcacaagagcttgccatctgccctgcatcctcacaccagctggcatgacctccttgggacaccctgtggatgccttccttgccactgcacactgtcccctggccgacgtcactcttgacttttatacaagcctcggggagtccctgaacctctgacacctctgtttcctttacatttcctgcaaattgaaagtctggtcgggatcagtgattcccaactcatgctccacagactagaaggggctggactagggtggcccgatggtcagacgggcctgggaaatgctgggccaagcagagtaagcaggtgtctctgctgtggatttctcagagcctttaactggcacctgttgtgaatctctgagagagcaacagggcttctaggctcctctgcccctggtgccaactgatctgcaacatcaggtaacatccctgtggtgggtgagcagcaacaatctgggccggtggtactggggtaaaagaatttaccaagacagttgtaggcaaagaaaggcagatttatgagagaaagtatgaaaacgcattccaaggttgcaatgggcagaatcagcagaagaggagccaactgcaaagaaacaaaggcttgctggggattttatagggtggttcttaggctgcagagggcgacgtgcagaactaataacgccaaggcagccaggagctaacttggaggtgtctggccatagctcggcccaggaagatcatgagttacctgagcaggaggcctgcgtgtcctggaccatgaagaaagtcaactctatagcttatctgctttctctttttgcttgcccttggtcctgccagcctgactccttttccctaattaggactccacaatcccaagaagctaacattcacagacacaggctgggagacatcggctgacgcagttgatgagggtcccttacggcaccaacaccgcttgctgaggctctgctgagactcagaaggtgcccttacatggagccagagaacaaatcgaggccacagggggaaggcaggaagagctgcttcaaaagagaaacttcaggctcccatgagccttttaacagcctccctgcaaggcagccactgactgataccagccaggtgatcagtacaggagaggacggggcccaggatggggctatccatccgggagaggggggtgctttacagacttttccagaaggtccccaggggaaccttcacaattcaagggcagaaaggatgtgaggtctggtgaggttccaacagccagagaggagccaggcaggtctgttcagcttgagtgcttggcccatcagcagcttgcgttgggtcagagccttcctccctcagccccaaccccctccctgctacagccccaaaacagacaagtctgaacaggtgtgactagagggagccaacaggcagggtccttggtgggtgacacatgctcactcccgacactgactcagacagcagcagggaagggaaaccccaaaccattcaggctagctgagtcagcaggtacagtgtggcccagagcacgggctcagcccagctgactcctggtaccttggggaggcactgggaagtttcagccagggaaggaatgactgctctgatttctatttctaaaagatccaacaagccactggagagagaatgactgagggtggaaaaacagtctggtgagacagaaactgaaggaggaaaccaaatggctctgctgtttctgagtccacagggcctggacacagaaccccgctactcagtcaaactcttactctaggagttgctgggagggcatgtggtagctccgggtgacttcaagtaaaggagcttgtcctcaaacatctgggtggacctcctgtcaatagctgaaggccttgagaaccacacggaaacttccctgaggaaggagagattcctcccatggactcagtgtcagctccagcctgagagtttccagcctcccgcctgccctggatttcagacttgcctaaccagcacccccacagttgcataagccagttcctcgccatatatgatgcagccacattaagcatgaaacatctgtttagcatccaaatgtgccaaagaaaaagatttacactgatcagaatttgttggcatttgatgctggagctgagtgtgggggctgctctggagatgggtccagcccagggcagtgcccatagtgagatacccaagaaaggaggccagcgtggttggaggagacctgggagggagctggctcaggcgaaaggaggaggaagcactggtgctgggggcaggggaactttgaccccagtgtatccgagtgtcaggggaggcagggggtggcagaaggggtgctggtatccgaagggcaggagtggactgatgggggatgtgtgctgtcaatgtttcctgagatggagcagctgttcccagccacggtgcagctgcataggacagcccagaagaggcagagctgagtgacaccagggccagctttgccagataagcgcaatagtgggcaagcagtgagaacatgaagggtgttcctaacagagtggctctaacacggtgctgccatggaagttttctagggaggaagggggccagccggggtgaggcacagggggctgctgtgccaatgggcaggaccagctgtgccaggtccgggtgtggggccagcttgctgggatgtggtcttagaaccagtgagaagaaaagtagaaacatgcaggcaaggggttcccaaagggacttttcagaggggtggcaaggccaaggggctgggcggcctggaagggccaccaccaggattagttcaggttgcccagaagctagcaccaggtggctgaggccacaaagagaagctgatgaggggcgacaggggcagccagggcatttcctttctgaactgtccccactcagatgaaagcaccatgactgacacacatctgtgcacaaggcgagtagccatggagcagctcctccgagagcaggcaaggcacgagaggcacagagaaccccatttcagagaaccccatggtggcacactgggagagaaggctcctgacagaggggctctgtgaagctctctgtggagttgcaactcgcacacgcgtgcacacattcatacactcatacacgtgcacacacatgcacaaacccccacacactcacaagcctatgtgtgtgcacacacgtgcatacactcatacgtaaacgcagccacccccacccagcaccaggtacccaccctcgaactccagaggttcctgggcacaggtcctcgagcctgtccagggccccagctcccagctatgctcatcccaaatcgccctcgagactgcccagagcatgactccggctagggcccctctgggggcctccctcagcctcctccagttcacagaccctttcctgatcctcagggccagggcagatcccaaccagtgaactggagaagaggggcttgggacacaaggggataagaaacgagtgccccaaaatgctgcagtaaccattcgcctccaacttgaatggcctatcatcctaaacgtgaaaacagatgcaggtgtcaagccgatgcttagggagatactcagccctcccaaatcccaagaaaggattaggccttccaaaaaattctagtgacaactttctaggaagagcaggcctttggtgatggctggtcttgagggctgggaatggatggctgagctccaggaggaactgagctcaggtgcagcctgtccaagggcagtgggaggctccagtatgatgctagaacattctgttgccaaggagaaggtccgccctctgtataaagttcagacagtgccctccacacaggcttctgccagccctcatgaccttgcagctggcctctctgtcctccccattcttcacatccagccagtttctcccacacacggggccagggttgctcagccctttatacccggccataatgagagaaaaagcatttatgctgaggtgatttttgccaagaaagaaggcaaccatgggcttgtttctgtcattcctgctgcactaaccctgtcaaagtgtgacagccactgcttcccaggtggcaagacaagaaatgctgggttgagaagctggtccaacgaccttgaatttctggagagagaactgggaggccttgctcttctcccttttctgggctcacaaccccaacacatacaatccttcttccacaatgtggtggtgagtcatccacactgggtgaccaatggaggcctggtcattatccaaacaattaagcctcaacagaccaatttatctggccatccactgtgaaacatatctcagacgttctaaaaagataggaaagaaaagaaaaattcagcctgtaatcttagtactctgggaggccctggctaggagcttgagaccagcctaggcaacatagtgagacccccatctctacaaaaaaatattaaaattatccaggtgtgatggcacacacctgtagtgccagctacttgggaggctgaggtgggaggatcgcttgagccaagaagttcaaggcttcagtgagctatgactgtggcactgcactccagcctggaagacagagtgagaccctgtccctaaaaaagaaaaaaacaaaaaaataaggaaaagaaaaagccaaccccaacagaacaagaccaaagctaggtatcctcctgtttccccaacttccttctgggacagcctccctctagaactttctgtcctcctggaaagtggccttcacttgagttcagcaacatttattggacacggcacttatttggtccagacactggggacgtaaagaacacagcctggtgggggcacaaggtacagaaaccacgaggccacgctggccctcccagcctactggccccaacctcccctccaagtgacaccctgcgggtgcacatcctatccctctgcccagaagcccctcttcctaccacagctccttctctgactccttggcagagcgtgtgtgtccttcaaagtccagctcagacaccaccctgactgccagagccccttcctaccaaaagtgtcccctccgcatcagtgcttcactctaagccccaaaatctttccattatggccagcatctaccatcaactgcccaattcaaaccccagccactctttctagaatttaacctcaaaatctgtgtcctcatctatagaataataatcgttgctaagttgaatacctgtattcaactgaatttgaatgtgtatagggaggcgcatgtgagaccattcagataacaggccatacgtggtgcctgcacacactagctcttagaaaacatctgctaagtattctgatgactggtttgagtccaaccccctgatctgtggatccctgaatctgtagggtctgacccagggccagagcacagagttctgatattgatctgtcacactcactgtgcccagcattttggagagccctgcaggggacggggagggggacttgccctgtagagagctgggttgctgccccatgtgcttactggcttgtgcatttcattcctcaggttgtttgggcttgataagtgtaaattacgtagccagtgcatgaatgatcagggatacatactttgacctgcactggggcaggaacacaggacttcctcctggacctggcttccactggagcagagcccaaggcagggcttttcctacgcataaagctctgttgtggtttttagaaaccacccccaggaagaggaatggccaagggagcagaaaggaggaaatgtcagccccaaagttgcatcttgagttggtctcctccatggacaactgaggctctgtccttcagtgaccctctgaggagctggggagaatggagcttgtctgcacatgccttgcttataggagtgctggcctggtatggtcctggtatctcaccctgcccaatctgaaaagcccaggagagggcaaaaggggctgttggtcacacctgcatacaacagtggctggcgcaaagataagtgtggaagctgtgaggaggcataagaagtgtccggcgcccagacccatcactccgcaagagacaggcctgttggtgtcatatggagaaagaccctagagctccaagctctcagggtgccagaccaaagattctgcaagacccttgtcggcctgtcacccaatgggtgctctctagaggacagaggggtaaatggcagagacacctgaggaacaggctttcatgacgccacggagcaccaggtaaacctcagacaagtccacactgtgaggcccaggcccaaggggcaggggacaggaggagccccatgccctgttgcagggaaaatctgctgccctggcccagcctctttggggatgctgcatcaggacagcctcaccctggtggcgtcgcttgcctccagtgtgcaatgtctgcaggaacatctgggtccctggctagaaccccttgtcctgcctcttgagtgctcagggtatgctatggaaatgcagacgaattttaacaagatcccaagctaaatgcaatcagggagaaatgaaaacttgggcaaaacacatcacatgttccaaggtcaaaggtgaaagctgtttgtgactgttgcacaccacttcagctctctgtcacagccctgcctctccccagtataccactctgatagttgagtgatgttttaagtatgaaaaactgtcacacctggaaggtgggggggccctggaaacctgagctgctgggaaaacgtgctcccctcctccatgaggaggacacaagcccacacccctaagccactgtatggggctgctctgatggggcttcaggatgtgccccagcctggaaggagcttgctgattcttgcctctgaatggccatgtcctgagctggagcacctgaagacagctatggtgcccagaggcctgggagctgtcgggtagcctggccccactgcaggtggcagatctgggagccacaagaaatgctctgctatttcatactatgcattcttcagaggctggtgcaatagagtttaatcaacttcctctggaagagactatattcatgcagacttgtaagaaagagaaataacttgaactttggtttgtttgctgttcttggtgtgcacattcataaatccctaaaaaccccgaagcacaagcactgcccctgccgttcctgctctctgcttggtggtcaggccactccatgcagcagaccagctcaggcctatgtggcctggaaccatctcttctacatgagacaaggccgggacctctgcccccacccacaagcacatggagagggagagggagccccctgcctgagcagcagagaccccaggaaggaggccaagccctcctcacacaggaggtctccagctgccctctgaggtgaggggtgcctctcccaaacagcacaaagtacagcccagaccagaatgttttggaaggactcagaaacaagaaagtgtgtgctgagtaagggccggggctgcaaaatacagggaagagaagccaccttgcagcctggactgcgggttgtgcaagccctgccggctgcagcctgccctcccaggctggggattaacatgggagcagacggcttggctcagaaccaagtgtgactaattgagaggacaaacaggaaggcttttcacctgcccagacctcattcagggtttcctacgagacgatagcatcaggagccctggcgagtacaggcagttttgttccttgctctgagtctcttgtgctgatgacgtcaaaggggcctaagacagtgcccccaaacctggacagagtgtggaggagaaagaaagctggtgagcaagcattttggccttgaagaccagatcgctcatcccaaagcttgggtccctggcctgggaactgggtttactgattccccttgtgattctagctcctttaaccttaagacggagcctttcttctggcaattacccaggaatgggactttcttccagcacagcagagaaaacaggattaagcaaggggctctggatcctaagacagcctctggagctggcaggagagtctggtggcttctgcactgggccagacttccacccaggtttccagtgacaaggttttaagggagaaatgcaaatctgatgaacatttaactccatgaagcagatagcttcaggtttgtcctgcaggattcagaggtctatgacccctgacacatctacacttgacctgtagccaaaaatagttaaaaagattatagagccctagaaacctggccctgtcttcagtgcccacagggtaaaacgtatcttctgggctcatgggagaggtgcagtcacagtgccctcctgccccctcatacacgggggtgcagagccagaagcaaatgggagacaaacattcccctaaaccctagttccagcccacacagccaaaagccaactcccccttagaaaaccttagtatgcgtgtcagccaaattccttagggttgaggcagaggtgtagcgagggaagcttgccggactagagtcaagacacaggtatgtttagcatgggaaggaaggtatgacagtccccacacacagagacgcagacagagagagagatgcacacagagacacacaaaaacatacagacaagatacagaaacaacactcacaggcacagtcacacagacatacatgcacacatacatgcagactcatacagataggcacacacagaggcacagtcacacacaaagacacacacacacacacacacacacacacacacacacacagagacagacacagatctgtggtcatctccactgaattgccagggacatcactgaaacaacttgaactctgtccacacctgattcaggcaataagtgtctgtgggtcagggcaggggttatgggtggatcccaccgtggtgtgactgtggggagagtccagggcagctcagcagcctccagggaaggacacagcccaggagaagtgctaggggagtctggggccctggtgggtggcttggacaggtagtgggagcagcacccaaggaatacggaggcccaaccagttgagtggcagaggctctagccagcctgggcatgggtgccttttccacccagggtaaactgcagccacaggggcaggggtccccgaggagaaggcggcacaaggaagggctctcaaggcaccttcttgaagaccaggaagactttgtgaaaggaaaataaatctcgggaccccaaaatcactaagccaaagggcaaagtcaagctggtgtaaaccaaaaataaaattctaagtcccccgacaagaacggacccttcctctcagcaagggcattccaaagctaacctgaaaaacaagttcaggccatgatgggaagggaagtcaggcatgactcattataccctcttcccttttggaattactgatagaatagggtctttaagtctgataagaaacatttacaatctattgtctccgaagcctgctacctggaggcttcacctatggtctccacaaacccttatcttaacccagacattcctaagtctttagacaataacttaactctttcaaccaactgtcaatcagaatatctttgaatctacctatgagttggaagcccccaccttccagttgtcccgcttttccagaccgaaccaaagtacatttacatgcatttgattgatgtctcatgtctccctaaaatgtacaagctgtactccatccaccttggatacatgatctcagaacctcctggggttgtgtcatgggccactggtcactcatatttggctcagaataaatctattcaaatattttagagagtttgactctttttgttgacactgggaactgcgtcaggcctcccattttattcctaaataagatagctacaaagattaaaaaaaagctacatacctccttcacaatttgcctcaagatctataccctaaaacagttctgttgattttcaccctggcaatgtaaattggtaagttatcttcacaggtatgggacaaaggacagaactcaaagtcatccctctggtcacctgagacaaatgcatatctgatggcttcctctgccctattgtttatgtataaaaatgaagatttggccgggcacagtggttcacgcctataatcccggcactttgggaggctgaggcgggtggatcacctgaggtcaggagttcgagaccagcttggctaacatggtgaaaccctgtgtctactaaaaatattttaaaaattagacaggcgtggtggcacgtgcctgtaatcccagctactcgggaggctgaggcaggagaatcacttgaacccaggaggcagaagttgcagtgagccaagattgcgccactgcactccagcctgggcgacaagagtgtgaaactccatctcgaaaaaaaaaaaagtgcagattcactgagccaggcttaggcataagtgactattcctctctacctgcctctcacatgtaaattgtatattcagtgaaaggcttatcaaagacccaaaagaatgcaaccttttgtctcttgtttacctatgacctggaatgccctcccactcctcccagcttccagtcgtgccatctttctgcactgaaccaatgtacttcttacacatattgactgatgactcatgtctctctaaaatgtacaaaagcaagctgtggcccgaccaccttggacacatgtcgtcaggacctcccgaggctgtgtcacgggttcatccttaaccttggcaaaattaaccttctaaattgattgaggcaagtctcagatacttttgggttcacaacctgatgagagaacagaaaggccccagtctgctgattgccaccctcaacatagcacacccacatacccccaaatacagcacacacaccccaacacggcacacacagaggctgctgctccaagcagcacaacagctcatgggacattcaggtgctgcctccccttccctgggctcagggccaaacctaaactacctctaaggaacaggtatctaagccaacacatgcacccccagcccctttacaacaagtttcacagaaccttaggtacagagaggtgagaaatttcatccaaatgtaagaaaacagccttctactctcataattgaaggaagtgtgctcaaatgccaaagtgtagtactaagtttctggaaaacttacttccctggctgagggtggtggagggaaggacactgattcatcaagaagaggaaaatattccaagtacaatgtataaaggagcaggcatgcgatatattttttaagaatttccattaaaatggttctttcaaaaaaaagctctgatgcctaacgggtgagcttcagctcccagcaaaaatacacactttgtgaattgtaggctcactccactctgtccttaagtaatcttaacctcgtctaagtttcagatgcccctttatttctcttctatcagtatttggactaaaaaaaacaaaaagaaaagaacaaagcagaagcacccgctattgcaaggtatgctcttacctgcccctctccctgcccattctggcttggtcatgtcagccctgggctgtgaccacctgcctgcccagagcaggggacatctccaagggagaggtcctgttaactctaagcctagcaatgtcctgtgctggctttctggcctagagcagggagaatttgtcctgctcctgccctggtttgtctcagctctgtggaatctaaaataaaagactgaaagagaggactactcaatgattctaagcaaggtaagataggttgtagtgatacctgagcatgcagctcatggagacaggaatgataattttataaactgctgcagatactgaacagaaccttttaaaaatcaaggcttttgatattgataattaatctctgtctctccctattcttttcttttctttttttttttttttttttgagacgaagtcttgctctgttgcccaggctgaagttcagtggtgtgatctcggcatactacaacctctgcctccacagtgcaagcgattctcctgcctctgcctcctgagtagctgggacaacaggcatgtgccaccatgcccacctaatttttg

SEQ ID NO: 69494 - DNA, 3190 bp, Homo sapiens
agccacccaactggctgaaggcaatctgctgtactcagtctcctggttcaaatgttaatcttatccagaaacatcctcatagacatacccagagttaatgtttggccaaatgtctgggcatctcatggtccaatcaagttgatataaaaattaactctcttagggaccacctaggtggcttgaataaaagcttcaaacctgcatgaaaaccagcctactaattctcagaagagattttccccccactacactcaatgccaaaggtcaaaacaattttccttaaaaaactttcggattaagcgagtatcttcagtttaccccgacactgctgggaaagacccttgggagtttcctctcaggatgctcacctgaggtgggaccggggctttgtctcctatcccccacaccctgggagccatggaaactaaaggacaagtttgaaaaataccctcaaagcaagaagttaagttctctgttaacctctctgtcctcccactttcacttgactttcatgctctaggtataattttatttaattatttatttatttatttatttattttgcggccaggaacagtggcccacacctgtaatcccagcactttcggaagccaaggcaggaagatcacttgagaccaggagttcaagaccagcctgggcaacatagtgaaacctcatctctacaaaaaaatgttgtaaaaactagccaagtatggtggtgcatgcctgtagtcctagctactcaggaggctggagcaggaggatcccatgagcccaggaattcgatttacagtcagctagcatcactccactacagtccagcctaggtgacactgcaagacactgtatcaaataagtaagtaaaatgtttttttgtgtctcactccgcattttgactgttcagtaaggagaggtggtcagggatttttccatcatacccctggctcccagttcatggcctggaaggatggaacatagggagacctataggaagctctcaacccaaggtgatggtggctcaaaactgggtgggaaaattagctgggcgtggtgatgggcgcctgtaatcccagctactgggaggctgagacaggggaatcgcttgaacccaggaggcagagggttgcaatgagccaagactgtgccactgcactccagcctgggcaactgaccaagactctgtctcaaaaaaaaaaaaaacacctaggtgggagtgctagctggtgatcagattctggagatgttttgaaagtagagccatcaggatttcctaacagactgaatgagggcgtaagagattaaaaggagtcaaggagtcaagaatcactcgaaggttttttaaaagtctgagacactagaaaaatagaattgtaatcaatagaaattagaatttggtgtgagggaagattaggggtttagtctgaacacattgaatgtgaatgtttattagatgtccatgtggagatatcaagtagacagctcaatctatgaggctagagctcgggacagaggtctgggctgaaggcacaaatctggagaacctgatcaatgctttgtgttactcagacaagccaaatagatgtaagatggaaataaccgcctatctgcccttttagcattgaaaacatggtaggaaatgcagtttcctgtgatcacaatactagtctgcattaacagttacgtaacatgtggccaccatctcaatacactctgtcctcgtcggctatttgctcgagttctatgccagttctgtggcttaagaggaatgtgaagaatgtggacaaagcctgggaaaaagccagccatgtagctgaacgaagggaagacaaatgaaatctagcaaacgttaaaggaaatgagatgatttagtcagggatgattaatagcaactggtctcgtactctgaatcagggaagtctagatacttgaaagtaacctgccacctttacagcaagcaaacaaaagaaaatgagttttcattgcagcatgagattttttttttcatttcaagtcttttatccctaaagcatgagatatttagactagaaataaaagaggaaaactagcacctatttaacacctactacattaggtgttggcctaaacactattgcattttaatatacattaagatccttgaggtagaaattctcattttatacatcagaaaagcaggattctaaaaggttaggtaagttcacaagcaggaaagctgcaattcaaatctgggttgaatgagtccaaagctcgtgtacttattaaaatacatcaaatttcttaacagaaattgataaaagtaggaactgattactgaaagggataatgagatcttttttttcctcgatcttatttttttttttaatgaagtttcactcttgttgcccagactgaagtgcagtggcacgatcttggctcactgcaacctctgcctcctgggttcaaacaattctccttttcctcgatcttttaaaaattagaagagcttcttatctgtccagtatattttcataaactagatctacctaaaaccaaaggaatagaagaagccagttttcaaattatctcttagtcctaagcagttatgattctagattctgaaaacagtctaaattctgaaaacagtcccactaccaccagcaccacgaactatttttgttcctattttcctattctatagtaaactatatattcaccttctaaaacacatatgaaattctataatttaagatttaaagtaatcccatacataactcaggagtcaaacatcctaggcttaaacagatcttgttttgtttgactttagaacaaatgattctaaagattctaaagtaagatgaccttgcaatggatttatgaggggttgggctgtgctcactgtgttgaaagaaccagtaattattttcacggataagaaagcctgggatggccaggcacggtagcttacgcctataatcccagcactttgggaggctgaggcgggcagatcacctgagggcgggagttcgagaccaacctgaccaacatggagaaaccgcatctctattaaaaatacaaaattagccgggcgtggtggtacatgcctgtaatcccagctactcaggaggctgaggcaggagaatcgcttgaagccgggaggcggaggttgtggtgagcagagatcacaccattgcactccaacctggacaacaaa

SEQ ID NO: 69495 - DNA, 780 bp, Homo sapiens
aatttaaatttttttaaaaaatgggcaactaggaaaaaaataacccctatctctgggtctaaggtactaactgctgaaaatgagtgaccttcgatcatgaaagtggcagtgaaagtgtagttccccagagagaggcaagctatacacaaggcagggggaggccaggaagaaaagaggctgatttatagtatgagaaaggtcttggggctccagaggactcaagggtgggcgttagtgaagtgggggaggtgaaaagaggggagaagagtgccttggagatgtggtgagacggaacaagccatgagcatgttggaaggcagccaaagatcccagggggaaggcccctctcaggctggtgcatgctgagatcccgagtcaggatagagggtaaacacgcggctttgctcagtggccaaatggaagactgccaagaaagtcagtgaatggctctgaaggcaattctccccatctcccactgcaatcaacaagagctcaccaggacccaaaggcacagagctccagggactggaaccggagaggctagaagtgacccagccctcacacacagctttgccttggaagttgaagggggactttagctggcccataaatatggaccttgtacagaccacagaagcaaaagaggcaatggattagtatccagaacacacaaagacctacagcagatcactaagaaaaatgcagcccaacaggaaagtgggcacaagacacagacaggtgactcaaaggaaaaactggaatggtacaaacatgtgaaga

SEQ ID NO: 69496 - DNA, 1001 bp, Homo sapiens
gtacagacactctggaaaacaatttggcaatttcttccaaaactaaatgtgcacttaccatacaacccagtaattgtactctcgggcatttatcacacaaaaataaagacacacattcacacaaaaacctatacatggatgttactagtgtctttatcagtaatagaaaaaaaaaccgtaagaactattcaaacttctttcagtggaggaattacaacatattgcaaacaaattgcaacatatacataccatggaatatgaggcaataaaaatatctaacgatacatgcaacttggatgtatctgagtgaaagtcagtctctgccaggcacccatggctcatgcctgtaatcccagcactttgggaggacaaggccaaaggatcaactgagcccaggggttcaagaccagcctgagtaacatagcgaacctgtctctacaaaaaaaattaaaaattagctgggcatggtgacatgtgcctgtggacctagctacttgggaggctgacatgggaggactgctttggcccaggaggtcaaggatgctgtgagccatgatcctgccactgcatgtcactgcctgggtgacacagtgagactctgtctcaaggaaaagtcagtcgcaaaaggttattctacgttatgacattcttgagataacaaaattagagatggaaaatgtattagtgattgccaggggcaaggcagagggaatggggtggatgtggctataaaggggtagcaccaaggagccttacggcaatggtacagttccaagtgtggtggtggttacatgaatctacaaatgtcataaaattgcacagaactatgtacatacatgcacacacaaatgagtacatacagaattgatgaaatacaaagaagtccaggtgaaactggtgaaacctgaaagttgttaattgtaccaattccaatttcctggtttttatcttctactatagttacgcaagatatcaccactagggaaaaccgggtgaagggt

SEQ ID NO: 69497 - DNA, 3083 bp, Homo sapiens
agataattatgaacctttatgttgtagggcagatttttaaacataaaagttaaaagataccaagtgaatgatctacgtgttaaatggttataaaatccatctgttcaactacattccaacccactcagaatacatacatttacaaatacaatttattgaggattaagagtaaaaaattcagtcccactgcttatcataagtgaaaggctgtaagccagccccactttctggcttggtgagagtctgtccctgagcatggtaccttcttctctcttatgttgtcggcctgcacggtttccaggcgggctttaaagtgctcacaatccattttcagctgctctaattcttgctctttcctttccaggtctaggagaaagacataaaattactcaagatatttcaagtcactaatctctccctaagcatctattttgcccagtcttgacttagtaaaatgtgtactgatttcttaggtgagaatatttgcatttcttgacttctagcctgtccttgaataaccaatattctaacagtcctgttctctaagttcatctcagtttttagcccacagcacaaaggactttggttgttttctgttttgtgtttttaaggtttcactttactgccagactagtactcaaggcttcaagaaaacatgttatttaaaggatggaaggcagagctgagaagcccgactgtctcatggcacagacttgtcgctactccatgaaaagcagaaggcagctcagggagtgcacggcgccagcacaggctgattcacaaagctagtgtcacccactggcagactgactcaatgggaacaactgcagtagtaggcactggaggagggaaagaacagtgataaaaatgagaaaatgctatagtgaaagagtggaaactatgtaatacttcctctccaccgcactcatttagttgatgagtcaacaacagccaacaaaaatcccaaaaaaatccacgtcaataaatcaagcaaaagtactatcaactttaaatttaaaattttatgttgcagaaatactgacactcgaaaaaacaaatatataatacaaatttttaagtgtttgatctcaaaagctaggaaatcatcagtttttatgccaacatataccaagatttgagggtgctaagagctaatggtctaacttctttgattaaagtagcgatgctttaggacaatgattctcaaactttagcgtacatcagaatccctggaggacttgataatacagagtcggctgggttccatccacagtttccaatttggaacgtctggggtgagcctgagaatttacatttctaacaagttcccagatgagactcatgctgcctgtctgggacccacactttgagaactacttctgggcgataacctggtctctcatcaccaataaaataaaatgaacatgcaacacatgaccagcaacagcaaacaagggaacccatccacaggaatgtgaaaaagcaaaaaaatggagagtaatggaaggcagctacctaatatttgtcacatgaaggaatttcacttctttacacattccctctcctaatccttgaactgagaaaaacacaaggcaactctggttatctgtttcattcttgtactgtcacttgcgatgagtgagaaagcctcaaagagccaggcgcctggaaaacggaacattactccaccctagaggagaaaaagctcacagacacttcctcaactatctgcaaacaaacgagaagcgggtagggctttcgaatctaggggtctgagaggacaagaggaagccagaataagacacttgtggggactgcttagaaccacacgtgtatccccaaagctctaaaggaaatgttaaaaaggaaggaagaaagcaagctagtctctaaattttctagagaccccgtcctagaagaaaaattagaacctaaaagtaaatattcagaccagctaaacatcataaaattggctggcaaagcttctcataaaatgcgtttcttaggggcccggctcggtggcttatgcctgtgtaattacagcactttggaaagctgaggtgggaggatcacttgaggccaggagttcgagaccagccagggtaagactcccatctcttaaaaaaaaaaaaaaaaaagtggttctcagaaatagagcagagtgcctttggactatttcctctccctcaaatcacagtttcattttctgctcttttaagaaatattgtgccacaatgactttcactggaattcttgattttatcctaatcccagccaaaaaatcaactaggaagcactatgctttaaaaactacatacttgcattatttgtaacaaagttaaatggaaatacattatttatacacatacacactacaatcatatgaaataccacctatggtcacagacaaaaatgaacaaactgaaaaactgagatgaaatttgtgatttaaaattttttctttgcatttaactgttaaatttggcttctactattaaacggtatattactcaaacatggtaaaagagacaggaaatctctacaagccttatcatgtgtaaaaacctgtgggaattaactttgaccacccaaaacggctctcttgcattacggtaatttcataatcacttgttccagacagctgtatgcaaccctagtgtaagttaacataccaaagggacagggttaaaacatcccactctacgataggcaatctcatagaattccagtcagtcatcagggaggccacacccatctacgccaggctcctggggaggtgacaagtgcccttctgctgtatgaggccgccaccttgtggccagatgggagcattgctgctgcctcggaacagaaccctgaccttgcattttcaacttggccccactgcatgcatgctacctaaaagcaccctgaaggcagggatttgcataggttttcttctatgcccaccctccaaatgtctatatggaatatagtaggcaatacataaatatttgtcacataaatttatttcacttctttatacattccttctgctaatctttgaaccaagaaaaacacatggctactttatctgtatgtct

SEQ ID NO: 69498 - DNA, 2026 bp, Homo sapiens
ggcacctcgggaggtcgcctagacaactgagcggagcaactgagataacccccgctacgtgtggagtgacctagtccattaacttgccccagcacgcccgctgagtccgcaaaatataggatggcctcgggttttagatgaacccaaagctaagatttcttccctctctggaattagcaagcagcccgccctgcccaactcccctggaagcgcgcgtgctcgccaggcctcgggacgcctgcgcgggcgcccttgcactggcaccagggctccggggtaggggcgcaccgatctgcccaagcctctgcaggcactggaggaaggcgagccctccacccgctcaacaggccccagtgccggcctttccttccagtctcaactccacccgggggcccgggggctccacagttaaaaactccacgccacggagatcgcaggtaagctgctggctcaacgaggtgtgctaaatgggattaaagatcctggaccgtggccaggcgcggcggctcaagcctgtaatcccagcgatcagggaggccgccgcgggaggattgcttgagcccaggagtttgagaccagcttgggcaacatagcgagacaccgtctctacaaaaaaataacaaatagtggggcgtgatggcgcgcgcctgtagtctcagctacttgggcggtcgagatgggaggatcgatcgagtctgggaggtcgaggctgcagtgagccaggatcaccgccaagatcgcgccactgcattccagcctgggcgacagagggagaccctgtctcaaaaacaaacaaaaaatcctagaccgtttacaaacagccttccgtctcttcctggtcaagtcctaaccctggctaacctcgccgtctacagcctgaattttggcaaccgaaaggcagcgccggcgccacgtgcacacgggctgggccgctccgccagctgccagggccactgccgcgctcactcccagagcgcgctgcgagccgcggcgcctttgtgacgccatcagcccgcgcgccgccgccgccgccttctgtgcagtcgcggcccgggcggacggtggctggctgctccgcagcgctcggctggctgcagcggcaccgcgggttgcgcggccggggatgctccagcgggcgcgatggcccccgccatgcagccggccgagatccaatttgcccagcggctggcgtccagcgagaagggcatccgggaccgagcggtgaagaagctgcgccagtacatcagcgtgaagacgcagagggagacaggtgggcgcacggccgcggtcagccgcgccacatggcgggccgggggccggggctggggctagggccagggccccggcacggaatgcggcttccacgtgttgtcgtgacacccagcgtgtgcttcggtttccgcgctgccggaaccgcttcttgctgtgtctagtgcctttttacacttaaggaaacgggttgagggggttccgttacttatgaaagtcacagtaagcggggaagctgagaaaagacccacatgggtccgattccccagccggcatctcgaatcactgggctgccctgatttgccctggtgtccggtcggtgattgccgccttcctttgaccagcacctttacgtgacggggctgcaggagagaagacagacaaaatcactaccctcgaggatctattagtaataaagcaaggaggcaaacaggcaaataaagtagaccttgtgtaagtgtagtaaaggaaatgaaaaccaggtagcaggccgggcgcggtgtctcacgcatgtaatcccagcactctgggaagccgaggcgggcggatcacctgaggtcgggagttcgagaccagccggaccaacatggtgaaaccccggctctactaaaaatacagaattagccgggcatggtggcgcatgcctgtaatctcagtactcgggaggctgaggcaggagaatcgcttgaacctgggaggcggaggttgcggtgagccgagatcgcagcattgcactccggcctgggcaacaagagcg

SEQ ID NO: 69499 - DNA, 2044 bp, Homo sapiens
gggtccggggtcactttcgcgcctccgcactattcccacgcccgcgcgcactctcgtggccatccgcgttgcgagagtgtcgcgcccggaggtcaggggcgtggagcccgggcccccgagtctcccctgcgtgcggcggggcgcggggcgcggggcgcggggcgcagggctgaggcggagcacaatggttgaatgaatgaatgaacgaacgaatgaacggcgctgcagagccctctccaggcggaatgaaagtgcaaacccagcgtttcgggcggcagagtggcgggggccacctggcgcggccgcgcggccagggtccggtttcgcttcctcccagcccgggggcggggcctgcgtggctgtccccgccccggtccgcccccggccagcccccggcgccgcgcggaactcgcgggttcggagccgcccgctgaggtcagaaggaggcgtctgcgctgatcgggtccgccgcgcgccagagccagagtcgcagccgaggggagccggggccggagcccgagcccgagccgagccggagcccgagcgagcggcggagaccgtgcccccgcctcggccccgcgccgccgcggccaggcccggcatggaggaggagtgccgggtgctctccatacagagccacgtcatccgcggctacgtgggcaaccgggcggccacgttcccgctgcaggtacgcatccgcccgcagcccgggcttacgtaacccgagcccgtgaccttggcggggctgcccgagacgagcctcagttccccgagggaggctcgggagctgcgggcagagcctggcgcgggcgccctggaggcaggcgcgggatgagcctcccgctctgcttggcttgcgggggcggaagcggagggctgagcgctctgcgggcccctgcgggtgggacgggtccggcgtcggggtacgcgggtaggagggagccctgtgcaccagctatggcgcagccgctcgtcctcgccccttcccgccgaccgggccaactgccgcgggggcgggcgggcggtgcggctcccggaggcgaggaaatgtcgcagagccccgaggagtcccggagcagtcacgcgagccgggaccttgccccgctggaacgcagaagcggccgtggagctcgagacgctcgcgcgctcacctcctgggcccctgtgcgtggggaagtcaggaagaagacgccgagtgaggtcacggtgcccacgagggtggattcccctcggcctgaccacgccaggaggtggccgaagggaagagggtggggcaggggctgctctgcaccctctagcagagcggcatccctgcaggtgtttgctctgacgaggagaagccccagagagcagttcgggactgtgcggattggctttagggagccagcttttaaaacgcgttggcccacggcctcctggttgcagctaagtggcccgtggaggggtaggagaggcctgggtgcagtggcgtgggtgtcacgcagggccgaggcagaaccaggacgacgggcacttcctggccttgtcgagtcagcaggagggctgggggtgccctgccgggtcgtgctctcctgtgctgcccacctgcggcctggtcactggggacgggagcaggtatgcctggtccctgtgctgggccccacgggatgtaaagaagggccacctgggcacggcggggcctgcggtgcgggctggcctgggaggaggacaggaagaggggagcagagcttcagtggaatttgagggctgacctaggcgtgcccccaggaggaccaagctgagcagagttgagcgtggaaaggcagggggttcgagtccgaagtaagtggaggtcctgttgggaaggatgcggtgcttcacaggtggtcttacttgagaccctgttccatccagctgcaggcagaccctgcctgggacagtcagggtgcaccggttctgtggctccggctcttaagcactgctctggaccactcctagcttgagggggttgggggaggtcaccacaggctggcggattgcttgggcagagtcagaggtaggattg

SEQ ID NO: 69500 - DNA, 583 bp, Homo sapiens
cttaaacccaggaagtggaggttgcagtgagccaagattgcaccactgcactccagcccctgcaacagagcaagactcaggctcaaaacaaaaaaaaaagaaaaggaaaggaaaaagagccagtggtgaaaagtgtgcctccttccttcctccggtggcccgcactaacttccttagaggtgatgctgatgctgtatgttggagacgcttctgagtgtcctcggaacgttcccacgtgctctccaggccatgctgggcagctggctttcctcccgtctagctgggattctctctctctctctctctctctctctggcctctgccagtccctgggtctgagccagaatgtgtcccaatccaggaaacaggtgttgtttctggtatttcttctttttctttcatctttctccaagaaggaagaaaattggctagttttttgcttttctgactcccttagtttgggactgaggtttctgttattcttgtttggctgtcatggagaaaaacaagaacttatcggtcccgttttccattttttctttttcttttttttttttttttttttgagacggagtctcactct

SEQ ID NO: 69501 - DNA, 2873 bp, Homo sapiens
tgtgggatgcatgtgtatggggcatgtgtgcatggcgtgtgtgcacatgtctgggcatgcatgcgtgtgtcatgggcatgcatgtgtgtgtatgcggtgtgttgctctgcaggccccagtgttggccggcccccccgtctttcctgtaagtgacttccttcctaggaggcttggtgtgactggcattccctggaaagggaggggcggatccgcagaacgggcagcttcggggacacaggggctgctgattggcattgtggcttgttggccttggtgtctgcgggtgcacacccacacagagcttttgaaatggaatcctgcgtgcccagttcacagagtgagtgacgctgaggaataagaacagagggaacttctcaaggagaaaggaagaaaggagttgtcaaagatgggctgagcaaaaaaccgtgcaatcagccgaggaggggccggcagcgcctcccttcctgcccacagagcagccgccttgtgcccatctattccccggctctgcatggggcctctgttttaaagggttctgtggccaagacaagcctgccagcccctgtccctgtccttggccactcctccggcagctttccccattcctgaagcaggtggctagcctgcttagcctcttgtcccatctccttacctgtgacagtcaccaagcctctgggaatgtggtcaccctaggacagctaaacgaggaagctgtgcagtgcacacaggtttggctgaccccaagggccagttgctgtgcatgggagcgagttccaaggggtgggagggagccagcactaggtggagctctgccagccggggcacagggaggaacagcatccaggaggagggtgcagcgggtgtgaggccctgtggagcagactctggagctagaataaggtggcatttttgctgcacgctgtgggggtggacggggcccgaggtcacaccagggagcccatattgggtcaggaatgctgctttggcaatccctggactcagcccccagctgtctggccatctgggcacttctgagccagccatgacctctgccttcccttagcactttgcagtgagcccagcacctggcagcccctgcccagctggtgcacggtccctctgcggcactgtgagcctggaagtagggagctgggtgtccatgtgctctgagcagggctgggggcccaggcgatggaccctggagctgtgaaggctgaggcaggggtgggtcagggatgaggggagactgctctggggggctcggggccatttccaccagaagttccccctgggagtttgtaggacaaaggacatggttgatgtggatcatagggctgaccagtggcaggcggtgggagggacgcggggtgcttgtgccccaggttgatcagggtgaagcagtcacatgatctctcctgtcctctttcctcattctggtttcctaaagtggtcagaggtctctgcaaaataagctaaagggagggttctgctgggtgggtggcttcggcttctgtgcagcgctcaccctgctctcccctggaacgcctggaactagggtggtcaggctggggtggaggagctcccctggaatgttccagagcttcccccactcctgccgttctgagtcaccctgcctccccggaggaggaggaggatcagctgagccgccgcgctcacgtagtgtctggctgtctgcctgtctgcctcgctgtgagcagagtgggatgctgccgataaggcgcgcacgtgggccctgggaggagcccgaggcagccactcccgcacgtgggcaggaggagggctgctcacaccaccggccgagggaggaggactgcgggctgcgcctgggcaggggatgagcttgtgtcgcgggcggcagggggaagggagtcggagagctcctgcggtccagccggatgactgatgaggttgaaagcacttccgctgcggcccccgcaggaagttcccaggaggaagttgcgaccctttctaagccatcccactggcctggactctgctgggattattttgaccccccagggcagagtgtagccatctgactggctttctctctcggcaggagacggggcgcacgcctgcaggtgggggagccccaatacgtcacacggatgagcggggcaaagcccagccccccaccccgcacccgcccgcccgcaatcctgccccctggctgcggcctccgcggctcttcccaccccggctccgctgggtgcttggcgcttgtttacggagttacaccttgcggtagaggctgagcaggagcttgtccttcagacttcccagcggagacagccaggctgtcctgtggcagcagtgggtttgtcagaggccgggggctttggccagggccggcagagagccccagtcctgaagaaccctcgttcttcgcgtgctgtcgcgggggctccgtaggcacggttgcagcagggtcttggaggccgaaagaaggacggtctgagctgagagaggggagttggccaggcacaggggtttcagagctttacaggattcagaaggtgcccggggttctgcagcccagtgaggagttcacagagtggtgggcgacccagcagccaggggcatcagccgtgggagtgggacgctccgggagtctgagctgcatcctgtgggcgcagcagacgctcaagggctgggtttagaggggtacgtctggaggtgcgggtggggaatgcacatgaggggagctaggagcagaacagtagcacgggccgagcacgatggctcacgccttgttattgcaccactttgggaggctgaggtgggaggatcgcttgagccccggagttcaagaccagcctgggcaatataggcaatatttctccacaaaaaat

SEQ ID NO: 69502 - DNA, 665 bp, Homo sapiens
caggaggccaccaagaggtgcaagaccatgccctctgtttcgataggaagctgggcctcagaggggcctggggcctgtgtctgagacccggccaagtgctggacgtctccccttcctcatggctgttatggctgaattacgtccccccaaattctcatgttgcagccttaaccccagcacctcagtgtgggactgggtttggagatggagcccctacagaggtcagcaggttaaaagaggccatcagggctctgggtgggccctgatccaagctgcttggtgtccttgtaagaagaagagatgaggacacagacacacacagagggacagccccatgaggaaacagggaggcaatgccgtctgcaagcccagggcagaggcctcaggaaccagccctggtgacacctggaccttggacccccgtgcccaggacagtaggagaattggagccgcctggctgcagtccttcccgatggcaccctgtattagtccgttctcacactgctaattgttgggaaaagggcttgtggaatgcctgtataaactggccatgaaaatatgggacaataagttgtggaaagccacaagaggcctctgaggaggaaagcctcctaattgccatcatgttcgcatgctcagggcgagacctgctgtcttatctgtaa

SEQ ID NO: 69503 - DNA, 1391 bp, Homo sapiens
gttgaaaaatgccctgaagcgaaaagatgcaggtttatatggaacccccaccccctcccccactctcccactctgttcgttctgaatgtcttcacgagcgtgcatcagggcgcctggctcccccacctcagccagtgagtcagacacgggtttcgcagccatgtttcctggctccgaggacacgggtggcaggcccgttgcagcccagagccactggtccctacagggcgccgccacaccagcaggaaggaggatggctgtgtccggagcctggcggggaggcggcctccccagtatgtgagtgcagggatctgccagaaccacctggccctctgtagggcgtttaactggaaataccctcactgccaagtggagactggggcgtgtgccacattgccagccaccaggaaagcttttctttttcttttttttttttttttaaacaccaagagcacgtatagcatgggggaaagaacctaaatgtctctctgtcctgtgagctggtgaaaaacccagcatgagaacgcagtgtcaggtgtgggactccttctgcccctgcagtgggtgttacgggcggtgtgccctggcgagcaagctttgattcttggttctttgagctcgtttcagaggctgagtccccacatcagctttagttcttggacttccctgtattaagcaagaattaggagaatggctgtccctgcaggcgcctcccgtaaatcctgagctctctggcgcaatctgaaacttctcttctgttttctttggctgtatcagccgaaccaggagaggcctgggctgcgactaaggagaaagaaatcgggggtttctgagagcagatggtgcctttgtgggtgcagggcttttgtggaaattgtcagcctctacgggcagagtccggcatcccctccccagactgcctgctgtcaaaccacggagcagctggagcctgccctgtccacggcccgtttccacccgggcatgttcgtctctcctgacttcggcagaggcccctggtggccttcagtttcagtttctcatccaggaaggtaaccttgggcattggcagtgggtttccctatggcttggatccagattagaattgatctttgttttcactttccatagttaataacatgcaaaataatgagaagaatttattttaaggtgacagctatactggtccaacatcgcctgcttattgtcagggtacagaagtttaatactttcttaatccagtttttcaaacttctccctgtagaccgtaaggatgaattccacaataggatcctttttaaaatcgattttaaattgttgcctagtcctgccaaggttattatgtgcatctgttatttttccaatacatgtaaacagttgcagcatgatgcttt

SEQ ID NO: 69504 - DNA, 1934 bp, Homo sapiens
aagcggaggttgcagtgggccgagattgtgccactgcactccaccctgggcaagagtgagactgagtctcaaaaacaaaaaaaaaaaacacaggcctcagcatcgcctggacctgttcttgcttggggcatcccgtcggtcaccaaccatgacagcgaggcgggcctggcctgtgctccaccggagggggcttcttgcacagatgacctgctcatttcagcccctccagaatcttctggcaggcgcagagcaacaggacgtccattttacagacgaggaaaccgagacacagggaaggttgccatctgcaacccagcccggtttttatcttgtttttctgtgttttaactttttatttagacttacagtttgaaacagtgctagaatcggaagcatgtaaagaaacctgtggaccttttatgcagatacacttaagtttttaacccatgtgccttatcactggggacctcttgcactctctctcatgatttttttcccgaactagatgaggatattgacaaagattcttgcttggccaaactgtagtcgggctcctgaagcgcctaggccacctgcgcacttccttgtaaaatccacttttagcaagaagcctggctaagtcagtttagccagacccttcccacccgcttgctatcggatcaccgtggagatcggagccggctgctcacctgcgccatcgccggcgacgcccgatcaccctgcctgcctgaaaccagaagcgcctcatccctggggtttcctctcagagactgtccatgcagggaccgcaccctgctccgggctatcaattcccactcgcccttgctgtattcagcggagcccaatgtctccccagcggcgccccaggcgcggccccccgctgctcactcgcgcgcagcgcccgagcggagggaggcctctcacggccacagcccgggccagcccaggggtgcgcagcggggccaaagcggcttctttcgctccaggagccgcggccgcgccctgaggctaaggcaggactccgggccggccccgtccccgcggcccacccacctggtcggcgatgtgctgggtctcggcggtggccggctgcgtggcggagggcgccccgcacatcatcttggcggcgacggagggaatctggcgaggggactcggcgaggggacgcggcggctcctcagcccaagtaggcgctggggtcacgtgacgcgcgggcggaaccaaggggcggggaggaggcactttggcttcggagtcccctgcggggtcgcggtggccccgcaagaagggacgcgcggggcggggcgcggggcggggcgcggggcggggaacctggccaccactcgccgcaggctgggtctccgcgcccagcgctggtgtcgggagggagcgcccccctcccggggctggtatcgtctttccgggcgccgagtcacacggaccggggcgggggcgcggccgggtgtcgccggtgggttgggcgcgcagggtgggacgatagggaaggggcagtcggagtaggcgcaatcctgcagggtggcggggtccgggccgcgcacgagggagggcggggcgcagcgctgcaggggtcaggggtcaggggtcccggccccgcgggagcaggtgtgcgggctgcagtggacatcaccgcttgtgaccgagaacactgaaggctgaagggggtggacagaggggcccagggagggggagacggcgcccacgcgctccaggctgggtgggggcagggggtagatcagagggatgagaagaaggcagggttctctggtggaatttgcgttttaggatttcttttctttctttccttttcttttctttttttttttttttttttttttttgagacggagtctcgctctgtctcccaggctggagtgcagtggcgcgatctcggcttactgcaggctccgcctcccg

SEQ ID NO: 69505 - DNA, 1384 bp, Homo sapiens
aaacaaacaaacaaacaaacaaacaaaaccctgctgtcacgaaggtcaaaagcagctctcaccaaggcaatgtggaagtgtgtcttgctgtcctcaactttagcccacgcacagtctctacatcaattctgcctcagcttcttccttcaacaaggaagaaaggaaggaaggactgacaagacctgggggcacctcagagactttgaacatcacttacatttgaaatctgtattcagaagaatcaaagtttgaaatctaaactatttcagaatctcacttttgaaatattggatttccccagggtcagtagaaccctagtgtgtttgattgcttgatttttcttccatgtgccttcttcctcagcatgctgatcaggtttcttgggggtttttttgggcttcctgttaatactcctaagcaggtgactcatacacctgttcctggttccaatcagttgtttgtgtttccattatgcaagagtttcatcatgagaatttgttgttaattaaattctagacatcagagggtctcagcccaagcaataggtgttgggggctgtgggcaccaggcgctgcagggggactgtgggccccatcctggcaccctgttcatgaacctgcaggtgatgctgtggggagctctgcctggtgcgaaaactgctgacgtggtgggctaaggcggtcaaacccctctgttgcaggatgtcccagtggacctcaggtccttcctgtttgctgagcttgtgtttcagctgcctttctttcccactgcaaaccctgccttcttccaaaagctgccggtagatccaaagccctgcagacttctactcaggttgcgacatggcaacgtgaatgccagtactctccacatttctatttgaggatttcgcaaaagctagtggcttccaaggacaaaggcctgagaccgtgcacgaaccattcacccttgcatctggctgtgcaccttactcacacgtccctttcatatgtctgcgttggctgttgaagagctcctactgcaagtatgcaagtgtggggagaaaagaaagaaaatgagggaaacaaccagtgagcctgggagggaggcccgcggggcacttgcctgtgggacccaatacgaggaaaaccgctcagaacccaggtcttcagcagcattcgaaacacacaagggcaagatggtggcaggagtgtcattaaactctcatcctgcacgggcactgggacggacagatcagtcagcggtgggtgtgcagtgcgctgtgggctatgtcatagggatgtggtacccagcacatcagtgtgtgaccaggtcttgctgtaggatgactgagcaggaccacaacagaaactggatgagcttctaagagcatggcctgcttgacact

SEQ ID NO: 69506 - DNA, 1966 bp, Homo sapiens
gccaccgcgcccggccaacgccacaactgttaacagtgtgccatagttgcttatctgcatacacatatgtgcgtgtaatgatttacttttttgcagaatgaattacagacatcatgacaggtcacctttaccaaagagttctgcagttatttctaaaaataaagaatatttttctacttcagggtatgtcaaactgtggccctaggccaaatgcagcctccccgtttttttttttgttgttgttttttgagacagagtctcactctgtcgcccaggctggagtgcagcggcgcaatctcgactcactgcaacctccgcctcccggattcaagcaattctcctgcctcagcctcctgagtagctgggattacaagcgcccgccactacgcctggctaatttttgtatttttagtagagacagggtttcaccatgttggtcaggctggtctcaaactcctgacctcgtgatccacccgcctcagcctcccaaagtgctggaattacaggcgtgagccaccgcgcccggcacacccctggttttaaaaataaagtttcgagccgagagtggtggcgcccgtggtcccagctcctcgggaggctgaggctgggggatccctggagcccgcgaggcaaaggctgcagtgagccgagatcgcgccttgcactccagcgtgggtaacagagcgagaccctgtctcaggaaaaaaatacaagtggggttataaataaaatgagattaaaaaacaacagatctttgcctcagaatcccgacccaccgcagccccagcgaggcgcaggcgcaggcgcaggcgcgcgctcgctggttccgcccatgcgcacaggcagggagcgcgcgccccctctgtagccttcggcctccgggggctgcagttgcgcggctcggccactgcgcggcggtggcgtgcgcctgggcggtgtcgcgggctgtgacgtcacgccacgcgccggggccaggaggaggcgggcgcaggaggcgcgtgctcagtgtgctgggtaccaggcgactccgggacagggggtctcggccgtcggcgtcatggtttcgcgcgtgcagctcccgcctgagatccagctggctcagcgcctggcggggaatgagcaggtgacccgggaccgggcggtgaggaagctccggaaatacatcgtcgccaggactcagcgggccgcaggttggcgggggtgtgggcggctggcgtctcgggggccggctgggctggtgcgggtgtgggcggcggcggccggagctgggggccctccgagccctgtggaacctccacgtggccgggccgggcaggcggggtccactggcctgttcccgctgttaccggcccacggcccccgccgccgctttccctcgtggtgcggtgactctggtccctctgcgagaacgctcctccccagccccgtaacccctttcctagctcaggcgtcccctccctccagtagaccatgtactcctgctgccctgctgtttgggcacccagtatttttccctcatggcagcatttcccactgtttgcagttttctgttttgcgttaattattggattgttttccgatttccactcgagagtacctctctgagggccgagaatctacttcttgttcatggtaccaggtggttctccgagcgtggtcccccatcagcagtagcatcccctggacatttgttagaaatacacgttctatgccgggcgcagtggcccaagcctgtaatcccagctacttggcacgtcgatgtgggaggatcacaaaggcccaggagtccagcctgggcaacatagcaagactccatttccatcgcaaaagaaaagaaagaaatgcaagttctaggatcccagccctactaaatcaggactggcatctgctttatgaagctgttcaagtgcttctgctccccacactcagcctgagaaccactgctgcaggaacaggttgccagaca

SEQ ID NO: 69507 - DNA, 810 bp, Homo sapiens
tcccgtgctctccggaggccacacggggtctccctgaggcactgagtctggcttgtttctggaaactgaggcacaggaggacgttgataaccggccttcctctgttctctttcccaggggtgcagctcgtccgtcccatggtttcagatttgcccggtgtgttgcaaccaccacctggcactcagcttgcccggtgccgcctggccccgcagcctttcccaggccttgcaagggtggcacagatggggaaactccatctgcaggggcgtcacccccgagggatgtgtcctccacactcccttgatggtcacgtgggtcccgggagggcgcgtgtgactcttcccaggattgcagcgttggggcgttgtgccagcctggccccgtgggtgcggagtgccgtggacccctcggccctcctgaccttgtttccctttgatgtagaagtctgcatggcatgaattccagtgacaatgggccgggccaggctccctgtgcccctggtaccgctgcccagggccggtctctgcagtcaccctccttccttcctggtggctcctccctccctcctttgttcttctttcttttcctgcctaaatgtttatcgagtccctcctgcattaagtacccgtgctgtgcaacaaattaccttgaacttggtgacttcaccaccactgcatgtcagcgcccagccgtagacgagggtttgggaggcatggctgggcctgcccagggctccctggctgaagtgggtgctgaagctgccaggcactggaggctgggcctctcgcacactccctggctgttgggagg

SEQ ID NO: 69508 - DNA, 4804 bp, Homo sapiens
ggcgacagagcaagaccctgtctcaataataataaaaataaaaaaaaaaaaaaggaaaaaaaggggcacagtagacagtaccagtacttggtattttaaatggttttcaaatgaagcccacccaagctcagcaagtccagccggggcctgaggacctgagcaggcgccaggtcacacaaggtaccgggcgcaggaggcggagcccgcagcgggccctgccctgacagcggcacctgcgcggcctccgcaggttctgggatcggccgctggccaggtgcaagggaggggggacggcagccgctgtcctggggctgagagggctccgcggtctggaggggacggcgtcagcgcccgcgggggttcgcagggcagccccggggcgacccccacccccgccacggtcaagtgtcgatacagtgttgccagccgggtgccaactatgaataagtccaagggcgcggcacgtgggccgaaacgcgatccttccgcggagccgctgcgcgcagggccgtccccaccgagcccgccgcgcggcgacccctgacggcgaccctaagccccggccgaccagggcaggagctcgcgcgcgaaacttccccggcgcccgcaggagaccccggcaggggagatggcggggcccaggcagagctcggaggcccctcccggccccaccccgcgccccggccccctctgcccccgacccggtccgggggagccctcgcgggaccccagcctggtccttcgccgcctccccccgttcagccccgacccccctgatccccgcgccccccgcggtcccggcccgccccctcccccagcccgggccccagccccgtccgttagcggatcccacgcaggctccgcgcccggccccgccggcgccctcggcccacacctctctccgcgcgcgtgtcccgccgtgtcgcccccgtgtcccctccgcgtccccccccgcgccgtccccccgcgtccccccccgcgtccttcccccgtgtccccccagcgtgtccctcggccgccccgcgcgcgccggcggaactgtgggatcgccgcgcacaggaagtggcggcggcggcgcggccgagggcggagggcggagggcggcgggatgggggccgggggcggcgggcgccgcactcgctgaggccccgacgcagggccgggccgggcccagggccgaggagcgcggcggccagagcggggccgcggaggcgacgccggggacgcccgcgcgacgagcaggtggcggcggctgcaggtgagcaccgaggcccccacccgaggtcgggccgcccccctcttcccccacgccccgccgccgcccgaggtcgccctcccgccgccggaggtcgcccctgccccagccgtccgacctcgggccgcccggggccccgcgccgcaatgggccggccgcgctccgcggggcgcggggcctgggaaggcgcggggccgggaggaggtctgggcccgggtcctgtgcgccccccgcaaccccggcctccccggcggcctggtccagcgcgaggccccggccgcttcccgcagcagcctcggtggcgctgggcccagcggggaggcccgggggttcggggcgcccgggaggggcccgggccgggccgagggagggcgagtgggttcccgcggggacgtcccatccctccgtcctggactctgctccgggccccgctcggctcccccgtggacaggacgcgcccgccgcctggtttcggggcgcggcggacccgggaccccccccaggggcctcctcctcgcgcgcccaggccaagggagcagtttcacttttgccgctccgcgcggggagggctgcggggcccggggttggctgtgggttcggcccggagaccggcggcgcgtttgcaccgggcgggtcaggggatggggtcagtccgggggcaagagccgtgggggcgaaaacccactcctggccaccccaggacccttggaacattggtcccaagtacttaggaaaggagggttattagtatttgaaggcagttaaaaatggtgcagtgtttttttttttttttttaactttgagagaagtttagtgacatggggaaaatgcttttataaatggcttcccagacctttaaaaaaaaaaaagcacaattttaaaagctttgtctaggagaatacttgagcagttgggttctttttcctgggaaacatgatcttagtagaagaaagatgtgggctgttggcctccagacagagggtgatgagcatgcggctcttattaaaaatgaaagccaacgccgagagcctgctgggggctgggaggtggggcgggcggcgggcccaggctgctagagggacccaggatcctgcagcttttaaattgcaggcgcggctgctccgactcgactcgcttaggaattgctgaacttcgtcttctcagtttgaaagcttcagaggggtctcccgaggatgctgagcactctcttgatttggccacttctttgccgccccccctccctctttccaaccaatcctcctcccccacagagttcggcgttagcctgtgcctgttacaactcgcttcttgtatccatttctggttagtcttaagtatcttcttgaggacattgtctaaaaagcagctgcatgccattgacattcagacagaacagggccccttggccttagaaggtgtaggggccttaaatattctgaaggtgacttcatggagtggccgccctctgtggtcaccctacctgtgcgtggccctgtcctggcgtatctgccagggggacgcgctgcagcagcctgaagactgctgggttaaaggcagtgtggccgggtgggaaagtccccaggagtgtggattctagaacaggccttcctggagggagggtgctgccccgccccaggctggggccccagtgcagactccacgctggggagctacaccctgcgcctggacgcgcgtctgtgtgccaggactggggaagcaaactgaaagtaatggctttattttggaaattagaaaaagagcattcaccaaagtaatctgttccgtccctgccgtagacacgtgactgatacacctgcctcccatcccctccgcactttgacctcgtaaacaagtgatctgacacaacagggcttgagttacttgcccgaggttgtgtcacggaacggcagggccgcctttaggcttacatccctggaactcccacctccacagacccgtccgggtgctgaaagtccacggatgctatccctggtcaaatcagaggtaggtgggaaatgttggaattctcctaaacagggaaggggaagatcagaatgtgtgtttgagaagagcctgatttcctggattcctttggaggaggggtgtccttaacttgcccaatcacatttaccctgttcatcaatcttcagccccgcttaggctctcacattgcagaccccacggcagagcccctagtgcttggcactgaagagccagtgcaggcccgttgtcaccatcaaaacccacctctggtaaattcaatggcttctgcttccacgctttgccccccctctctggccttgtcaaaaactcttgtgatgtccctgttataaggtatcgccggtggactggtgtttctagatcgcagcgtgggacgtgattggctacatttgactgtttcctttttaatgacttgtttaatgtgagatctttagctgctccatctcattgcaagatttttgttacagtaaagttggactgagttttctaaagacagttgctcagaaatttcatgggaatttacttttggttaaccgaagagtgtttggggttttaaacgggtcgtttcaagtggtaaagtaacatgaccacgaggcgtctgtccttcctaaaaccacttcatcataatttcaagattgattctaaattaccaatttcaaagcgctgcattttaggcaagtgcattaatcgttcaccttctgacaggctttcatgtagtcatttacaagcggccatgttttgattatctttgtcaagcaaagtgcaggagacaggcagtctcataaccttggggcagtgtctgtgtttagttttggaggcgggaaggccgagttgatggtgaaagttggccattctttctgcagggccaaagtctgtacctggctattagggtgcatggatgctggggttaaattggccacgtcttttcccaagcctaggtagaaggattgcagataggatatgttttaaatgttactggtggtgaattgaaagcaacacaactatccttcagtgtgtgactggcagaaatctacctcctggctagcgtgccctgtgtcacttaagactcaaagtggagctgggtgctcttggtgggacagtgtgcctgcagcccagaggcctgtccccagtgactgggaaggctatgcatcattgttggagatggtctcgattcctttctgaaagcgggtagagaatgaaatgcataataaataacaataatgatgaattataaaatgagcagcagtaacaagctgtacaaggaaatacctgtcctgagatcgattactcacccctgactgtctgccctcctgattctcagccaggtgctgggagctgagtaccggcgctgcagccacgctggctcttgttctcttcctcatgtcctattagctgacctgacactaaatctgtcacctgctttatgacatgcttaccttattattttataagctcctctacatccctgtaaggagagtggtattgccccatcacacagaaactgacagagacactgacatgggaaactgagtggggaagtgtggccag

SEQ ID NO: 69509 - DNA, 490 bp, Homo sapiens
cctggaccagcgtccgatttccctgctgctgaatcacttcatggctcagcacagctgagggcagcaactgttgtcccctagagcccgagatctgggagcggcaggggcagccactgttcctgtggaacacactggagaggcatctgcaggggcggggtggggctcctggtcagcctgttcttgtcttgttctggtgccacttcctcaggtatgcgagggctgcctttgtaagtcactggcaggaagatgggaaaggtgctctgcaggtctctactgccaggagctcagctttgatcttgagtgctggtggctgtccagctttactggcagggattctgatgactcagagacagtagctacccttttcccagtggtattgccactgagtgtgggatgggtcacagctatgtctgtggccttttgcaaatcaacttcaaaatttgcagtcacatttatggtaggacagattcatttcacaatgattttgcca

SEQ ID NO: 69510 - DNA, 475 bp, Homo sapiens
gtgttctggtctgtttgtgatgggtgtaagaatctgtctctttaaagaggtgcctctggccaggtggttacctctgtcaccagagatgagtcacccagtctcagctcgcaggccttcctggacgttcccagatagtccccagtgctggaggcctgtcgaaagtgtagctccaccacgccctttgatctcttcctcctctcctcttccccacccgcttccccctccttccccctccttccccctcctccttccccctcctccttctctcctgctgagggcatttggcctcatagataagcggtttctaatgagctcactggtttccgatggtgggtggggagtgactctgggctttctgtgctgcctcttcgacctcgtccctgttttctgctgtgcggagcatggccctttcctaatccgaaagagccgcacagtcccttccagtgctgcctgtggtctcgcccagctggctgtg

SEQ ID NO: 69511 - DNA, 1342 bp, Homo sapiens
ttaatttgtcttggaaaacttttactacacatagatctacttcatttaaagaaacacttcctcttttatgcatgttctaaagagatacctgtaggcacacacacacatgtgcattgtaagaactgtccgtgtgatagttttggagcacagttacctgattatcagtctactagaacccgagtgtgctttaaagacttgaactgtgtttgtgtgatttggaaagtgtcctagagctgcgctcttatattgaggggctgggcagggtcagaagcagcctgtccaggccaacgcagcgaggcctgtctgggaagattgcaacactggccctcacagctccctggtctctgggtgaccccgcctggcccagatgccgcctcgctggaaggcagactttgcctcctgcctgctctttctttctgtctgtctggtgccgttcataagttcataaaggtggcaaggaggccctaggtgctccgtggcctgggctgcagactccttttccactctggagctgctgtgctctggaacatcccacacggggttcctcccattggaacacaggtaaagggctctatgcatgcacatttctgcgtgttttattgaccgggtcatctgtgttcattagctagcagctcccctgcagtcctctgaagtgcaggccagcagagacgggggcggtggctttcgtctgaccatgcctagtcacgaggctgctgtgtgtctgtgcgtgtgtcttctctcagacactgcctgcctggcacccccttacctcttggtgaatgtaattcaaagcaaaggctgcccctggagcttccaggctgggccccagcgcatcttgctctgctggtttggcattaggtcaggggtcctggtggaactccacggactcatgggcatggtggcactgggagcctagaggtatcttagtcgtcctcacaggctcagcttgagcattgccgtaagtgttcatctcaacacttccatgtgaattggaatcaggaggtgtgtccatggcaacacgtgggcccgagctggatgggaccactgtgtgccttcagtccagcctgccagagtggcagaggacgatgccggggccatggggcaatcctggcacgcgagcaaagggtggggcacatgtgagccacgtctccttttatcgtggccttgtctcccttcctcatctctcccaagtgaggatgaatttctcctgaggaaggcgctggccatggcgcagacctagcgaggatggcaggcagcccccgtgggcaccaggggtgctctggccatggccaggaacttgtggattttccgtgcagatgattgtgttatgtccaaatgatga

SEQ ID NO: 69512 - DNA, 2468 bp, Homo sapiens
atactcaacacagaacacttctgccgtgagatgcgtggatgtttccccacaagcagtgctccagggcacccacccaggcgccctccaattccattgagttctgacgcgtcagatcccccagggccagggcccagtcccacaagactgccccactgtcagatgccaatcccaggttgtgatccatgacccaactggctggaagctggggttcccatgatgccctcgagtttgaacatttgccaggacagctcacagaactcagggaaataccagctgtgtctgctggtttctggtagagggtgttacgaaggatccgatggacagccagggggaaaggggtacagagtgaggcctgggggatcctgggtaccagggcttctgtccctggggagctggggtgcacgggcctcccagcatgtgggtgagttcaccaccctgaagtccattgtacaagagttttgagggagcctggtctccagcccctgtccttcctggaggacggcagggggctggggagtgctgtcgagggccccgcaagtctcctgtcactcaggtgagattgaaaggcttgttaggagtaacagtagatgctcccatcctgtaggaaatgtaaggtgttttttttggttttttttgagacggagtctcgctctgttgcccaggctggagtgcagtggcgtgatctcagctcactgcaagctccacctcctgggttcacgccattctgtctcagcctcccgagtagctgggactacaggtgcccgccagcacgcctgcctaatttttttgtattttttttttttttttagcagagacggggtttcaccgtgttagccaggatgatctcaatctcctgacctcgtgacccgcccgcctcggcctcccaaagtgctgggattacaggcgtgagccatcgcgccgagccaggaaaatgtaaggttttaagaactttgtacaagaaccaaatagaacaaaagatgctcctgtcacccttcccactcaggaaattacaaggaatttatgagctttgtgtcaggaaccagggactaagaccaataaatacctgctgcttatcacacagctccccaggtccgctcccgtgaggagcaggctctgcctttgcaagcactttcacgaacagcagatccatcttcctcctgttagcaatcaggcggtcagggtggcggccacttccctgccatgccgcagagaccctgacctcctccgacatcatgctccggccccggcttctgtcctagctgtggctcgctggtctcgagatggctgccttgccccggctgtttcatctgcattccaggcaggaaggtcgagaagggcacgcctgggcttttcttttgaagactccccctgagccccaccctgccgcaaggggcttgggctgtcaccctgtgggctgagtccagggctgccgtgttggagaggcgtgtgggaatgtgcgttttgggatggcagcccgagcctcctacaacttggcagagttgtcaggatttcaagccccgtgtgtctttgaccttttacctgagctgtgtgagaagaggcattttcttgtttctttgcgagtccttcctcactgcacttcagccagggcgccgacacatggtcgttcgacttctggcttggcctcttttgtgagtgtggggcctggtcatatcctcttggtcagtgtctctgtgatgatgagaacgggaagacggccacggtgcccaccctggcaggactctctcccctcgctggcgctggctcagctgccgtgagcggccgtaggcactgtcccgggccctcctgtggttgctcccagccatgctgctggctgcttctgccgtcctggcttgcagagactctgggtcatgcggggaagagggcagagtcctcctccctgctcaggcaagagaggatccagcaagatttcttcctccccaccctcctgcccctcccagtctgggcagcagataaaagccagggccccacacttctgccacctcctgctgctcacacactccagccagggacctgcccccggggtccaacaaggtaaggacagcggggctgcccctgagcagaactctctttcttccctggctgactttgaggcacctgagtcattgtgggtagacaaaagggggagggagaacgggagcttggggtcctggtctcagaccccatgctgtctccaagtctgtgccctctgggctggactcttcctcagccccagccccagcgcctccagctccgctctgtcccctcagggggcattgaccccttgtagccccgtggcttgttgcccctgcaccccataaccctgtgttgacttgggcacctgtgacattcatgcatctggcctgcgcctgtctccagcgcccacattcccacacagagctctgtcaggacgtgccacagcaggactcccaagtccattccaccttctccgtcagggcaggccaatcctc

SEQ ID NO: 69513 - DNA, 1173 bp, Homo sapiens
agctgggattacaggcatgctaattttttgtatttttaatagagacagggtttcaccatgttggccaggctggtctcaaactcctgacctcaggtgatccaccagcctcggcctcccacagtgctgggattacaggtgtgagccaccgtgcccggcctgcaaatcttctattttgttcagacactaactccagccctataaatagtcatccaatacttccagtaaatggtgcgcctcatattgatctgcctggttgccttaccgtgtttgttacattgctgtgtaacgagttacccacaaacttagcagcgaaaacagcagacatctattatctcacacagctgcggagggtcaggaatccaggagtggcttagcgggcgattctgggtgtcacgtggagtcacatggggtcaatgtgttggccggggatgcagtcacctgaagccttgtggggggaaggaggggctcccccaggcctgggaaggctgcggctgccccatcacgctctctcctccaccaggttcacaggttcacagaagtaaaggctgagcatgtcaggactgagctgagcggttcccacctctcagtccacagtttcccacagagcacgcaggggccgcaccagggctgggacggggctgcgaccaggctaggggagcatcctgggcaaaccctgctggggacaggttcgttgtgtctgatgccgtgggagatgcacgagcagtgactttcactttatcccactgtggccccgtgaccctgagcgagaatgcactggccgggcctccagggggcgctcccttaggaacaccccatccccgtccccgtgtgctgtcgagggcctctagcgggcgctcccttgataacaccccacccccgtcgctgttgttgtcgggggcctcccgcgccccaggaggtttcccagggcgatgctctggtccctgggtcctttgatctcatctccctagtttagcctttgaactccatttcagattgagaggtttcaggctggagtgacatggagggacgtgcctgacttctggaggataagaggcggcccaccccacagctcttccagcgtgggagctctgaacatgggacccggagcaccaccgtttagcaaaccttgctgcagtttggagagagtgtcgcgggcgcctggcctgtccggca

SEQ ID NO: 69514 - DNA, 2412 bp, Homo sapiens
gtacctgacttagaccagacagcacagagaccccaggactgtttcatcttcagtgggtccccaaagaaaaagaccacctcgactaaacagactgttgtaactatgcattaggccttatacagaaaagacgctgaaattcggttaggcttcccgagacgctggctatagaaacgaccccaaatttctacgtttgagaacactgacttccattctttataatgtttcctgggcgcctcaagcttcgcatttgactaaactctagattctgacccttttgattatttttggttgacagtttttgtcattttatggctgggagtgatggctcacacctgtaatctcaacactttgggaggccaaggctggaggatcacttgagcccaggagtttgaaaccagcctggaaaacatagtgagatcccgacaaaagaaaagaaaagaaaaaaattagctgggcgtggtggctgcccccgtggtcccagttactggcggagggggtggggcggggggaaacaaggcgggaggatcgcttgagcctggaaggtggaggctgcagtgagccgtgtcccgccactgcactccagcctgagccaactgaggaagaccctgctccaaagaaaaaaagaaaaagaaacacccgcgccccgccccccccgtttacgtgcacaagaagcccatatgcagttaagtgtgaggtttattttgtggcattccgaaatgccgagggccaggtccccacaaaaacatttgcggcgtgagggaaacgggaagagcccagcggtaggcggaaggcacgcgccggggacactcagcggcgagggcctgcgggagcccccagcgcgataaggagcccggccggggagcagcggcccgccgcgggacgcccgagctgcggggaacgcgagggcagcgaggccggcgtctctggtccgggagcgtccaggctcgctcaccgcgcgcgaggcccgcctgccgagtcctggcctcagctccggcgcagggcccagcggggcgcccactgccgagggaggaagatggacgtgtcccgggagccccgctccgcctcccacttcccacctcccggtcccgcgcggccggcccgggcgcacttccgtcggaggcgaagcgcggcgaagacccgccccgtgaagcctcgcgcgccccggaaatggtcatgcggcggcgccgaggccggaagtggctgaggccggcagcagcgggcggcagctgcggcgcaaccggctccggagctgcctggcgcggccgggcgggcggcgccgctcaggctcgggctccggctgggcccggcgcggcctcggggctgcccatggggcgcggggggccgggccggtgacgccggacgcccatggacgcctctgaggagccgctgccgccggtgatctacaccatggagaacaagcccatcgtcacctgtgagtgcccggaggcggggagggcgcggcggtcgttgggcgggcccgggccctggcgttatgcacccggcgcccccagaccttcagcccccggcgcgctccgggctgggccgcttcctggaggtgtgaccagggctgcggctgaggcggggccctctgacttttcggggacgccctctgaccttcccgccgggcgacctctgacccctggggggcgccctcgggccggctgcagttggagccggtggaacccggcggactctgcccgggactgggcgcgcgccggcgtcgagggcgaggagcgggggctgccaccgccccgtcccgcccccgttgagccgcgcgcccgggacctgggggccccggcctcttccgccgggcggttttgcccgcgggcgccctttccccgactacggggaagtccttgggggctcgcagagttgcaggcgttggcgaagtaggaacagtttgttgcggggtgaagcgtcaggcagagccgccgggactgctttcgctcctacacacttccccgccgcgcactcaaaccattttacggatgagaaagccgaggctcgggcgcttaggcgagcttgctccccatgaacagcctcccgctcgagtctacactacggacacctggtgcctcttgggtgtcgtgtcctccccgcacccctcctttaatgcatacacaaaggaactgtttttctgttacgggaaaaatgttccctaaattttagaagtgtgactctccagagttaaatacggttaagaacagtgagcttatgggaagtattgaaatgtttgttggttggcttttaggtgacttgcagagaggtgtttcagactgttacgatttttgacctttgacagtattctgtattttcatgcatgtatgcagttagtttttttctagttgtctttcgtgcttggaaaggaagcactctctgttgcaaaatctgggtgcccaggccacagtagac

SEQ ID NO: 69515 - DNA, 978 bp, Homo sapiens
ccagcgctggagcgcgcctaagaggcgccctgcagtgtggctccggggtgtgggcggggcccggagaaggcccccgccttgggaggggttgggcctcgcgttcaaactccgcctcggggcggggcgagggcgacgcagctcctcctgcctcctgggccgctgcggacggtggtgcgcgaccccgtcccgggcgcgcgcgctgtgggcggtgcacgccgtcgcttcccggaagtgcgtgctgtgggcggtgccgcgcggacccccgggaagtgtctctgtgggcggccgccgggttgagctgcggcacacgtgcgacggccgtgatgaagttcgcttaccgggtgagcgcgggcggcgggcggtctgttggatcggcgcggctcttccggtggacggcgcctgagctggctccgggcgggctgggggcgcgtggtctgcttttgcggcgtctggccgcgtgggggtcgccggctgtctgcgcgcccgtggcctcggggacgcggggctgtggtggggctcctgggagagctgggacggaggcgccgacggcttctcggagggaacagggacatttgtcggggtcccgggatatttttaacctgagtatggcccaacctaaaggctggagttggtgcagtcggggagggcacagcaccctcgggagggatgaggaggtgggacggggcggggacgcgggcgcgcgcaggcggggtgagaacagcagggacccggggcccgggactggtccctaacgagcgagcgtccaggtgagcggaagggcggggaacccaggtgtgagctctgtttcccgaggccggagggaattcctgaggcggacgccctcagctttgagagccagggaagacttgtcccagatgtgaagtgcaggaggcgggtgagacaggtaataagagggggccgtggagccggcctgggggtctctgaagcgtttgctacagctggccggttatggggacg

SEQ ID NO: 69516 - DNA, 3539 bp, Homo sapiens
cagatcacctgagctcgggagttcaagaccagccagaccaacatggagaaaccccgtctctactaaaaatacaaaattagcctggcgtggtggcgcatgcctgtagtcccagctacttgggaggctgaggcagaagagtcgcttgaacctgggaggcggaggttgcgttgagccgacttcgcgccattgcactccagcccgggcaacaagagggaaactccgtctcaaaaaaaaaaaaaaaaaaacccaaacagaatcggcggctcacttgcccccagactaacccagatcaagcccctgggtggaactgcagtttccaggatacaacatcccggggtcagtaaaacccggaggggtcgctccgtgggagccggagccgcgaggagacagtcatggaagcggaggggtagtcctgaccccgcgtgggtcctgacgccgagattaagacgagtggccatttaggaggatgtggaccctggacgctcgtggtgagttaaggatgagacggaggtaaggtaagaagcgccggactgagccgccccgaggcagccttgctctgcggatggcggaaagggtgcgccgcctgtggaggcgtccgatgggggcggggctggggaccccgggagtcaccagcatccctcagcctcgagcacgagccctcagccaccaccggaaggaagacagggttcccggaactctattcggaggctctgcgcaggcgcggcccccgcccaccggcgaactcactggatagggctgagacgggggcgggtcttggctccgcccagaaggctgcgcaggcgcagtcccgacgagcaacgcgtttgtagaggggtgggtgcgcacgctctgtccctgcgtgaccttccgaccccgctgtcctcaccgcaatggcggctgtgagggtcctggtggcctcgaggctcgctgcggcatctgcattcacgtccctgtcccccggcggtcggacgccttcccagcgcgcagcccttcacctctccgtgccgcgccccgcggccagggtcgcgctggtgagtggacggagggggtgaggtcagctcccgcctccagagatcagccttcgctgttctctgcccaaggtcggcccctcttcctaggtccgctcccgccgccccacgtcggctccttcaccccaagtcagctcctgcggcccaggtcggccccattttcccgggtcagcgcccgcggcccaggtcggcccctttccccccagtcaactcccgccgcccaggtcggcccctttcccccgggtcagctcccgctcctctcgcaggtgctgtctggatgcggagtctacgatgggaccgagatccacgaggcctcggcgtaagtcctcaggggcagctggtcctccaccccgggggcctcgagaaggcctctccaccagtgaagtttactcttttttgaacagcttagagaaagcatgtattttattttatttttactttttgtcttttgagacagcgcccagtctggagtgcaatggcgcgatcttggctcactgcggcctccgcctcctgggttcaagcgattctcctgcctcagccttccgagtagctgggactacaagcatgcaccaccacacccaactaatttgtgtatttttggtagatacggagtttcaccatgttggccaggctggtctcaaactcctgacctcaagtgatcctcccgctttggcctcccaaagtgctgggattacaggcatgagccactgcacccggccgagagagcttgtattttaaataccctattcttggctaaaaaaaagcaaaaacgacttgcaaaacccagggagacgctaagaaagaacagtttttaagtgtcgcttatgctgtcacctagagcctagaaatgacttagcatttcacttgagtgtttttcaggacacacacattttgaaaacactgagatcacactcacccgtgttttgcaaatgtttctgacgcatgggaagtaattcccattcattcagttctcaacatcattttaacagttgcgtggtatttctgggtcctagacaggttactgtttacgtaactggtcagctgttgctgagtgcttggtggcctgatttcctgtgctactggaaatgactgcaggccgaaccagtagggcaggaggccaccacgcgtgccaggtacctgtagttcccatgtggttcagggtgaactggagaggggagagctgggtggtggcgaaaggggtgtcaggccatggagagtggcctgaggctggtggctttgtgggtggcccaccttggctggttggagttggcactaggcagagtgagctgggggaaagggccaggatgtgtttcatgatttggccttggtgggatagaaaatagccccagaatagcttgagccctcccaggcagaacggcagggtcttgtgtctggggtgtctgggtggatttcttatgggtagcggaacccaagtgccagggccaggtgctgacctctccctctggcaagtcactgcacttcatgcctcggtttcctcctccacgtaaggggcagtgagggcttagtgtgtgggtgggcttagccacctatctcctgttggcactgggagttgcggatgccagcgtgagcccccataatgtcagctgttgtccccaggaggagcttctgttgcccttgcccttggggagatggagctgcctggcctgtggtgttgtcctggggtctcttgtgtctctcccaccatctgtgatgggaaagttgagggagactagaaattgaactaagtagtgaccgaaagccccgtcacaccgtctgtgcacgtggcactctgagcacactgctgcttctcactcttggtgcttgcagcaagcaactggaggagggcagccaggccctgggtgtaggtagagcactcagcagccggggacccgcacgcctccaggctgtgccctcagtggagtcacccggcccccataccccagtttgcaaagggagctgttgggaccagctgatctccatagcccacttctgagggtttgtcatagtcgtaacccaccaaccgacagtgaattggaatgggggtgtgggggacgtttggcttggtatggaaccaactgtaactttttgcagagcaagtaagatattaatatacattaggaatttgctcctggtacttagctaaaatcctgtttttaaaaatgtgttaacacaaatctgagtggggcacgttttgaagagttgtctctggttttcccccgtgcaggatcctggtgcacctgagccgtggaggggctgaagtccagatctttgctcctgacgtccctcagatgcacgtgattgaccacaccaaggggcagccgtccgaaggcgagagcaggtgtgggggtgggattggaacttgcttcttgtctacctcccacggtgcagcctttttttgctggcttagcttaaaccaagtcttgtgtgcaaatgaacgtccttctgagcagctgtgctcgggctgttccagaagtaatgctgccaaggctcaggagtgccttccttccagta

SEQ ID NO: 69517 - DNA, 596 bp, Homo sapiens
taaccctcctgcctcccaaagtgctgggattccaggcctgagccaccgcgcctggccccaattctcttatggaaccttgcaggatcagaaatgggtttccttcttggtagtttgggcggcggtcctgacaggaagaagggaggccgccttggcgtggctgttttggtagctggaccgtgaatcatggaggcctggctggctcccacacggtggcgtccttgagttccagatcctctttctgttctctgtgtctcctctctctctttgcacattcatggaggttctctgggcaccgcccccatggccctgcctgagaggtggaggtggtgccaggctgaccctccagggacagctctgccacctgcaggagcactggccacagtgcatcggagcgtgcaggtggcttctgtgccatggtgtgggtggcagccccagcacggccggccccggtcggcagctcctgtttcaagggcaggttggaggctggctggccgcttgccccaccctgggcagcctgcacccagagtcgaggggtaggcagtctccatccgaagaatgcgcccctccttatcccgaaacctcagaggcctccttcc

SEQ ID NO: 69518 - DNA, 1770 bp, Homo sapiens
gcattattttttcatgcaccatttttgaacacaagttgcagacatttgaacactggccctaaaaacatcaatcagcaaacttctgggaatgaggacactccccgcgtcgccgccatcacaacaaggccttcggaaaactccacacagcatctagcctcccactcgcgctcggatgtcccaggtgccctcactcggtgccacgccttgcctttctggaatcgtgccccagcttgttagagtggcactgactctgctgggaggatgtcctgccaccggggtttgtcttttataacaacttgtccctccttcccctccctgggtttgtgataacctggaggttaaaccttagagcagccgctcttcacctggggactttgccccaggaggcgttggccaactctcttgtgcctggaggaggaaggcagattgtgcctggaggggagaggctacgggacggagcggagcgggttaggtgctctgcccagttctcctgcttctgcacgtctctgccgcctctgcctccctgctcattgccctctctgttcccggcctctcctctcaccctcagagtaaatgtcacatcccagagggccactggtgctcaggccacctctcaccctcccagcctgctgtaacctggacccccagtttcccccatctgccctgcccaggcccctcagctccacacccaggaccccaggcctgacacttttgggtgtggctgcacgcctaagggcagagggcttgggtagggggtaagcgggggctgtggccctgctgcccccgctgcctcagtgggagaggccctgtgggcagcctgagagccgaggcctcagtggtatttcctgggagggcagcccccaacctcctgcacccacagaggggctggagcaggacacagggtcgctggccccgtcctcgggagcaccacagggcacaggcctggcctggcccggccgtagcccagagctgacctttccttgttgacttgtggtccgggactttccaggacaggcttcttgccacagagaaggctcccggggaaaccccaggagtgtgaaagtggagcagcccaggtccctgccctagaagagccaccaggagccaggacaccccctcccggggacccctcccaccctccagccccagcttgaccccagacctctgccctcagccccctggctgtgtctgagcacctctgccccagggtctttgcacggaccgttctgcctggaaagttcttcccgagatctgctgaggcggctcctcctcggccgcacgctccctgaggcttcttcacccgcgcacacacgggcaccgcctgcctcccggtctcctctccccagaaccttagctccagggtgcagggactcgcccacgtggttccagcccagggcctggcccgagcaggtgctccctctgtgcttgttgaatgaaagcgaagtgaccaacagcacagactttttccgaggaagagagagagcagagagcaaagcagaggcctgagggaccttgtgacccccaagcccacctggctggttccctgcagacagccctggctcctgcactgctgcttttccccgccagggaccaggcccccaccagccaggagcccgggacacgtccatgttctgggacttgaccttcgtctccccacagcctgcatttccaccctgcctggccgcagctctggttggtgggaaggggctccaggcggccccgctctgctccggtacgtgcagacatctggtgtgcagtgaccttcatccc

SEQ ID NO: 69519 - DNA, 1071 bp, Homo sapiens
cctcacacaggaaggagttcagggtgagtccagagagtcaagtgagaagtttattaatagagtaaaggaataaagaatggctactccagaggcagtgcggagggctgggctgctcagctgaatattcttatgcttattttggtcatttcttgattatatgttaaacaaggagtggattattcatgaattttctgggaaagggtggtcaattcccagaactgaggcttcctctcctttttagaccgtgcagggtaactttcggacgttgccatggcatttgtggacatggcgctggtgggagtgtctcttagcagctaatgcattagaatttgtgtataatgagtggcgagcacgaccagaggtcactctagtcaccatcttggttttggtgggatttggccacttctttactgcaacctgctttatcggcaaggtcttcgtgacttgtatcttgtgccaacctcctgtcttgtgactaagaatgccttaccctcccgggaacgcagtccagcaggccccagcctcattccacccagcccctattcaagacggagtcgctctggttcaaacacctctgacagttggacaagttggtgacagccaggagggcccgatgtggacatgtgacaggcaccctgtggccatcagattctcaggaggaagaaatccccttctgaaataaagcaccctgagaaccggcgggaaggagcggggactccgtcggggctttccagggaagcagccagggacttgccctgattttggtttctccaggttggagccgccccgcaggctgcctctgccggcgggaggaagtgagcagctcctgcggaacctctggctggcacagagcccgggggcgggggagccctccctgccaagagaagccatcaggtgcagaggacagcactgactgggccagtggggcgttctccagctgggtcagccgtggcccccgcctcgggctggagtccggcaggcaactgctgcagaaacggaggcagaggcaggtggaggagccgcctccaggcggaggagccccagcaagatggggcgctggagttgagctca

SEQ ID NO: 69520 - DNA, 621 bp, Homo sapiens
aaatcagatgtgacctggtgacaggtgccaagaaggtctggcgaccacaggtttcttgtcggtttctgcctgggacccccgcacctccctaccagtattcccaacccaacgaaagaccggccaagtacaaaccaagggcagccctgaagcccaggaccatgaggcctggaaggccccaggacaggtgatttgtggccctggtgtctcaggtcaggagcagggcagagccaccttcctccctccctgtgcggggctgcatgagctcagggacctttggacctgagaaaggtcaggctcacttcctccccgtgcctgcggttggccgcagggggaatattctcctgacccgagtcccgaagccctgggcgtggagtttccctggactgggagaaagtaaacaccgagggacttgccaagaggaaatggagaagcccaggtgttctgggcggagctgagtgtcccgcagggggttccgcagctcctcgcctctggaagaccaaggacagctttccccagggctacagcctcacgctcccctcccatcgtggctgggcctttacttgggggtgagtgtcctacagacgaggggcttaaagctacaggaatgcctcgtctcgcaga

SEQ ID NO: 69521 - DNA, 1465 bp, Homo sapiens
atctcaccagctcctgttctattcctgtctatttcatctatttcatctgatgtgtcaccagctcctgttccattcccgtctatttcatctgatgtctcaccagctcctgttccatccccatctatttcatctgatgtctcaccagctcctgttctattcctgtctatttcatctgccatctcaccagctcctgttccatccccgtctatttcatctgacgtctcaccagctcctgttccattcccatctatttcatctgacatctcaccagctcctgttccattcccatctatttcatctgacatctcaccagctcctgttccattcccatctatttcatctgacatctcagcacccagtgcctacacttaatgatttcctgaatttttccagtgaaactagcgcctaaatgtattctttcttccttcagaaagtgtttttaatccgcaggttgagtactgtgttttcctgatttgataaaacagaatatttttatagctctgccagttttccttttcttcctcatgaataatcagtgtgattcagctgggactttccctgttgaacagggagagtgggtttttccagcctctcctccttttcactccgctgtggttgaactcctacttactctttcggcagatggtgtttgccaagttagttttgcagctgcctgggggtactggggtggaagcagccccgggaaaccccatgggggactttgtgtcttttactccatcacagcgaagccacggggctgggccaggccctgccctttgggaacgggctcctccggtgctggccttggccttggccccacttcatcctggcccctgcccaggcttccagcccctgcccacagctgccccctccaggggctgccactgtccaggtcagggaaggctcttcctacctggggagaggacgccctggccaggaactgtccctcagctttctgtggtctctgtgtcccccgtgccctccgggtgccctgctggggccctgcctccccttgtcgctcagccttcatggtaggggctgcgggtcccagcgcccctcctcctcctggtcactcacctcccactgaagcagccccgtccgcaccagtgtctgggaaaccccagtgaggcccctccctgccagaccccaggtgtgggggcttctgctccacctgctgcatctgccacggggccctttggagaaagtgttttacccaaagaggcgagtcctggtgatgctggagcctggccctcattgctgtcagcccccagcacctggtacaaaggccactcatcccagtctctgagccctgaagacagcggagggcagcctgagacacaggaccctctcccaccagctccaggggccaatgccagcctggccagcggccgggaccagcacagaggctgtggatggggagggtggtgctggaggcagggggcatgctggcggtcttttgggggtg

SEQ ID NO: 69522 - DNA, 4396 bp, Homo sapiens
atacacttctaatggggaggggacctggggagtgtgactccggtgtggcccagctctgagctgtgcgggaggcatccctggggtcaggggcctcacaggttcacccaggggagcacaggctgcggaccctacaacgtgggttgcgaagagtatattttggatattttcgcaaaaatccaggaggaagctgtcactcctggttcaggcagccccgccttccccagtgtggatcggctgccgggctgcggggaatcccacgtgtgtgggggagggcgtgtccgcagaccgtgggcaccagctggccttggagagcgctcggccggtcacctccctccttctcccttcttctaggaaatcagcagtgccagggagtggaaggggcagcgcccgtgccccggcgtgcagggtgcgcccgccttccctccctccttccagcgttcgcggtcctccttccctggcagggaccccgcccccgagcccgcccccgcacggctgtgcgtcctgccatgggtcccggtgccaggccccgccgcccactgccgtccacgccccgccggccgccccggcgcctccgccgcccgctcctcggacccgcactgccagcccggcacctccaggcgagccccgcaggccccgcgtccgagccgagctggggacgcgcgggccgagccaccccgcccctgaccgcggcgcctccgctccttccccggctcacctgcccagccgcatggtgcgggcggagacctcgggccgcggagacctcggggcgcggagacctcggggcgcggagaacttgggccgcgggagacctcggagaggagcaacctcggggcgcgggagatcggctctaactgcgctcccgccgcgcccgaggctctgagcgcccagcgcgcggtgtgctggaggcagccgtgtccccgccccgtccccgccccgcccccggcctggctcctctggcgaccgagaccgccccgggacaggaggcggggcgctgcgcggcggctccggaaagttcggctctgcccaggcgtgtgcccgtcggccggaggcgggacagaggcaggtcggcctgtccgcctggacgcggacctgggcgccgtaggtgccctgggaagcgcaggggtggggggtacccggcaggaaggtggccaggggtgctgcgggtgccggcgcagcgagggagggcaccgtgggaggcaagggccgttccccgcgccgcgcacaatgcgccggtcctgcggccctccccgagcaggagtccggggacccaggccccaaggctgggagagcgccaggcccctggccggctgcgctccgatgatctccaggacttaaggcgagtgagctcagcgactgctgaggaatgaatgactgaatgaacgcatgcatgaatggaaggagggagggaaagtgggcgggctctaccctctgggccagccccagcccgcccccacctagccttgctcccctagccttctaggggtgtgaagggcgctggcgcagcctctttgcttaacactggctctgaggatcccccgccgagaaaccgaggcaggcttgcggctctgggctcgtcagccttggcagtggcgtctggcctggagtctggggcagctggtttgggaaaggctgcaccacgcaaccgagggtgggacccagagtccctgctccttccccaccgcacccagcccaccccgccctccctccctgatccctgcaagccaggtgaggcccaggggggacgtgactccctttctgcagaggcacctccggaagggcctgggtgaggctgctagacagggcagcggggcaccctcctcccggagcccccgcctctgggctgaggctcggatccccaccgcctcctgcgcatggaggaggcgagaagcgcagggagacgggggccccagacggcaccccgcaggctgccattccttcaaccaagatgtagagaacgccgtggacaaaagctttaaaaaaattctgaaacctctgcccgtgggaagtcaacatttttgcggagcagagagcccaggcacaaaataagaaggcggaagagacgggctggggggataggggggacggcggcggggaagggcagggagggcggcggcgaaggcgcaggaagccctgaagccgggcggcttccccctcccaggccacgctgagagacgggggttggggggatttaaaatcgcgcgcctggcaggggcggggcgggggccacctgccctccggcgggaagagctgggcagggcccgcggagtgcagggcggaggcactggcggtccgcacccgggtgaggtgaggcgcgtaaccgcatctgagccggactctttaggacgagtcccgtccctggagtcagaaaacccggtccagcgccagcgtggacgtgcgcttcccgggacacgcccagggacgccggctaggaccggcgaggctggaggggtggcgatgttgggggctgaggttcctcgccccggggcgggcggctgctggtaagggaccgcatggccccgcaggtgaggagggcgcaggtgaggagggcgcaggtgagccgggcgggctgcgggcagcgccacctcctcccggaggccctccctgattgaccggccgggaaccgcgcgcctctgggcctgcggctgaggtccggggctgcgccgcgccgatgagctgacgccgggccgagcgctccacccccagggccgggcgcacctgaatcccctccacccgcgggactgcggagagggggacggcccccggataccgcgtgggggctttgggaggatggggaatgggtcctgggggagcagagcctcccaaattaaggcctcccaagagcgcggccggtcatccgcggcggcgaagggaaggtgccctgtcggtgcgtccggaccccgcagccccccagtgccgcccgggggcggtgggagaggggccgacaccgcagggcccgccgtgctgtggccgagggggcaggtccaggctctgcttcccgggcagacgccggagaccccagcaagccaagtgctgcgggcagccccccccccgcccccccgagagaggggacgccgcgtggaggccacagccaggcaggggcaggaaggcagctgggccagaaggggacactgaggcaggccgaggcggccgcgggggagggtgccaggaccagcccaggaacctcggagaccacggtaagcggtggctggttcagatcccaactccggagctgtgtgaccccagaaagttccttagccccttggtgcctgcatcccctgacgtgtgacatatacatgaatggggctgttgtaagtgaacgcacacagcacaccggcacatgtgtcacaacacttagatgggtttagatgaagaaacagggaaacctttgggaagtttcctgtagtcaaaggaaggttttcgttttccccctcaaccgtgactgtttcttgggccggcaggataggcttttgttctaggggtgtggagagagggccccttggcagcgtccagggccaactgggaaccaagcaggaatcgtatttgtgcagcctggagttcgaggctctgggtgcgagtcgtagtgcttaagcaggaagcagctgcctgatgcccctagccccaggccgccctgctctgccgtttcgagggcgtgggggtcttctgatctccaccttgatgcacctccaggcccgggtccttttggggtctggcacagcaacctgcgtttgacagcatgggcgtccgctgatgctgagagctcaacttctggtccaaggaagatcttttctcttcggggaacagtcatacattgtttaacgaaaaggatacattccttctgagaaatgcgtccttaggtgattttgtccttgtgtgaacacagagtgcacacactggccctggtggcacagcctgctacacgccgaggctgtgtgtcacagcctgctgctccagggccacgagcctacgcggcaggtgactgtgctgaatagcgtaggcagctgtgactcactggtatttgtgtatctaaagccatctaaacatagaacaggtgcagtaaaaataccgcgctgtgatatgggagcactgtggcattgcttgttgaccgaaggttatgtggtgcatgactgtatgttcgtttcctgtgggcgctggaactaacgacctcacgcttgctggctcaaaacaacagcagtctattctctctcagccctggagagcggaagcctgcctggtggaggcgctaggggagtatcctacctgcctctcccagctctgggtggcccaggcatccctgtgcttagctccagcagccgcctcagtggccatgtggcttctctgtgtggtcaagcctcactttgcccctctcttatgaggacctttgggatgacacgtagaa

SEQ ID NO: 69523 - DNA, 3525 bp, Homo sapiens
tgtgcgaaggctggcatgcaggtgagagggcttctgaagagaaagcatgctggaaaagtgcttcggctcagccccacccaaactcaaatccaggggaagccaggccagcaagacctgcaggtgccatgccttggcaggtgccaggcaacaggatcgtgcctcggtggtgacgtgggagatgctggaaccggggaggtgagagggagtaagtttccagaactcactctcaggcaggaggagatcatgactcagctgagccagaaagcgctcgttccacacgaatgcacgtatgagcgaggcacgccaggcgagtgtgggagtgaggggatggatgggcggttggctggaggtcgtgaggtctgggccgcctggaaaggctgttgaggggcgggggcagctgggagaggctgtgggggcagcagaagggggtgcttagccgcagagagggcacgtggggaaaggccatgtgttcaaggccccaaaaggtggggagggcagcccaggagtgcaccgcagggggtgcaagcgtgtgggtgggtgagactgatgcgtgtgtgcctgtgtgattgtgagcacatgtgaacgtgtggatgcaggtggtagtcgtgagtgtgcttgtgtgagcatgtgactgagggagcatgtgggtgtgtggatgagcgtgactgtggggatgactgtgtgtgcatgcatgagcacacaggtgtgtggatgagcgtgaccgtgggaatgactgtgtgtgtgtgcatacatgagcacacaggcgtatggatgagcgtgcaagtgagtcatgtgagtgtggctgagtgtgagcacgcatgagcttgtgggtgtgcaagggaggtggggaggccacacggaatgaaagcctgggggctgcagccgattcagggccaggccgccatggcgcatatgggtgtccaggggctggaccccgagaagctgagagccagtgctggagaagctccccaaggggaaaggggcatcctcaggcttcggtgtcttcagggtctcagggtggccccgaaggccgaccgcagtcccactggggcgcagaggctgctctgggcttggctctgctagacagaccccatttcctcagtgaaccccgcttctgggtccatgttccccttgaccctgaacgctttcagctgcccaggaaatacctccttatggctgggatgttgctccacacgcggacagcattctgcaaggatccgccgtggacatctgggatggtgactggctccatctgggggcgggagggtcggccgtgggtcaggggacctggacggtaagcgccccccacaggcccactggcctcagccgccaatggccctgagtggtcaatggactttctagcccgactgtgttccctacgtccttttttcttatgaatcacctttggagaaaaatgctgatgaattattttaaactgacagaacagactctgtggcaataagatatcaaattacaaacaggacctcaggccgcgccaggcaagggtcgagccgagccgcgtgccctacactgagaggacggactctgccctcacgccacagctgctgctttttctgcagcggctaaacacgcactggccccgcgatgaggatgagcaaggttcaaatgactgcagctcatccacctgcagatgccaactgaccacgttccacagccatgaccacagctctgactgggcaggagactgacttcaggaacctcctcctgataagggaccccgaccacagactggctccggccggtttacagaggttgtgcgcttgagggcctgtgtcctgagaagacctctgaggtttagggcctcattgcgacacactgacatgataagactccaccccggagtgaacagaggtcgtaagttccacggattttgttcagtacgcacgcagcaggacccccttcatgaatattcaccgctcctccataacctgccgcacaggtttagccaacccggtcagcacggagctcctgccccagccacccctccccttcgaagtgcctcctcctggctcctctggtcttggtggaggccccgtgcttcccagcctgggggacgggaccttgcaggctgtgcccctttacagaaacaaagtctcctgttctaaaagcacagactttgtgattttcagctcatggcgtttgctccccttctgaatagctggatttgcattccagccactccacgagattccagcaccaaaggaacctcaacgccacctggacccccagcaaaggctctggcccacaggtgctgcccactcggtgggtcgggcccccgctggctgtggcccctccatggaacctgagagcatgaggaaattccccctcctgagcctcacgcctgtctcctgtggctgaggtgtggccgtccctccccaaccctggaagtgtctggaacacccggcccatcagccccagaggggacccatccgctgagtccaaaagtggctgctctgacaatcaggattcagacgtgtgaagaaaaggctgtatgtgtgtggtgtgagtatgtgtgcacgtagtgtgcctgtgtgtgtgtggcaagtgtgtccctgtgtgtggtgcatgtgtacagtgactgtgcactgcagtgtgtgtgcacctgtgtgtgtggtgtgatgtgcgtgtgtgtgggtggagactgagggggcaggggcaggaggtgagcccccgaggccgtgttctgtgagcacaggagtggtgcgaggtgggactgccctcccatgctgtccttgaaggggctttgtgtcccaggccgcagtccctgcccggactgcacagcagctctcctgggccctgtacacacctggaaaccaggggccgcaaggagccaggcccggagcctggggtgtagactgagctccaccagaaaagcccctccctcacgtgggcaggggtcagagggcggcccacgcagccctgcacgcacctccaggaagcgagatgcgacgtccaggtcttccttgttcagcaccagattgtccacgaacatccagaagaagggcctggggctgcctggcttgggccgtgcgtactgcaggagccggtggaactggaacaggtaccagcctggagtggggtgagggggcagggctgagggggggccgggggggctggtcatggggacgctgttcaggtgcatctgggcaggggcctaaggaaactggggcttgagagaagggctgagggggtcgaggggacgcaccggcctgggtctgagggatccccctgcccctgtccctccagcagcaatgaagccctgcccagtgctggggccacagaggtgcatggacccctcctcccccaggcaggcctagagtggggaagagacagacaggcaaccccgagggaggagctgacgcagagcgcgtgccgcggcacaaataccgccttttagaggaagctccagaggacacgtgagctgcagtgatgtgggcacgctgggggctgcatggggtcagcgggaggcttgggggcacagggaagcctgcagtgatggggact

SEQ ID NO: 69524 - DNA, 707 bp, Homo sapiens
catggggcctcgggcctcagtttccccacctttgacttagagggaaggttggatggtgacttcttgtaacgatggccatgattctgtggctgcggcgggggcgcacctggaggttctcaccgtcactctgtcccgcagcacaccttcgatggcatcctgcagtgggccatccagagcatggcccgtccggcggcccccttcccctcctgaccccagatggccgggacatgcagctctgatgagagagtgctgagaaggacacctccttcctcagtcctggaagccggccggctgggatcaagaaggggacagcgccacctcttgtcagtgctcggctgtaaacagctctgtgtttctggggacaccagccatcatgtgcctggaaattaaaccctgccccacttctctactctggaagtccccgggagcctctccttgcctggtgacctactaaaaatataaaaattagctgggtgtggtggtgggtgcctgtaatcccagctacatgggagcctgaggcatgagaatcacttgaactcgggaggtggaggttgcagtgagctgagattgcgccactgcactccagtctggtcggcaagagtgagactccgtctcaaaaacaaaacaaaacaaaaaaaccacataacataaatttatcatctcgaccacttttcagttcagtggcattcacatctcatgtaaccatt

SEQ ID NO: 69525 - DNA, 1844 bp, Homo sapiens
taacatttcacaattaaataaggagtagttgatattcacagccaccatttccaccgtatatgtagagaaaaatgctcaaatcctagcgatcagcccgctgagctttcacaaaccgaacacaccgtgcggtcacgaggcggctctcccgaacaccggctctgcacccccagggcccggggaaccaagacttccccaagggcccagcaaaagtgagggaggaggggaggaaaggagggagagggagggaggagtgctggctgctttccgccagcgcctcgtttgggtttcgctctgctgaggcctgaaggcgccctgagggcccctggggggcagggaggggcggtggctgcggccgacagcaaggaacctccggagaagcgaagccgggccagacgtgccaccggggcctcggcgctggcgaaggggcgcgtgcggccgcactggggccagccccgccctggtccccggccacatcctcgagaccaccggggtggaggggggggtctcactgctcagggcccgcgtgacattgcacaggtttagaaacgcacagcgggaaggtggccccggcgggccgagggcgcaggatccctgctccgtccagggtccgtcctgcgaggaggcgccgggggcgggcccggggcggggcgggcggaaggcgcgcgcggggcggggcggggacggcgacgcggcgcaggcggcgggagtgcgagctgggcccgtgtttcggccgccgccatggccgcggtggacctggagaagctgcgggcgtcgggcgcgggcaaggccatcggcgtcctgaccagcggcggcgacgcgcaaggtgggcgggggtcccggccgcgtcgcggcgcagggggtggagggcgcctccgccctggcctctccggagcgcccgccgagccccgggacccgggtctcgggccggcccggcctcccgccccggcctcccgccccggcctcctgccccgggtctgtcccccgctcttccccggcgcggtctccggcctacgtgcggccggccacgttctcggcctccgcctgggtcttggcgccgcccgcgccctgccccgggggtgtgtccgactctgggccgcggggcaggacctcccgaggagtccccgaggccacgcgagcggagggcgccggtcccgccacccccagagcctggcccttcctggttctgaagcgacccggggacccggtgcctcccgagggccggcgccaggctgcgggcttccgggacctcctcccggctgggcgggggcggactcactcccggaccgcgcctcctcctcggggccctcgcggccgccttccttgtgggtctagctggggaagagggcggtggggagatgggctgcccggggcattgagcaaagcccagttgtcacccttttcgcaggggtactggggaggcctcaggtggtggggactgggacttggcagagctgggtgggggtccggcctgagggcgtggtgtcctcgcacgctccctcccggaggcctggtcctgcccactgccggcctccagtgtctctggcctgacatgtccagtgtggcacctgtggcacaggacgccacctaccctacccctcaggaggagagaggagaggatttaggagaccagaagtgaggtgctgggttgggaaggggcccagccagcaccccaaggctgtgcagcggggtctggtctgtcttttagagttcagaaaatggttgagaaaatgcggacacacacccccacccagcttcaggcacctgaccctccttttccctatctggaagccaggaagaggcgagaaggaagccggccttgagtgggaccaagccagggaggcagg

SEQ ID NO: 69526 - DNA, 1356 bp, Homo sapiens
ctccggctccgccctcgtcccgccccggctcctccctccggctccgccctcgtcccgccccggctcctccctccggctccgccctctccccgccccggctccgccctctccccgccccggctccgccctctccccgccccggctcctccctccggctccgccctcgtcccgccccggctcctccctccggctccgccctctccccgccccggctcctccctccggctccgccctcgccccgccccggctcctccccccaccccggggcggccgcggccaggccccgcctcaccagcagttgagcttgcgcacgctgtgcagctccgaggccttggcccgggtcagaaccatcttccgcgtcagcttcatggcggccgcccaggcccgaccggcgggcgcccccggcctcctgatcccgggcgggtgacgactgcgcggcgcgtgtctccaggggcggggcccgcgtcgtcaggggcggatcctgagccgattggcggctcggtgaggagagcggggcgacgcgagcccgctggggccgcttgggcgccgctgacacgttggctctgctcctgctcatgcgcggcctggggcgcccttctctgacgcgattctaacgcgaccccggaagcgcgcagcgagcagagggtgggtgcaggtggcggtccccgagtcggcccagtgagggctgaactgctgctcccaggaaccgagcggggtgggctcggtccgacgcgcatcatggccgagtgcctaggcctgactctgagcgcaggcctagcgtggatggcatgggcgctacacagctccaagttacgcgattcaaactcttggaataaacccagggcagccctggggctgtgttgattccttgtctccctccctcccagcatttacagaaaagacgcatttataggaaagacgcacgggcaggtccagcagagcccttacaagcatttcaaccttttagaaatcagataagaccctctaaacatcgttacatgggccacagttacattaagacaggcgttctgacgttctgaaaccgcctttgcaaaaaattgtatcggtgagagaaggttggccttgaaggagatctggccaacccccatcttgcctttggccttaaaactgcccttaattattcctggataagcaaaggtaactttgggagacatttatagtttaagtgatagcagcccttcctcaaaactaaacagcctttgtaaagctaatgagaccactgaaaccgcctttgcaaaaatcataactgaagaaattatgacaggggaagatctcctcacccaccccatcttcctgctatcctctaagctgcttttgttcattcctgggtgtaga

SEQ ID NO: 69527 - DNA, 1163 bp, Homo sapiens
tggaatatgaaagtagtcactggtgtctggaagcaggagctgtgcagaattgtacagttgcgaaaccatgtcgctggcagctggtgctggcggtggagacttccctgtgcggtgctcagtgcagctgcacccgtgggggagggagctctttctctggccctgcagtcacctgaggttgttaccattatgaacggccgctgggacccccgcatgtgcatgtactcccccagagtgtccgggggccccagccaagggacacagctcaggcagctgggaacatgtgcaggctgatgaagagaaccggatgagggcttcacatgaggaagcatgtggccaggtcctctcagaacatcagcctcatcttcctgtctctgatctatttcagcaaccaccccatgtgtctctagaaccccagtgtagcgagctggagagaggactgtcctgagggcagcaggcctggttgcagctggcgtgggggtctcagaatggagccctcagccctgaggaaagctggctcggagcaggaggagggctttgaggggctgcccagaagggtcactgacctggggatggtctccaatctccggcgcagcaacagcagcctcttcaagagctggaggctacagtgccccttcggcaacaatgacaaggtaggctttctgctggtcagcctgcagttggcacgtggccacggaggtcaccgttgggcaggtcatagcttgaggctgtgacgacgggggtgggaaagggtctgctgaccttgggggctcctgcccaaccatacctttgggagaacagaactggggagggtgatgcgtgtctcgtcttctgtgggttgcatgaccatttcccatggttggtctgattgggaaatcaccgggttaactcaaaaatgttgcgctagagtcctggaaatctgttacccgtgcttaccttgttgcataatgatttcacatcctttatccgattgggagggcctgggcctgggctagctttccccaaagccctggatacaaagacacaagtatgttgaaagcacatggcatcttgcagtccccttgccaggcaggcaggagggtggctgccctttttccgatggtgcaagatccaggtccccagatccccagcctccacgttttccaccacaccatgttgttcccaag

SEQ ID NO: 69528 - DNA, 605 bp, Homo sapiens
gtggggaggaggaggtgcaggccggagctgggtccctgagtcaggtggcgctcgggagcgtctgggagcccagccagccgcagcacaggccggggtgggactgggagagacgggaatgcaaacagggaacccgccgtggcagcctgctgcactgggcgggagctgggaggggcgacgcgggggcaggcgccaggggagcgggaagggggtgccctgtcacccttggggagtctgagctcagggtgggtaccctgggggctgtccctgctcctcagaggttgtgtctgcagcccagtgccccctgctcgggccacggcaggcctcacagatgctgacgtggacggcgggttctgggcaatgtcactgcagcctgagatgccgcctgcctgtggctcccagggctgggccgctgcccacgccgggcaggaggccagtggagacgggtgccagggcagcctgaggtcccgcttcggtgccctgttgacctgcctccgtcctctgtctgtccagggctcccgggagccaggggagatgctacctcggaagctgaagcggatcctccggcaggagcactggccgtcttttgaaaacttgctgaagtgcgg

SEQ ID NO: 69529 - DNA, 1705 bp, Homo sapiens
taaagccgcaccaccggcccctcccatgcccctcccatgcccctcccccatctcttccaggccccgccctgccgcagaacccgccctcaagccccgcccccgcctaaccacaaatcccgttccggtctccttacatgccccgccccttccccgcccccgcggggaatcgacacagcctgtctccgcctttcgccccgccccctccaggccccgccccaccccgcccctcgcccgcgcaggccggagtcgcggcctccccagctagtggtcgcgggcgcggtcgcaggggcagcggggtggccgccgcgccaggcgtggagctgggtctggcgggctccgagaggcccgggagcggcgcgcagagcagcctccggccgccgccgcgcaggtaaagcccccgcccagccctgggagcgtggattcccacccaccccatgaccatccccccgccgcgagtgctggggtctcgggggtcccaggttccgggggtcctagggccggagggtctaaaggctggaggtcctgggggtccgagcctctcccggccggctccgcgcgcggccccgccgtccacgcccagcgcgggccgcgcgcacagggcttggcttctctgttttctcggtttccttcttcaggcagttgaaagaaaaggcgcggttctgtgcccggtgcgagccgcggctcctttagggctggcagggaagggcttgctgggttatgacagtttttaggggttgtcggagtcagccaggcgttggctgctggagtagcccctggcgcgcgagcgcccgctggtgcccggccacgtgcccagcttgacccgcgctccaggttcgggagaagctgcagccgtcaccgtcctcctggcgtccaccctgaggagggaggggctgggtggtccaagccgccgccactccgccgcccggcctttggtccccagcggtgctgtaggtggccaggggtggccgcagtgaccacccactgggccatgcggagccccctggcagtgccagctccctgcacttgtgggacgctcctcccgggcgcattgggagtctccagaagtaagttacaggcagagctgtttaaggaggcgtgctccccaccccagacccttcagtgggccctcaacaccctccccaccagtggacgcgtttcccaggtgaccgcagccggcagtgctgaccaccctccctccctctccgctccctcctgcgtcttccctttcagagctgccagagtggactgcactgcttctcccagcggggcaggatggcggtttcatgtctggttggataaggccttgcctgcggaaaccagctccatccccaggccctagcagaggctcgcgtgtccccgtccccaggtcaggtcaggatgggcaccgtgcgcccacctcgcccctcgctcctgctggtctccacccgggagtcttgtctcttcctcctcttctgcctgcacctgggcgccgcctgcccacagccctgccggtgccctgaccacgcaggggctgtggctgtcttctgcagcttgcggggccttcaggaggtccccgaggacatcccggccaacaccgtgctcctgaagctcgatgccaacaagatctcccacctcccggacggggccttccagcacctgcaccggctcagggagctggatctgtctcacaacgccatcgaggccatcggctccgccaccttcgcgg

SEQ ID NO: 69530 - DNA, 714 bp, Homo sapiens
tggttttgccacacatccgtgtgacggatgaggaacctgaagcttagaggaacggaatgactgcccgtgacgataccatcaggaaattatcccagtggaacttcaacccgggctgtccatcgtgacattccgcctccttccaccatgccagcctctcccacacggggccctgcaggctgtggatatgcactcagaggactaagggggtgctctgcaagcgagagggttcaccagagggagcttgggtgcaggttcacccgctgaaggcgctgataagtcctgtgctgaggagctgacttgcccttgtttacttacaaagtgcattgtaggtaaacatgagccttgttccagtgttcgaagtacattggaacgtaagccctgtttccagagcaaagtaacagagaccaggtttttctagagagctaagtgggatgtgtagctcaaacaaactgtcctacccttttttattctcaaatgtttgttttgagtaaccgtagtgccaaaatttcagttcagtaatggggtgaacaatatggagagagacctgggaaaagtccagggtagcttgcccaggggaagacagcagccacatacctgggggcccgcctgcttcctgcccctctgggtgtgcctgatgcgggaggccctgccccagggcgatctcagctcactgcaacctttgcctcccaggctcaatcacttctgctgcctcag

SEQ ID NO: 69531 - DNA, 1430 bp, Homo sapiens
gaccacagggaggcctgggaactgcctgagcacctgcaccacgggagaggcttgggtgacacttgggcacctgcacccaacacaggtagcagtgatcacagtgaaaacattttgttagcagtcgtctgcttcctgtcctggcatgagcagcaacgggtaaagggcactcttgtcagctgaggggatgagtggggctctgcccagctggttggagactccagcaggtttgcaggaggagacggaagagcaaggagtggaggcaaaaactgctgccaagatcctgtgggaaaacaggaacccaaagaaggaactccaatgggaaactaatttagacaacaatgatcttaaagtttttgctccttcgagactgttgaaaagaactcccacgagtgaacaaaagacgcctggccgaggacactccagagtgctgtcacgagggttccctgcagttttcagaaacttggagcatgtggccacagcggcttgcacgtgattcatacggcacatcttgtcaccatgtaaatgtttatcagcagagacaaagaccagaagagcaaccttggaaagagctaaatattccgatgttccagcattttcccctctggtttgtattgtgaatttttaaaatctcgattgacaagttctggtgtttttagttttgtttccacccagcagtgctggtgccctttgattgtaaacagagcagagtgcaccgggtgggagtgcatgtggctccctgcgtgtgcctgggtgctggcagcaccttgtctgcctccttcctccctggcgccagctcctgacgcaatcagaggcccagtgacacccacagcacagggaggaagtgcgtggatgtccaggtccctccacggagcacagctgtgtagcttcaggtgctcagggaggatgccccattcactcctccctcatgggtaaactgaggcacagggatggggaactggccagtgggactaaacacaagatgtcctgactcctgtgtgggactgttgcctctttgggccttgcattcatcagggctcagcaaggaaacagagccactaggatgtgtggagaggagcagagactttgcacgaggcattggctcctgtgcggtgtgggcgggcaggctcaggacccagaagagcccatggtgcaggccaagcccaaaggcaggctgcaggagaaggccttctggcccaggggggccagccttcttactctattttggccttcaactgattggaggagtgtagggaccagccccacagggttggtgggtctctccctgtgtgcagcgacgagagagtgtagaaataaagacacaagacaaagagataagagaaaaggcagctgggcccgggggaccactaccaccaatgcacagagaccagtagtggccccgaatgccaggctgcgctgttatttattggata

SEQ ID NO: 69532 - DNA, 2550 bp, Homo sapiens
ggaacctgcttagcctgatagtgatagtgatagtgtcatacttacgggaagccagctccctcgactttttcgtttttatccctctatttttctcgggctggagggcattgacacattcatttatttatttctcagaaaaggcaacagaggttcagggaggctaatgacttgcccaagttcacattgctaacctacaacagggctgaaggggatcatgtctacggtggtccatttccaagacaaagtgccttgaatcggcttaggtctgcaaaatacagaagaaacaggatatcccaggcccctgctcagacagccgatgcctgcttatcgggatcccccttagttgccctcacctgaaccaaagaagtttagtctaagataaaagtttaccagtctgcaaaatagctggctttgtctgttcttatcagcctgccagctacgtaggtcataagtcaaatatttaaagagccccagggctaactaggattgcaatgcactgtgggctgcaacaaaatgcagcaagacaaccctaaaaagacacctacagcccctgcccaacaaccaataggtgacatctgggaagactgtgaccccatagtgctcagcctatgaggaactgggggagggacctgcacactaagggataaagtgcttgttaaaaccatgctggaggctggtgcagtggctcacgcctgtaatcccagcactttaggaggccgacgtgaggcaggcggatcacttggggtcaggagtttgacaccagcctggccaacctggtaaaaccccatctctattgaaaacacgaaaattagccaggcgtggtggtgagtgcctgtgatcccagctactcaggaggctgaggcaggaggatcacttggactcgggaggcagagttacagtgagccgagatcctgccaccgcactccagcctgggcgacagagaaagaccccatctcaaaacaacagcaacaacaacaaaaccgggctgggcgtgccttcccatcggacacccgacctcgcaagactgtcattaaaagtctcactctcgctgttctctgggttgtgagtccattctctgggtgtggacaggtgagtttgtttctcacaaggtccaggacttgaactcaggccatgagaccgggccagggttgtgagcaaaagtgcagctcgttgcggtgcctccctcggcaccagtgggaggggagaggaccctggggctcgtcagcctggacacgccagcgctctcagccgtctcactcagtcccacgagcccacacagtggctgccctcaaagggactttggagaccacccagtctttcttcccagtttacagacccagagactcgggcccagagaagacaagtgactttgaacaaagcaaattagtggcaatgcccagacttgaaccgagattggcagagcttggtggtctgccacaaaccaccctcccccacagcaggtgcgggtggggggctccgttcttccggtcaccacagcatgttacaggtttctgcatcagtgcgcctcctcttaggaagaaacatctctgggctgggatggctagctccccgctttcagccatgtagaatttctcttggcattttagttagaagtgttgtctagatttcttaagtgtctgaggctgccctggccacagggatgagttagggaaaattaccgtttcccatgtgcgtgtgtgaagctctccatgctcactgaagtcagagtgagaagcagcaaacacgtcatcgggagggtggccagcaaggctgtgtcctttcacacgtcctcagatcatccttgaatccacccacattccaaattcattctcaaaaatgagattccaaatttcaggatctatttacagccagacgattttggtgccccctgctcaaaagctttgattactcctgtgcttaattaagtcacaaatccctggcccatcatccaagaccacttgtgatgtggttaaacctacctctgtgagtgctagtaaatctacctctactagtactagtaaatctacctctgctagcgctagtaaatttacctctaccagtactgccccccactgtttccttttcaggcattcagctcagtctacggcccgcagacagatttcctagaaataactgctcctacttctcaactcttaacaaaaaggtctctgaaaaggaatttggaggaaacagactattccagtgaatagtgtacaagcctgggagatgcggactttggtgtaaaatgaaggtgtgttcaaagagcaaagaaggagttcgggttttagagcaaaaagctcctgccctggggtccccattaggtccatgtaggcaaatgaaggattgaaacgtgcttagttctgattggttggtacagctgggccctgatgggttggtttccaacccgcgaaccggaagtctttgttagctgtttctttcaaacagtggtggggggcgtgaggggcgtgcggggcgtcgggggcgtgaggggcgtgcggggcgtgaggggcgtgaggggcgtgcgggcgtgaggggcgtgaggggcgtgag

SEQ ID NO: 69533 - DNA, 565 bp, Homo sapiens
cctgtggtgcgtttacagagtctgagaacacagagttcgtggccactccctcacccagccctgggcaccaggttatgttttaaatttgagcacctcagccatggggaaccccttttgtttgtcagccagggcatagtttaccaatcccaaatctgtaatctctctcttaacaaatcactttctacccaaatacagatccttaagggcagggcctctggttcatttttgtcatctccacctagcggagagcgcggcacacggcaatgatacgggagtgcgggggaagggaagagtgtggtccctttaaatgatacagaagggaggtgctgggtagaggggggcgtggtccccggctagggctccacccccccggacctgggtgaggacaggcacttctgccttcttgccccaatgttgcattttccaagaccaccctggcccgccatgcccccattctgagcctataaaaacccgagaccctagcagggcagaggcagaaactgctggatgctgagaggaacgcatcagtggaagaaaacaagcggctggacgtggagaggacgtc

SEQ ID NO: 69534 - DNA, 490 bp, Homo sapiens
gacctcatatgaatggaatcgcacggtatttgtcctttgtgtctgccttagctgagactccagtgactcaaggttcatccgtgtcgcactgtgtgtcagaatcgccttcctttctaaggccgagtaacgctccgctgtgtgaatggacacgttgtgtttgtccatccgctgacagacacttggggaatttcctccatgtggctactgtgaatgctgctgctatgaacaccggggtacaaaagtccacttttaagaggttgaaacaatcagagaaaaagtctcaggctgctggtgcctgctggaggcaggagcttggtttcccgctctggacactgtgcagaaatggcgtcacagtgctgtggcctctgtgcctggtttcttctctcagcattgtgtcttcagctgtgaggtcagcggccgtgaggtcactccaggaggtgcctacaggacctgcaggacctgctcgttcacagatgttctcctagaagca

SEQ ID NO: 69535 - DNA, 471 bp, Homo sapiens
ctgggacatgtgactggcactggcccatgggctgtgagcacaggtcaggtcagccccttcctgctgcttcccaccgtgtgtgctccttgtctgacttgatatgagaactaacccaatatggcaggaagccactgacatgtgggagccgtgcatggcagtggccagcgtccttgtcctgcgggggctctgtggacatcactcgccttcagaacactgagccctcctacctcctgatatccagggctgccgatgggaaatcccaggctgccgcggctcctgtgtgctttgaaggtaactttcctttgctctcgcgctccttgggctcagcgccctttcagtctgatgagatctgggcggttttcttcaagccttctctgacaattccatcactgtcctcaccctcttcttttttttctagaactttggttagccagatacagactctcctggtttgattctgtctcttttcat

SEQ ID NO: 69536 - DNA, 585 bp, Homo sapiens
agaagcctcgccttgaggccgtcacaaaatccctgtcctgttgccacatccctgggtaccccaggcccacctgacttcccactctgtcctagccagcagcagcagggccgttgcaggctccacatgcttccagggcaccagccctccccgagtgacacccccttctcatcatctgccagttcacccacacaagagtacacaggaggagtgggcatcttttttagggtccctctggcaaagctgcacaaggttcactgagatgatcatttacagtaggctgcatgtccagaggccaaggaaatagcctggtgggaacaagttagcaaacacggtgaggacaccacagtccagctgaactcacagagcacgggcaccaggccaacatagtgagtgacgcagctgccctgactgggctgggcatccatgggaggggcagacactggtgcttagcaaggacctgcagggccctgtaccctgagataaatcacagctccctcctgagagcccttctgggtgtcccccatctgctgtggggccacagaggccatgtcatggtggatcatggaaacaaacgtcccacagagg

SEQ ID NO: 69537 - DNA, 777 bp, Homo sapiens
ccgtcatgggcacagacacaggcactgagtctccctggacctatactttcctcacgtgtaaatggaagaaatagatgaaaccatttcagaaatcctgcttaaggtttaaaacccaacaagtataaattaacactatcttgaccaacagttcaaggcatgatggccacaggagaggaagagtgtcagccactatgcctgtaccttcacaccagggacgaactcctcttctcctacaaatcacattaataaaacacacattggaggagttctaaaagatcttgcaccatctttctttgataaggaagcaggactgctgaatgacagcggcagacaacgaaacagtggaagttgcactgggtgtgactcatcagatcaataaataggtcagtaaacccgttctccgtctacgaactgaaagaacaagtcccttcctaaacagctctgctcctctaacaacaaaggctaaggcagaaagaacagtcgtgcaggggccgaggcctggatgagcagaggacagtccacaccagacctactgccttcagaaagaatccaggatatggcacaggaaaaaaataatttaaaaaaatatacgttttaaatcttcagttaaaaaatagatttcttaaaagtaaaaatttgttttaaaaatcttaaaattatcttggttcagtgaaattaataacaacagacttggaaatatttatctctataattaaaggaaaaagacaaaaatcaaaaagaaactgaacgaagagctttagctttcacctggaggcg

SEQ ID NO: 69538 - DNA, 951 bp, Homo sapiens
tccctcaaccctggtcttccaaggtaaagatttcagtgcatctttgacatgtctgtatcttcagacaagggccctaacatatcaaaggcacttagtgtttgttgcttagatatctaaaatgacattttcttcactggcccttaaggcaagcacaacagcaaaaaccaacagccgttcgacttctgtgaggcaagcacgggttttagaaatactagggtagagaggcggccctggaagccatcaaagaataaagagaaaaagaagaaacttatcaccaaggagcaaagacttggccagatgtctgccaaaatagcagggtgagacaaatcgatgggaggacagttaattccctaataggcattttaagtgcacttgtaaacggcctcttgtttgtgaagggtctggaacaggaccaaaacccacaaactcactaggatcttcaagcaggggaattccaaactaatgcaaaaagccttgttcaaacacagaagtgctctacctaaaaatagttctaattactttttaagacaggttttcaaaatattggtttaattttacactgtttatttaaaattggtaatagttaccctaatcgatttttaacaatgaacatttttttaaaaccacactggacggctcaactgttcctttaatgagcttccaaataggcctacggaggagccaacaccccacaaataactgcagacacgacaggcgccttcaacctctacacacagacaggcctcccgccactctgggcccctgcagcaggcgtgctgccccgctggcatgagtgcaggtgcgcctgcattaacacatgaaacaagcaggttacacatcagttcatgtatatgatctcctgcttctacagaaataaaaagagctgccccgatacaagtatacagccgcacagtccactaatgaggacagcccagactgtgggactcgcca

SEQ ID NO: 69539 - DNA, 2013 bp, Homo sapiens
taagcacttcacctgcagtatcaagtttaaccttttaagacaaggaaactgcagagacagagagaggaacaaggtcaaagagctaacaagcagagaggccgggtctgaactcaggccctgctcttagccggctactatctcgtctccatcggcgactcaggctcctggcgctttcaacacaatggtattccaagacttctcgcagcagttcttccaagcgggcattcggtgtaaaacgatggaatgccgagtgttcctaggttctcatttctcccttcgctctcctcagacattagaaatatctaatttaccgggtaggaaagcactcaagaggtttcctcaacactacctaggaggagtgacaggtggcactgttcaaaaacccttttccttcattagagggaaagccaaaatctgacctttcaaagctccaccaacgagcctttccccttttaacgcatacacttttccctcctaattccgcagcagcaagtcaggccttcttcctcaagctctcactgcacgttctcaaggctgccaagaaaagaaaaaatagaagagaaaaaaacaagcccgcaaagactcaactgtgtgtgctctcaactaacacggcgccggcgctgcctttactgatgctgggaaggcttctcttcacgacttcacgcgtgagagtgggcagcgggcgcagggcgcggcactccgcgggacccacaggggggctcacggtggaggccccgggcccggctcccccgccaggctccctgccccagccccgccggacgacgcgggcccgggagcaggaacgcgggacgctgctgacggcccgggtccccagactcacgtttgtactcggccatcagcctcttgagcgcggtccccgccatggccccgcaacagctgcgccgagcgacctcgcctcagccgcgcgcgtgcctcctgccccgacaccggggactgcttccgggccaccgtcgcgggcccaggaactcttccggggcgtggcgcgtgcgcgatcgccgaggcgcgctgtccgggtggtgggagctcaacccgcgaccgcggctacgattctcttggctcctgccctcgccttagtcgctctgcggggttggttcggtcccggcacttccagaggcctcagggtcctggtcttgtagagacttcctgaacggtggcgcctgttccagtgtgtgtgcgctaactgcctgttctgtgccagccgcgcgtggccgaagggcgggaggacgggggttgtggaggggaggatggaggttggggagacagggcggggacgagataagaggtcggggggtggggaggatggtcgcggggcggtctggggctggagacaaggggcctgaggtgcgggtacgcactgaacattccaaccgtccccagccggccgggtttcaggtttgaaaaggtgggaaggttagctgtcctggcgcttttcctccacgtgttgtgcggctccgctggagttcgggtccagcaccttctactccgagggagagagccgcggggagagccctgttcgggcccgcggctcgaactgaccgccggctctgccgagcagcctcgaccccagggcacccccgggagagagggcgcggctcaggtccctgcccgaacccctggggtgctgagagactccccagcgccccgcgtgggctcccggcctctccacagttgaggatcctgtaaggggcgagccctttttcccataatggctgtagtgagtgggtgtgctttcccgattgacccgctgtgaggtgagcgattttaacccacatccttactgacttcacagcacagtaggtgcttcgtggctgtccggtgcaaggatgtatatacacacacacctttgcaaaaaaagtttgcatctcttgcctggctgtttgttgcaataatctatcatttgtcttttcctttccagcattgcagatgatcccttgaaaagaagtctgatcacattcacactctgctccgcccatttcactcagtaaagctgaa

SEQ ID NO: 69540 - DNA, 1542 bp, Homo sapiens
aggagcacgcaaagacgcttcggggacactgctggggcgggatccgagggcgccgcgctctgcaggagcagcagcgcggggcccgacaccgggcgctcaaggaggcgctgggcgcgcgccttcccagctggggaggagacgggcgtggagcggaggcgtggccaggcccggagggggcggagctcgcggcacagcgcgcttcgcgggggcagagggggcgcaccttgggcgggcccacttaggggcggggctctagagggcggggaggggcggagcctgtcaggggcgggacgcggggcggagtcggggtgggggcggagccgggctgggggcgggacgcccgcgatagacgcgcgtgcaggcggggtcgccgcgcttaccttgggcttctcctcggacatggctgcgcgagcggcgcggggaggcggcgcgggggaagcagcgcggagcgggcgagtcacgctctcggccccgccgctctcccgccgcaactgtgcgcggggccgcgctttatcccccaaatcccggcgcacccgttggccggcacgggggtcacgtggctgcgcgcgttcacgaggcgcgctccccggggcgtcgggcgcgcgcaggccgggccgcggctctgggcggttggagatgcgtcacggggcgggtcccgcgcgaccccgtcgggcgcggaagccctagggcgctgtggggcgcgggccaggagcgtttacggggagcccgggccctggggacccttgcccgcctccccgcgtcgcccgggccccgactcctttcctgggggccgcgttcctggggcgccgggaagtgaggccggggccgccgcccatggccgcagggacctggggcggaggagggaggacgctgggggtgacgttccctctcaggagccgcggacagagcggagaaggcggcccgcggggtcccgtccgcgggggccgcgcgaatcgggccagcaccctagacgattgggggcgccacccgcctccctgccgccgcggtttcctgtcagccccaggccgggctcctttggccaacgctcctacggggctgccccgggccctccacacccgtcctcaagaagacccgttttacctgtgaagaaactgaggcactgggaggtcaaaccacccccaggtcagcgctggtgagcggcgccgagcttggccaggccgccacgtcggcgagcgcgggcaaacccaggctggacgccgccagtgccggcggaacggggacctcgtggacgcgggaaacgcgctgggccggcaggacggcctccccggacttgcgggcgccattcctggggtgcctggcccgccccggcctccatgtctgtgatcccagggcctcggatggaacggacctgagggcggacacccctgcgtccctcaggagtgcccgggtggtgccagccggggcgtggcggaggtctcatctgatggtgagcccggccgaaggcgggggaggccgcacttcaggctcagctgggaaatggcagggcctggatttgaacctaagcgtctgagccgtttctgt

SEQ ID NO: 69541 - DNA, 7212 bp, Homo sapiens
catcacagccaacactaatgcaggcaagaattccccaaagatgccaagtccactgggtctgcccccgaagatgccaagtccactgggtctgcccccgaagatgccaagaccactgagtctgcctgtggactgacaagatagtctcaaagcacctccccacaggtgagtcattactcatggagaggaggtggcacttccaagagatcagttatctccaccataacccagaacaacatgatgatgggacaaagtgacagcatgtgcctcccacggaggatactgagaggacagaatcactgtgccgtgctcctgccaaagcgcacctgaatcgaatcaaaggaaacacccggtaagacccactgagggtccttccacaaattggctttctcaagacaaagaggaactattctagatcaatggagattaaagagacacaacaattaaattcaacttgtgatcctggatttcagggggtaggggaacaggacattgttggggtaactgtttaaatttgtatatggattgtaagttaaatcaggtattcaatgttacatgtccagattttgataattatataaatttcagttatgaagaagaacagcctccttcttaggagatagactctgaagaatgtagagataaagggtcacaatagtaacttactctcaaatggtttggtcaaaataacaacaggcaacacaattatgattgtcaatttacaatacatttttaaaatataagtagagatagagtcttgctatgtcacccaggctggtcttgaactcctggcctccggcaatcctcccacctcggcctccaaaagtgctgggattacaggtgtgagcaactgtgcccagctgaatcaatttttaaaaataaataaaacacaaacaattgtattataaatttaaaaaataaggagatctagagagtgctaaggcaaacagagccaatgttgagaatggaagggcatccaggacttcactgcactattccttcaactttctgcgcctctgaggtctttctaaatacaatctgggcaaggagacagggtatgcccaacacacccactcgagtccttcctgaaaagtcatccatgaggaagggtgcgtgtgcttcctctcctcagcccaacagtggctacaagtgacaggggattttcatttttaaagcttctttctgataactaggtcttgtgtgaactaaaagaactgagctccaaaacacacaccgtcaactccatctatccccagacctctggattaccggtcagtctgagtcagacccagacctctggattaccggtcagtctgagtcagcggagaggcatgagaggaagagggagagaaaaaccgcccaacattcctcctgctcccagcaggccaagaacagagcgggctttcaataagggggaaaacaccaatgtttacagtcctcatgaaaataacatcaaagatgaaaaaaggtcattctattctatcctttgaaaacatatcatcttgcatagtaagaaaagaaaggccgggtgcagtggctcacgcctgtaatcccaaaactttgggaggccgaggtgggcagatcacctgaggtcaggagttcgagaccggcctggccgacatggagaaaccccatttctactaaaaatacgaaaattagccgggtgtgatagcatgcgcctgtaatccctgaggcaggagaatcacttgaacctgggaggcggaggttgcagtgacctgacatcacgccactgcactccagcctgggcaacagggcaagactccatctcaaaaaaaaaaaaaaaaaaaaaaagaaaggcatgaatcatttgttactgcttcaaagacaagcagtgtttatttctctaagtgatcactatctcttatctcatcacaagatacagaaaaaacatgtgctagaaaaccagagataaaaactgcccttgtgttgcttaagtctaacactgaatgtgactgccctgacttctgggtcctatgactgcaaggcttcaacttagactccatttatcaatttttaaagacctttcagtctcatttgtttccgaaattaaaggaaaaaacaacaacaacaaataacgttttcttctgtcaggatacaccaaccctccatgacccatttgagtgctttcctgaagtttcaggtgagtcaataaacacactaaggacaaaggaacacaccagcaagtgtacgtatttccttgtcatgctcctgtcacaccgcaggccacaggctgcagtctccatgctcatcagcagaacgagcagccaaacgggcatggtgcccactctgcactgtgacagaggcatggagaacaactacattgtcaattccaggtgagaaaagagggcagatatggagacaaaaaaatgttcttggaaactccactatttcaaaagaaagagttgaagactaggagtatgtatcaacactgtgaaccctatgtacactgtagcactctgtacagttagaaagccacgtttctcagggtgacaggggcagaactccacatcaggagtccccactgtaaggagcagctgagtgggacccaccacctcggggacctgcactggccaccactgcgccagccctcacacagcagtctgagctcctttttggggtcgtctttcctccagatgaagctcttggattgagtctgaccccatacacaaataaagtggggtccaaaagccctatccaggtttaacttcaagaatcttgctctaaagatcttcaatacaccatgggttcttaatgtctctcctccatcaaaacacataaaaagatgcttaaaagtgttggatttggattggtataatgtattctctaaattcacacagtgtccttgtaaaggagacaaaacgttttaaacatcagtactgcggtcacattcctgtaaccatgacaagcagtaaaaatctcacaccaagcaagtactctgtgggaagaggggagttctccaggctataaatagcccctctctccaaggacaaggggcacgcagacaccaaaggcgcctgggcagtgaatgccaacatgacacggcaccattcttcctattccaaggggtccccagtgagagaaacaacagtccacccaccaggacttggtgattaccataagtggaagcaagcaagtgcagcctccaagtgcagacacaccgaatggcttttcagctgacacaccgaatggcagttccggattaattcccacactgtccactccactcgtccacacccatctctgcacccttcagcagtgcagagcaggaggaatcacagtcaaacaaaacctcatggttgttttcctgacactcccgctttcacaatgcaagcaaacacacccccgagccactgatacagttgccagtgaatcacacactctgcctgcagacgcccattctgtttgtggaaacgtattcactgcacatttgcgcttagaactcaatctgggccaaaagttcccagtacagtcccactggcctccttgactaacaaacttcaaggcagctgcattgctaacgtcacaaaccctaagcacacttggaggcaggtaagaagaaacacaaataatcctgcatcggaataaacattccataaggtcacaaaaagaaaaggtgctctactatgctaaacagacactgacagagcctgggctaacaagagctgagaaaagtattagcccctcaagctgggcccaggtcaaccctaattgtaagggtcaggaaactgaagttaaggtggcactattccccaccactagtggtcacctggaaactccacacacggaagccagcatgacattgtgaaacaggtccaaccatgacactctccagcttagaacctgctggattttcccgcagcccaccaggccctggaggcccagccccacaggaagccaccctctataaacactgccggtttctggaactctgagtctcctgtcatgcactttcctcccccagcccccgcgccctcactgcttctttcttggtcagcctcccggggactcagctcctcttggataggagctctggctgtcggtcaccactgtggccgcagggcctggtgcagacgggataaacgatgaagaatgccacctgcgcgtctggacagcgtagaaccgcaatcagcttgcttcaaaatcagatgctacagcctggctttggggacgccttcctttctaaggcataagtgcgagcgttcgctgctgtgcgtggaactgcggccgggagggagtggcggcgtgaacgccggcggctgtagagacacaccggccgcggccccatcaccctgcaggggcctgcggccgccatcccggcctgcccccgaccagctgtgcgacctcgaacacgtcgtgagccggcttcccggctcgggatcgaacccgaggagtgctgtttggggtcgcagtgaggctaagggaggccgcaggtgccaagcgtcccgcctgccgggcgagggccaacccgaggccacgcgcgaggagcggccgcagcgactggacaaaacaaagacaaagacaaagacggctcttcccctgcccgcgccccagccgcgacggcagctcccgcggccgccaaacgggcgtgaccctcgaggagcctccgtcggggcgctgcctgcgaccgtgggcccaggccgcccgccgagcccagcgccctggccgaaaccccgaccccgaccccgacctggacccaccagccgccccgcccccttcgcggccccgcccgccccggcgccctcaccagctccgggaggctcctgcgcggcggccaccgggatgagcagcaggagcagcgcggcgccaccgaggcgcaacctccagtacggcgtcggcccgcgggccactccgggcgccatggtcggccggtcgctctatcagtcagtggagcgttacaactccgactccagcacaagcggtctccgcccggaacagccgcggcgccggaagtggacctgcgaggtggggccatgcgagtgcgcagcctcaaaaagcagctcgccccgctccctcgccatctgccccgcccctcgccaacgggctcgcctcccggcgcggctgaggttcagtgcgcctgcgcgatagaggaaaggagcctggtagcgaggagagcggctgaggctcagtgcgcctgcgcggcgcggatgggcgaggcgtgaccgaggggcgaggcgtgaccgaggggcgaggcgtgaccgaggggcgaggcgtgaccgaggggcgaggcgtgaccgaggggcgaggcgtgaccgaggggctcgccgcggctcctgcgcctgcgcggcggggaacggcgaccggctgaggggactaggggagcgcggtgcttcggtggcggaggtcacggtggcctccatcctaaagggctgcgggcgtcccggacggcggtcccaagcgctgctcacgctgctcttaagtgagccctggacgaggcgcggtgggccctcatagtccgcgccggcgccctcgctccacaccgcggcgtccggccctgggctcccgccgatgtccgcgtgggacttttaggggatttgtttatttttgtacgttaaccacactagaaacggccccagaatgggctgaaacgtgtgctgctgaagctgccacctaaactcccgagagaagcgccgtttctcctccatggcttctcgccgacgccctcgctgcggccttccgggcccctcggttgataaaaggactaaatagtgacggacatttttaaggctacttaagaaatggcaaaaatacatttagaggtgtgaacccgaacacactgcgcgctttaagccccgcgagagccggggccgcccgcttctgtgcgcccgtagctcctttctcgggtccgggattcgccggtgccggggacagaaacctcctgccttcttagttcatgacccttgtagatgaacttccctgttttctgcactgcttagaccagaagacgggaaaccgtgactgccgcacccttccctgaagcaggcactgcccgtcgtccatcaaacgcgaggactgcgcccacctcgtaggaaggacgccgcggtcctgctaaaagcctccgcctctgcctgcccgagggcacccttcccctccccgcttccgagggcggactccattcctctggagccggtgtttccgggtgggccagcctccaactgcctttgaataacccccccttacattagattctgaccctgtggtgattttaggttgggatttgggcgcctgcagatggctccgaagccagcctcttgtgatccgagccacttctctggcactcggagcgctggcacccgcggagcggccttggttcaccggaccgcctgggaacctggccggggtctctggcagcctcccagggctgaggttcagactctgttccgcctacccaggtccacacctgatagggctggagttgaggcttggttttaaggcaagagtttcgtttgttatttctccaaagagtcagctgtttgcaggtgtgtggttaacactatccttcgaggttaaggttttgttcgtcttgctaaagtttgcaaccttttttgtccttcagatttggagaaggggaaagcagtttctctttgaaaagaagcagcgaatcgtggcttaagcaaaatttgtaatccttaaaactggccaggctctggagctgagttcaatttgacatgtctaaactttcttcttgagtaaccagattttcccttacagtcttttgtcacttaagagaactcataggcaatcgtccatccaaaacaagtctttctccttcagggaggacccatctttggaaactccagctggtttcctgtgcagtgcttatggtgccacctctcgttatatttagaaaaatggtctcacgtaacttgagaaaaaacatttcagtgaccaaagccgggtaccattggaacaccaaggtaatttacttgtttgctcaattggaaaacgctggctctaggataaaacggaatctttgggagagttattttttatggtagttggaagcatccaaaagaagttctaataaaggtatttatgagagaaaaacaaaaattatctaaaataatttctgaatttaaaaaagactactgaaatttctccccctcctccctcagctccttctctttatcctttgttgtctgaattacctcgcccagacccacctttcttcctcctcctcctcctgttttggggcca

SEQ ID NO: 69542 - DNA, 1291 bp, Homo sapiens
ccttgctaatgctccgcctttggggcatacaaattataaccttccattctattatttgtataatacatgaaagtggtggagatgctttaggggttcctaaaacactgttatatgtaaaaattgttatttagaaacagaatgcttgttcccaagtgctgcaaagacacagcactcgaacataaatttaattctctcagcaaggccatttttactttctgcagaaggggtgctcatcacagatggaacaatggcgagagcacacctgaacaaaggagggaagccattttcatccctgccgctgtttggccctgctactgtgtcctgtctccattggctggagccagacctcacaatctaaactaaaacccgattggctaacagtttaaaacttttctaaataggtaaaagtaatggaaagacaaaggaaaagaggaagttgcttaataccaaatagggaaggggcataggctgcgagctggaatgtgcctgtgggcaggtccagcacaaatatcctggttaaggttcaaggacatagaatgtactacgtgcccgtgagcaagtgtaacagctacacaggctagagcttaacgagcagttattagcacgaagccaggaggcttgaaggaagttagtttttaaaagaaactattatttttaacacttatgatttactctttaacaagaagggaaactttgaagaggaactttttgctttctacaaacacaaagatcgaaacagacaatcattgccacagttccctaaaatataatccaggaaaaccattataaggacatttccctttacccgaggcccttgtgagttatgaccattagatgccatgctgttgccaccctcagaaacatacaaacatgttctgataacaatttacttgttttctcactgggcagaggcatttccatgcagaagagcactgccttagcagtgagtaaaattgctgtagaaaaaggtattgcaacctggggagttcctctggaacttgtagcaatagaggaactcacttcgctggacggatgattcaatcagtatgtaaactttggcccatcctccagcatttccattgcgcttaccacacccagtcatctgggttagtgaaatgcaccaatggaataatcaaaactcagttggcaaaattaaccaaggcttttcaaattccttggtcagaagttcttctactggttctgcttaatcagaggtcgacccctttaggtaaacaccagttatctctgctaaaaattaggcagacccatgaaattatctccaagaaactgt

SEQ ID NO: 69543 - DNA, 459 bp, Homo sapiens
gtagagctggagaggaggtgtagatggctggaggggaggtgtagatggctggagggagggcagacaggtacccgctttcctgctttgcctctgccctggccaggctccgccgcaggcacctctttggtggggccaccaccgtttacggaaatgcacctaggatttgggacagggcctcagagcggggctctgtatagaccagcaggtgaggaaggaaaagggaaaacagaacctgccccatggtctgaagccagctgtgtgcctgtgtggcaaaggtcagcgggcaggacagggcccacgtgtgcctggccaccttgccagtcgggggaatacagcggacacagtgcccagtttccatggacagcctgtattgaagttttattttttttctatacacgtgattgattaacaatataattaatgggatgtcattttataccctgacaagtttaaatgtaa

SEQ ID NO: 69544 - DNA, 1760 bp, Homo sapiens
gggcccctgcagaggcacacaacacaggcacacacacacatgcagacgtgtacacacaccacacatgcacgtgtacgtgcatacagatgtgtgcctgactgcatgtacacaccacgtgcatgcacacaccacacatatacatgcatcacaccacacatatgtacacacagagatgtatacaccccttacccacaccatactccccgcaagacactacacaccacacacaaatatacacatgcacacgtacacacacatacacaccacacagacacacacaccacacgcacacaccatacacacgtgcaaatgtacacgcacacaaacaccagaaccccacacacccggtgtgtgcactctgccccagtgtgccccaggtcctccgtgagcagagcctgtgcttggaggagagctgggcttggccctgtctctctgtggcagaaacatagccaggaagagaaagctggctggatgcccgcgggtgccaggctgtgtgccaggaagagaaagctggcttgatgcccgcgggtgccaagctgtgtgctaggcctgcccaggagccctgcagtccctgccaggtgggaaaaaaagtcacctgacttgcccaagccaccagttgccggggtcctgcccttttgtttccagatacacacccaccccgtccttaacccacgcatccacagccaggggcggctcagtggtcactcacaggccctcggccccagaggcaaaatgacggaagcaggcctcagcctggtgctggaggccggcagcacctcctagcgggcagcagggccgttccacccctgggttcccttccctccatccgggaggtgcccaaaccaggcctaggtcggctccttggggggtcttagggcttcctaggtggggtgggcccctgggtctgacctcccaggacctgagaacattatagctggctgggacccttttatctggcaccaagaaggtggagaggtactgagaaggggtacccaggagccttcctgtcatggtgggcaggaagacatttccgttaccctggggctgttgtcagaagcaaagatcaacacacctcctccagcaaatgccagttcctgtcacggcctcccaggctgctggggcgttcctgccccacacccttccctcgggtggtgctggcagggccacccaaggttcagtgggcagacccaagccagcagagccccaaactagggcctgccggctttgaagacagcgctgggtgctgtgctgtggcccgggaggctcgggtgccctcagccacaggccctggctcccctccatcccccgaaagccctgcacctgtgctgggggctctgaggccaacggaacacccaccaggggcccatctgaggatcccacagcttagacgccccaacaagccccaaggtcctgttgttttggcagtgacctcattccctggttcccagcaaaattataatcagaatacaaaaatgtcaaaagggaacccttgatccttcccgtcctggggtcaaaaacagaacctgcaccctgctgtaacttcctggaggaggtggttttggttcacattgggcccaccctgtgtctgaaagcccccatatctctgatcgttgggggttgtggttcaggccgaggccagttccagctctccatctgggccccctcaaagtcctgcgcctggactgacctcggtgccacgagtgcccaccagcccctcagctgatcggaggccctgtgcgtgctggagctaccccagggtg

SEQ ID NO: 69545 - DNA, 1365 bp, Homo sapiens
aactgagggccccagcagcagcaagatatggacctggtgcccagttaccccgggcactcccacctgcccacagggagagggggtgcaccttgattccagcaggattggctcagagaccacggcaccccaaccttgaccacaggaagggggctggtggggagccaccttctccccactgttgctcctccatgagcagccctggggggcttggagctgggggcacaagagaagccaggccctgccccaccccccaatgccagtggctgagcccagacaaacagctggggatgaaggtccgctccaggaggtaaggcagtgcactgagcctggcagccagcctcccttctgtgggagaacagggcagggcagcccctctgcccagcagccaggatggcccacggaggtccagggcctcacctgaggcctgagagaccaagaccccatcaggcctatctgcctcagtttcctccatgtgcctggaggtggtcgaagggcctgtgccagctccctgggggatgggaatgggtaaggcacagatgtagggcagcattcgggcaaacaggtgcctggccactgtcacctctggtgccctgaggctaagccggcagagctgcagggcaggaggggaggaagagcacagacaccccccaccccagcccctgagctggccccagagctctggcctggagcctgatcaccctgaggccctccctgctgccccacactgggggcaggtgccctcctcattctccaaggccctccctgctgccccacaccaggggcgggtgccctcctcatcctccagctctggacatcccccatctaagggcgggcgggtccccttaccaagacctaaggtgcaaaacccaaagctgaggctgcttaggaatccacagccccacaggcctctcagaaccttgcatcagagtcgcccttgacctcaaccctgcccgagaaggaagtgctggtgcaaccccagcccagctgcaggaagtggtacctgtcaccaagtcccctgcacaggggaagcagggggctgagggggcaggaccagggggacgaggtcatccttccccggagaacccctcaggggccgggcgcccttccctcccgggcaccaaatggacacagctaacaagaaccacacttcacggtgagcaaagctctgaacattcaggctctgagacacgaaagcggcgtcagaagagacctgcagcagatccgggccaaatcacacacaccctttcacagaagtcgaggacaggagaacaggagcaaacacaggaaaggaagaggccagcctggtggctgacgcctgcaatcccagtgttttgagaggccaaggcaggagaatcacttgaggcc

SEQ ID NO: 69546 - DNA, 1257 bp, Homo sapiens
ctgcgcgcagaggctgcggcaggtcccagccaggtgccctggaacgtggctcctccttccctgaggcgctcccctgggcacgaggatgggtctcgaagcaggaggaagccgccttccctcacccgctgtccggagctgctcagccggtgcgcggagcctcccccgccgcggacaccacgatccgacccccaccctgaccccgacccagacccccaccgcccgaccccggccgtattccgttgcgtttgctccctgccagctccggggccaccactgagcacgcgctgtgagtaggcgcttcctggagcttttcctgggggtcctcagaaaaacccctgccgtccccattatagagatggggaaactgaggctcaggaaggccagagcttgcccaaaacctgcggtccgcggcgggcagggattccacgctccgagcctggccgcctccctggggcgcgtgaagggagctttccttccccgggaaaggccggggccagagacccgcactcggaccaggcgggggctgcggggccagagtgggctggggagggctgggagggcgtctggggccggctcctccaggctgggggccgccagctccgggaaggcagtcctggcctgcggatggggccgcgcgtggggcccggcggggcggcctcgggaggcgtccaggctgcgggagcgggaggagcggccgtgcgggcgccagcgccgtgggtggaggtcgccgtccctcctgaggggcagccggtgcatttgggacccgggagcagagcccgcgcctccccagcggcctccccgggggtctcaccgggtctcccgagagcggaggccccggctccgcagaaacccggggcggccgcggggaagcagcgccctcaggcgtcggaggagcccccagaaggacctcgcgcctccccgccgggctccgaccgcctgggttcggtgcgggacggcccaggccgccaggacccccaagcgcagctcagtctgcggggcacgacccagaggccagcagcagaggacggggccggggccgggagagggcggggagggcgctcctgggaggtcaaggccagggctaggctttcagggtcatggcctggcccctcatccccagggaggtgagggggctctgtgagcagaggggccccggtggagaaggcgctgctagccaggggcggggcaggagcccaggtggggacttaggggtggctgaagggaccctcaggctgcagggatagggagggaagctag

SEQ ID NO: 69547 - DNA, 1913 bp, Homo sapiens
gcctgttccatagtttgttctcgatgtgtcagctttgtgttcccatgagaacaatgggctccttgaggacaggcattgcatcgtacctgtggtctcttccctaacgccccccagtacgcccagcatagacagcacagggtgcaagcagtcagatgagcagggctcccgttcccagcacgggacccagcccgttacctcgctgctatgtttcccacgtaaacggagcaatacccaattctaaagaactgttctgaggactaaatggaatagtgtaaaaaataaattgacatgaagtgaaggtcaattaaaatgcactagcttggccaggcgcagtgtggctcatgcctgtaatcccagcgctttgggaggccgaggagggaggatcgctggagcccaggagtttaagaccagccagacaacacagcaagatcccggctctagcaaaacattaataaaaattagccgggcgtggcggtgcccaccggtggtcccaccttctcgagaggctgaggcgggaggatcgctcgagtcctggacgtcgaggctgcaatgagccgatttcgcgccattgcgctccagcctgggcgacagcgcgagactccttctcaaatatagaattttaaaaaggccatctcgactgccgcgggggtcgcgtcctctccatccccgaccttggacgcaaccccgggcttgggtcccccacgatctagacagaaactcgttgtttctcgtgctccgcgccacccgcgtcctccggtctgtttctcccaggtgcgtcggtgaaaggcggagcgccgccaccctacacccgcgaccctgcgcccgcccgagccgcttccgggtacttccggcggccgcggggctcccggcagccgcggctcctgtttccgccgggcggcgagaacgcaggaccagcttccgggaggcgctccgcacgtttgccgtgctccgccgggaagatggggaaagtgagggggttgcgcgcccgagtgcaccaggctgccgtgaggccgaaaggggaggccgcccccggccccgcgccccctgccccggaggcgacccctccgccggcctcggccgcggggaaggtgagctggggaggcgctggccgggggctgccgcgtgggtccgagggcgggtgagctgcggggcgccgcctccgggagggttccgcgaccccggccttccctcgggctctgcgggcatttgctgcgctacagacgcgaccttcttgcttcgcgaagcgtcgtaaactccgaggctccgctctgcgctgccgtcctgggcacacggactcgcgccgctcccggggaggggagagagccaggaacctcccgctgcggtccagggttgccacgcggaccccagaggttcctgaatcgcactgagctccccggaaaggaaaggacgttcccagagttagagaagaacggagagcaaactgaagagagaccccgttccctttagcagtcggctggcctgtttctccatccccctcagccctaagcaagcacgaatctaccttttgtctttattctagacactgcatgtgagtggaattattgctttcaggatttttttttttttttggcttttgccttaaatattttgaccgatgtgtcttggtgtaggtatctgcatttattttgcgtgttcactgagcttcttgcgtgtgtaggttaatgtttttcgttacattggcaagtcttcagccattatttccttgaatatttttttctgcccctttctgtcactcctctctttcggatacttccattataaatatgtacgtcgtgcttaatggtgtcccacagtgctctgaggcgctgttcactcagtttttctcttttcttcagatggcataatctatcttaattcaagtttactgatgttctgccagcccagaggtgctt

SEQ ID NO: 69548 - DNA, 669 bp, Homo sapiens
gcctactcttagacgccgggcacagggcacccaccgccgccattgctgctccggcagccactcctgccgcttctgcctgcgccttccggctgtgtacgacctgctgctgctgtcagtggaacacgtctgcgtctgcaggcgtgttggactgggtgacgaggccaccaggctgtggtgcaaggacatcccaagctcctgcacccagcccttgggcagggctggctctcccggtcagcacagagcgctgcccaggtgattgtacctgcttagaccccactccacccccaggcacctgcggtggagggacctgcggtggagggcgcgaccttggcttcctggccgtccctctgccctggtgatctggccagcagagggcagcagagctgtgtccttgtcaggtcagcccaggtgtgggacagtcccgggatagagacgcaggctctccctcctgccttgcacagcggagacttgggaagtcccagctcctcatcagacagtacagactctggggttacagggttgtcttcagggattttttttttttttaagataactggaaaatggcagaaaatgagccttgccccaccctgcctgtgtctctgggcttgagtcccaggtgcctgcctgaaaacagaatgagctcattttctgctattttccagtatctca

SEQ ID NO: 69549 - DNA, 737 bp, Homo sapiens
ggcaggcccctgccccacccttggctgctggcatcacagcgcccctcccccgccccctgctgagagctggggtggtgggttctgggcccttagtgcatgagtggccaagccagcgggcctgggcctgggcctggaccccagtggggcccctccacccccctgccctgggcaaggcctggtcccgagcatgagccctcctcctgacgcactgaggtgctccctccagaaccccatcacccagtgacacaaccccgccacccagtgacgcaacccccagtgacacaaccctgccacccggtgacgcaacccccagtgacacaacccccagtgacgcaaccccgccacccaatgaagataccaccacccggtgacgcaaccccaccacccattgagccatttgccagtggcaggttccatgtgccctgacaatgtggacagtgttccatgtgccagcctgctgtggtgtgtgcaccccaggacggctcaaccaggagggcagcggctgcatgaccctccctgtcacctcgcaggggatgcagcctgctgataagctgctgcctgtggcgcccgtctcccaggagcttggctttcaggctctttgtgcctgggtcacatgcacgtgaaaggagagcagcctctgcccttcccctgtggctggaaggcaccacccaggtgtgggtgctgaggctctgggctcaggcgggggctgtgtagccacagcccagctttcagggctg

SEQ ID NO: 69550 - DNA, 1264 bp, Homo sapiens
ctgggccgcgacctggttctcccggagtctacagtgaggatgacgggcggggagagggggccggcgggacccgcgtgtcccaggcaactccgggagagggagaagcaggggtggctcggcgggggctcggcgggggctcggcgggggctcggcgggggctcggcgggggctcggcgggggctcggcgggggcagcgcccgctgcagggaggagcgcgggggcccgggagcctgggcagcaccgcgagacgccacctccgcaaaacgcaaacgccaatcgccgggcgcctgcggtcccagctaccagggaggctgaggcggcaggatcgcgtgagctcggaggtccaccgcgctccagtctgggcgacagtgagaccccgtccccaaaacgaaggcgggcagagtctcctcagccgcgctcgggcgggcggcgccgcgacgccaggccggtcccgcgctctcgccccacgctccggagccgcccagccgcggtctctcagctccggccgcgctccagccccaacggccccgcgcccgtccgccgcaggtggtcgtgagggaggtgccacagctccggctgcccacgacagacacgggcgccccagcgcgcgcacgtccggcgtcgctgcgccgcccccgccccctcggcgtgcgcgcgcccggcgggccggcgggggcggggagggggcggagccgccggcggcggggctgaggcgctgaggcggccgtggcggcggcggcggcggcggcggcagcggcggccaagcggccaggttggcggccggggctccgggccgcgcgaggccacggccacgccgcgccgctgcgcacaaccaacgaggcagagcgccgcccggcgcgagactgcggccgaagcgtggggcgcgcgtgcggaggaccaggcgcggcgcggctgcggctgaggtgagggcggcgcggggccgcggcggctcgggcgggcgcgggctccggaccccgcggtggcggcgtttatgtaagcgccgggcagggactggtggtggggccggagctgcgggccgtcccgggagcggagggcgcccgcggagaagcgagggtgccgcggcaccgcctcgcacccaccctcctgggtcgcccgtctgctccggcgctcggctcccggaggaagctgcgcccgggcggccccgcgtcccctcccgagggcgccgagtccgcgtgggatgcgccgcgctgcgccgcggggagggcaggtgcgccgggacgaggctgcgccctggggaccgaga

SEQ ID NO: 69551 - DNA, 1730 bp, Homo sapiens
ttcttggccccggctcccgccccgcccccatcccatccctcgggcccccgttcctgcccccatcccatcccacccctcctggccctagcccctgccccgcccccatcccatcccatcaccctggcccctgccccgcccccatcccatcccatcgccctgatccctgccccgcccccatcccatccctcctggcccctgccccctgcccctataccatcaccctggccccttactccgccacattccttgccccagaaccctgaccccatcccattcccctgacccctgccccctgaccccgctccatcccatccccctggcccctgccccataactccgctccattccatctccctggccccggaccaccctccatcccgtgggcctgcccctgaccccatcccatctccctggcccctgaccccgccccgcccccatcccatcctctgaccctgcccggtcctggaaccccagcgttggcaccgtggacgcgcgtttaccgtctgcgggaagccgcccccgacagaatatcggccgccgattgtccgggccagaactcctggccggaggcagaagccggaggccaggacactgcccccagcagcaggaagacgaagctgagtgtcgccatggccccgggcggccacgcacttccggcggccgcgccccgccccggaaccacgccccgcccccgtgaaatgcgttcccagtagccacggcaacgcccagctccgccctccccgcgcatgcgttatgcgccatcaccggcaagcaggggcgggagggggaactgcgcgtgcgcagagtctccgccctcctgaccgcagcggctagaggttccattgcagacccggaggccgtggctgtggttcgcggcggtgctgtcgcgggcgccctggcgcagcccacgcaggggctcctgagggtccgcgaggccgggaggtccgggggtcgggaggtcccggggtcgggaagtcggtggaccctgcaggccagtggggagggtacgcgagactgggggccgggagggctgacggctggtggcgcggggcgggtccgtggggaggaggcccggggctggtaggggcgggagggctggacggcgggggcggggcggaggagggggtccgtagacggggtcggcgccgggtgctctcgcccctctggagctggggtcggggcgggagccgcgcatgagagcctgggtttctagtcggggggcgccgtcgagctccacacctgcggcctcctgggtgcccccaaccctggagccccggcgagggggcacccgggctgaggcctggccctccaaggagccctggagggactgtgctgctagggcgcggggctcgatggggtgatctggagacctggggggatccggggctgccgcccctgcgctgccaacctcccaccccgccccttctgcgaggcgttattaaaggtctggtttcgggagccaggtgcgtgcccgccgccgccgctccccgcagcctccaggcagctcccgctgttccccgagggcaccagcactggccgaccgacctggcttggggcgcggcgctggcaaacccggccttctgaggggacgccacgctgactctagtgcaggcagcccccaaaacggtataattggacgaatttcttgaaggatgccagttaccaaaaaagaaaatactaatgcttattatctgttaaatttgagatcaatttgttatcaaattttctca

SEQ ID NO: 69552 - DNA, 1127 bp, Homo sapiens
agggtctatctctcacctgccccactcacgggctgcccgtgccctactctcgtcctcgcacagtgggacccaagatgcatttgggcacagcaggagggaatgtcctggtgtgtgaggaatggcagccggtgggagctccgtgaactgcctggccacaaacccgcactgggagcattgttgaaactgccctcaaaaccacagttgagagccgggtgggccctgggagtttacagtgtgctggggcagtggggagagcctctgataaacactggaggagattgcaaaatcgtgggtctgaaatgtggagccgaagttcagttgtaggctggggcctccggcggggccagagtacctggggcagtgcctggcaggctgggctgggcctggcgctctgttcttcctgagcccaggctgccatctgcagacaactgctgcctgcctgctgtctcgtgccgctggggggcagaaagggtcctgtggcaccgtgggcagggtggcggctgatcccctcttcccgcaagggacccttttcctgaagtccacggcactggtgccccccagcagccttggccctcctccagcttagccgcccctacatcgtgtttgacccctggagcctgtggatgggaccctgtctaagagggagtcttgtgggtgaggtgaggtcaggctcttgaggcaaggagagggtctggtctattggaggggggacctagatgacatctcaagggtccttaggagagagaagagaacagggcgcaatccagccaagggactccggggcttcccagagctggaggaggcaggaaggatccgcctggcagcccctggcgccccctggagggaggtggccccgtgacactttcctttcagactccggcctcggacctggagagcacatttctgatgctgaaagcaccaagctcatgacactttgttaccacagccccaggacacatgcagactctcaccttgacccaaaggagcgtattttattcaaatttcacaaaactgaggactaggggacattccagctgctcagagaaaagctcgtctgacttatctgtaggaagatgagttaccagtgatgagtcacggcttttaccatttccaaaaatacctgtttt

SEQ ID NO: 69553 - DNA, 636 bp, Homo sapiens
aggtcacagccccgaccccggcccagctccagggtgaggccgggcccctctggagccccactctggcctcctctcctgcccccacccccatcctgccccttcctgccctggccctgtgtctatctgctctgcaggccgtgctctgggagccttgaggccctgcgtccaccccctggcagttcttctaggctgggctccaggattggggcctgttacctggaggtggactggcctccctgctgtcaggcagggccattgggatgggcgtggtcacaactgctgcagacctgggtctgggaggacaagcgccttccttcccagcggcgaggttttccatgactcacttcagagccaggccaaggtcaaagggcaccggacgccggtccctcctcaggcagagggagacaggaagggacacccaggccccaagggggaagggctgctgcagtcgggacagggagcatgtgtgagcgtgagtgagggcgtgaggcctgtgtgcaggcagcaggtcaggtggacaggccggaggaatggccctgactccacagggaccccaccagacagctgattggcaatgccgagagatgctgtgctgctggtccttcctgcagggtcgtggaggagctcggccacttg

SEQ ID NO: 69554 - DNA, 3087 bp, Homo sapiens
cattgccacagtggacactgccacacaggcttgtgtgcttgcgcgtacccaggtcctcacctctctgggataaaccaggcacgtggcggccgccccattttccacccgccagcggtggaggagttgcccagccttgcaggaaaacagctctcatgccagcagcggagcatcctattcaagttttctcagggctgccagcacaaatgctgcatgccgggcggcttcctcagcagaccgttgtttctctgcgtcctggaggctggacgtcccaggtccccgtgtggcaggcccggttcctcccgcagcctctccttggcttgtgggcggcgtctcctccctgggtcctcgcagggccacccctccgtgtgtctgtgtcctccctccccttataaggaccccaggcagactggatcagggcctgccctaaggactgaattttaccttaatcacctctttaaaagctgtctccaaatacagtcaccttctggggtcctggctgttagggctttgatgcatggatttgggggacaccgctcagcccctaacagcccccatcctctgcctgcctttaccatggggctgagcccagccctgcaggagtcccctggtttgatgtctgctgtggccacggcgaccctcaggctgctccagccgcacttgtgcttgtctctgcctggccctggggcttcacctcctgagggggtggagagagagagacctgtccctcccagctctcctggccttgcccactgcagagcccagagggacatcctccaccgtgggcctgggctcaggtgtgctccgcgttctccggcccctcctccaggtgcgctgctcacagcacacgtctccacgtcctggcatcccgggcctccctgggctccgtggccccggagggtgcccctccctcagccagtactgtgggaagagcccggtccctctggggccagatgagcagggcagagtgagcaggtccccctttggtggagattcacgatctccaccccgcccagcagccatcccaggccgcagtctgctgactatccccagctcacacttctcaccagctgacacggtgatctggccgggcacctgcccagggtcccacccgcagaggaacccgcctcttccaggttggttccgggctcctggacggatcacgcgctgttgacatgcagttgtagcttttttcttgtgggtgggagcaatgctcttcccagctccacctggaattccaccagggatgggtgcagcatcctaaccccgccttcccttggagaattcactgctctggacagacgcctggcccaggatttcaaaggcgcatctgttatggaccgggcccccagaggagacgtctttttgccattttgttttctgaccggagggttttttggaggttgccctcccacccaccgggttgctggcagcccagcccgtgctgttttcagtggacccttttgcaaatgtcttcacaggctcccgggaagctgagctgaacagtgacctcagccttgagcaatcccgaggatgtgtttgctgaggaaatcattaaacagggagatgagagcactcaacccccaacatgccaggctctgcgggaggctgcttattcctgtggcctcgggccaggtgccccagcgtttgctgcccttggtagacacttgtctggcctgagccctcgggcaccatacaccgacatggttagggcagccagggtcagcccgggcccctgggagagctgagtggagggaccactggccaagcacagagggtgcagggtgcccaggaccaggcgtcacctgatggtcacctgggggaacctgctcactccgccctgctgccctgctcactgctcgggggcccagccaggccggggaccagggcctcagagtggaggggggtcagggcccagggcctcagggtggaggatggtcaggactcagggcctcagggtgggtggtcagggcccagggcctcagggtgaaggggggtcagggctcagggcctcagggtggaggatggtcaggactcagggcctcagggtggaggatggtcaggactcagggcctcagggtggaggcagtcaggactcagggcctgaggatggagggggtcaggcctcagggcactggacagctgactggcttcttcccaacccttttccttcttttcgcccaacataaccactgggaggtatccacagaagggggctcctcaaacactgcctggtgtcctctgtctcagccccaggggaaaggactcgcacggggcggagtgggaactttgggtgaaactgggcagggggtgctggccaaggcgggggagagggtggactcccatcaggtcaggagctccgaggtgaggcctctgctagggtggagggtctcaagatggggagggaggggttgtgggaaaggggaggggaggtggagccgctccaggagcctcacgggccttcgggatggagccgctgggcgttggcgagaggcttccgtccacggcacagccccgcacgggggcagaggacgggaagggacccagggcagccccgaaccacctcagacttttggaaaatgaactggaaagaaacaagacttcttttgaaaagaagaatgtccttttttattttgactttttgtcatcgatattttttgcgttactcctggttttaaaaagaattgcattaaaataccgcttttctgatgagtgagtttttggaacacccccctgctccctgctttaattttgccctggagaggagcacctcattctactctgggctgtgcatctttggaaggaatgctgagacccccggttcccactgtccccgtgggccataccccgtgagccagcgggaccagctccgaaggcagaaggtcaggccggggtcagcttcagccttggcgggggcagccgctcagcagagggtggcccagggaggccaggctggctaagggcagggccaggaccacccagaatgggaggcccacagcccaccaaggggttgccccgtgggaagacatggggaatgggtctggccctctcagcacgctgtggagtgtggcagagggcgggggtcgtgtc

SEQ ID NO: 69555 - DNA, 3049 bp, Homo sapiens
tcaaagatccacagttccaggcggtgggcagagtgccacggccggtgtggaaaatggtggctggcatccactccagtctaacgtttcgtacctgggacccggcagtcccaggcctcagtgtgtgttctgggtaggaagcacctactggtgttcacccaaagacatgagattgtttatagcatcattattcccaatacccctgaactggaaagaactcagatgaccactggcagtggggtgggggtggaacagccacgtaatagaacacggggtggcgatgaaaccagctcctgcaatgtgcagccacatggctgcatctcacaaccgggaagcacctgtcgggaggcgctgtccctcccagccttctgcaagcacaaggtgggcacctgggaggaaggatacccttcatgctgcggccgggggcctcgcccactctccacacccagccccggcccagccacagcctggcttgtgctgtgaccactgctccttctctcgctagactgggtgctcctgagcgtggacactgggcctctggtcatctgtgtgagctctgcgtggtgcctgacacacagtaggagcttggcgagtgtctgctgagtcaatgagaaaggagtgtagggccagaaacacgggccgacggctccctgccagtgagtcactctcggggcactgctgagtcataagttcctttcactttggatggatttttaattgtatgttctgaacagatggaaatttcttggctgttgggagtcaaactgtggatatttggtgagtgtatccaaaaggaagtggccgcagtatgagtcacccaggccatgtgaactttgatgggggaaacagaaccagcaacttctgctggttcacgaccaaaggaagcagtgccggagcgtgaacaatggggtgcaggcggccaagttctgagtggctgctgggagcgctttcccactgtctgcggagcccgtgacaccacagtgtccctcgaacatgcggggatggccggccaaatcacccagcctgctttcacgagcgaccgctgagctgtgttgcggcagtccctcccagggccgctgggccaggcccagctgcggggtagaggagaggatggggagaggggcctgagatggggcagggaagtctgtgagctcagcccgggacctggggccaagcaccaggaggccagggggagtctccaggggctggggctggagccgcatcagagaggaaaggggtgtttgaaaaaggggcagggcctgggacccaggaaactgttcttccagagacacccgtgaagctgagctttgcctctcagggaagctgtgaccccacgggtgctgcccagagagatcgggccaggtggagccaagatggactggaattccccgacggggacaaggggccggacgaggctgacttgccctgtctgatgaatggtcaggtttgctttttctcctgaaaacacgaggcagtgatcccggccagctaattccagcagactggagacgggatggtggagaatgaggctgtgggcgggaagagcagatgggactcgccagcatcctcacggcagggccgcgctattgccctccctcccctcctactctctggggtcccaggagccccagatacgcaatgctgccaggcgatttctggcgccccgcagacccctgcccctggagttgggccaggtcccggctggagcaaagggggctccttcaagcccgctcctccctgtcaaacccgaggagcctgacaggcgcagcgtcaccagcgtcaccgggccatagtgagcggccaagccagcgtcaccgggccatagtgagcggccaagccagcgtcaccgggccatagtgagccgccaagccagcgtcaccgggccatagtgagccgccaagccagtgtcaccgggccatagtgagcggccaagccttggtctgccagagccggccgcaccagaaggatttctgggtccccagtcctggaggagcacacggtttacaccaggccttgggaggggaagaggcaaggcgtgggcccagccctcactccccaggagaaaccctgtttgagcggcagaggagactggagagaccccagggcggggatccctgagaggagagaaacccggaattcatccacggaggcgttcacccagaggagacccggagcttctccaggagaggctggattgctccaacaggggccctgaggagctgatggcaagagcggaaggcagctctgactcgtgcgtctgactccaggtgtggccgttggggctacagtgggaccagcctgttgtcactgaacccacaaagtgcctccgagcgcgggtggagagagggggacctcccaccgtctgctggccttgaatcttgaatctaattcccgtctgtgctttgatgggagaggcactgggagcgggcggctttttcagttccttttatcttgaatggcctttgggggattttcacagattctgagttcaaagcccagggaggtgtgggaacgtgacattcctcaccgcattcctcaccgcattcctctgtaaaccaggcggtgttggcacccatgagcctgtgtcttctatgacatcaggagttttatccctcacgtcagaaatcagggttccaggcgccttggtttttcttggcgccagcggcttggctatagaagaaaaactgaaggggccaggtgcggtggctcacacctgtaatcccagcactttggaaggccaaggcgggtggatcacgaggtcaggggttcgagaccagccaacatggcaaaaccccgtttctactaaaaaaatacaaaaattagccgtgcatggtggcgggcacctgtagtcccagctacttgggaggctgaggcaggagaatcacttgaacccaggaggcagaggttgcagtgagccgagatcatgccactgcactccagcctgggtgacaagagcaagactccgtctcaagaaaaacaaaacaaaaacaacaacaacaacaaaaaagaatcactgaaggaagagtctctggggcaaggaggctacacaggg

SEQ ID NO: 69556 - DNA, 1658 bp, Homo sapiens
ctctattcaaatctccccccttcccgctgccccaccggactcaggggctggggtcgtagcccggcgggcagcggtgttcaccttccgcataaacctgggcttcctcgcggggcagcccccgggccctgtgctgggtcgcagcctcgggcggttccctcggggcgggacgtgtccccgtccgtcctcgcccgtccccgccgcccccgggtcccggcccgccccgtcctcgcagccgcaggtccgctgcggcgcccgcccccctctcccctccccgggccttgccctgctcgtcgctccgccccctgcccggcccctgcccggccccgccccgcgcccgccccctgcccgcgcccgccccgccccctgcccggcccctgcccggcccctgcccgccccctgcccggcctcccagcggcggcggctgcagcgcggcggtccgagcgggtgcaccgcggcggaggaggcagcatcccgcggcgctgacggtcctggggagagcatggcgccgaggtgaggccggggctgcgggcaggggttgggggacgccaagatgcggctgcgggggtcgcgggggtcgcggggctcggccgggtcctgcgggggtcgcgggggtcctgcggggtctgacccgtgcctgtcccgcgcaggtgcccctggccatggccgcggcggcggcgcctcctggacgtgctcgcgcccctggtcctgctgctcggggtccgcgcggcctccgcggagccaggtaagacccgggcgggacgggaaggttcgcgccggtgcccgccggcctcgccgccctggctggggtccccgcccggctccctcacccccgccccggccgctctgggttcagccccggccctgcccacgcgcgcaggaggcgccggagccggacggagcggggcggggtggccggagtcccgcccattcattctccccgcggggtccgggccgggaggggtgcgcggtgcgagcggccggagtccccgcgcggggaccgaacctccgcggccggcggggtcgtcggtgccgggagggctcggggcggggccgcggggtctcgggagacgcggcctctgtcgccgtcacggcctcgtccccgcagcgccgggtcccgggactgaccgcgggcggaaggcggcggagcgcggggcgtcgtctccgcgtttccaacctgttgaggctcctcgccgcgggccgggccttgtgcgcctctgtccccgccgccctcaggcctctgtccccgcgcccgccgtggtgtcgggttgcgcggtcccctttgatgccaaccgagcgccgcgcggtccgagaacaatgcccagaagccgctgccccgccggcctcgccgcttcccgtgcgcggcaaacggtgcgcggggcccgtggggaccttcctgcctccaaccccgggacccagttccccaccacctgctaaccggggcctcctgcctccagccagcccagcagaggcccgggggaggcggcggggacgcggaccccaggggagccccgcccaaagggcctgggtgccttgtcgcgggtggaatcccacccgggggtccacgcagccagcgcctgcctccgactcgactccacacctgcttgctacagcgggtgaggaagcaggaaagggggagggagggatgtcgtctggattcc

SEQ ID NO: 69557 - DNA, 808 bp, Homo sapiens
gtgatgggcagggcaggcaccagcaccaggctgggtggcggtttggctctcaccacgccggcttccagaaggccagcaggcttgcgagtgggcacacgctggtgctggggccgggcactggtggggggtcaagggctgaccctgcggggacccctgcagacagacactgggccagagccacagggaggaaggccagtgggaacggcaggaggagggagcgtgattggttacggtggcggaactcgcacccacccccgcagccgtttgttcgtttgctcatttatttttggtctgaagtccatgcttttgtatttccccaccgttccgttgagcagcttcaacatttgccgcagttaggcctctctggaatctgtgcttagagattgtgagacagggtcaagtttcagcagctcggactcctctgtctgcagagaacctgccagcacagctgctcctgggggcaggagaggcactgtctgttttggggtgacgtgagctgatgggaaagccaggctggacatagctcctgggccggcagcccatcttggtggcggcttcacgccgtctggcatctccggtcctggagcatgagggctcaggaagagcctctgattcggctgctctggaggcctcgtctggacacacctgggcaggcccgagtccacacaccctatggcctcaggaaccgagagagaccttccttccatgtttcaacttagacaacaggagactttgttttgggaggaatcactcaattcaggtggacgctgcagctgggcgggacatctggcctctccctgtggcaggg

SEQ ID NO: 69558 - DNA, 1008 bp, Homo sapiens
cacatgcagtccacacacacagatatccatgcatgcatgtatccatatccacacatccgtgtacacgcgcacacgtgtgcttctgcatacccacatgcaagtacagacgctcgctgaggtgagccgcagcatctccacacattgccctgtagatgcacttctgtgtgcgtgtcccaagaacaaggacattctcccacagagccacagtgtcattgtcacgcctgagaagtttacaatcattctgtccgtcctcctgtgaacaggtcgtcttcagatgcgctccataatgtcctttgccccactggcctgcgtatcttttgggcagtcccagagccgtcagggaccacgtgttgcattagtgtcctgctctgtagtctgttgactctggagcagccctgcccgcccccgctgccccaccgccttcttcctaacgtggcagtccagctgggtttctatgggggtgtctgacccgcagcctggactcacccacctgcctgctcgtgtttaggtgcaggctttgtggagagccatggcaggggactgtgtgtcctccccgtggcctcctgtcaggggcagaggtggcagctgtccctgggaagatgtctaaagtgtcttttccctgcggcgctttgatcctcttgctgctcctgcctcaggccccgctgcccggctcatgacccttcaccagtgatccatctcctgtgtctctggcggccttcccaagggtgggccctggggctgcggtggaggttgcaccaagcccgaggggagggcctggctcacatgggcttccagctgccgccggccaggtgcggggagaagaggcaggctgcccgctgagcgccaggctgtgcttggcattaatttaggagccaagaaggctcccaccactcgtgatcacccagtggaggattggggttgaagacctcaggctccccacctcatagtccccaggctctgccgagcggtcagagggacaccagagcctggggagggacacggctgagt

SEQ ID NO: 69559 - DNA, 3043 bp, Homo sapiens
tcacagcagcagcagtcagttttcaagcaaagagacttctctgggcatctctgagacgagtttgagcagtgtggggattcgttttgggagcacggcctcactgacatgcagatgtttgcttgtggaatgcctgcgcctgccctcgagaaggaggtggcactcagctgcttgaaacaaggctgggtcccaagcagcccagccctgccctgtggacagcaatcgaccgatggctacagcatgtcctgacctggggacagctggggacaggttgtggggctgtttcgtcacagctgctgtcacattaactgaccccagccctgggggagggtggctgcaaccccagccgcacagcctggaggaggcagggtgacgagggactccagctgggggagctggcgtgcagagcactgagggggtgggtggattgtggggtgaaacctgggtgtgtgcgtgtgaggatgcacatgtgtgaacgtgtgtgtgagtgagcacgcctgtgtaaactgcctggctccacctctgatgggctccgtgatcttgagcggggtcaccaggctcatgcctcagttttcttcatctgtgaaatgggccgatggccaggctgcacacaggtcctcagagggcataaggcacactcagcacccactgctgtgcctgggcagctggcgggggggcacagcagccactcacatgccactcacatccctgtgggttaccggctgcctggaatgttccagtctaaccggatccttttgtggacggggagactgaggccgggaaggagtatgcattcctgccctggtcccgggctccgtctctgctgggtctcctgggcagaaggtcaggaagggctgagagggacacagtccaaggcaggtaaagccccagctttgaggggaggcacagcagctctgagagggtctgagcccctcgagaccctccccgggatgtttaacgacttgggcagccattgcaacagtggaattggcactgcagcaagctgagcattttttcggttccaagtttcccacaacacaatggctccaggccaggcgcctctgggcgttccaggtcagagggggagcaggggctgggggccgctgcctcagtgcttctgggatggggtcctggcttggagccccaatccagagactcagcagccctgccccggcagagcctagcggagcacgttgggaaccctgtggacactgcacacagcaccctctgtcctcacggagcctggggctgctgcagggccgtgggaaagaagttataaatccttgggtgctggaacccccgggtgctgggcaccttgattccaaggctggtgccttctttccttctgcaagagtggggggtggaagacagccggccagaggctgggaagcctgcacaggggagggcaggagggcgtgagcctggctagccccacctccaggcacagaggccctcccgccgcccgcagctccagccgcactgccccgatggctccctacccctgtggctgccacatcctgctgctgctcttctgctgcctggcggctgcccgggccaacctgctgaacctgaactggctttggttcaataatgaggacaccagccatgcagctaccacgatccctgagccccaggggcccctgcctgtgcagcccacagcagataccaccacacacgtgaccccccggaatggttccacagagccagcgacagcccctggcagccctgagccaccctcagagctgctggaagatggccaggacacccccacttctgccgagagcccggacgcgccagaggagaacattgccggtgtcggagccgagatcctgaacgtggccaaaggcatccggagcttcgtccagctgtggaatgacactgtccccactgagagcttggccagggcggaaaccctggtcctggagactcctgtgggcccccttgccctcgctgggccttccagcaccccccaggagaatgggaccactctctggcccagccgtggcattcctagctctccgggcgcccacacaaccgaggctggcaccttgcctgcacccaccccatcgcctccctccctgggcaggccctgggcaccactcacggggccctcagtgccaccaccatcttcaggtagagcttctctctcctccttgctgggcggggcccctccctggggaagcctgcaggacccagacagccaaggactctcgcccgccgcagccgctcccagccagcagctccaacgccctgacgtccgcctgcgcacgccacttctgcaccccctggtgatgggctccctgggcaagcacgcggccccctccgccttctcctctgggctcccgggcgcactgtctcaggtcgcagtcaccactttaaccagggacagcggtgcttgggtctcccacgtggctaactctgtggggccgggtcttgctaataactctgccctgctcggggctgaccccgaggcccccgccggtcgctgcctgcccctgccaccctccctgccagtctgcggccacctgggcatctcacgcttctggctgcccaaccacctccaccacgagagcggcgagcaggtgcgggccggggcacgggcgtgggggggcctgctgcagacgcactgccaccccttcctcgcctggttcttctgcctgctgctggtccccccatgcggcagcgtcccgccgcccgccccgccaccctgctgccagttctgcgaggccctgcaggatgcgtgttggagccgcctgggcgggggccggctgcccgtcgcctgtgcctcgctcccgacccaggaggatgggtactgtgtgctcattgggccggctgcaggtaactggccggccccgatctccccaccctttcctttttgccttgccaggtaagtgtgggcggggctgacgtgagcctggtacaggttccccccacatcgaatctctacgttcaggggcccgtggccctcgggaggtgggagagctgggagtgaggcctcctgtgtggggaggaggccggcgtctggacaggaagagggctggatgaa

SEQ ID NO: 69560 - DNA, 2503 bp, Homo sapiens
ggctcctcttgggttagccccaactcctgccggacccctatgttgggctggacactcccagccctgggtgaggggcaggaggaggagggggagcccagcctgacccctcgggcagacttcgaggccccgaaagtgggggtgctgggctgtgatccgggcaccagaacagagccctcgaggcccacagaggtccctggctgcatctccagggatcagggagtatgtgcccctgaggggaggggagctggaggggtcctgctgcctcctgcccggctccatctccagcgccccctccacctcgtcctgggcactgccctgtgtgtccaccccgccggcccacctcgaggagagtgtgggggacagtgcagccgtgctggggcgtggggggcgctcaaagggagggtgaaccctgtggtcagcacacaagcagggaccctgtggagggttttgctgtgttgtgggcttgtccctcaggtccacgaggaagggagtgaggccccctcacacgggagggccggggtggggtagggaggctcccttgctgcagctgccaagagtgagcgagcggggcttgggcttgggctgcccgggacactgcctccaggaagccccctgggctgtctcagtgggactctgtgagtgacacatggagctcaggtcacaagggctgtgggagtgtcaccccacaacagcaacgggtgcctggccctctggactttgctctctacacccctcctgagctctcacaaaccctggcccctgggaccggaggcaggtgatgtttccaaggagtcctacaggcaagcatcctctgacctgggagctgcgtattgttcccgtttacaggtgagaaactgaggcctaggaaggacagacacgtgtgcgtgccgcaagtgtggctagcaaggagggagcctggaggagggcccagcagcctggccccagagcgctcttcagcatcgcagcagatgcaggacaagcaagctcccagccggggagcaccaggagaccagcaggcatccaccctcgtggtgcaggccatctgatgagggcagggaccagtgccgggatggatagtgcctgtgcacagagtggggcgcaactgggcacagctgccaccggggtgctcgggaggcaggtccacacacacgccggccaagtcgctcatctcaaatgcacgagtcccgtgatcttggaaagtggtgcacaggcccctgggctggggcttcctctgcctccacccccatcactggacattcggaggtcagtgggaggccacgggagtgcacgtgaaggtcatgtcaccatgatggccccgaggggctgctccttcatcgctcctccctaccccatgggccagccactggcacacaggtgtccttatatggtgcttacctcttgctcctttagtcaaatgcagaatttgagaaaatgtcccttctccttaaaatgctttgatttgtttgatgtttccatgtaactttggtttaagaagggagaagaccactctgggaaataactcatgcttatctctcaccgcttggcaacctacaaatattttttcgatgatgctggctaagcttctcgtaaattctccatgcctcttagatgcaccaagagtgactcagcatttaactcctactggagtgtcaagggcccagtgcattgggtgcagttgtctgtgggtacaagatcttgtgtgattctgaactaagcacagacagaatgaaaagcacagcactccaaacagggcttcctgcaggtccttttacgtatatttgggtttttgtatatatctaaggtcaagctagtggacatctatcacttcaaccagttaccgttgtgagtgtggtgagaaaacttaagatctactcaagtttgaagtgccatatgcgatacagtattctagctgtaatcaccatgtgtacattagacctctagaacttacttttcctgcataactgaaactttgtacccttcgaccaacagtcacatttcctcttctctgtgggctggcctcggctgtgccctgttagcattcccagataaacaaaagctaagggggttaattgccactagaccttccctgcaggaaatggtccagtagtccaacaggcgaaatgaaaggacactactcagtaacagtaagtcaaggaggcccccgttgcctatgcacagagtggggtggcagctgtgccccattgcaccccactctgtgcatgggcaccgtccatccggcaccagtccctaccccttatcagatggcctgcaccattagggtggacacctgctggtctcctggtgcccccctgcagggctcttccttgtcctgcatctgctgcaatgctgaagagcagtctggagccaggctgctgggcccccctcgaggcttccttgctagccacatctgtggcacacacgcatatttgtccttcctagacctcagcccctgacaaccaccattctactctgctcctatgaatgtgacttttttagatcccac

SEQ ID NO: 69561 - DNA, 1904 bp, Homo sapiens
cagcttccggctccccgccttcgtcggccagtggacacacttagccctcagtgtggcaggtggctttgtggccctctacgtggactgtgaggagttccagagaatgccgcttgctcggtcctcacggggcctggagctggagcctggcgccgggctcttcgtggctcaggcggggggagcggaccctgacaagttccaggtaacccccactgtgccgtcgctgggggactggagcagctgggatggggtggggtgggggtggccactgggacagggacggagctgtggccggaagaggagagcccccaccccagctgtggtcagcccgggcctccagcgcaggcctcctgggttcttggctgctcagccctggcctccggcgcaggcctcccgggttcttggccggcctggctggggtggcattcactttcttggctctctggctcctgcgcccccaggaagggtagccctgggcttccatggtttctctgagaccccgaggcccagcccaggagggccctctttgaacgactttgtaactagacatccaccccagccgtgaccccgtgacccagagacacccccaggcctgtgccaagccctgtggtgaagtggggctcccggcctctgaccggccggtcgggtaagtggggaccgagtccaggcccagccacacgcctcgtggccccatgcagaatgaaagctggggtccttgttgaaaacgatgaacgatccaaagctggcggcagcagggtgttgatcccagcagggttctcctgtggtagctgcacacccgctgggaccaggggctcagggcggccctgcaggtcagcacctttaacaaagggtgcagcaacccacgcctgtgagactccactttggagcacgtggtgggagtcccccagcggtgaacgcacgtggccgcctccacctgagtctccgggaagtccctccagtgggccttcatttcttggggttgggggggtggacagatccctaaacccatgtggggtctgtgtccaaagcccctgcatttctgggaacctttggctgggaacagccacgtgggtgacctcagctggcactgtctcacaagtccctgaattctagcattcaagctggcctgcagctggacgcccctgccctggcgggccgcaggggacagaaggttaattattgcccagacaagggctgtttgtttgaagttgttctaagtcctggtgtctgggggttctgaaagctgacttttcacctttggcaggaacttttaaccctcagagctcaggagccgctaggacgttgacaccaaactgggcctctttgttttcctcttgatcacaaacatgattaccgggaaagaagtcagagtcaccccctccagtgagaggcaatttgttgtgtgagtccccagccgtttcttggtggaataaagtggcccacaagtgccgtacatctttaacactgttaggaaaagcggctgagtgccgagagctcggtacgtgggtgcacagctgtgccccgatggtgctagggagagccgggccaccgccctgcggtgagggcctcctcatcagcgaagtcccgtgtgtaggaagagggggtctgggtgtttaattttgcatttcttggactgtgaagatagactttcattttgtcacttgtttattgtctgtttgtatttcttcctttgtgactgaccggtttatgttctttgtggttttcaatgggcccaactctcagtgatttatacaaactccttatctttaaaagaaacttctctttggttttgcatgctgcagattttatttctaccatgtcatttgcctttttaccttgtctttttttttttttttttttttgactattgggattggatgtgtggtttttttgtgggtttttttttt

SEQ ID NO: 69562 - DNA, 3003 bp, Homo sapiens
tggaatctcgctctgttgctcaggctggagtgcaatggggtgatctcggctcactgcaacctctgcctcccaggttcatgcgattcttctgcctcagcctcccaagtagctgggattacaggcacctgccaccatgcctagctaatttttgtatttttagtagagacggggtttcaccatattggtcaggctggtctcgaactcccgacctcaggtgatccacccgcctaagcctctcaaagtgctgggattacaggcgtgagccactgcacccagctgggatttgatgtgtttatgtggttaaatctggcctggagaagacaccatgacttacaacagcccagtgaaaccttggaaggtcagagagctggaacaggagggagctagagggccctgggtctggccctgggctggggccctgctgggcgtgggtggcgtgcagcaggccgtgtgctgctgggcgtgggtggcgcgctacaggcttcgtgctgctgggcctgggtggcgtgctacgggcttgtgctgctgggtgtgggtggcgcgctacgggccttgtgctgctgggcctgggtggcgcgctacgggccgtgtgctgctgggcctgggtggcgcactacgggccttgtgctgctgggcgtgggtggcgtgcagcaggccgtgtgctgctgggcgtgggtggcgcgctatgggccgtgtgctgagggctgtgttggttgatctctgtgtcaggtccctgcaggcctcaggtgtcaggaactttctctttgggtcttagatgagattccagctggggagaggagaagcatgcttgtgtggtagaaaagaagacagacttgttcagcacaagattttctcagacttctgaattgagatacttgggaaagaaacattcaagttgtgtgactcataatttttggcagaaacaagcacagagctttgggagcagggaggaaaccgaggcttcctcctcctcagcctctccacaagactgcatcgaccctggcgctgccacagatggtgcctgggacccccggccgcagctgggtccaacagagccctccggagcattggttgtgttcctcgtcctaagagtccttgggcgttgttggtcttttcaggttcactttcttgagtcaggtttgtcagtggtcgtctcccgggaaatcatgcacccctcccagctgctgccgttgccttgaacgtcatttccagctgtgtcctgatttccagctgtgtcctgatttccagctgtgtcctgatttccagggcgctgaggctgcagcgtgtcgggaagcattttacatgctcttccctcacagaattcctgtgagctctgtttcaggtgtctccggatttcataactttcagtccgaagtcccttaaatatttacaatgggcctgtggcttttgcactagcgcctcctgccccacccccggagccagcggccaccacgggctcagagcttctctgccctctgtagtcgccccccacccaggcaccctgtagccccgtgcaggaggcgtcggcccctcgggggcactctcaggagagcgctgtggccacctgtgggggggtcagggcctcacgggcctctctggacagtgcatgtctgtgtggggatcgggtgtcaggaatgcccagtccctccccgacaccaagaccacccaagatgcaccccccgcccgggctgccccagtggagaagcgcagttttttttttttgttttttttttgagacggagtctcgctctgtcgcccaggctggagtgcagtggcacgattgcggctcactgcaagctctgcctcccgggttcacgccattctcctgcctcagcctcccaagtagctgggactacaggcgcccgccaccaggccaggctgattttttgtattattagtagagacggggtttccccatggtctcaatctcctgaccttgtgatccacccgcctcggccttccaaagtgctgggattacaggcgtgagccactgcgcccggccgaagcgcagttttctagaattcaaccccagctcctccctgggcctgacctgggggctcctgaatgtgaaggctcagctgctgggctgctgccccacccccacgcagtaggtcctggtggacagtggaccctggaccccacggtgctgcccctggccgacctgggggcactgtaggcaacgccctcccccgcagtgtgacgctgagagccgctggtgcgctctgtgaggctgagaaccgctggtgcgttttgtgggaaacctgtgggaaacccagggggcccacagggtccacacccccccacgcatgagctcacacgcgtgcatacgtgatctcatgtttgcacacatgtgtccatgcagatgcatgctctcacgcacatgtgcccacacactcagcactcacaccccgtcctgcaggctcagccccactcctgagccacctgcctgggctttgggggcccagccggcatggggagccccaggctccagctggcctcgcttggctctgaaatctaggccaggatgcagaacccgcagtgcggccagtggagcccctggtactgtgcgcagcccccacctggcagccccttttcctgtcaaagcccctcccagcgtcctctccccaccaggcaagctacccgcttgaggcttaggacgttgcgccctcctgtgtccttgcccagcatccccggcctgcatctcaccaggcaccgccggccgcgccagggcccgagagggcagggtcaggcaccctggcactcagcccaggactgaagatgccagagggagcggtgggtaggtgggtgagtgagtgagattgggtccggacggaatgggcgcagagatccaggaaactcccctacatctgcggcgtttctgtccttggcttctgggttttgtttttgatgaaaaggtgaagttcaaagaaagcaaagccatggtgccacctcggttggtccgagtcgggagatgaggccgcctggtgcttgcgtaaagctccc

SEQ ID NO: 69563 - DNA, 847 bp, Homo sapiens
agtgggttagtggatgggtgggtggatggatgggtagaaatattttcgttttcctaagtgttgcgtccagctgctgtcggcccctccttgagtagaggtcatgattccttaattggctcaggagtgaggcctgatgtggagcagtgtcaggggctccacagcggcctgtctcctcacagggttcagcccagtctgctctcactcatttgctgattcattctttcattcagccagtcaatagtcatggcccctcctgtgtgccgggtggccatggatattgccctgggtaacacacagcctggccctgtggagcagacagtggggacagccatgtggacagggtgcaggtggatggcaatggcagctgggtcaggaggggctgagggccgtggggaaaggtgcagaatcaataggggcatccggactggggtgcaggcctgggggctgggatttctagggtggaggtcacctctgagggagacagagcaaggccctgggagattagaaggtcgaaggtcgccgtgttgaggtcaggggccctgaattggagccgcggcaaaggagagggcaggtcagggcacgtggtgagtgattgctgcggcttctgagcacggctgggtctgtggggcctgagcagaggtgacccgcgatccggcgccacggcaggcaggactccccacccttgctgctgcctacacccccagggcagccccagagtcgggggcgcagctccctgcttgccagttcagagcccagcccctctcacccagcccagaggaggacacagatggaggaggggcacccggagggtccccccgccgacaggccccacgtctcccacctgcag

SEQ ID NO: 69564 - DNA, 1031 bp, Homo sapiens
acctcagatattttgaaactgaagaaggcagcaggctggaaaagacaacagatgcagaaaaaagagcccatggaagcagctctctctggcctaagacccagggaagggtcagcccaacatgaggaaagacctttcgacaggaatcgccctgctccccgcaaacaccagacctcggctccacccaccatgtcagcaaggaccccccaccctcgccagcctgtaacaaggacccccgagtcccctgcggggtggtgtcagacaacaccagtgggcactagagctttcactcccactggttggtaaagacacccaccctcacccccaaggagtcagcagagaccacagggaagcccaagatgtcacccccaaagcctcatggagtcagtggagaccatgtggggagcctagtcacccccgaagcctcacggagtcagcagagaccatatggggagcctggcctcttatcctcacccagtagtaagagcgtgcctgtcctgtccccctccatgctggggggtgtcagaggaggtcaagcgggagtccagactttcacctacccagcaataatgagaatgtcccaaccccaggggcatcaagggggccacgaggggagctggactcccatccttgcctggcaacaagaaggagcccccacccagccacccaccctccctcaggtgtcacaaaggctgagtgagagcctggacttccaccccacctgcctgtagcgaggtgcacaccccgcttgacctgcaggagttgcgtcagccacaacaggatgctgaaattacatcatacccaaaatgcttgcatctcactaaaaaatcccttggcacactaaaccacaaagatctcaaactgaaaaacaattaatagacaccaacactaagacaacacagacagtagaattcgccaagaaagatcttaaagcagccaccataaaaatgcttcagtgaacaataacaaacatgctggaaacaaatgaaaaaacacagtctcagcaaagaaataggagaaataaaaaaaattta

SEQ ID NO: 69565 - DNA, 1282 bp, Homo sapiens
tggaggctcatcaccctgagtgttcacgcctgggccttggaggctcacctgccctgagtgttcacacctgggcctcggaggctcacccaccctaagcgttcacccctgggccttggagactcacccgccctgagtgttcacacctgggtcgggggtgttgtacccagagggctctgtggcacagggccacgtggcctgccagcgtggacaggccctaatgacactcttgggctgaagaatgcatttcgatgagtgagcaacagccatcctcacctaacaggcatttgtgagccgaaggggatgcctgctattgcccgggccttaccctgagctctggagtcactgaagctgaacagactccgcaccctcagaggatcaggactaaccctgacagtcctcctgcccagtgagacctgggccccaggtggacaaagcccttgtcccacccgccaagggcatctgtctagctgcaggctggggcagtcctgaggagcctggaaggacctctcacaccacgcccaccatggctgattccagctcactcggagacccggccttggctgggaccctcaggagttaaatgtgtgttttccagctcttctcagaagcagcagaggcccgcgagaggtgggaaaggggagggcacccgcagaggcctgcgcactgacactgctgagtggctctgctcagctctccttcctgaagaggacaaaggtcacgtggcctccagccagggctcaaggacaccaagttccggcagccacaggcagagagcggagacaaggacagctccgccgtggcgagcagaggctcagctgctcccactgaggcccagggcctgacggaggctcccgcccacaacaactgagccccgctagggtctctctcacttcctgctctcgctggcctggtgtgtcccactggaagccccaggcccgcaccctgtgcccccagcccacagtgggctccacatcaggcgggcaccaggaggcctcaacaatgtccccacaagtagcttccatccccgaggacgcaggcctgaaatgggctcacctgcttgcggaccgggaggcccaggccccgcacgtccgagacaatgaaagtgatgatggtcttgacgatggtggcaaagaacgtgttgaccccgaagaccagggcacagagctctttagacagagaagatgcaatctgaaagctgaacgggaagagcgggcagatcaggcgctgctgggagaataagcagcagccacagggaaaagcctgcagcccggctcccaccagc

SEQ ID NO: 69566 - DNA, 679 bp, Homo sapiens
ctggccgggtctggccaccgcggggcctctgagtggaaccacgcacagggggcgtcctcttgtgcctggccaggggcactcagcatcgtgtctccaggtccctgcacggggcagcggcgtggaaacttcctttcaggccggcgatccttcctgtgtgcgtctccacattttgatttttcatttatggatggacatttggacatctccttccgcttggctgtggtgactaaagctgctgtgctatcatttttactattattgttatgacaagttgacaagtgaatctttctcttacggtttcggtttttcccatcttatttgcttttaactgtccagattcattgagtcccagcagcgggccctgttcccggcttcagtggcgaggcccctcgccttctccccagaagcagcccctttgacgacatcggtactttcggtccattccctgggtcgatgtttccagaaccccgcgcccaggagcacgtccaggttatgcgtggggccgccctgtgcgcgcgcctggaggcctcgggtttccccgacgcaacgcggggagtggccaccagggggcgagcggcgcccggagcctccgcgggtcccagcccagcagcctcgcgacgcagggggcggtgcagggggcggcgggggcggcgcagggggcggtgcagggggcggcggg

SEQ ID NO: 69567 - DNA, 1192 bp, Homo sapiens
cctgaagcccctggcaaccactcatgtttttattgtcactatagttttgccatttgcagaatgttttgtaagaaactgccacagttttgtaagaaactgccaaactaccttcccaagtggttgcatcactttgcaaactaaaatctctctaaccgtgagatctattagtcatgctccttggtatttactcaaaggatttgaaaacttcagcctacacaacaacctgcacacagatgtttatagcagctttgtttatcattgccaacacttggaagcaaccaagacatcctttagtaggcaaatgaatacaccagtggtgcatccagacagtggaatatgattcagcactacaaagaaatgagctgtcaaaccatgaagtgatgcggaggaaccttgaatgcgtgttacttagtgaaagaggccagcctgaaaaggctgcatgctatacgattccaactatatgacattctggaaaagacaaaactataaaaatagtataaagatcagtggttgccaagagttgggcggagagatggatgtgtaggtggatcacagagtacttttactacagggaaaatactccgggtgatgctgtaatggtggatgcgtgtcattacacatttgcccaaaccacagagtacagcaccgagcgtgagccctgctgtgaactctggacctggggggtggtgatgtgcccacatgggtttggttgtgactcatgtactgctctggtggcgggctgtgggggatgggccgtgggggatgggggtatataggaaatctctgtgttttgtgctcagtttgctgctctaaaaaataaaacctaaacaaagcagtcggagtccctgaagactgtcctgtgacagagcaggaagggctcccttagctctgagggaaagcgctggttatgtatttgctcttctcccaagaacacacagtctaattttgatcctctttacagacgggatgaagggcatgttcatcaagtaagcggatgcaggtgcagagaccacacctggcacgacactgccgttgggcaccccaaggccgaggccggcagccactgttgtccccagagtccatctggtttctagagtggaaaatggaaaggggtcaaaccgcccacgcagccctgaagtccttgatggtagtgtagattctacagtcttccccaggtgctatcttggctgag

SEQ ID NO: 69568 - DNA, 1801 bp, Homo sapiens
atgcgctggctgcccgggagccttcagggtgggctctgggggccaggtgcggcctcagcgccgtcccttcccgggaagcctcctccctggggtccacgccggctcctgctggctcccccattccgctgaaatctgaggaaaaggctctgggaacgcagccagactcccccacagctcagacggctgtaaagaaatattcctgccagatgttcagaggcggaggccagcatgaggtaacgggaaaggcttaacccgtccagccccgcagcctcgcagccgcctccggggcccagctctaggggctgcgggccccgtgccgtgggggacgtccctgccgcgtccgtgtcccgggggccgggcctgcctgcggcgggagcccaccccgtgcggtcagacgggctcagagcgctcttctgcagtctccagccctccctggagggcgtgttggaccagcccctgatgggcgcccgggagccacgggatggggcgtgatgccagcctgggagagggatccactcgggggtcctcaggaggcggtgccagcccccggcatggcttgggggagcctctgtgttgccagcgctgggcagccctggaccccccgccaccctttgcctcacgggccctgggtttcagggcagtggcctctcaacccagcgagatcacagcgccatcgagacagtctttcagtctttttttttttttttttttttttttgcgtctctttgaaatgacagttcccagaaccagagcttctatggcggattctcaccagaaaatgaaattctcagcttacaggcaacggaacaaaatgaaatcaggccaatgcacgcggccccgggaagcaccagggggcctcagcgagctcctgagtttcacactcagtgcgggggtttccgcctcagcccctcttagcgggagtcactaaaggaaacgcagagagggcgggaacgcaaccccagcaccctgcggctcccgccacggggtcgcgccctccctctgatatccagagcctgcggctcccagaggcgctcccggaacaaaccggggcgcgcagagctttcttcgccgctgtctgggggccgcaggactgtcccagggcccgtgattgacggaccagtccccggcattgagccttgtgtctttccagttacaggcgatgctgccggaaacgtgtgttttcctatctaggagtcagtctgtcgcagaccgattcctggatcgccgaggtcgcccactctccccagaagcctgctccctcccgacccgaccggtgggaggccgcgtccccgacgcttgccaggagccccgcctgcagccgaggcgtcctccccgcgccgcgggctcctgtggcaacggccgcctcccggctggcctcttttctgccttctgccttcccgttggcgactggggaggcccgtggtcaacgaggccccagcgatcacctgggggacgtcctgtagggagagcctgactcacaaggaccagtgttgagccgtcgcacccccgcttgggaccaggatgggctgcactttccccacccgcggccctgggacccgccccacccgaagcccggggagatccaaccgcaggctgcctccggccagcggactcattcacactccgcaaacaggctggggccagacgccgccctgccctaggtgcccagcaaacacgcgggccagccagacccctggaccttcacagggaggaggagatggagatgggttcaccccccacaaaggagggaggggaggggatggccgccatgcccaggtgccgggacaggagccgagggccg

SEQ ID NO: 69569 - DNA, 487 bp, Homo sapiens
acacagcatatataacaactatattgtgagcaactttgtcttcccacggtacaaactgaaatatctttggcaaatacgtatccgactatactgtgaagaaatattgacgtgaaaaaagaacgcggagatctgataaagcaacaattcagctcacggcgaggtcctctgcaggaggcggttggtgggaagaggcgagtgagcctgcccgtgcgtcccgcatggagacgtctggattggaaactaccgaaagatgtttcaaggaactctccctgggtgacacgctggttttcagacgtttgattcagctgctgcagtttcctcctccctgacacgggaactgaactgcaggccgcggcgagccagccagggaaaccgccttctccctgggctcggagctgctgccggttctggagggagagaccccagcaaggaggtggtgactcatgggccgctcctccccgccccgccccgcccctcccctcccgcc

SEQ ID NO: 69570 - DNA, 1826 bp, Homo sapiens
ggatgggttagtgggtggctgggtggatagatggatgggtgattgggcgaatgggcgaatgggtggatgggtgggcgtggagttggtgggtacatgataatggggtggaatacccatggattggaatgagctgttttggctgctatttctgggacacccagctctgccaggcccctacccctctggtgggccaggctctgacggtggccactcatggcctttctagctctggtgccagcatagggaaggaggaggcacagccttgtcttactccttgcacctgttagcccccccccccgccaagggaggacccgtggttggggacagcacagggggccctgctgtgtgcagggactgtccctggggccactgaagcccacctgttcttgttccttctcaggcggatcctggtccccctggtgagccaggccctcgggggccaagaggagtcccaggacccgaggtaggttggtggccagtccccatgccctccccccaacctgccaggccaacacacacccaagcctcgtggttctgcccacggtggacccacgtatcagtgggcagtggcctgggagagactcagccacccagccttggccccagagtctcagcctcatccttccttccccagggtgagcccggcccccctggagaccccggtctcacggtaggtgtcacatggggcagaaccagtgtccttctcctgccaaaactagacaccaagagcagcaggggtgggggaaggtcagctggcacggtcagagagcaagatcagtggaggaggtcagagggcaaggtcagagagcaagcttggttggggaaggtcacagggcaaggttggtggggggaggagggtggcagcgaggttggtagggacaggacccgccagcctccccgcatggctgcctccacacgtgggctggaatgtcccgggacccccaggccaggaccttgctgtggaaactcttctggggccccggggggactaccctgcctgccgtgtgcattgcaggagtgtgacgtcatgacctacgtgagggagacctgcgggtgctgcggtgaggcactgcccacggcagggtcggggcccatgcaccgggtggagggcgggagtgcagcagggctgggtcatcgctgggtcctgcatgtgcacgtgaccctagggtctgaggtctccccggtaccccccgatgaccctgccacccccccagactgtgagaagcgctgtggcgccctggacgtggtcttcgtcatcgacagctccgagagcattgggtacaccaacttcacactggagaagaacttcgtcatcaacgtggtcaacaggctgggtgccatcgctaaggaccccaagtccgagacaggtcagcggggcaggggcgggtgcagcattgcggggggccgggcggggcgtgggaggcgatgagatgggagaagtccagacgcgtccctccaacgagggcctctgcatggctggggatgccccagaccccgaggcctctggcaacgacctcacgcgtgcggcttgcagggacgcgtgtgggcgtggtgcagtacagccacgagggcacctttgaggccatccagctggacgacgaacgtatcgactccctgtcgagcttcaaggaggctgtcaagaacctcgagtggattgcgggcggcacctggacaccctcagccctcaagtttgcctacgaccgcctcatcaaggagagccggcgccagaagacacgtgtgtttgcggtggtcatcacggacgggcgccacgaccctcgggacgatgacctcaacttgcgggcgctgtgcgaccgcgacgtcacagt

SEQ ID NO: 69571 - DNA, 1199 bp, Homo sapiens
aggatgagctcacccgagtcacactggaccagggctcagcctattccgggatgagctcacccgagtcacactggaccagggctcagcctattccgggatgagctcacccgagtcacactggaccagggctcagcctattccgggatgagctcacccgagtcacactgggccagggctcagcctattctaggatgagctcacccaaatcacactggaccaaggctcagcctgctctagaatacctcacctaagtcacactggaccagggctcagcctgctctaaggtgagctcacccgagacactgggccagagatcagcctactctgggatgagctcatccgagtcacactgggccagggctcagcctattccaggatgagctcacccgagtcacactggaccagggctcagcctattctaggatgagctcaccagagtcacagtggaccaaggctcagcctgctctaggatgacctcactggagtcacactggaccaggactcagcctattccaagataacctcacccaagtcacactggaccaagctcaccctgctccaggatgatctcacctgagctcactgcatctgcaaggaccccatttccaaacaaggtcacatccagaggtctggggcttagggttaggggttggggttggggttgggggtcaggggtcaggggtcaggggtcaggagtcagggtcagatttagggtcaggtttagggtcagggtcaggtttagggtcagggtcaggtttagggtcagggtcagggtcagggtgagggtgagggtcaggtttagggtcagggtgagggtgagggtgagggtgagggtgagggtcaggtttagggtgagggtgagggtgagggtgagggtcaggtttagggtgagggtcaggtttagggtcagggtcagggtcagggtcaggtttagggtcagggtgagggtgagggtgagggtgagggtgagggtcaggtttagggtcagggtcagggtgagggtcaggtttagggtgagggtcagggtcagggtcagggtcagggtcaggagtcaacatgtgaaactggggaaatgcagttcactctggataccctgaaactttgttgtcctttgaaaagactcactcttttcttcatactccaccgctctgtcatctgaccacacagcctgcagctccaggggagtacgtcagttattt

SEQ ID NO: 69572 - DNA, 4216 bp, Homo sapiens
gggggatacagaaggagccaataacccacaccaatgagacgggagcagagtgaggggggcgggggggcacgctcacctggcacgtccagctcctctgccagcctctggccaaaggcctgggcgcagagcacacactcatccacgctgacgcccctcacggggatgaaggggcagacgtctagggcccccatgcgggggtgctctcctgcagagagacggcgaggccgggcaggaggccaggtgtgggagcgggtgggagctccacggggttctcggaccctctgtcctctccggcctgggcagcccccagtccacacacccagcaagctgctcacactgacccacagggaggaggccggccctgggcgctcccagccctgccccagcggcagcaccagccctcccgggacaacggaagttcccgcaccgtcctcccagccagtgtgggggaggtccttcagcccaggagcagcagcacctgagcgggtggtctggcatctctgggataaacctgtccctctcctaacactcacaaaaataactttgaaaggggtgcaaagctcagctctcaggcagccccggccaggccaagagggggcgctcgaggctgggttccggccaccccaaccccctcccctgaagccgagaatccactctgcgtttccagagcattcttctcactagctgagtccctcgctgtggctacaccaagccgtgggtcggcgcccaccccaggggacgccagcctcccccgcctttgccgccaccgcccagggctggccacttagagataagcttctcatccatccacccctcaggatcactgtggatccctggcctctcatgagcggcccacagcccagcccctggccagcgcccgtgtgtccacacacctttggccctgcctgcccaccgaggtgtttggcttgtgggctgttgacaggtcagcttccaggcagcccttcccccaccagtgcctgctccaagactggctctcagcccccttgacgagtgggcaggtggacggggcccacaaaccttccccggcgtggccccctccccccacccagccgtgaaggtggcccggtgctgtgggagcgtggcgacctgggggtcccccagagcacagccctgcaggcaggatgggggccatgacccccacactccagggtcctcctaggagagccagagccagccccactggaccccacgttccaagcctgggccccgggcctaccccctctcccaggacaccaggacagggctcggccctgacattctgagacacggcagccacaggagagcccagagacctcaccttggtgcctgctcatgtcgataagtcgggaagctacccgggcagcgttgagggccccctccaccacgcactccggcggccccacgaaggtgtacacggtgcggttggtggaagggcctgcgtccacatccagcagcacgcagcccggggtctgtgtgatggctccagagatggcgtcgatcacctgggacacaggcccggcccccacacctcagtctccccgtttgaaagaaggaaaaggagcttggaggtggctgcaccccgagacacaaatgggggctgaggaggcgggccaagcctttgggggctctccgacaagctgagctcccaccgaaagtgcccgcacacagcggccgcccgggaaccctcacagcagccacagtcactccagcccaagcacagtccccacaaggggctgcaggtggtgcctccaggagagactcacgggctctgctccgacagacagatgccagagacgtggccggggatccaagaaggtgaccacaggcgcaggtcacagaggggccgggacccccacccccgagcaggggagggacagatcaccagcatgggggaggggcctgaagggcctagaaccttccgggtggcaggactgctgggagcaggggctcagccccaaatcttgccctgtcccagggccttggtgctggctggaatcccggcatgacgaggcctccctgcacccctgcgggtgacccctgtggcctggtgctgcgctctgggaggccttccaggtggcccttagggcctgcgtttgttcccggaggagcctggacctcagggctgtggaaggcgagaggccggacctgggggcctgctgccccctctgtgcctacttcgttttgggtccagtgaggatggtggctgcagggtgggggctcagcaagctaactccagtggagatggagaggcggcagtggggaccatgctgggccacctcgtgtggcctcacacagccctttcagtcagtggcaggagccccattttcaggggggagcaccaaggccctttgaggcccagagatctgcccaaccccccaccgaaagcacccgaaaggcccctgaagccacagccaagcctcagcccccacaagcaccagtcgtgttccacccacccctgggtcaggcactccccagggccctgagccacgggatgtccttggggcccacgggcagcggctctgcccatcctgggaagacgacccgggacaccaagcccaccacctcctccatggcctgggccttagccactcaagctgccccatcagccctagatgcttgaccagctcctcgggcctcacctcctggttcttcccctccgaaaagttggggacgcattccaccagctgggacatggccagcaccttgatccagatgctcctctctgggcagatggaaggacagggccagtgctccgcagccgccgccagggcctttatacgctcaccggcagcacctccccaccggcttctcattaaccagcaaggcacaaggagcagtggggccaaggtccctgtgcagccgcggagtggggtgctgcagagccaccccgggtgctgttgacccagaggggatggctccactcagccagagtgtgggttcccggaaaagaagcacatgccagggtgaaggggcatgtgccgaggacccccaggagcatcaggccagcctggctggaatcctgtcgtgacgaggcctccctgtgccactgcgggtgaccctcgtgaccctgtgctgccttctgggaggccttccaggcagcccgtggggcctgcgtttgttcctggaggagcctggacccctggggctgtggagggcgagaggccagcatgaggccctggctcgcagcacccaactgaggtcagctcagctcagacaggagagtgcaggggagcacgcgtgtgagagtgagtgaggatacacgtgagggcagggcaggggaacacgtgagagtgcagatacacgtgagcacaaggcaggggagcacatgtgtgagagcgtggatacatgtgagcacaggacaggggaacacgtgtgagagtgagcgaggatacatgtgagtgtggggtaggggagcacacgtgtgagagtgcaggtacacgtgagcatggggcaggggaagcaagcatgtgagagtgagtgcagatacatgtgagcgcagggcaggggaacacgcgtgtgagagtgcagatacacacgagacgggcatgtgcgatatgggggaaggcagctgagaccccagctctccccagctgctgctcccctgactacaggctccccacgaagtcagcggcaccagggccgtgctcagaagggagaactcctgtctccacgttcagccgctgcccacttgcagtgcttttatcattttctcttttttttttttttgagacaaagtctcactctgtcagccaggctggagtgcagcggcacaatcatggcttcctgcagccttggtccccaggctcaagaggtcctttcaccttagcctcctgagcatctgggccacaggcacacaccactacactggctaacttttccatttttggtagacatggtgatatggtttggctgtgtccccacctaaatctcatcttgaattgtagagcccatagttcccacgtcatgggagggacccggtgggaggtcactgaatcacgggggcggctttttccggtgctgtttttgtgatagtgaatggtctcacgagatccgatggttttataaagggcagttcccctgcacacaccctcttgtaagacgtgactttgctcctctttcaccttccaccatgattgtggaactgttgagtccattaaactgctttttctttaaaaattacccagtcttgcgtatgtctttatcagacaaatacaca

SEQ ID NO: 69573 - DNA, 1125 bp, Homo sapiens
tttacatcatagtgaacaaagaaaacctaatatgatgccagggaaaagatttcaggatgttcaaaatctgttcctgataaaaataatctgaattcaaaaatctttcatgactgatttttaatcacactgaggcaaatatccccctcagacagaggctgcaccggtacagctgccatctcctcttggtggtgtcctttgtcaagagcatgtcagggtgatgagtcatctgggacaggtcaccctcccagcaccgagaagccgacgggggaggaacagactcctctgcattgtgatccaattgtgaacaaaaagtcctcttcgtggaacaggaaaaatacactccctctaaacaatggattgaacacagatgtgatttctaaagaagactgaaggcagggatactgacactgaagtcctgcctgtgtaataacaccgaagagggcagggaatcgctgcgtcctgtgacttgaaggccactgtgaaggaaaacaatgcagtgaaagaaagttcctcctatgtggacattgtatcacgtttatttatcttcctggatatgcttatggcctttaaaacatattaaaataggctatgctattatctcttaaaatatctgttttccctcaggtaactggagacgcaccctgctactcctcacgtcactcttgttccctaaaccaggctgggcctcccactcgccccacaggcaggtgacgtatgacagccagaaaccccaaatctgcagttctccccaggatgaaacgaaacacagtgtgacaggcttctgataagggaatcaatgtctgtttattaaggcagatgctcataaaagtgactttcagtaacattttcagtataaaaatggatttacatttcatttctggaaaaccgttttgtacagtctgaccatggctaggagtcccagggacagcagcctctgctcagggcagactctgtgattcactgtctgtcctgctgctaccccacgtgggggagaacacgtgggctgagaaaaaaaaacagcatgtgcaaacctgacagatgtcaagggtcccaacacagttccttcagcgaaaataaagcccagttttaagatgtgcagggaagtgttgacactgaacaggcagc

SEQ ID NO: 69574 - DNA, 1188 bp, Homo sapiens
atgctccatgagcaacccccgcactgggctattcacggatgcacactacctgccattgtcacagggttgccctcgtgtccctcagcccagcagacaaaaggtgcaggagaagcctgcccagggccgaccccagcccagagcccactcgacactaaggaatcacacaggcacagctgctcctctcccaagaactcagctattggtcagaaaaaacctcctagcctcactaccttgaggccgtgcccagaggtggcagaaggcgctgtgcctcctcaggggtcacggctcctgtgcccccttcctcacccaagcccgacaagctactttcagaaatgaacctacagtaaaaatcaagagtctaagccacccaccctgtccccatccctgcctccagcctggcccccagattcacatctatgagatagaggttgaggggttggagcccaagacagggttatgggagggctccccaacccggccaggaccccttggcctcactggaacgcacagacggcacccagcaggtaggcatgttctcaggggtggccagcaagggctctctcagggtacagctgggagaagcggccgagggcccagatggggaagatgttcctgtagctcgtgtaggagatggcacaggacttgttgaagaccccagcaatgttttcctaaaagaacacagagaaataaacacaaaggcttcaccagtcagctgagggctagtccctgaactggagccctggctgttggcttggctggcttgtgggtgagtcagcctggaaagggctaattaagcaagagcataggaaagcaagtagtccatcccgcatcagtcatggcaccatcagcccagctcagactccccgccctgcagcaaaccctaagccagggtcaccagcccctcacaaccacatcagcttccaccaactcagcctcatcccaggggagggcggttggcctcacatgacctcatgacacccacaccacagggacttctggctcagtgaggggccactaggtcatctggagtgggagggtctgtcctgcagcaaaaaggcttcccgcccactggcttctcccatccagctcctcccccacccagagcatcacttgaaacaacagcaagatctggactttaggacccgaccacctgccacagacctgccaccaactgtggcattcactggc

SEQ ID NO: 69575 - DNA, 4013 bp, Homo sapiens
gaacgctgtctcaaaaaaaaaaaaaaaatacaaaaaaactccaactcacagccagcccacaggaagggtcccagccagctaagcccagagccaaagcagcaagaacaaacaacacagtaatccccactgaccaagcaccactgcatgcctgacactgtgcacatgaccaaacctgattccaatcctgtcacaggtcaggctacagaggcaaagtggggctgacccatctcctgaccaactctatgtcattgccttaccacgagccctgagaacagtctaaacaggccctgatggggccaagggaagaagagcaccttgacttcccctaaggacaggccctcaaatcccaggacagaaaaactcaatgctgtacagtccaggtggcagcagggctagaagtcaaagcagagatggggatcccagtgctcctcctgctagtctggttacctggaataaatgtgcctcagctttctaatgtatctcattaggcttattctaaggactaaaagaagaacaggccttgagcagggcttggcctacagtaaacaccatggaactgtttttaacgttaaaggccaactcttcccaaactaacatataagcctattgcaacttcatttcaagtctgggacaaaatcaggataaaggcaatttggatgagtaaatgaatagacacaggtaagagatgttttaaaaagaaaggcaacaaaggtatataaggactttctatctattacaaagtcagcgtagtaaaagaaaatgatgtatcagtaagagttatcacagaaacaaaacctatttatgtaggaattcacgtcattgaaacaatgtgattacaagtcactagggaaaaaagtcctattgcataaattcataggagggaatttcccattttacaaggctgaggatttctgtagagaaacactcccaggatgcaaaatagtcttgtgtagccaaatcagttcaatacccaggcagtccaactgctatgctcctcctactcaccagcctgaacctgaagctctcctgcaatagccccgaggaagttcacagcagatatcagctccccacccaccactctgcccacctacagccccttggcataggctgggccttccacctggaatgtccatcccatcctgtactgagacttcaaagcccaccttcctcctccctcaaggcaacacagagccctagagaaccacttgcttctcttatcagagagcctgtcaccctacactggcaaggctagctgatcccctagaccaatagcaggacgactctgacatagggcagagtttgccagcccttttcttgtgagcccctggattttcacctgcttcatcaaaaccctagaccaggctgggccaggatcccaagggtgatccagggtggccataccatcaggctggggcagcatactcctacctggcaggaggaaaagtgggccaccataatcacccgtccagtgcccatcctcagcctgcagccccacgtaaaatgtcatcccgttcagagccccctcaaaggcggtgtgggctttgggcaagtccttaaagtaattcttctgcaaagagatcgaaaaaaaaaaaaagagatagctgacgggactgttgcccggccagaggaaccctcttcacatacagcccaagtcaaaacagtgaatgtaaattactttaaaagtttcagctgtttccatcaaaagtctgaaactctttgatgagagcatcacacctcagcaaagtaaaagaacagctgcacattttcgttgctttatttgccagtcatgtattcttcacaacttctccaagatgtctggaataaaccaggcacccagactgtagggtggggcacgggtgccgacctgggcctgggactcgggcctctcaaagagggcccaaggggcggcacagcctttccctcggtggccggggctcggcaggagaccctgtttacactgcagactctgacgaccaaaatctcttacaatgcacacaactaagacagtggatccaaacactttttgtgaataaaaacaaagttacaactatctttgcaactctcctataagtcaaaaattatctcaaaataaggtgctaaaaaataaaacattaggagtctcctatgcgtggtttagagatgaaggggctgaagcggaggggcccgcgaacgcagttcccgtgggcgctcgccttggggatgggcgtcgctggccgggtcctcccacccgcctttctgagagaaaacgtgctcctcacggctcacccctcagggtcccgagctcgctgacgctccgcggaagcaacttacggtgtccagccccagggcgtaggcttccaggccggtctgctcgcggccggcgcgctcgtcctgcaggtaggtccacgtctgccggcccctctcgcagttgagtcgccagcggccgaggtcggtggcgggctcggtcttgtaggggccccctcggcgccgcagacacctgaggaccaccggccatcagcgacccaggccccgccccaacgccggccgccggcccactgccccagtcgcgctctcctcagcacctaggaccaccccgcattcgtcaggagcccggggcgaggggactcacgtgccctccgtcattgctgctgcagtgctctacgccgcccactgccagctgccagatgtccgcacccgggacctgccgcccagccccgcccctcccgcccctcccgcccctcccgcccctcccgcgcgcactacgcaggcgcaggcctcggcaggcgctcaggcttaggtgggccgacgcccacgcaaccaatcagagcgccgcgagcgtgaccccggggtgtgccaggcgaccacagtggtggagcgcttggtgccccatgcggcgtggggcggggcctgagggagcggggatggtgggtgaaggcgacgggacgggggaggcgggtggggccttattggcggggcatgaggggcggggctggtgggtggggaggtgggggcggggctggtgggtggggaggtgggggcggggcctggtgggtgcgggtgggggcggggctggtgggtggggccgaagggcgggggcggggcctctcgcgcgccctctagaggcttgcgtcccgggagcccggcctcgtgcgccgcgctttgaggtgagcctctctgagaaatttgtgaggagggtccagccgcgggtcggaaggaaggacgtggggagcgaggctcgagcgagcgacagcgagtgcgaaggtcgggtggcagggaattgctctcgcgctgcaggatttgcccggacgccggggccgggggtgggggcgggaggccgccctgaggtgaggtgggcgcgggccgtcggctccagtgcgagaccagggggagggcggggcggagcggaggagccgagggcgccgccggcgtccctgggaagctgagcgccgcgtagcttcgccggggggagtggggtaggcgcggtgaggccgtgggcccccacacctggcggaccacaggggccagaagccctggagccccgccagggaagggctgcgtcgctggccaggaccgagcgcggtagagcctcagctgctcacggggtcgctggagttgggggtggccccaggagaaattaaaggtgaaaagccttagcagcagagggaagaggaagatggaggcagagcgagtgaccgaacttggaagggacagccgggcgcaacagggcagggggcgtctgactgttggaaacatggctgacgtctggaggctgcagccagtggtccgtaagtcaggtcaaggacccacagaagaccccagcatgtcttcacctggcccacagaagccctgacatccagttacaactgccccagcctagtgagcatttcggcacccactcctcaattcctacccccagcctaacttcgaaggggcggtgagccacagcaagccggaggagaaagttggaagagagagtggacaaaagaatacccacaggcaccttccccacagtggaatagcggggttttagacaa

SEQ ID NO: 69576 - DNA, 2062 bp, Homo sapiens
agcactaggctgctgcccactgaaaggattagttgggttcatcttctgctccaattattagaaggtaattaagtattatgtgtacaaaattaattggcttcctgaaacagcctgtagcactagggagttccccttcgtctttagaacaagctgaaagagaaaaattcagatcatcatagctatgttctgctacaagtctaagaaaagaatttttgaacactgtcatactaaaaggataactatttcaaaggcaggcaaagggttattattttctgagagccgataggttattttgttggagggtggggtagagagtggtacaaataattactttgttacagaggtttaaagcgtgatcctttaagattaaaaaaaaaaaagccgaatctttttactgagttagtaaattcatgaaaaacctccattggcagtaagaaaatgaatgctgttccaccttacaacttagagacgaatttctcccgacttcctccaatctctacagccggagaattcactgtaacgctgtcaaaaccttagcgtttcgggatctcctcccacctggcttccctcggagcggctggagcgctaagcactttctcacattccttcatcgcgccctggcggccaccctcgagcgggctggaaggacgagggcgctgccacgaagctgaggcctctcggcggggacggcgtgcccggggagcctaatcttccacccagcacagcccgaaacggcggaggccacgcgctgggcccaggccggcctggccactgtcccgccccgggctcgccaggggtcgccggcgccgcaacgctccgttagcgacgatgtggaggcccgggcgcgcggagctgcgtgggggaaggaaacggcgcccctggcgccggcccagcccccacgctcaccgtctcgccccaggaccccgaggcccgcgctgcccactggcccctcggaaagacttgaggcgcaagcacaggctgctgccgcgacactcagcgctgcgcaccgcgggcagaaaacgccgcggaccgacttccggttcgctcagcactaccggattccgccccgcccgctgcgatccggttccgctccccacaacccgctctgtggcggggcttccggtcgggagggtccgcccgctctcgcgtcctttgctgggtccagacaccggtacgtccgggcgggtttttagtctcccaagcgagagcgtcgcattcacccgcgtgggtctgcgggcgccccagaccccagaggacccggcccccaacgcttacctgtcccctctcctgtccctcccccattccagccccttctctccccagccgttgcccctccccgcaccccgccgcgtccgcgcgcctctctccgcgcgcacccccaacccgcccccttttctctgggaaccgctccttccgctccgcccgcctggagtccttctggccggattccgcggcatccttccatagaccctcgttgttgcttcctccttgtggtaaatgtaaattcccttaagattttcaatcagttccaccaaataaagtgatctgattgcgcgtgcatctgtatttttacagaccgtattatcacttgtactgattggtcttctcttacactttaaccccaggttccgttgcaaacatttttaaagggctggttattcttcctgaaatgagtttggtgattagaaatctgcagcgagtcatccccatcaggagagcgccacttcgcagtaagatcgagattgtaaggaggattttaggagtgcagaaatttgacctggggatcatctgtgttgacaacaagaatattcagcacattaatagaatctacagagatagaaatgtcccaaccgatgtgctttcttttccatttcatgaggtaaaaaaaaaatgttcctcttcttgtctagcccatcttcccagagtaaatttcctgtcgttttgttttgttttgttttgttttttaattgagacggagtcttgctctgtcacccaggctggagtgcagtggtgcgatctcggctcactgcaacctcccttcctggttcaagtgattcttttg

SEQ ID NO: 69577 - DNA, 1695 bp, Homo sapiens
gtaggaggcgggtacgtgagcgcaccaatctgtggccggcgagcgtaaagggcggggctccgcccaggctgcaccgcccagagcgcgcgtgcgcgagaccggaaacgcagccccctgattggcggcgcgtgtcgggggcggggccgcggctgcgtgacagttgtcgcggggggagggcgagcccaagcgcgggggagggagtgtaaatagagcgaaggctgctctgtgtcagccccgtcaccgccgggcggcccgcgcggagtctgagggagatggaagttgagcaagagcagcggcgcagaaaggtggaggccgggaggacgaaggtaaacattaggggcttcttctctagctgctctggcgtgaagtcctaagggcggctccggtgcccgccaccgccccctgccaggagaggacgcggtccggcggaagccgccgcggaggtctcgctttttcccgccggctccgctggaagccgcctcctggccgccgccatcttgaatccgccgctctccgccaggtcccgcccccgccgcggccacagccaatcagcggccgggacgcgcggcgcctctcgggcgggccggggcggggctgcgcctgcgtcggggggggtggggcgcgggctgggcgcggtgcacgccggggcggggtgtggctgcagggcggggctacaggggcgtggcgtggctgcacggagggggtggggcgcggcaggcgctggaccccaggctggatcttccagtggctcccgcgtcctccgggaccgggtggcctggggcgggcggccggtattcgggtggctgcttggtctagggccagtttcctgcgcggccggggccgggggcgtggcgcgggtggcctgcagcgcctccccagggtgcgccttcgcctcgtccgtcggagatgctttccccgcgcgtttctcgcggcgttgcagtccttactgtgtgaaaggcccccgcggcgctcccggccgccgtcttcttcccgcgcccttgggctcgcgtcctgcccgtccgggcctggcgtacgctgccgggaacccacgcggcgctggcgccgggcgccttcaagggacgcgctcccgtctttctcccgccccgggtttctccgtgaaaaagcgctcggtttgatggccactgtcctaggtttcgtgggaataaagcgcgcagagcccatgactcgggggcaggagaaagggagtcccgaaagcgcgaggcggaaccgcgggagcaggccggcctctgcgaggtgcgcgccgctcccccccaggatgttctggctggggtgctggggaagagcggggctcccgggcacggcggacaggggacgcggggctaggccggggaagggctgaggcgggcaggaggggaaggggagcccggagcctgcagggagctgcgaacaggagcagagctcccaggagggtggaggggggagggagggacaagacgccgcctgtagggcgacgcaggccgcagaccaggtctgtgctatatcccgacatggataggtgtggtggaggaggacatgaaaataaacgacatgaggttgactttgaaggaaatatttccttgagagaccattttcttgtgtaaatggccttgtgtaatttttctgggtccatgagcttgtgtacttgtgttatcatttacacaaatgtgtgttccatgcgtttgtttttgtggccac

SEQ ID NO: 69578 - DNA, 1318 bp, Homo sapiens
cgcccagccagccggcgctgggccacaccccgccgggggagaccacctggtgtttcatcacctcgagcccttggacttcagccagtcacttcgtttgtcaggcctccgggcagataaaggggtgtgtggcctgcattctgttgaacggcccggtgaggccggggccctgtggctagcgcccccgtgtcaggtgcctgtgtcgtgccctgggcctgagcacgtgggtctgagcactgcagggcttcttcccaaggctgtggtggcccgtctgctgccttgcctctggttcatctcctgccacaaagcctggcccaccagggagtgtcgtgacaggtggatgtgggccctgggtgtccatagcctggctgggctccctgcaggccccaggattgaagctgaggcttaccatgggccttgcagtggcaggcgcctggcatgccgggagtggatctcatggagccctttcgcaggctcgggccaactttgtcactgggaaattctcgttgtttctctggggtcctctttgtttgctttcctttcgacatggttaaccctgccctagtttctcactctggtttgttttctttcctttcaccctggctctgcggttgtgtgactctgcgccagctaccggccctgaccactctcccggcagggcctaggctctgacggtggcgtgaacccggccctggtgtgcagcggccctgcctcgccgtgttgcgtgacgcccccttcgctgtgtggtgttttgtggctctcttcaggtgttgccatctgtcccttttgttctctttgtctccttgaaaagttgatgggcctgcagccgcacaggcagttgtgggcatggtgggcgctgagtctggaggttgttcaaggccagcagcgttgcccagagccctgctgctgacgctgccgtcactggttctagctctcacattctcagctgcacgtttctgtttccacctcagtaaacgcaaactcttgttcataggcacagctgtcactgcagcacacaaggactcaggtttgtaaagacaaacgattgatttgtgtgtgacgtgctgtttgtttgcactggattttgcaaattatttactaaagaaaagtacttcagaccttttgtggcaaacaataaatacagcgatactctaatcttcagtattcataaaaatgggtggagttgtcccattttaacgccccagcaaaacaggagcatttctctaacggtctttactacagtgcctaagctacagtttgtgctgcttttcagaaactgatgtcttgtgatagttacagctgttcttgggctgggtcccag

SEQ ID NO: 69579 - DNA, 2578 bp, Homo sapiens
tacaggtgtgagccactgtgcccagcctcatcttttcttagcagggatccaaacttagtggaagagtattgccttgtttgggtgttttgctatttttggagttcagtcaaacagggatgttaattcctgggcctggttcttgtctttgacctgctgcagtaaatgaagcttctctatatgtaacgggacagattcactggcttacaactgtttgttgcttgccttcagctgaccactattcttaagagtctcggttggcactaagcaatagctatccaatccccctttccttccttttatctactacgttcaccatatatgaaatgtctgatacttcacccactcgtggattccatttcactagttcaccctcctacttcaccactggtgagtgatgcagcctcgaatcccatcttctcaccagctttaatgctgcagaatggtttctccagaagcagacgctgcgactgagtttggggtacgaggatgttgacatggtatcaacacccgtgaaaggaaggggaaggaagcaggactgggcggaggaagaagggtatgtaagtcccgcaaagctttggccaacctcgtgtggagctctggaacgagaactgctgaagttcgccagactcgggcactcctgcctaactcagtaacaggcgggcggcatcgggacacggacacgctgctcaggccccgccacagccaccctcgcaccgtcagacacactcccacacattcggggagcagggccttcaggacgccggcggcgccctctcagtctagctccgccaggcccctcgtccgtcctcccgccctccaaggtcacctcgcggtccgacatggctgctggggctccttcggggccaacgatgtgtacttctagggctgttttttaaagcaaaggagtgaacacaggtaaaggcacgagaaaggtgcctcgacgccaccacggactgcgcagcgttcgcgatcagcacagcccgaaagggaagacagcggtcaacgcggacgcgccatggcgcggggaccaaggaggagccccgagaggggcggggctggccggagggccgcgcgcggggccaccagcggcgcctaggggtcagcgccaacgcccacgggttggtcatccccacttaggcgcctcgggccgcaactaagcagcctgcccgcctcaagcccgccaccctcaagcaggcccagcgcagagcctgtcgggagcggcgctctcccgcctctcccaatgggagcccggagcggcatcgacgcgtcttcggggccaatggaagcgaggctctggtgttgctgggcggggccgggagggctgcgcgggcccgagacccactgcgcacgcgcgctcgctacccgcccttcccgccgcgcacgcgctcccgtgtagggccggccgggcgctcaggagcgcgcggggcagcggcggcgcggcggagccatccgcgctcgtgcccgcgcgggtgcgttgctgtcctggccgcgcccctgtcccgccgcctcccgctcctcgcctggcggatgtaggttgttggcctgaggggagctacgtagccgaggtttgcgctgccgccgccaggcccggtccggttccagcctctgcccggacgctagccggcctggccatggctgaccgcgggtgcccgctggaggcggcgccgctgcctgccgaggtgcgggagagcctggctgagctggagctggagctgtcggaaggtgagccggaccccgccctcaacccccgcgacccgccctcagcccggtcccccgcgcagcccctcactccgggacccccgcgcggcccctcactccaggacccccgcccttcacccccgggacccccacgcggcctcgcccctgggacctctgcccctcaacgggaccccggttcctctaccctggaacccgcccctcgccccggagacaccgttcctcaaccctaggaccccgcccctcatgtgggaccccagcacgacccctcgccccgagaccccggccccttacccccgggaactcccgcccctcacccccgggacctcctgcccctcacccccggaaccccgcgcggcccctcaccccggggaccccgcccttcaccctgggagccccgcgctgcccctccggactcccgaccctcagccccgggacacccgcgcggcccctcaaaccagggaccactgccccgcctctcatacaaggacccctcccccatacaaggactcctccccccaggcccttcacacctgggacccttactcctcaccccgggacgcctgccaaacttctggagacctttccctatccccagctgctcccccaatgggatccgaccccaaggactggctttgactaggtcgtttggacaggtgtgagaatcttgagaggaatgaccacttttgccccaagctgtgagccccgcttttctcaaggctgtaggtctgggcttggtctgggcttcaccaggatgactgcgcccgttgtccgcaggcagctacttcccttggagctgggagcccttgccgcgcgcctcatactctaggagctgcaccctgtgcctcattttattatctat

SEQ ID NO: 69580 - DNA, 542 bp, Homo sapiens
gagtagctgggattacaggaacgcaccatcacacccagctaatttttttgttttgttttttttttggtagaggcagggttttgccatgttggccaggctggtcacgaattcctgacctcaggtgatccacctgccttggcctcccaaagtgttgggatacaggcgtgagccaccacgcccggccatctttcacatttagatgcgtaattcacctggaatttaatttcatgcgtggtgtgagggaagagtgatttcatttctattgcagttgggtaatcagttgactcagaacatttggaagaggctatccttcccctgctgcttcggactgatttctgctgtgttgttctacttgcttatcttagcacctgctccattctgtcttcatatctggtaaagtctgcccttttaattttattttgtttttcaagcttgatttagctaatcttggccctttgtatttccctatatactttggaatcagcttgtcaatttctatgcaagaaactttcaagaattttttttttttttgagagggagtt

SEQ ID NO: 69581 - DNA, 2058 bp, Homo sapiens
taaagcacaccccgccccccaacccccgcccaacacacaaaaggagttgtacagcaaaataaactagatcttgactaaatctgggtagatcagggattctctggagggggtgcttccaggcctcagcaaattgtcctattggtttgagccataaagatagctcaagctggtactaaggactgacagatttgtcaaaggtcagtggcacctctactcagaatccctttgtggttaccaaaatgtgaaccttgaatatctgagtcagatctcagtcaacttaggaagtttattttgctgaatttaaggatgcacgcccatgacacggccgtcggaggccctgatgacatgtgcccaaggtggtcagagcacagtttggttttatacgttttagggagacatgagacatcaatcaatatatgtaagatgaacattggtttggtccggaagggcgggacaactcaaagcaaaggcaggagggagcttccaggtcataggtaaatatgagacaaatcattgcattcccttgagtttctggttagcctctccagaggtggcaatcagatacgcatttatctcagtgagctgagagatgactttgaacagaatgggaggcaggtttgccctaagcagttcccaacttgacttttccttttaagcttaatgattttgcggcccccaaatttattttccttccacatttttttttttaaatcagacttaaggtctgccttgatgttaatgctggaggagtgtaaaaaggcatgtccaactcttacttcccttcgaggccagaatagtctctcaggttgaacttcagggtcccctggtaaaggagggagtccagtcagacggctgcgggggagggggggcttcgaattttatgttttacaggcattagcgccacccatttctccttaaccccaaacttcctctccccacaacagaaacgtcatcattctgcttccacttatccagaagaaaggcagagggcgcacactgcgcagcgcggatgggaaagttaactgaattatttgcgggaagacagaggaggtggggggtcccccaagccccagccattttgtggctcgtaggggttgtcgcttcccaagccgtgaatggcccaaacccgccccccgccccaggtcggactcctgccccgcgcccctctgggtcggaccccaagccgagccccccaaccccgcggctgggctgggcgattggggacgagctccacacatggagaacctggcctcgcctcgcaagaccgcgggacgcgcagatgtgaagtgcgcctgcgcggggcgcagccccagctgcagacgatctgtgagcgacgcgccggcgcaagtcgagggcggtggcttggcttccctggaatgggggacgtcttaggactgcgcctgcgcggggcgccgggccctgggcggggccttcccggctgacggcctgcgtgcactgcgcttgcgcgggttgagggcggtggctcaggctcctggaaaggaccgtccacccctccgcgctggcggtgtggacgcggaactcagcggagaaacgcgattgaggtaggtgtcctgatgggcagctcagatggctggactgcacgtaaggaaggacaggccaggtgaggcgtcctcgcactgcgtgtgcgtcgctggcggacagaggcctccgcccccttttgggacctccgagcgccttcgcgatctcagccactttccctggcgtccaaacgggagctcggtccccgtcacacccttccctgcgtgccgcaccccttcccggccactcccgccgtccagcgccttctacggccacgcccaccccaccaccatctctgtcacgcccttcgcggccacgcccacctgcctggcggcccctgccccgaagctcgcggcgctgtcccagcctgaccctctcgtgcccctgcgtccacgcgtggccctctcgcttcctgcccccttctcaccccccttcactggccacctgttccaaccctccatgatcctgttcctcccgagggcatcttaggagggcagggtcctgcgcgcactgcggcct

SEQ ID NO: 69582 - DNA, 1471 bp, Homo sapiens
gggagacagagggagaccctgtctaaaaataaagtaaaataaaaaacaaaaataaaagggacagagactaagaaaacggacttcctgaaatcccaagttgggatttcacgtccagtgacccacaagagaagcaagaagtctgaacagggccaagaatcaagtgagtgggggcggaggattaaaatcgacagttgctgcggcacggccagggtggagggtgcatgtggggcaggcgaggctccagctggagttgacgctagcccgacgcgggtgcaactggaggcgcgacgggccaggcccaggagcagcgggaggagcgcacctggggcgcgcgggcggaggagggccggggagggacgccggaaggactgggtagggacgcccggaggactgagcgtagggccgagaggaggggcgcaaggaggaacggggggagggccctgtctcaccctaaacccctccccgtcccagactaaactcctcccctcggcccggcccgcccctgggcccgggctggaagccggaagcgagcaaagtggagccgactcgaactccaccgcggaaaagaaagcctcagaacgttcgttcgctgcgtccccagccggggccgagccctccgcgacgccagccgggccatgggggccgcacgcagcccgccgtccgctgtcccggggcccctgctggggctgctcctgctgctcctgggcgtgctggccccgggtggcgcctccctgcgactcctggaccaccgggcgctggtctgctcccagccggtgagactcgacgtggggagcggtagccgccaggatgctgcggacgcggggcaaggtcgcggagggccggacggtcgggactacgcgcccgggctggggaggcaggaagtccgcgccgcgggcttagaggggctcagagccttgggcacagatatcgcggcgcctggggaggaccctcggagcggtgggagttgcggtgtggaatacggggggggtgggtggcacatcgcgcggcgcgtgttgcacaacctggcccgccgtcgtgactggaggcgggagtgacacctccgcccgggccgcggagttcggggaaggagggcgcggcgctgggccaggccggaggggcggccagggctgatagaaaggggctgtggagaaggggcccggggaggagccaggacgggtctggacccagctccacgccttgcgcccctcacgtaccccggcggggcacggtcggccctcgggaggcccatcgcgccctcgggagcttccctcaagccgtgcccttcatgccgccgacggagccgggcgagcccacgtcgtccgtgcggaaggtggagtccctcacccgcggcccccagagggaccccgctgtcgtagagccacgcgggggccggagcgctgagacgcggcaccatgtttcggggagagctctgccgagggcggctgagggccacctccccagaggcgcgaag

SEQ ID NO: 69583 - DNA, 1231 bp, Homo sapiens
catcacaggtctccgaggccaatttaaggagtttgaaaatggaaagtggtatcatcagacctgaactatagaaaaaaatttggctgcagagaaaagactgcattgggtggactgaagggagttaactgaaagaccaggtgggaccaaatgcaacccaagacagagaagatggagcatttacctgggagagtggtggtaagaatggagatcagggggcattatcagagacagaacagtcatgacttggtaaccatccagatacaggggtggagggaagagggagccacacggactcccatgcttttttattttggtctgggaacccgggagggtggatgcgggtatgagtcactgaaccaaagggcacagtaggagcgggcagcgagaggtcattggaggatacaaggttaagtcccactttggacctgggagacaggcaagtggagacatcagcactggacaggtcctggagatgaaaattttggaaggtctcgcctctcagagaaccaggaagaacaatactacttaataatggaccacacaagacctgccagcaaaagacagtgcaaggaggaaaaccaagagcgtgtggggtccaggaagctgaggtatgtctcgggtccagtaaaacagggactggagtggctgtaatgatcccatcttctttccactgaacaggcaagacccccgggagaggcaatcttccagctcctcctccatgttagcttgtacatgagccctccaagcttggacaatgacagctacagagccaagcaggaggagggcagggaccctggaaaaacaggaggaagcaactcgagccaacaagatatcacacctgaacaccaaaaaacagctgccaagagaaaactgaccaagccccacacgccacacaggaaatgcctggacaaatggtgcctctaacccttggcttcacaggcttatgctgttgcacccagacctgtcactgtcccaagcactcagccagacatgtaacaaaggcatttttatgtattctttttggcagccctttgaggaagtgtcagcatctccaaatggccttgcctggcaaaatgtgccggtttatacaaggtgttcaatatacaggcactaaattacctgactggacaaataaggcatcaacctcaaaaagaactcagcaagggtcacccagttcacaagtgctggattcaggattcagtctcaaattcagctggcaactcggcagcac

SEQ ID NO: 69584 - DNA, 2391 bp, Homo sapiens
aagttcgagaccagcctggccaacatggtgaaaccctgtctctactaaaaatacaaaaattagccggatgtggtggcgggtgcctgtaatcccagctactcgggaggctgagacagaagaatcgcttgaacccgggaggcggaggttgcagtgagcagagattgcgccactgcactccaacctggtgacagagatgccgtctaaaaaaaaaaaatgcaaggattactgtgaaatccgtatgttaatgtaaaatattacttgtgcgtttagaagacaaagtgattcctttttccagaaaaggcaaaacggcccaagggagcgtgagagccgtggatctgaccaacctggtttagtgtcctgtgccgtctcccagctgcaggacctgagaaaacgtacttgaaaactcgtcaagcttcggcttcctgaccacacaaggtcacaccttctcagaagttgcggggaggctcacacatcactaccgcgccgggcacacagcaggcgccggctccagccctcctgctcccgcccgcggagcctccagcgctcagtcgaggtcacagcgagctgaactgaacccaaggcccgcaccaaacccacaggcacttgggggcggagcacccgcaggcgcggctcccggcgcgcggcccagtttcctccacatgcagatgaaaatcacgacccaaacgtcctcatggtggaaatcagaagacgcgcagggaaaacagggacgcggaaactgccgggaagcgcaggggctgacaagcagcctggcccaggccgtcccacgagcgctctcccgcgggagtagcgtttccgaggccgccagcgagtcagaggaaggcagggcgcatccgccctccagcaagaacgcgatgcactcgggcgcgacgacggtccaggcagttcccaggaggctgggataccagcccggccgcccctccttccccgcggctccccgccccgcctccggccctgagtggcgagtggctcggccagaacccggacgtcctcacctgagcggggcccacagcatagcacctgcgggcggggcggccctggagccccgcagccgcgcgcgccgcccgccagcaaagcccacgcgccgcgccgagcgcagccacacagccccacgcagccatccggccgtcgccgtgcgcacgtgcacggcgtgcggccccccccccccgcgagtccgtccgctgcacagccaatcagcggtcggcgcgcgcggcatcacgggagttgtagtcctgtaagcgcgcggagcccgtcgggcgcctatggaactcgacccgcaggccaaaggggctccgttgcaaggaagaagtgcggggtcccgccgcctcctagaccgagatcgcggtgagctggccgcggcgcacaatgggcacggcctgggcggcggcgtccgtactatcgccctgtgcctgcggatcccggtaacattgcgcggcaggccccaggccggcctccctcagcttcgcggactgtctgggccgggggtctcaaccttgacttcagggccgggccgctggggcagacccttagtgatgttcaggtcctctgggcccctgccagtcaagggacgctcgtcgcgcgccaattgttaagtctttcattgtttctgtaaacctgctgacgccctcccagcgcatagggagactgcgcacgtgagtccgcccccgcgcgcactgcggagaggtagaggcacgaatgtagtacaaggtacaaaatgactactccagagagggccagatgactaagtcagcaaacacttagggaacacgactgtgtccgctgcgcgtttcccggagtagacacaagggtgaatgaacaaagaatggatttcggtcactgaaagtggagaggtagccgactccgtccgtggaggcccttagcagagctggatctggtagtcccccggtcatgaggggagattctgctggaggaaagaggtctccattcccaccgtttgaaatgtgtaggatgccctcagattctttggcccattcataggtatagctatgctaaaaacgcgggaccctacaatgtacttagcactagcagagagggagtcgaggatatggacagagactgcactagctcacacattagcaggccagggtgcggtggctcacccctgtaatcccagaactttggaaggtcaaggtgggaggaaaacttgagtccaggagttccagaccagcctgggcaacatagggagaccccttctctattttaaaaataataaaatagggccgggtgcggtggctcacacctgtaatcccagcactttgggagactgaggcgagtggatcaggaggtcaggggttcaagaccacctagccaagatggtgaaaccccgtctctgctgaaaactgcaaaaattag

SEQ ID NO: 69585 - DNA, 1698 bp, Homo sapiens
aacacaagaaactaagcctggtgggagaatgggtgggatgggaaagaggacagtggaaaacagaggtggatagaagcctttcgaatgtgttccttttcatactttttgaatttttgaaatgtgattgtatatagattcattttaattttaaatgtaattaaaatttaaaattcattacggcactactctctcatcctgtactatgggctctacccttttttgtttgtttgtttttgttttgttttgaagagacagagtctcgctgttttccccaggctggtctagaactcctgggctctagcgccccgcctgggcctcccagaatgcgggactacaggcgccgccaccacccggcgtctactctaaatgcatagaggccaggatgacccaaggtcaccagcggccgatgctgcctggcaggggcttgaggccgggaggggaccctgcggacaggcgagaccatgtgtgatctgtgggaagcaactaaaccggcgtattcgcggcaggggagctctgtgccgtcccgcggccccaccccgctctgccatgggaagccgtagcttggcgctgcccacagtgacgcgagggactccgagggcacccgggccggggtggacacgggagtgggcccgggcgcggccggcagggggcagcagcgccgcgccgcccgcgcagttccacaggtgcgccgagcctggggccatcgcctccctccggccgccgtccccagcgaatcgccgcctgcgttctgccgtttccccgccaccgcagccacccggggcccggggggccgcagccatccgcaagccgcggggcggcgggaccgggcgggccgctagggacgccggacgaagggagcccgcgggcggggtctgggcgcctacatccttgctcccagggaggaagggacaggaaactgaagctgtttccggggctgaccccggccagagagagcagggctcgggagagtcggcgcgtcccggaggcggcgccccctggaggccggtgtgctttggctctgcagcgggggagattaggggtggaggccgaccgatcccactcagccaggactggcaggcgccgggagctcactgggaggcaagtgccgacccccgaaacccactccagacaagcgaagaaaacagctctgtgtcccaggacgagcacatacctactgtcacccactgtgcgacctggaagagttactgaccctctctgggccttaatcagtcatcagaaacacaaacgcgtagataagatggtctttaggcctctcccagctctgctattctgtgaatctaagaaactctagtccctccaccagtccccaccccgggctggcttcgcttcagggaggcctggctgagctggggccctcatccaaggtctttgcacggttcctcagcaaaggtgttttggaaggctgggtcccaccccttcccggcggaggaagaggctattggctaaaaagcctggacaaattcaaaaccagcagctcggccccggttttttcggagcacagccaaacccaaatcacacctctgcacctacctagctccagagatctagacagcatttacagcccccaaatgttatttttacaccctttccaggcagggaaggacagaggagggtaagctatttttaggatgactgctatttaaagtaacatactggcctggcaaggtggctctggcc

SEQ ID NO: 69586 - DNA, 925 bp, Homo sapiens
cgggaggctgaggcacgagaatcgcttgaacctgggaggtggaggttgcagtgaggcaagatcataccactacactccagcctgggcgacagaaattctgtcaaaaaaaaaaaagaagaagaagaaagaaaagaaaagaggagaatttcctgatgaagcataagtgtctggtccgaatgataacagcattctgactttcttgtttacacatctatcccttatgaatttgttcagtgtgtattgatcctgcggagtcctatcacttctgggtctacaaacagtaaacttcggagcgtataaaagcctacagaatatgctaacaaaactaaaatactgccaccatgtgggcctttccacaagcttaactgtcagtccccaaggcatttgtgtatccgatcaatatgtaaatgaacgagcagactctcttggatacaatgtggagaagactctaccaaaggtcactttccccaagccactgataacctttaaccagctcaaacccgtctgagctcaccacataaaacacccaaggatcctgcccactcccacaataccccatctccctcagcccaacaaaaacatcctcaggaaagttctctccaataaactcactgaaataaaactctagcagtatttgagcacctagggctgctctcctcgaaagatccctcccctaccaacacggagcctggtgtcagtccatctcagagtacctaacctcagttatcctttgcttctggccaaaatgcaagacccaaaaatcagatttttttgatgatgctcccttcttttggactctttctactcctttccatttcactctctccaaacttccttccttaaaatcaaatttttttttcttttttcttttttttttttttttttttttgagacggagtctcgctctgtcatccaggctgaagag

SEQ ID NO: 69587 - DNA, 1056 bp, Homo sapiens
ccagcagataatgcctaaaatggaaaaaaaatcaagaatagcaatataaagttactgatgatacggagggagattgagttgaaagattcaactcaagaacttgaaaatcactgcctctaagaagctaacaatgtttggtattggggtcgacccttgggaacctgactctttaaaccatggacgtgagtgcacagccccagttaggggccttcttcctgctttttggctgataaggagcagaatggagaaatgaacggtgttatacacaaaccacagatgctacacccgagcagaacccaacagaccatcactaacccaggaggggagaactcctgacttcatgactctaaggggcaaactgaaaagtaagactgaggcttgcagcaacttgtgactcttgaagctatttgctccctgtccagcttccccattcgattgcaacactcgttaaatatttgctcaaaagttgctcacagttagtgggcacttactatgtgctgggcactggactaaaggtcgtggtctacgccatctcatgcggtcctcaggacaattctgtgaggtaggtgatctgcccattttacagatgcagaagtccaggacccactaagtaaaatattggaactggggaggcagtcttggggccatgctgcccatggctctgttccagtcttccttgttgcttctccctgctgaattcccagaaactgcccaataaatatttgttttgattgtcctttttttgggaatgcaaatgctcaaacatatactcagtgagagaggagctggtgagtttgtctctgtcctcatattgtgacagtgaataggccaacactgagatctcaaactcaacttggcccatattgacttttccattttccctccccacaaaagctgttcttcttccaactttccccttcccagtgagtggcacctccatccacccagttgtttctgccagaaacctgatttccactctagaaaatgaggaggagttagcggatatcttccacatctcccaccccaaatctccaccaggcccccatgtttaccctt

SEQ ID NO: 69588 - DNA, 1064 bp, Homo sapiens
ggggcccttcacttccaaggcgctgctgtgcaatcccctttacgggggagctccttcccctccttgactagtgcagctcccacccatccttgagatcccgatggaaatgtgtcttcctggggagggcttcagggaacacccctataggaagttagccccggttccactcttcacaatacccttttatcttcttccacaacatgtatcacagcttgtgattttgtattcatagatttctatgactgttcgtttcatatatattcgcatagcagatggaaagctgttgtttaccttggggtcttcatagtgccaggctcagaggaaggacccaaacgtctgctgcgggaaggcacgcatgattgaaagtatggaggaaaagagcgggtgtttgggtgtatgagtgtttgttagacatttaggtctcctcaacctggtgtaacacagaagaggcaaatgacaccagggtgccttgcaaggagtggccaatcagcccagccattcgctgtgtggcttcttgtgtgccattggccaaaacttgtcataaatagatgagcctacaatgccagcagtgtacacagtgcctcctggaatcgggcagcactctacttgtgcaatcataccacaatcttagagatcatgataaatgccaacagcaaatggataagcctgggcaagttcttcttgtttgtttgcatttagctcttcattttcttttttttcttttcttttcttttttttttttttgagacaaagtttcactcttgttgcccaggctggagtgtaatggcacgatctcagctcactgcaacctccgtctcctgggttcaaagcaattctcctgcctcggcctcccgcgtagctggtattatagccatgcgccaccacgcctggctaattttgcattttcagtagagatggggtttctccatgttggtcaggctggtctcgaactcccgacctcaggtgatctgcccgcctcggcctcccaaagtgctgggattataggcatgagtcaccgcacccggctttttaaatttttttattttttacttttattttttaga

SEQ ID NO: 69589 - DNA, 736 bp, Homo sapiens
aaaaaaaaatgaaaataatgaaaacaaaaaagaggcaaattataaattaaataaactactaaataggccaggcgcggtggctcatgcccgtaattccagcactttgggaggccaaggggggcggatcacctgaggtcaggagttggagacctgcctggccaacatgatgaaacccagtctctactaaaaatacgaaaattagacaggcgtggcggtgccagtgaacagagattgcgccactgcactccaacctgggcaacagagactgtctcaaaaaacaaaagcaaaataaacaaacaaacaaaaagtcaggaatagtatataaagtgccagtattgttagttttggcttaaacataatactaacttccaaattctctctccttggccaaataaatcgaataaaactgggctaaaggaatgaatttgccaatgcaacaaagatgactgccattctgccctgcctccggaatcatgaaaggggtggtcttctgacgtcctcccttttcacaggggcctgcagagggaggcagccgctgttgggaggtcacagagcgtctgcagctgactgggaagccctcctaactggcgcacctgaggggctgggtgcccgtctgctgcttctggctgccctggcccgcagtagtagtaagtctcctcctcacctccctctggcccaagcatggaaaacaccaagtcttcctgtctcctgaacacagttgggactagtgggaatg

SEQ ID NO: 69590 - DNA, 890 bp, Homo sapiens
caaaaactaaattaacatagtctctaaaaggttttttgcaggagtcctcgggagtgtggcgtatggaagagcttcagtagtcttcactcctactgctggggaatcccattctgtctcctggaggcaagggaacctgggtcagaacctgatctgtgcactttctctggtctaaaacttaagaggtgtttttgactaatttcctctcctgcagcctgtatggccaagccaggttcctgatgctatctttgcagcttctcatcacccattgctctgacttcccactggtgcaaagctaatctttgccctcgttacctcattcctggcttttgcaagtatcctaaaatagcttcactgctttcaatatgtctctcttaagtccttcctggccctaggcaacctacccgagctgtttcccaatcttctctaacaaacattctccactgaagatagccttgtttagtccaccccacaagcacgcctgcccaatcctgtctctgcctgtccctttgttgatgttgttccccatatctgaaatgcctttccgcctcctctcctggctatccggacctcacctctagtttaagttcagctcagatttcaccttcaccatgagctttcctccagcaactctaagccacggtcattgctccctttcggtatcccatagcacttacttatagaatcaaagagctgagaggaatctcagtaggcaataaaatcaaaacattgattttaccaaatgagattaagcgatctctccaaggttaccttgttcgggtagcaagtgataagcaggaaccaagcctcccagctcctggtccagtgttctgtcacagacattatgccatctctcctccacttgcctttacatttcacaggaatttgcttgt

SEQ ID NO: 69591 - DNA, 2919 bp, Homo sapiens
tgatgtattttgagattactagattcacagaagatgcacgtgaatatactctaaccatttaaaattatgtttctgaatgctgccttaaaaaatacaacaagttattatcataataaagtgagggagagtggaggggtaattatccagacagcccattccaaaatctatcatataaattatctccagattgtacactacttaaaggtagaagaggatctttgagtttaacccttgtacactttgtgattgtgcctgtcactcaataaatagttgattaatttgggggacgcaccaggagcagtgtttcctatctgaaaggtggaccaccgaactcagaggcggccctctgagaccagcaggatgcaagtgcgacgaccaatacaaatatctgagcattcaatggagtttttccaaacttctagcctgtttctggggtgattttttttcttaggatttagcagtactccaccgcgctacagcagttagcatttctaaagcacacactccaacacccttcggccgtagcacattcaatccctccgccggggcgtgggggtctcctcccctccgagcacagtccccggcttcccgatttcctctgccccatccccccgccttccaagcacattgtgctcactcttccaggcagctctttcagcggccgggcagtagcagggttccgagcccgtcttctccggggcggtcacacgtgtccattccctggggttggggatcgctcttcccgcttggctgctgattggtgcctccccctaccccacccttcccgccgctctccagcctccatcctacttcgttccagctcaatcagccccaccgccttcttccctcggagaaaaaagccacttcagagctccttgggcgccgttctcggctggaataaaagcgttaagaaacaggtggaaagcacttcacttctctaggcttcatatttctagggtggacagcccgctcctgctccggctctgccctcggcatcaataataactgaactcccacacgtgcacgtttctgtctctagcccgaccgaaaggaccaccccgcgggccctttaaaaggacgcgaccactcaggccaagtgggggtgggagagctcctggccgtcctcccttgggaaagtgcttcaactccccagtcccaaagtcctggagggcggagggcgcctcgtgagagttctcgggggtgcggcccgcgccccctgggtcctgcggatctgggcccgggggcgcgcgccccgcccctccccctccctggcggtgcagctgtccgggcgggggtggggcgggggccggggcccgcgtgggattaactaggaccggggcgggagtcgaccgcggccggcggggagggctagccccgctctggcgggcgggcgcgtggcaggggctcccggaggccccgagctcccgggaggcgctccggccaacttcgggccggtggggaccgggcctgggcgcggggctctgaaggtgtggaaggaaagtttgggactccgttattcttccacagcgtccttcctcccgtaatatccagcctctttatcgcggggctcgggagcccttggagttgatctcgccaccattatccccccgggcgagcgcggaggacgggctggccattctggccaggccggaggtgttttccagcccggggctttgtgataactgggccgaaacccgagggtcctggagcgcggcgggtggcgggagcttgcggagcgcggcgcactcggcggccaggcatcggccagcccagcggcagccccctttctcctatttttatttttatttttggaaggagctgagaattagtcgattggttggcaggttgaattgccttctcttctatggcaatatgtgtcgtgacttttcaccttttgcctttggacaaaggtgaatggcaactgcgttggtcagtttttgttttctgttctgcggatgggttcgccgacgcagtaatcaaaattagagccactcttttggaagagcaaatcgttgttgttgcctccccagccccacggatcttactttgtgccattttcgggttgattttaactcgtttatttcagagctctttgcctcacctttatttttagatttagtcgtgtttgctgaaatatcagttgcttcttctgtgaatgaagtgtgggaacttgctctcgtcgcagttaatgaaatcaggaaaataaaaagatcaaaagggttggggatgggagaatgaagaggaatgtagacagatagtctagggccactcactggcttttggcgattcttagttccttaagctgattaaaacaatgtgaggaaatgtgggcttctccactttttaggaagaggtaataacgggcattttacgtggcgccacagcgtttgttttcaaagtttgaacgtgaatgtagcaagcataattttattaatgaaaatattctttagacaactgttaatattgacgaaagaagagaaacagagacacggaagctaaagagttgggaatcctaaaggtcaaaggatgtttctcagttactctgatgtcctgtgttttctttcagttggtacaaaatcgtgagtagtttaattatatcctgcagtcaaaatggtggctgtggtgggaggtgccgcctgtgacagggccatcttgggtgctggtaaacttgcacctagtcccttttcttccttgcgagataaagttgaggtggtgctgggattatgagttcagagtttaaagacccatcctaaaaatattgttggaaaaactttatgtctcaaaatccatgtattcccattttgttgatgaaaagctagaggtaactcattttgccttaagtactcgcagcatatttagagtaacctgtaaataacttgtcttctgttataagcaataaacttgtggtttctgagaatt

SEQ ID NO: 69592 - DNA, 504 bp, Homo sapiens
gcgtgtcatcttgcataggccagttttagtgcaagtgctgctggagtgagtgcataaccctggattttcatcgctttcagcaatggaacccatcttccttacccctgactctgcttggatttctgtaacgtgcacatttttaaggttaaagtgaaatgtttttaaaaaagggaaaatctcaaaacccaatcagccttccctgtgttattgtcatcattattaatactgaggttgcagaggtatgtggcagagtccctgttgtgctgctgccctgggggaatttgtctgtcgaaaaggggcagggcagcagtggtattgtgaaacctatgttgtttgcccagtgagcgatagggaatataattgctgtaagagttcagaggaaggcagagatggcgagtgaaacgcttcctggaggaagcatcatgcttctgggggtcatgctgagtaagtcagtgtagttagctaggtcagagagcccccacattttttttttttgtttttttt

SEQ ID NO: 69593 - DNA, 2197 bp, Homo sapiens
gagattacctgattggctgcttaataattacatgaagttgcttgtaattctttgagcatacacagaactaattaaattaaccctttactgcctggcatgcctggggtattctcgtgcgaaaatggaggaacctaaaatccttcttgaacactggtgaggtaaacaagcagatgtgtcagtgagtttcaaagggaagcaccttgtataagaagcatttaagtacaaatcaaaaaatgcagattcagaaactaccagtcctttgataacttgagtattagcttattagccgtgttcttgaagtttaatgggaagcttttataccaatactttctttggatagaaacttaagataaactcttttcatagccacttactgactttgaggagtttgttgttgttttaaggatcattcagtgtaaaatcatttccttagttatttcagtataagcttgcatcatcctagtgagatatagagcaaggctggtgaatgagaataccgtactgggctataattgaaagaggccgggtgcggtggctcacgcctgtaatcccagcactttgggaggccaaggcgggtggatcacctgaggtcaggagttcgagaccaccctggccaacatagtgaaaccccatctctactgaaaacacaaaattcgccaggcacggtggcgggcgcgtgtaatcccaactactggggaggctgaggcatgagaatcgcttgaacctgggaggcggagattgcagtgagctgagatcgcatcactgcacaccagcctgggcaatagagtgagactctgtctcaaaaaaaaaaaagccatgaattagagggccttattttagcctcgggttttaggtggatgattaaggaaattaagataggagaagttaggcaccctgtctaacagtggttctcaacggggtgatttgccctcttagaggactttggcggtgtctggagacagttttggttgccacaactcaggggaagaggggtgtgggtagaggtcaggaatattgtcaaatagcctacagtgcgtaagacagctcttcagaacaacagcaaacatcatctagtccaaaatgtcagtactgctgagattgagaaacgctggtctgaagccagcttatcttgagttttcattagaacatgggtgtccgaaactgtacctttggtgactaataatcttgtcatcagttgttggtgatcccctctaaattattatttttattttttcaagttcatttgttaaactgaagcaaaatttacataacgtaaaattaactattaaccattttaaagtgtatgattcagtcacatttagtgaattcaatatgttgtgcagctgtcgtttctatctagttccaagacgtttttatcacctcaaaaggagagaccctgtacccccctcagccccctcaccccccagcccctggcaatcactcgtctgctttctgtctgtggattctaaattatttttatatttgcttttttgtggtgctctggaaagaaccctggtcaggaagtcaggagagtggacttcacatcccaacgtctccattcttcctcttgctagctgtgtgatttgggcaagtcattcatctgttgtatgcctcagtttccttttcatttatgtggcagctgtcatggtagccagaatgccatttttgtctaagtaagatctttaaagtctgaaattctagcccacatgttgtttgctcagcatttttgttggacatccgtaacaacatttttaatcctacactgattgctttctcacccaagatgtttccgaaacaccattccaggtcctgcattagtgtcctgggattggtgtgcttggaatgagaagttaatgctactatcagttcacataaaaggttagcgaggtaaagatgccaccaacatgttagttcatcccatagctaaacataaatatattttgggttacctgatttagcacctaccttgtattaccttgtattcatgaaacaaaagcaagcatagtatctttctctcttcccattgttgcataaagccctccagtggctttctcttgcatttagaatagtctaagtcccttaccattgcttagtggggcccacgaaactttctgcatcttctgccttccttacctcgtaccattctctcctagctttagctgtatcagctttcttttcttttcataaaggctctgaa

SEQ ID NO: 69594 - DNA, 1108 bp, Homo sapiens
aacgcttgttaagcatcctgggtaaatatatcttacacagataatcctacacagtgagcttcttaaaataagagcataaaagctactcgggcaagatttagggagacaggaagctatacattgttactgtagattagtctcaaaagttctgatcaactttctattttgacatttggagacatccataggtgcttctcttgttaaagattaatgtctcttgtctctaaaccaattcgtgttactggaaggaaaggcaacgcaagttttataaatcagcccctttgtgggctccattttgctatactctatgttctctgagagtgctaccaacggaattgagaaaataaccatccagacgggctatttgggggctgatctttaccctggaatcttcctggaaggtgaacggcctatgtcatgcagttgttatgcaagaggtatcatgggacctttccttctgggcgctcatggagccgcggcagagccctgggtgacccagcagcagctgcctgctgtgtggctgccttcactgtcctcccccacaactgctgttgatttctctgcattgaccctgcagatgtttccctggcctcgtggtgttcctttggacttttaagggacctctgtgcatctattttagtcccctttctgctagcaatgctcactcccctagtttccttaagcagttttataaaaaaccttcagtgaaaaatactagccaagaaggcgaaggcatctggaaaatccccagatttggctattgtgtgctgcaatcccagcccccttctacagccatgacatgcatatcaatgcaggtgcccttgagactcctgcaggttcgagaaagcatgacatgctcccagaatcctggatttggacttcattctggacagcatatgacaaggacgaggacccctattctagccagttaaagctggacagaatttttaaaagcaatgaagccagttccttggatatatccacgggctttgctttgagaaggaactgagtaggcagtgagaagagtcgagtgaagcctggcccgtgagtgcctcaacaactgagatgaacgtcgactcgcttgcaggcaagttgtcagtaagtattt

SEQ ID NO: 69595 - DNA, 2833 bp, Homo sapiens
caccacgcccagctaattttttgtatttttagtagacacggggttttaccatgttagccaggatggtctccatctcccgacctcgtgatccgcccgcctcggcctcccaaagtgctgggattacaggcgtgagccaccgcgcccagccctcttctttgctttttacacttgtaacattcttaagcattgagaatgtgccaaaactacattgcagccctcctgcagctgagcacgtgatagcccccaacaaatacatgcaaagtgaaaggaaaatgtgttcctgcagggaggatgcctcccaggatcattgaaatagccggttatcagcagtaagaaaagtgcatgagactgagaagcagagatttgcttctggcaccaaatgtcttgcaaaagtgtttgcgttgcattgattttcagtgtttgtcctcctccctggcttccaggtctctgagtgggtggtgaatctcccctcacccccaagctgccttgttaaaatcttttcccagcctggactttttgtccgagtcatactagccaccaagtaaacagcaacctacttgccacctggggaggtgcagcgtggcttgactggatagtagcctctttgggttttgcttcaaacccaacctatttgaaggtgcagtgtgcggtgagagtctggaaccctgcagtggtgatgagggggaggcagagggagggaaactgaccacagaagggaaaaccagtccaagctggctgacactgaaagccacctctccctgcagctcagcagcgatctgaactatatcctgggttccagaaaaggcagaggttcttaccgaaagcaggtaagtgtcttgtctgtctgcatcaagctcagagttggtaggaaaagactcttctagcaaataaaccattgggggaaaggggaagagcagccagtgggacagggacactcatcccatttgttggatagagtcagaaggggtgggcacgaggaagtggccgcccctgaccatggggtatcccaggcaacatccaagccaggaagcaagtgattttcttggcaataagtcaagaactggctcctggctactagtgtgaggggctcattcctgggaacactcacccttgctctgctaataagaggaagtaggcggggacgtggtcatcaccctgaggcccccaacccagctcctcacagtgggaataaatgagcacagctctacagtggagccagcagtctcgtgacaagtctgacagcaaagtcagatggggagtcattgtggcttcttgatttgaggatgcttactggatgcctctgcgccgtggccaggatactgccccaagactttttgttgttgttgagacagttttactctgtcgcccaggctggagtgctgtggcatgatggcggctcaccgcaacctcctcctcctgggttcaagcaattctcctgcctcagcctcccgagtagctgggactacaggtgcatgccactatgcctggctaatttttttttctattagtagagatggggcttcagcatgttggccaggctggtctcgaactcctaacctcaggtgatctgcccgccttggcctcccaaagtgctaggattacaggcgtgagccaccgtgcccagcctcaagaccgtcttaactcacaaataactggtaattttcatggggaagcaagtcagtgtcaatgtaatgcagtaagtgctgcaactgaatattcaatgggttaacaggagagggctcctagccaagaatggggtgactccagaaaggcatgtgggaggaggtgacgtctgagctgaagcccaaagaacagtttgtaaatcactgggtttggatgcggaaagagtgtcctgggtgaaggggacagtatgtgcaagactcggaagcaagactgacgtgttccgaaagcaaaagttgaaagcagggggtgagggagaggaaaaccagggcaggttgtgcggtagtgggagcctgtcccgagagccgtgggaaggcagcccccgcgccctttcacccacttggccgtttggaaggtggatttgaaggcaacaaggctgaaggcaaggagctgagttaggagccctcaggcatccggagggacaatctgtggtgatctagcagtggctgcacagaaggggaagccagaggagtcaagccaagggaatgggacgtttttaaacaggaagaacgaaaagctatgtgatctgaggagcttggaaaactccagcacgctcctccctgcagctcagcagctagtatcatttctctaaatagtgtgtcttgttcacaatatgaccctcagttacaatgtattaagaatcacttctccagccggggcgcagtggctcaggcctgtaattccagcactttggggagctgatgtgggcagatcacttgaggctgacgagttcaagaccagcctggacaacagggtaaaaatgcacaaattagccgggcgtgatggagcacgcctgtaatcctagctacttgggaggctgaggcagaactgtttgaacccagaaggcagaggttgcagtgagccaaggtcacaccaccgcactccagcctgggcaatgcagtgagactgtctcaaaaagaaaaaaaaaaaaaaaagtctgggcccaaggcagacggatcagttgaggtgaggagtttgagaccaccctggccaacatggtgaaaccccgtatttactaaaatacaaaaattagccgggcatggtggctcgtgcctgtaatcgcagctactgggaggctgaggcaggagaatcgcttgaacctaggaggcggaggttgcagtgaaccgagatcatgcccctgcactctagcctg

SEQ ID NO: 69596 - DNA, 768 bp, Homo sapiens
agtctgcctcccgcctgaaagataagaaaagttgagtgggttccaaggagtctgagaaagctttgttttctatttcccgtcttccaaagctcctatacccagcagggtggggggccatgttatctaaactgtggctttacttttggctggaactaggtcacctcaagggctgaccgacttgaagccttcactgtgggaagtgcctgctctcttattatgaacaatagctggcattcccccccaggcacggtttccatagtcctcagcaaccctggagtgagttcgacgggaatgcaggcccagagaggagaggtcacagtcaggatgcaaactcagttctgcctgaccttcagtccgtttgtgtgagaactgcacacgtggctccaggcctgcggaggagccagaggacgggccggggaagcttggggcagagcggtgccctggtggcggcccatgggggcagagctgggctcctcccagaagcccctgcaggtcccagctccagggacttcccgggttgcagcaagatgcctcacccgggtgagtgcggctgtcctgtctggaccagacctgggccagggaggctgaagagggtctctggacacctgtggggctggggttccccactgtctgtgcccctgcccattcctggctgcatccgctccctaacctgcccctccctctgcctctctcctccccctgtcctccccctgtcctagcatcacagccaaactcatcaatggaggtgtagcagggctcgtgggggtg

SEQ ID NO: 69597 - DNA, 2248 bp, Homo sapiens
agcttctagggaggctgaggcaggagaatcacttgaacccggggcggaggttgcagtgagccgagatcgcgcccttgcactccagcctgggcgacagagtgagactccgtctcaaaaaaaaaaaaaagaaaaaaagaaaaaaacacagttcataaagtgaacgaccttgtcaaaacactggttggaagcaggtctcttccctccgcactgtttcctatcatatagccttaagcatttccctcagggttaaaaaaaaaaaaagtgacaaggctggtttgttttttttttttctttttccagagggagtctcgccctgtcgcccatgctggagtgcaaaggcgcgatctcggctaactgcaacctccgcctccgggttcagcttcccgagtagctgggattacaggcgcgcgccaccacgtccggctaattttctatttttagtagagaccggggtttcaccattttggccaggctagtctcggactcctgacctcaggtgatccggccgcctcggcctcccaaaatactgggattacaggcgtgagccactgcccctggccacaaggctgttttcaatccttgcacagatctctgtccgactaggcacagtgaatacccttggaaaacagggaatgctgaggtgggaggcaaagagccagggcgttcaagaaggcagcgcgcaggcaagcgggcagtgcccaagacccgagcaaaagtcacatgagctgcggggcaaatctccgtcctcaggccgacctcttggatctggtgacttggagcaagggaccttcctgcggcatctgggcggctcaaggcccgcggccttccctaggcgggctccagcccactccccgggactgccgccgcggcttcgtaagacccaaccaagcccctcacctgcttttgcacgtcagcatcgctgagagccatggcgagagcaatgctaggccggtgaacagtaggctcgagtttaggtttgaaaggtgaggtgagagaaatcggcaaagggaacccctgcgcagatctcgggttcctttactttataaccgcgggttccggttcctgccaggtgactgcacagttcatcctcatgacccttctcagccaatgggaagagagcgacgcccaggaagtcccgccctgtcccggcctgtgggcgcgtcctcgggtccttctacgtcgctgactcgtgacctgaccggtatttttttcctaaactgggatcttgggtaggaggaagaaaagataaggagttcctctatctgaaattagtcgggctgttttgaggagtactggttaggtatattggagaatgtgcctttattggaatttttcgcataattacacagggttatgggcttaggggtacatgattgttggccgggcgtggtggctcacgcctgcaatccggagactttgggagaccaaggcgggtgtatcgcttgacctcaagttcgagaccaggctggacaacatagaggaaccccgtctctaccaaaagaaaaaaaaaagggggatacatgatttctgactattcatgtcaaccttgattacctgaataaagtgtagggtttgtaggtttctccactctgaagttaccttttttaaccccctttccatactgtagtcttaggaaggaagccactatacaaagcccacacctagggagtgggaagctatgctcaacttccttattagggtggagcagctacataatttatttggaacttttctgagatagcctatatatttttcaaaagccttcccaggtcccatttagaggaatattaggacagaaatccccccaggctcatttgtttttatttggatttacctcaagcccgtttttttccccaaaatcccaaaggcaaaaacttttgaaaattcctttatctttaggatagactgactcctaatagtagaataagaggtcaaatggtacacccacttttttctttttactgtgctatggttacccaccatttttattagctttttatcttgaagaaatttgagatatagtaacttgtaagaatactgcattgacctcccttcacctagattcaacaattgttaacattttgctacatgtacattaacactttattttcatacacacacacacacacacacacacacacacttcctattttagtgtgtcataagaacgaggatgtagcaaattcaggaaatttagtttactaggctgaacattaatttcctttgtcccgggccaggcgcggtgtct

SEQ ID NO: 69598 - DNA, 1893 bp, Homo sapiens
tttctgaaattaatatctggaatggatgtagcactgtctagatcaaccgtgcttttgttttttggaaaacagtgtgataatctttatgattcttcttcttttttttttttttttttggagatgggagtcttgctctgtcaccaggctggagtgcagtggtgcaatcttggctcactgcaacctctgcctcccgggttcaagcaattctcctgcctcagcctcccgagtagctgagactacaggcatgtgccaccatgcccagctaatttttgtatttttagtagagacaaggtttcaccatgttggccaggttggtctcgaactcctggcctcaggtgatccacccgcctcagcctcccagagtgctaggattacaggcatgagccactgcgcctgaccacgatttacttatttttattttgagacattagaaaatacaaaaaagtacaaagaataatttattcccataccatgcaccactacccaaaattaacaattaacatttgtcacatttacttcaagacttcacttgaaaaacaaatcgtaggtatagttactatccccttttgcagcacccacttctcccccatgttagtttctctttaaaactcaattttcttcagttttgctgattcaccaaggaacaggccaggtcctgtctgaaaagaatgtaagctttacagagataacctctgaagggaaaaagttgttatgaatacatgcaaagatgagccagttggtagttttccaaatgtaattttctcctacattcttaggccttgtggagacactttaaaacatattttcagacaagtttcaaaaaactccctcctagataagcctatttgtggcttcaccaaagtcactggcctagattcctgtcaggttagtcagaaagggacggttcatgtgctctcacctactcccaggcaggtttactagatactgaatcagcaggataaataagctaactctggagtttgctcaggaggacaaagcgcgaaagactagaagtaaatgtaaatcatctgtctttaaatgttgagcaaataatttgaaaaggaaaaaacaaagtgtagccaaaaaatagtaactctaacttaggtgtctgcactttttgcctctttccagccaaatttctatgctacagtgatttaaaacctagatggcagatggcatcaagtcactccccaatttacaactctgtcatggcttctgcttgctcctgaagccttccgctggctctagtagatgagaccactggatctggccctgtatgcttgcctgccctcattacccctcctccctttgcacaccacctcaaagctttactggttgcctttcagtttttttgaaaacatctatttttctgcttgagaagttattttcctccacttaccacttaacttgtttttcatcctttaggtctcaaaatctctttgaggagagcttatcctggtcactctctcaccttcttctctattccagtcccttgtctgtttcaggacatgccaccaccttttttttgtttgtcttgttttgtttttttgagacggagtctcactctgttgcccaggctggagtgcagtggagtgatctcggctcaacacaacctccacctcccaggttcaagccattcacctgcctcagtctcccgagtagctgggaccacaggcatgagccaccatgcccggctaattttttgtatttttagtagagacgaggtttcactatgttagccaggctggtctggaacttctgaccttatgatccacctgcctcaggctcccaaagtgttgggactacaggcgtgagccatcgcacccagcccatgccatcatcttaaattatttttacttttttctgtttcaatgtttttcttttctggttttc

SEQ ID NO: 69599 - DNA, 2607 bp, Homo sapiens
gttacccatttcactgcaacctttgcctcccaggctcaagcgattctcctgcatcggcctcccaagtagctgggattacaggcgcgtgacaccatacctggctaattttttgtgtttttagtacagatggggagtttcaccatgttggccaggcaggtctgaaactcctgacctcaagtgatccgcccaccttggcttctcaaagtgctgggattacaggagtgatccaccacacccggcctgtactattagttttccaaggtcactaagcctttcctttgcaaaactttatgtccctattaatggcaccatcctttcctcagtcactcgggcttaaaaagcatcctgtggcaccagccccacaatagcagttcaactcttttatcacttcctttagaatagccttgttgagatatagatctcataacatagaattcacctatagtgtacaattcagtagttttcagtatttcaaagagtcgtgccaccatcaccccaaaaagaaactctgtatccactggcagtcactccccatcaggattttatcacttctgatctggctcagtcttctaactccttattgtcaatgccctccttgttccaattcagtacacacaccacgggcaatttgatctccctaaaacacactgtatcctctctcctagataccttccgatactcctccaaagaactctcggattcaagtaaacaaacatccattaatacaagttaagtatgttccaggcgctgtgtgttccaggtactgttaacaaaagcgggttactagttaagacttccttcatgccctggcgcctctgctcagccagttcccttcgcctaggaggacctctctacaccaccccgctatattccctccccggaattccttcccaaccttcaaggaccatctgccccaactagtggcgaacatcgaggctgtcgtgactgtgtagatacttatttgacctgctcccttggcaaacacttgaaacgcaatacatgtttgtggaactgaacatagcctgtgcatgcagcaaggcttctttccctggaatcgcctgcccttcctccaacacagcgaccagccggtcagaatcccaacccctcgactccggaaatgatctgagagacggaacttccgaacgtcgcaatcagatttgggcgggctaggagggtttgggtcttcaggtcacatctggacggagagacctccggggcctccgttggtcggtccttccgctccggataccgttccggatgtcaggtagttcaggtcccgccccgacgccggccgtgacgaaggcacgccggggtgacctcaccctccaacatggcggcggcggtagattagggccgcgggtcggagcactcaccgccgctgggggaccctgtcggaagcaactgccgccgccgcctctttcatctcttctggggcaggggccagggccaggtgaggggagtggggttccgggaaggctgagctgggtgaggaggtggttttcacctgggtaggaaagtgcccagagaccgtatcgagccaccgactccccagtggttccgacgacgcgtgagtttgagtgtgtgtgtctacaccggcgctccttcgcccgaaggtgctcggagcttaggggtccgcttcaccgtgaccggacctggccgcgcggccccgccgctgagcaggcttcttccggcgtggggtgccggaggcggaggagctcggccctggctccacgccgctgtccttccccacagacagcttcacgtggaaaacccgggtccatttttagggctaaactggggaacggcgacttctttttggttgagggaaaggttttcctgcgattcacttagaacactggaagattagctttgccagtcttagtcgtttcttctcagagattgttagaagtcttgtttcttaaccttaattcactgctgttctgacacctattttttcagaaaaaaactgccttcttgcccttggaggcagtacagttcacacggagtcattttccccctttgatttatcctcccaacattctgtaaagatcctatttcttgccttcataaccgactttctgagtggaggctctaacctagcgttgaaaatcggacggatctggccagttgttcacatgctgttgactgctggctttggttagctcttagccactccctgcacaagtgtttgtttattcaaaatagctatctcactgtctctgtttagaagtttgaactaagctgagagccctccctccttacttttatttttttgttgttgttgcgtaaaacaaaacaaaaacttctttggcgaaattataagatttcctctggaggtttagtataaagcagaatgttgctctctgccctgactagtgtgaccttggatgagttgccacacccttcagataccttctttctttttttttttttttgagacagagtttccctcttgttgcctaggctggagtgcaatggcgcgatctcagcttaccgcaacctccgcctcctgggttcaagccattctcctgcctcagcctcccgagtagctgggattacaggcatgcgccaccacgcggggctaattttgtatttttagtagagacg

SEQ ID NO: 69600 - DNA, 1866 bp, Homo sapiens
tcaagtgaaacaaactgcctacctctcaaggtgcagctacttttgaaaacctgcagcagaggaggtggtgccagcagccataatctgttggatgaatggagtgatatagcacatagtcagttaggaacaggcaggctttggacatatagatttgaaggagaaaaataatattttgttttctgaattattaacagaaatggctaggacttagaaacagggtcttgctttgttgccctggctggagtacagtggcatgatcatggctcatttgcagcctcaacttcctgggctcaagtgatcctcccacctcagcctccctagtagctgggaccacaggtgtgcatgcactaccacacttggcttattttttgcagagagaggtttcactatgttgcccaagctggtctcaaactcctggcctcaagcaatcctccccgcttggcctcccaaagtgctgggattacaggcatgcgccaccttgcccagcctgttttctctttctaccttgtttttttttttttttcactctgcctttttacccggcgaatgatgaactgagaaaaggattagaaatcacaagatttgtttcttgccccagctctgccaaatactagccctgtgttttggaaggattcatttaacttctctgaacctcagtttcaactacaaaaagggaagaatagcttctctgtctcacaaaaataatgatgtgaaagtgttttgtgaaaatgtcacacttttacaaatgccaggttttcacatgcgtctctgaagagtgtggtttttttccctctccttaagtctgatcaccatttcctcttagtttcagttttgacttttatttgccctgcagcccggtgagggcacagactggttcatgtgctgtgattctccctgagtcatccttgctccctccctcctcattctcttttcatttcctgggcttgtgttgctacgttagaagtctgtctgtctcctggaaagggcagagcaagtccactgtggtaaggcttgtattttactttctccgtcgtcacatgataaatacttcttgtgaaagatttacttttagattccataaaagattactggagggaatgtcatctgtctattgtaatatttaagtattttgaataaaattaatctttgtcattttctcttgacatgaagcttctgattttagaataggtttttgtttgtttaatctaggatatttaaagactatctcttggaagcttttaggttaataatttgttagaatagttttcatattgtgggaggtgacacacagggatgatctgaaattaatgaagtgggttgcagctaaaatcaatttagtaagagtaagtactgttttgggaaaatctgcctgctgtatatgtgggtgtggatgtttactgtgttgtactctgaaatgtgttttttgtggatcttcctcatcaagttgggtggaaaattacttctctgtaatttcttcagcactctccattttcttattttaggttaataatgatctgagaggcgcatttggttataagggtccaaagcagtgatctgtttccattttgcgacttcgaggcctcagaaatataaaactagctggttgatcccggctagttttatatttttgagccctcaaagttacaaaatgtcagtggagcctttgtgtgttttgtgtcagtggagccaaagagatggatactcccaacaatacaaatattttatatgaagaatgatttagattgtcagaatcgttctaagactacttgtagatgttattctaatgtaagttgtaactaacgtattatccaaaacagctctttttcttgacagatatatatataaagtctgagaagtaatgataga

SEQ ID NO: 69601 - DNA, 1569 bp, Homo sapiens
actcgggaggcagagcttgcagtgagccgagattgcgccactgcactccagcctgggcgacagagtgagactccatctcaaaaaaaaaaaaaaaaaaagtttcatatctggccgggcacaatgactcatgcctatactcccagcactttgggaggctgatgagggcagatcacttgaggtcaagcgttcaagaccagcctggccaacatctctactctacatcccagctctactaaaaatacaaaaacttagccaggtgaggtgatgggcaactgtagtcccagctactcgagaggctgaggcagaagaatcgcttgaacccaggaggcgggggttgcagtgaggtgagatcgcgccactgcactccagcctgggtaacagagcaagactctgtctcaaaaaaaaaaaaaaaaaaaaaaaaaagtttcatatccatctaccagagcagagcctactaaatcatcacggattacagacactaagaatgagaaagcatttcctcttacatctagaaaacagaaatgaacacatcagctatattccaagcaaaccaccacaattcagttccctcagcagcccgtcgcactctgcaggactcggagccagcttccagcctcacgaagccctggcccggcgcgctggggtggtctgagagccattgaggtaatgtccatgcagaagcctgggcccagaggctctattagtcactggtgaaagcaccaggcaatcctttcccacatggggaacatcagcatgggaagactcaaagtctcttttcataacgattttctaatgcatctggccagatgcgttattcagatatttctgaatatttcattcagatattttctgaatgaaaatatcctacacagagcaagggagggcactgacaagcacggggcctcccgccaagcccagaacttctgaattatttccatgaataacatttacacatacacaccgaaccaaggagctgtggccagcgtctcttgtgatttgacaaccactcttcccgtgcaggtcttacaagataacgcttaaaacaaacctcattatgtctatggtatttttctttttataaggtgaatgatcaaatctttgtgattttccaggggcactcagagtctcagggacagttttagaggcaatctggacagttgtttaaggcaggctcgcgggtgtctgagagagacttgattatccattaacaaaacaaacctgatgtttcacaagtgatgaacctttgttctttgttttttccccttaaataagcacaaacataataaagtcaacataaagcatcaaaaatgattctgctatacagaacctctgccatccaggtgcattacacagaaaggaaagaataatctttcacttttttttttttttttttttgagatgaagtctcgctctgtcgcccaggctggagtgcagtggcgtgatcttggctcactgcaagctctgcctcctgggttcacgccattctcctgcctcagcctcccgagtagctgggactacaggcgcccgccaccacgcccggctaattttttgtatttttagtggagacgg

SEQ ID NO: 69602 - DNA, 1916 bp, Homo sapiens
atggcgtgaacctgggaggcggagcttgcagggagcagagatcgtgccactgcactccagcctgggcgacagagtgagactcgtctcaaaaataaataaataaataaataaataaataaataataactaaataaataaagaacaaggctttcaccacatcccaggcagagtccaagtcagggcagagcctcacagagcacagcagggcctgtgccgtgccaacgccatgcccctgcctggcagaaatgccacccagcccctggcagaaacgcctcccctctcctatggaggggctgatgacccaggagcggctggctgctggtgtgagtacacgggtgacccttccacaaaggcccctagctgggctccctgctcagttggccgggtttggggctggatgtctgcaggggtcctcagggatacccagagggagaaacaaggcttttggggaaatggtgacacctggggccaggtttctcacagccaggccccatctctccctgcctggatttcaggggaagtggggcttgggtaaacaggaacggacgtggccatcaggccggaagggtgtgtgggccacagagaagcaccctgaggctgtgctgtcatccagagtgccaccccgcttttccagggcacagcaaggaagtgcctgctggaaggatcctggggacagttgttaaggcaattttatcttctcatagcatgcctgcctcagttccgcagccaggacggtgccttactgactccacacacagaggcagctgggtccaggaggcagccatcccaaacgcagtgacctccagcacccaaagctcagagttcccagctgaacccaggaggcacccaccttcctgtctctaggcagatgccagctggtgcaggagccactcccagtcccaataccaggcctggtcacgtggtgccccgccaggcttgggggtgtgcacttgcccgctggcctccggtgccctcaggcctagcctcattgtcacaggaacggagctcctcggggatggccaccttcctggacttacccccaggagggacacgctgctgcctcccagggcccttcgtgccactggcccctttctttccacccccatatgctacccctgcctactcccttccctggccctgggttgccactcctgtcctgttctcctgctgtccccaccccagccctgaccccagatggctctccctacaaaaacaccagaaccccagagaagctcaatcccccaagtccatctgcattttaagaagccctcacgcactcccagcccagagagggaagctgtaaaggtggacaggtcatgtcgggctttgaacctgcaatgtgatctcaccttccccgtctgtaaaaggggacactccctgccttgtgggatcacatgcagtatcagaaaaagcacctgacatgtgacatccacttacaaagggttttcccttctctttggttttgggggagaatgggagaggcccaagcagaagctcctggaacaccgcccatcccggacccagggttgtagtcacctgaacactcacccagacaagggaaacttcacagaatgaatgtgaggaataaaatgagacattcagttacacaaattaaaccaaacccagatgcagaggtgccccataacagaaatagagcaactactgccagccttggatgaaagctcttggccaagggccgtgacggcggcggggaggttcagcagctgtccccaagcacacaggacatttggcacctccaagcccagcctgtcccaccaggccacggcacactttccttcctctgaagaaagggggtttgttaagccaacgaggagggaagccaaggactgcccccggcgccagcatggctatgagcatagaagcgggctgagccacaggctgggggatcccatgca

SEQ ID NO: 69603 - DNA, 1630 bp, Homo sapiens
ggaaaaaccgcatcctctgcagctcccccacagtgagagcgaggactgagggtgtggataaggctccaggaagggggtgcaagcctgagaaggtggaagagctctgggtgggtccatctgctcctcacctgccccaaccctgcctgcaggtgaaggccggtccagccgcagaaggcccagcccccagcccacttacagaatccgcactgtgctcctccagccggcccggcccctcgctgcccaccgagccatcatgaccccagcaccgctgcacattcgtatttgttgaatgaatgaatgaacccttgccagcccagccacttggtggctgagggcttcagagctctcccagggtcccctggggtcattcagccactcaacagtttcccagcagcagcagcgaggatccgcacatcattgccagtgctctaaggagcgggcgagccccagtaagcggccgctctgaccgcgctttgtcagccctgagctccgctcgggaggagccggcaggtgtctgcggtgctggaaagaccacggtgtgggcggggattccgatccgccggcaagggtggcctgcacccggccaggcccgcgggttttctcctctccggggctggcctcggcccctccccctccccgcgccccgcacccctcccctgaatccccaggccacgtggagaggacacaacaaagccttccccgcctccgaggcggacccgaccctcagcaccgacctgccggccgcgccgaggagggcgcccgggcggaggggaggcgggagagacccggccctcaggtcgctgctgaggcctggggctctgaccccccgcctcccctcctctggctcccaccgcggtcgggcccagggcgggcggcgggccctgagctccacgccggggcaggcggcaggcaggggtcacgggctggggctcggcgcgtaccccgggaggggcgcgggtgcactcaccaccctccagccgcgggggcgcgggcgcgtccgggccgaggcagcgtctcccaggcgcgcggacacggtcgactacccgcttcctccttatggcgccccgcgcgcttcctccttcggccccccacgcccgggcccgccccggcccgccccggcccgcccccggcggcttgcggggacccggggagcccgcgccggcgcggggctgtggagcggggcggggagccggcagcgcagtgagaaccaggctttccacccttaccccttacgcgactgtttcagacagtgtcgtccaactttaagttggccacttactccagcgccgctgggataattcctaatgattctctgggaaacattcagaatccccaggctgtttctggaacagtctggggtggtcattctaggtcctcacggaaccaggggtttggaaagtgggtgaagccatgtgggttgcagagaatctggcccagcccctcaccagtccctgtgcttgttgtttattctttaattatttggatatcaactctgatttaaaacatcagtttaacatatagataatgctgggactacaggcgcacaccacacccaactaatttctttttcagtttttagtggaggtggtggggggggggtctccacctctggaggtctcaggctggtctc

SEQ ID NO: 69604 - DNA, 1542 bp, Homo sapiens
cccaccaccatgattggctggctaatttttgtatttttagtagagacggggtttcaccatattggccaggctgttctcgaactcctgacctcaggtgatctgcccgcctcagactcccagagtgctgggattacaggcgtgtgccaccacacctggccttttttttttttttttttttttttttttgggacagggtcttgctatgttccccaggctggtcttgaactcctgggctcaagtaatcctcccacctcggcctcccaaagtgctggggttacaggcatgaaccactgcacccgacctgaatgatgtttttggcaatgaaaatgaaacacaaaatccagcaaggtttgacggggaaggcgagctggcgaccacatagtcacagtcggcctttgcttccgctttatgctgcagtttctcactgtcacttcctgccaccgggctcgtcttcctgtgaaaattcagcccctcttcctcagttacccctttgcaacagaacgaggccggcattttctaaagcgtccttgaggagtccagttcctaaaagattatttcagagtccactgttgtgggctgacttgaatgctctcaaaattcgtaagttgaagccctgacccccaggacctcagaacgtgactgtgcttggacacagggactttccagaggtgattaaggtgaagtgaggtcactggatggccctcctcctatctgactggtgtcctgatggggacgcggacacccacacaggaacggacccggggagaacaacacatcgtctctgcgccagggagagaggcgtccggggaacccagccgtgcccacgcatttatctccgccttccggctcagaattgtgaggaaacccgcttctgttgtgcaagtcccgggtctgtggtgctcggccatggcgcccccagaactgcatccccaccttctgctctgagccacccatcccctctggaagggctgagcttctctccctttccaccttctgttctgagccacccgtcccctccagaagggctgagcttctctctctttcactgcctatgctctgggaaactttcagaatccccaggctgtttctggaatagtctgggatggtcattttcggtcctcacagaaccgggggtttggaaagtaggtgaagccatatgggttgcagagaatctggcccagcccctcactagtccctgtgcttgttagttattctttaattacttggatatcaactctgatttaaaacatcaatttaacatacagataatgctgggactgcagcttcgccaggtggccttcctctcccggtctcgggaggcgtcacccccatcttgtccccccaagatcaagcgaaaagggcaaagttatcttttttttttgcaaaattcaaacctttccctccttcccaggtctgggtcacttgcgaccctcctctcaggctgcttctgacaggcccaagtcacagccaacttcaggggagctgtgttggatccctccaaactccgggaatgatgtgacctccccggcgctcaccctgggc

SEQ ID NO: 69605 - DNA, 1195 bp, Homo sapiens
aatggctattaccaagtgggccatttctccctcctgcccctccaggcatctcatccccccacactgcaggaggtgaggtctgcacaaggcctctgctcccctgggaataagcccatgcgttccatggtgcctcctaagcccctgaactggagcccaccccagtactggcgggggcctgattgctggagtgaaggcttcctccttcctggccaccccattcccctcatctctgggacagaaaccgacaataaacgcctgcccgagacctgggttggaaaaacagagtgaacacacaccatcacatggcaggaggccaggtgcacagagccctccctgcagttagttccccaggaactggggctgcagggatggcccagagctctcagccaacatcaaagggccacagcaccggggctggtggctcctggccaagtcagcaccgaccacagagctcccctctctgcctagacccagggctctgccctgacagcctagagaagggcctggctggtggtgcctggctgggtggctccctgcctaggaggtgctttccccaagcgctgggccttgaagggccggtgggttgtgagggcaagagtcttgctagaggagaggggagagatggcgagatgcaggaccagagcctgggggggtgaaaatcatgttcacccccatggtgaaatcacggccatggtgaagaccagtcccacccactgagcggaggcaagtagaccccaggaattccccagccccgctgctgggtgggtgtgaccctgcagaagctctgggaggctggcatgactcagctgttgcagaaagaccagtctggggtttcccatattgcttcaagcagccttttccctgggactgctctatctaatgccaacaaccctcagctgctagtgagccctcgccaccaactttcagagggctaactcctaaggcccaagggctggaaaactccaagcacagccctcccagagtctggctgtggctcagaatgggtgctggggcagggcgagcaggatttcccagagggagctgggccctctggcgtccgccccagggctggcccagcccagggacccccatgatatccttcctctcaccctgccctttctgaagtgaactctttggatattggccaaatcacacccagcagagggaagggagtggaggtcccggtgtgggggtc

SEQ ID NO: 69606 - DNA, 894 bp, Homo sapiens
aattctcttgcctcaggctctccagtgtgccaccacacccagctaatttttgtatttttagtagagacgtggtttcgccatattggccaggctggtcttgaactcctgacctcaggtgaccctcatgcctcggtctccagaagtgctgggattacaggcgtgcgccacggcgtgtggcctttttgtgtgcttctgacagtggctctggcctggcccagcagccttcctttctggtgtcctccctaaagcaatacttatcatttcctgccacctgaggtggctgtgaactgcagcccaaggctgcctggtgcagctctgacaagcaagcccttctgaggaacaagagcctgggggtcaggtgactaccaagccccatttcctttcccaacaggcaagtgacccagctctccttgtacgggatgtcctctagggccacaggatatgcactttgagctgctcatccatttttgtcctctgttctacctgacacgcccacatttgtcccagccaggcctttctttgttctggaatagctgggaacgcagctggaaggactgggagccagcttccactgagtggcttctagctgcctgtaggcggtgtggctcacgtgcacagagctgctgcggtctttccctccctgcatggcgcccctggatggtcacagggtcagccgtgctcccaacaatgcaacacaccgagggaggggttagagagacagctggggcgtgcctcggaggcttcttagaacaaagaaagaggagctggccaggactgttccctgtaatctcctggggacaattttcaggctaacgagcagtgaccctacgcactgaatgacctcgagatcgttgaaacatctgaaaggtttaggcgtgggtgctgcagacccca

SEQ ID NO: 69607 - DNA, 694 bp, Homo sapiens
tgcacatcatgcagcaggctttacacggtggaaatgtaatccatgctaaaactagcatcctgctcggcaatggctcaggagctgcctctgcaggaaaagggagtgaggcgggagggagagaacaggcagaaatccccatttattcatggccagccctgagggagcggccttctcccactcgtggtgttattctgaaagagcggccttctctcactttcgtgttattctgacagacagcaacgcctgccatccacttttctgtgacctcgcctgtgccatcagaaaacatacctgtgtgtgctagccctcctgacttctctctagagccaagaatgtggaaatgctaaagaacttcagcacgtgggcactgcaccagctgcctttgctgcccggggcacattcttccagaaaggaaggcagtcagggaaaacaacacaaacatcacaaagccagccctcccttggttttggcccactggcctttccagtgaaaacaaagctgctatttccagggtctcctccaggagacaggccccaccttgcctgcaaggtagaggcatgaagctgattaggcctgggccaagggtctgtgacaaggcttgggatttataggcgcttgtgtgactaaaccatgaattgattatgagactcacctggggggtctgttggacactgacattcctggcctccacccc

SEQ ID NO: 69608 - DNA, 954 bp, Homo sapiens
tgcagagtctgatcttgaactcctagacacaagcaatcctcctgccttggcctcccacagtgctgggattacgggtgtgagccaccatgcctggctgcaattatatttttagccaagcatcccaggtgatgtttattatcagagaaatttagaaacattaaagtggtgtttctcaaattgtggtctttggaccacagcatcacctgggaacttttgagaactaaaaattctggggctttaccccagaggcgctgaatcagaaactcagcccaacgtgttgtgctttcatcacaagccctgggtgactctggcatgggaaagcttggttaccaacattctcggacagggtgagcttgagccaaacccaagtcccggcatcaaccccgtttaaggaaaccaatacaaggctgcctggccctgcccctggccctgtggtgagggagacctgtgctgtaccaggagagtaacaggagcagtaactccgggcatcaaggcttcgtccgtgctttatacgacttaatcctcaaaacaaacctatgaagtgcagcacctttgcagatgaggaaactgaagcagggagaggttaagtaaattgccaacagctagcaggtggcagaactgggcttcaaatccaggctttgtttgactccaaagtcaggttctgaaacatcacgctgctgtcccctgcagcagaggccaaagttaagagttcactgaacttgtgaaatgagagttccttggctggaacggttaatgccttaaaatgatgccatttctcatcttccagtctaacatctcagcaaggaaggaccgacggctggaaaggcacccaattctgtgcttggtgctgtagggaagacagagaaaaacaccacgcacttcccgtcctgtgtcctacggccacccagggaagtaagacaacatttatagctccttcccctagatgcttttttt

SEQ ID NO: 69609 - DNA, 2150 bp, Homo sapiens
gctgaaagcagctcggcccagcaaacaccttctggaaagcgttcttggaccttaaaaaaactgctctgctctccttatccccacatgttcccttcatcatggctaaatcaaggtgtgtgattcaaatgctctccaaggccacttgaggcctctgcccctcgggtttgcagcctgtgtttctgtcctgaagccccacaggacaccggacccccttttgattcttggctctcttgatcatctgtaatcggctgaacactttgaagccttcgctgatactggaagccctggggtgcagggcagtggatatagggagtcctagggttatagcatgcacatccccaaaggtgtcacccagctggatgtgattacagctctggaactgcctaagcatgcatccactggtgctgcatgcggcccctggggcacacattttcagtccctttctttacctacaggagaaaaaaagatgcctgggggacggactaggcctccctcaagacggcccggtgcactggtggctgaatcacccagagtccctccccgtgtgcccgtccttccctctgctgaatctgtgaataacccgggggcagagcctgccactttccttcccaatgacagacttggagctggggacatgtcaggtcctcaaggaataaatacttcctgaatctctgaattgagtctgatggaggagtcctcactgactagaagatgaggctaagaacctaaaagggactggggagaatggactgcgggcagcaggaaagacaggaggcctcccttcactgagaagaaaccgagacacacagaggtgaggaggctcttagggccgtgtggcgggtgggcgccctgcagccctgcgtgctgacctgctggcgacgtcctcctcggcgcccgtgtccagcacgctgctcaggttgtgctcggcctgagtctcctccggtacctcctgcagtgcctcagcctgcctcagggacaggcggtagttctccagctcgatccgctctggggtgcccctcagtcgcttggcgatgctgggctcctccaggccgttcacgcctgaacctgcgggacaagcacagaagcactgcactgaggtccaaccacagacggggcgtgggggtgggggctgacacccaggctgcaggccctcctgccagaatgtggggcaggacaaaggtcagagcatttgcagagttgccagaggccagagaaggaccctggcatgtgagagggaatttcactctgcaggagaaaggaaggtggccctgtctgccctccaggtcagagcgttctctctccttcatcaccctgaacccggcccccagaggggagacgcagtctccccacaagagtgactggtggtgaggggtgtgggccagaccgcaggcagccaggagccaggtgcccctgaagcagccttgcctgagaagggcatccccggtgcagtctgccccagggatccaggcccccaccaggtgcctcccccaatgcctgccccgggatccaagtccccaccaggcacgtgccccaccactgagggggcctggccagctgcctgaagaacgtctcatgctgcggatctgtctcctcacagttagataaggcactttcggtttcataaggccacgtgggcgatgctgcccctaccgcagcaccgctgctcagaggaaggacaccaggcccgaccgctcacagaggtggcacccaggcctctctgcgatgcacaggcacacttccccatcagtcctccgtgggcttctgaagccacggggtgccctgcctgcgtcctttcaccctgtggtttcagcatcgtcggcgatcttggccggagtcctttgtgtgcacagggcgtcacaccaggtgattttaaaatcccatcactctggctgggtgcggtggctcacgcctgtaatcccagcacttggggaggccgatgcaggtggatcacgaggtcagcagatcaaggccatcctggctaacacagtgagaccccatctctactaaaaatacaaaaaattaaccaggcacggtggcgggcgcctgtagtcccagctactcgggaggctgaagcaggagaatggtgtgaacctgggaggcggagcttgcagtgaaccgagattgcgccactgcactccagcctgggtgac

SEQ ID NO: 69610 - DNA, 460 bp, Homo sapiens
agaacaaatgggaacggccgcctcatgaaaagggcaagtctaccaagacggcaagagttctcacagcactcaggagagaaattctgacgaagacgccaatggcacagaggacatcaaagttctgaaaagagactacctcgaatggctcgatgtcctgacacaagcacttcacttcacggtagagaggagtttggttccgggaagcagcttgctcaccagaaaggggcccagtgttgacacgtggcgggtgaagggcagaggaggacatgggtcagcacgagcaagtccaggctgacgtgctttccccaagactccaggctctattccaaccctcctgtcctccagagcagagtgcccctgacactctcagtccggaatgcatccaaagccagctctgatgtgaccctcctgtgagcagccacacagcctcaggcaggctcggtctacatcgcaggatcca

SEQ ID NO: 69611 - DNA, 519 bp, Homo sapiens
cccaaagtgctgggattacaggcgtgagccaccgcgcccggccgaaaatgtttacttttaaaagaacctactgacctagtctctcggtagtaaaatgataggaaagaaattttatagctggtctcactgtaacctggtctttttagagtcttagttctggggaacagggcaacaataaataaattgctgccataatcctgttaatcgataccagctcttccttggtcaccaggttgtactttgtccatgaaaactactctggcaggagtccccaccccctgcgctgtggcccgggctgggtcatagacccaccgcctgtcaggaaccaggccgcatagcaggaggggagtggctggctagtgagtgtcacagcctgagctccgcctcctgtcagatcagcggtggcggcacgagattctcccaggagcgggaacctattgtgaagtgagcatgtgagggacccacgccgcatgctccttatgagaatccaactaaggcctgatgatctgaggtggaaga

SEQ ID NO: 69612 - DNA, 1431 bp, Homo sapiens
tatcacccaccatggcccttagacctgacaagctgttaaggtactaaatcagctctgatcaatcttagccttctcctggaggggaaattccaaaatcctcctcaaaaaatttttccattgctaagtttcctatttagattaatggccatttcctactgggtttaagcctcttgcttttcagaagactgatcgcattcttctttacatgacttcaggttaacccagcagcccttaattctgtgttaatctaggatcccacagcattttccattttctcaaactcctcctcaccataggttcagcctctgaaactatgacctcactgctgctgaacagtgccgcgctgtccctgtgctgctttgccttcctagaagacggtcccctaaccttctccaggcgcccctccacccccacctgctaggctccctcaaccacttctgcctgttccctttggaacagagctgactcacctgcccatcctctgccactgatcacaatctttcccaagctgctcttccttgccctaccccctttctttggcaggagtgaataagccctatttttacttacttgctatcaacttctgggtgagctaagtgacaggagcaccagaggtcacttacctccatccaagcacaccagaaatccccatttgtaatccacactgcacaaggctatttttaccagctcttgccttgtcagtttataaccatcatataaatagcaactatatcttgtaggattccttaagcaatcattaaacaaaacaaacagaaattggccccttaagtggacctaatgatgaaaaggacaggaaaccaaaataatgcaacatgctctgcttctgaatccttcggtttggcttccgtggtaacaaatgccgatgggggaacctgggtgtgctggtccccgcagctgacctggggtcaccctagaactctgattctgtagacaggtgagtggagaatggccaaaggagatgtcactgggataggtgggtaggacaacagagtatgtctgtaaaaaacgcagtctttaacacagagaaaataccaatgaaccatcataaattggtcaactgttcatgatgttttgctttgttagtagtgacacatttgccttgagctggccaaatgttctagccaggtttcccttgtgacccatagaatttgagagacagctggccgaaatgaagagttcaaccggggccaataaacagttttcctttgtgggaagctaacaggcccaggtgggtgtcaaaaccagtttttgacttatgagtgttgtgatttttaaaactcagctataggagcacaaaaaaaaaaattggaaaaaaacaaaaataaaaatcattcctgggttgagctatataatacatgacatacagagtttcaaatatagtgaaatcaaaatcactgccttctagagaaa

SEQ ID NO: 69613 - DNA, 598 bp, Homo sapiens
agctacacccctcaccacaccacttccatgggaaggaggatccatttggttggaaatgaaacattcagagaaagtgagtaacaagcttgctttcttctgctcaaggaatactgcaaattccccaagctacactcaggcagggtcttgaaagtccacagcccacaacttctccccacttatgcaccccttgccctaggggtgaccctaccctgtccggagcatattgaactatagccaaaactgtggtttcttttctcccaaagaccagttgccaaaaaccaactgccatgacctctctgggctccaaaattccaactgctctgggctccaagccagcaacctaccacattttttttctacagaagacttattaatctttactcaattcagcaccaataagattagccagtgtagagccagaggggctaccagctccattccacatctaccctggactaagatgccagcacctgatggccaaaaggcccaggccaccttctggtacctgctggggcccagtggcagtctcaggtcctgagctgggctttgcccaccccttggttttctaaagcacttgtctagtttgctacaggcacag

SEQ ID NO: 69614 - DNA, 595 bp, Homo sapiens
ccatagggggaccagagcaaccaaccgggagggaagtaggtttgaattcagatcactcaatagctggacatacggccaagctcagcagggttcagccatgaacacagctccacaggtaatacagatttggtaggggtgggctgccttttccctacgctgctgtgttaccaatgctcctccttacgaacggaggaggctgtattaggccgctgggattctgtgcattcctgagcttaaacttggcagaccactgtgctgcactttgataccaagcacaattctggacaacagatttgggtgttgaaatgaatgaggagtgccttggtctaagctgatgctttgatacccagagtcttaaaggactaaacggaagcgtggcagagggtgaggccactgctcacttgtgaaagtcagcccaccctcctccacaccagtgctcctggctcaagctgacatctcaaggtcattcagcacgtgcagcaaaaaccatctgggtaacacgtggtgaaggtgaagcacacatctacacaggcattacagctcatgatctgcgtgagtctcaggctcttgctcccacccctggctaccatgtaca

SEQ ID NO: 69615 - DNA, 1170 bp, Homo sapiens
gtagaaaaaaggaaccagaccatcccatctcaaacaaaaaacaaaaaaatcttgagacaagaaaatatatatcctgaggcagtatctgattaaacaccagatgaaatgttcaagtcacatggtccactggaaggggaaataattcccaggtaaggtggtgacaacgggtttcccaaagagggtgggactccaagtagaaactgaaatctggagcgaaccaggctaagctacctgggagggtggaccaggcacacgcaacaggtgaacggacgtacgggagtagggacagcaaggcacatcggggaggggtaagcacacagaaaggttgagcccgcctacaacacacaacagcccatcccgggcagctcacccccatcttcagggccttggaggcagaaggaagattcccacaggtcagggtccggggctggtctcctggcaggcacactttggggcagcaggagaaggaaggtgagtaagactgtctgccccaggaaaaagggcaagggcagagagctatggatctcattcactgggataaaaaattaagtgccaaggagggagaggaaagggaggaaaaataatccaaattgttgtagtattgtgcaactgaaattccatgcataagccaggaaattcaaaggtcacagttcccacagcaactgtaacctgacccgtcagcttaagtagcctttggcactgccagcccccaagcgcctgcagcccctacaatgcccacccagacctgccctcaggcccctgcacgtcaggcatgttgcgccttgcccagccgggcccacgtgggctgcccacctctggctacaaggggccctcagccatgcccaatagttctcagttctttaaggagcatcctgtgactccgagcctacttgctgtgggtctttacttctgactcttctgtggggtgagtaagcctccttcaccacccagatggggggaaaagggagaagagaggtgtgtgcatgcagacagaggcgctgctaccaccctcttcactcatgccctgtggcatcaacacttgccaagcctcaccatggggaaaacaaaggtggggggagcctggggagggaatgttgtagttcaaaggacatcagaaaagacggcttaccaaatgggagaaactttctaccagtctgaaatctgataaga

SEQ ID NO: 69616 - DNA, 1842 bp, Homo sapiens
cctctacatcaacccgtttcacataaatcacaattaacatctgcattaaacaccattaaaagaacacaaatgtggtttgaactcttggacatactttctctgcattcagagtcaggaagaccagccaagatacggggctggtccccgccccttaacgggatgcggcacagaggccttgcctgaggggcctgccagaccccttcgtcccggctacctactgagcaagcggggtggcggctcaccagtgccgcatgccaggcggagggtctcgctgcggctggctttctgctaggccaggcaagcccggttccgtgtagggctcctcaagatggtttcttagctgggaatttcccatgtgccccggagacctccaaaagcgcggtcccctcggaaggcagccagggaaggggcatcactgagactagaggcgaaggcggctgcgatcgcccggccgcgcccaccgcccccacaaacggaaaggcgcgccggggtcctctcggccacctacctgccagggtcgcaggagcccacgcttggcgcacgctagctccaggccggggcagcgggacggggaggccccgagggccaggccgcggaggcaggacccggcggagcctcggcccggagcctgcggactccggtaaagacagagacctcccccgccccaaaaagcaccccccgaccccgcacccagagccgggctaagcccccaccctccgcctcccgcctgaagcgggcagcctccccgcgcttccccgcgcctgctgccccggaactcaggaccagccggcgcacctggccacgcatcctccggcgggaggtgaccacacgggaacgcgaggcgggggcttcctcgcgccccgccggccggacgcagggttataagcgcagccggaaggaggcgcccgcgccgcggcggctcccggcttcggcactgcccgggcgggaggctcggcgcgcgtccgctcgcggggccacccgctccagaaccgcccgccggaaccagcccggtgcccgagaccccgagctcgggcgcgagcaggatgcggctccccggggacggttggcgcgggtcggagtcccgaagccccgttcttacctctgcctcatactgcggtgtccctcggcgccggcgtcgctgtggcgggccagtgccgccctgttccgcagcccgagcgtccggcgcggtaggtagcagccggagaagcggcgcagccgggggatgggcgggcacatggaagggcgggggttgtggccctcgggccggaccacgggaccccagcctcgggggcgagatatctcagtacacctcgaaaactggcaagcggcccccgtcctcagggactccattgctacttgcacgctcagtcttgccagaatctcacgggatatgtgcaaaaggcaaagaaataagctgtcgccacgcccttcgtcctctccgtccccctgcaggatccatatggtacattcctcaaagcccaacgggagacgggaaagaactgattggttgggaatcttggaaggggcgagaagccacatgaagtggccaatggagaaacccggtgggcatatcaaagcctgcccccggagagaagagaggatgtatttaaaggggacttgttggccgggcgcggtggctaacgcctgtaatcccaacactttggggagccgaggcatgcggatcacttgaggtcaagagttcaagaccagccgggccaacatgatgaaaccctgactctactgaaaatacaaaaattagccgggcgtggttgcacgggcctgtagtcccagctactctggaggctgaggcaggagaatcacttgaacccgggaggcggaagt

SEQ ID NO: 69617 - DNA, 671 bp, Homo sapiens
ctcatggggagggaccctctttcaaacttttggaggggtaagggagggccagacagtgctgagaccaaggcgatagtggtgggcggggggcctgaagttccatcatctaattgggcttcttcacgggtgcattgcccataagtgccatattgattccctcagctcccagggctgccagatagggccggggcggccagagcctcccagccagtctcctcctgcaggagcaccttgtcagtttacctcagatatttgctgctcaaataccatcttctgtgtgtatcacaacatgacacgcctacgaagaatgctgagctaggatttctagatgtactgttacatggtgatttactggtctggaattgctgccttgcaggaggtcaggtgaaaacactaccagcaaaaccaagcatttatggagccactcccttgtaccaggtcctgggctgggatgtctgactgcatcagctccacggtggtaactgtggctttagcctgcccagcattcagacccccttgcttggtaacagtgcctacatcttagcttctattgtggaaactacctttcccccactgcatgcaggtctggtgggcatggggatggaggcaccttgctctccatccatgaggaaggcagcacatggtccagcctcatctagtctgacctctct

SEQ ID NO: 69618 - DNA, 2422 bp, Homo sapiens
cccttgccctggaatatagatcagaacacttcatttagtgaagggacctgttccgagagtgatgatccctccctcgtttgagacactgccttcatcctgagcttcttggagcagcccaaggccctgccagctctctttgcctgtagcttgtaggcatttatgacagttgcataccctgccctccaacggcagcctgagagactgaactattaccaagttcacctggaaaaatgtcaccctgattgattagaatggtgggtggccatcttagctcattagaatcacctgggaagttaaaaaaaaaaaatccagtatgcactccaaattttcccaccaccactcctccccacaaaaagaaaatttaaaaaatcccagtgtttgggccatatcccagaccaattaagtcagaatctccagggattggacccaggtagcaggatttctaaaaatctccccagcagccaggcctgagagctaatgaatagcaccacagggcccagcctttcagcctacagcttgtctcggtttcacccttttttcatttctttacaatgaaaattctaaatagttgatcacagtgccagaccaataagaaagcattttagggaggagagaggagggaaggggttggcaggcacggagaggacttgacacacagaaagcattttgctatggagtcataaccatttgattctaagacacatgcagcctccagaagtcatgcggccccgccctctgcttccaggagggaatgaacttggccgtccttttgttgcacacgcccgggagctgcgccggcgcagcgcgccctgcagcctgggagcgcaagcgtgtgcgccactggtcctgggccaccaccgcgcgccgcgggcgggtgcagggcccctctgccgcagggaaaccggcgttccccgcgcaaagcagccgctgctcctaatgagctcatgggttcaccgcgctgagctagccagagcggacccggcttcgccaagggcctgctggctgtcctgacacctggcctacctcgggggtgcctgggtacgctcttcctttgcctgcgggatagaagcacaatgaaaatggggtggacgtggctgggagacagccctgctctctggcaggctctggggagtgtgtggtacgtggcatccgcactggtgggtgtcgtgcgatgatcgagacacggatactgggtgtctttcccactaggggagagagggctgcgtttagagggaaacgaaatagatccgagaaacacaaagatgtcacaaaggaaacgcttccccaccataagcaatctaaataaatgattcttagaagacatccagcaaaacacataaccttgtcatttagattcgctcgcccacagggggactggagggtactcaccgactagggcttcacagccgcatcaccgccggcggtgggcgcctgcctcggcaggggcagggtgggtgcccgcagggcacaggtgccgccgtggctgctcgcacaacccctgcagctgcgatcccgcccagttagcctcgggggctgcacagcccagccccctcgcccagggcccaggggttctcaggccgcgcggcgaggacggagggctgccccgggtgcctgcctacgcgggcgctccccgccgggactccgccggggctgcaggagcgcgcgctgctggctgggcgggctgcggctccgcgcgagcgccgtggcaacgcgagcgggcgcccccaggaggccgcggagctgcggcgtgggacgcttgggtgaggctcaagccaaaaccaaacccaaaccatttctcctcctccccatcttttcattttctccccttcttttcattttctccccttctccaaccccttcctcgacacacgttactagcacctcgaaggttggaaattccagcactctcctgaggcctcttccccagcgaatcctgctaaccacgcagtcggtgttcgctgtgtgttcgagcacacacctccttgcagtggcttcagcacccaggtctccgggagccagtgaaggaaccaagtgttggatactgagcaagtcgcgtaacatctgagtagtcgtgaaattgaaatttcaacggtataaaggacacgacgttgtcttacagattgaaaaatgctataaaatgaagttcttactgttactatgatgatgaccctggagatcagcgcagagccctgggggagggctacagttgcaagcgctccaaggatcagatcgcgcactcctccccaccggagaaaacctcttgatgccggagcccgggcagcctcttccacacttccagccagccccttccacacttccagccagccccggcattgccacagcccgtggagctggacagaaatccaccaggcactaaaataagttagatggaagacgggatggatttgaccaaattcctatc

SEQ ID NO: 69619 - DNA, 1020 bp, Homo sapiens
ctgctatacatatacatatgtaaaagcatatagatgtacaggctttcctgtatatgtgtatacacatatgtttgctgggttgtttttcagaatattgaaagtcagaagcatgctatcacataactctgcatttcatcgggccgagaaagcacaggttttcaggaccacagttcccatttctcctgttctgcagtcctcgtctgattggccaacactatgggcactccctgctctggtggccactggcagtgggccagggtgagggcagctcacagcccgtctcctctctgttaccttgggacgtcactcagcagttgcatcaccggctgctctctccctctgaaacatgaagcccttcctttcttattccaccttagggaagcctgggcctgcgacagaccagaagacctcacattccacagagaagacctcggtttccccccaagctctgtccagtatggagtgacaaatcgctgtacttatgagacaaaggcatgaagtccaggtcaaggcatgacttttcggcagcaacttttctagatgtgaggtatcagtaaacatttatggtgcttctgttatggatacaatacaaggatgtaaaagaaaataagtatgaggctcatcctcctgggaactcacattttcactggggctacaagacccccggagcaaatgccaggcacaagatcggggataaaagcctaactttgagaagcttgctttggctaaaaccgaaatcaattatgaagcaaaggaagtggattagagggagatcttatgaaatcccatcagatttggatcatgctactgagtttttttcttcctggctgtattttaggttttctctcccactgaaactgattaatcgttgtcaaaattcctcccttgtacccttctctctatgggagggctgtcccttggctggcctgggatgcaggaatagcttttgtgcaccctttggtgtccacttctgtgtgtctctcttggtggcactgcttccctatctctgcttgctctgac

SEQ ID NO: 69620 - DNA, 1151 bp, Homo sapiens
aggagacttatttttcactggatatgcttttgtacattttatggcttattaataatgattttataattatattaccatgatcaaataaaacccttggtgaatcttcaatattcaataaaaggcttggttcttttaagcacatataaactttttttttttttgagacagggtcttgctctgtcacccaggctggggtgcagtagcacaatctctggctcactgcagcctctacttcccaggctcaagtgatcctcccgcttcagcctcctgagtagctgggacctagtaggctgaggtagcaggtgtgtgccaccacaggctaatttttaaattttttatagagatgaggtcttgctatgttggccaggctggtctcaaattcctaggctcaagtgatcctcccaccttggcctcccaaagtgctgagattacaggcgtgagccactgtgcctggcctagcacatatcaacttagaaagagttaagaaaagtgggctgggtgaggtggctcatgccagtaatcccagcactttgggaggctgaggcaggtggatcacgaggtcaagagattgagaccatcctggccaacatggtgaaaccctgtctctattaaaaatacaaaaattagctgggtgtggtggtgcgtgcctatagtcccagctattcaggaggctgaggcaggagaatcgcttgaaatggggaggtgaagattgcagtgagctgagattgcaccactgcattccagcctggtgacagagcaagactccatctaaaaaaaaaaaaaaaaaaaaatgacagagactaaggccaagccacacattttctgtgtgtgtgtgtgtgtgtgtgtgtgtgtgtgtgtgtgtgtgtgttgtagacagggtctcactctgttgcccaggctggagtgcagtggtgcaatgttggctcactgcagcctctacctcctgggctcaagcgatcaatcctcccacctcagcctcccatgtacctgtgactacaggcacctgccaacaccaataaccaaattaattttttttttttgagacagagtctcgctctgttgcccaggctggagtgcagtggcgtgatctcggctcactgcaagctctacctcctgggttcacatctcattctcctgcgtcagcctcccaa

SEQ ID NO: 69621 - DNA, 876 bp, Homo sapiens
gagaccgtggaaagagagggagagggagaccgtggaaagagagggagagggagaccgtggggagagggagagggagagggagagggagaggacctcttccactttctattactgggaacaccatgtgatgactagggttccagcaccgattatgtgactgtgaggcgatcttaaagatggaagccatgcagtaagtatggcagaggagaaaggcagaagaagcttcagccccgatgaccacagggttactgtatcagttccatctgcttatctccagacttcttttatgtaaaataaaaattattctctaccttgtttaagccattgttatttaagggttccgtttctagtaaaccacacttcttcctaaaagattcgtatcttttcccaaagatatccaaggattgaaaagtaacacctagagcacgggtcagtaaacgtttctggtaacagacgagacagcacgttttcagtttttcaagccacatagtgtctgtcgcaatgacttgaccttttgttgcagtgtgtgaggagccacagagaatgtcactaaatatgcatggctgtgctccaataaaactatttataagcactgtagtttggattccatgtaattttcatgtatcatgaaatcttattctgctttagattttttgactcatctaaaaaatatcaaaaccattcttaacttgcattgcaggtcacacaaaaacaggatttggccccaggctgcagtttgccaacccctactctacaggatgcaattcctacaaacaaaccaaggtataagcaatgtaggcttttatattatatttgttggttatctttatgtttcaaaacttcttagatgtagcagaactgggcctataaaataat

SEQ ID NO: 69622 - DNA, 1903 bp, Homo sapiens
attttaaaaaataagctggtcatgatggcacacagctgtactcccagctacttgggaggctgaggcaggaggatagcttgagcccaggagattgtgaggctgcagtgagccgtgttggcaccccagcctgggcaatacagcaagaccctgttgccaaaaaaaaaaaaaaattctcatctaagtgaacactgccttcccattgatgaccttgagaggttagagaccaatggcagtgacggtgatcacattattatttgaagccttatttgaatatttaagacttagtatgtttgtttaaaaaaataatcatgttgcatcataaccatactttgtaagaccagattaccggtgaccgctcgtgatgttaagctagtgaagacaatgcaaggtggcctgaagcagcatgaggcagaccatggtcccgacctgcattggctggtgctggctgcagctgctgatggaggctacaaacagtgatagaagcatgcagaagctacacagcacaggccaaggtgctgtgggagaggcggaggaggaacactgaccactggcggcctggggacacgggagggctggcttctgaaactccatggtgtgagaattctgatcgcagtaggtaacttttctgatgggaaaggtgcagcattggtggaaaaacaggagatggcactcaagaatttatactggagagagaccaaggacagagattctaaaagcttaaagaaggataaacacccgtggcatgggcattcgtgtgtgtgtgtgtgtgtgtgtgtgtgtgtgtgtgtgtgtgaattgccagagcaaactcttatccaccatgttgtgcaaaagttattaggttgattaagttgttggcttttctttccacgggtttgatagaaagtacgcacacacatcttttgtgtggtatgacagtgtgtgtgtactcaggggagggtgcacgggaggtcagtggaagcttgtgtgtggagggcaggggaggatttgggtgtgaaaagcccagaaatagggtgagaggcaatgtgttccatagccaagggtgagagtcaggcagagatttgctttcttgggctttgagtcatgccgatactcatcgcttagcctcatatatggtaagaatggagcgggtgctctctgtctcagtctctccctcactctctctttttcccccagcagctgtgcaaagcttaaaccatgtgaccctgaaagcacaacactgaaagcctctggctgtgccaagaggagagtgtagggagacaaaggccaaggccagggccagggccagctgccaggaactcccatccccagcagggatacagagaaataacagcaagacgccattcgccgacgctctcctcatcaggccaactctctaacttggagatgaggccctcccgactttctttcccggctcccaccctcctgtccacccacctcctcagagtgaaaccccagggcccaggagccaaatgctgtcctctctctctctggagggcctggggggcacctgtacaggccagatggagtcctgaagagctcagggttttggagtataggagagggaggagaccctctggagggtggagtctggaagttcaataaggtctgtaggatttgaatagcaggatcagctcggtataactgagacacagtctttgcacaaggctaagacatctcttccagtcacattccagtttatgcaatgcacctgctgttggctgatggcctctgctaggaggccttcaggaggaagtagaaccaatttggtgccctcatccttcctctctctttctttacttctccaggcccaccgcaacctcatcaatccttacctgaagtcttagttctaccacaggcccgagacctagatattctggttggacttcttaccagatccaca

SEQ ID NO: 69623 - DNA, 4399 bp, Homo sapiens
ctcttccccttaaaaaacccaacagaatccaaaccctttctggtggcctgcagtgacagagctgaccctgccggcgtttgccgctcttttccctcctctccgttggtcgccgtggcactgtcctatgggccttctttttgtcccctgaacacaccaagctcttttctgactctgagcccttccactcaatggtccatgctacctagcagccccctcacctttcaggctgcaactttgacacctgctcagacaggcctgccctaaccttgtgggctaaaggagccccacatcactctctagctgcagtttcattttgttttgtttttgagacagggtctcactctatcacccaggctagagtgcagtggtgtgatcatagctcactgcaagctccgcctccttccatgatagcctcaaactccaggcctcaatggatcctccctcctcggcctctcaaaggtctgggattacaggcatgagccactatgcccggcctctatctgcattttgtgttcagtgtacacttatcagtacataaattatcttggctagtcgtcatttctgttgtctatctccaaccacccccgaagcctttcatctctagctcccagagctggggacttgtcttgtttactgccgtattcccaatgcctagagctcatgtggcatgcagcaggcactggctatgggtggaggtctccagctctgctccagctcctgtcccacacggtgagtagccttcagaaaaggaagtccttgaaaagtggaggctggggctttgttcggcctttccctgcccctaggcttgcgttcagcccgtggctgtgtgtcccttcctggctttgcccctgatttgctcagtgtgggtgagccatagccagtctggtgctgaggaagggggtggatgggaagggcggggcccatatgtcagtgagacacaggccacagttcagatggatggtatcaagtcttcatgacttcagctgcacttagttaaacatggaccagcccattggaaccttgtgggcagtagtctgatttctgctgtcatttctgctctcttccaagcttcaattaagggagcaacaaaagatctctatcatgagccatgtgtggtgatctcatctgctgagacaaatatttttttttctggttatatttatagaacactctcttgtttccttgaacaaccctagctggcattatcttgtttactttctcttcatctagatttgcatttgcaggggggcagcttttatctgttgctcttagctgtgtgggatttcaaattcctctgtttttcttcttttagctttcatctgtgagctcttttaaaatcaagcagtttgtaacttatagttaccaaggcagtaattaatattataagaaaatagacaacaccggctccagctaagcactctgtgataatttttcttagcagtgtcttgtggccttgcagaggaaaatggaacttggtattcctttcccctttgtgccagtcatgtgcttcctgatgccaggcctccctccagccctcccatcacagggaaactagtacagaccacccccacagacctgtggactgacacctgactacctttgggggcatctgaccttgcctgcggtcccacggtgactcacagtgaaactaagatgcacagctcgggtaggaacctgctggcccagcaagagaatctcttcttcggggacccattaagctaggctctgtcaggtgaggagaatggggaccctgcaggcaaggagagaccgtgggtgggctgaaatctgttcctgcagtcggggaaaggctgtgggctcaaggaggcataaagaggcgacacccaagcaaaggcagcactgtgccgactgtgtctttggtgcccctcaacttcttctttttttttttttttttttgagacagggtctcgctttgtcacccaggcagtgtcatgataatagctcactgcggccctgaattcccaggctcaagtgattctcccaccttagcctcctgaggagctggggctacaggtgtgggtcatcatgcctggttactttaaaaaaattttttatagagacagggtcttgctttgttgcccaggctggtcttgaactcctggcctcaagtgatcctcctgccttggcctttcaaagtgctgggattacaagcacgaaccacctctcccagcctaggttcacttttgcaaaaggtggttatgggtgcttaacggatccagatagagaccaaagtgactatggggtgcatatgtggagaaagaggaagagctttttgtagtctagatgctctttctgtacttccccctgggcagaagcagcagccctgagcccccacagtgctcgccttgttctggggacacacagtgtagttgcatatgcctgagacacactcaaatgagcatcatgagcaaggctcaaggcccatgacgtcatcctctcactgttcttggctttaactagaaacttactggtgactcatgtccagttttggctttaaaggtaaaagagactgggaacaattggatacagtccatataagaacaaataaaatgaatacttggaaaataggtcctatgcgaatacaattaggactacttaaattagactacagcaggcagatggaagaggttatttatatgaggaatagtgataaactcttctcttttatgcctttttggatgtagatgggatagaaatgatattcctgctttatttatttctctctactgaaaaccaaataaaagaaattgggcttgatttgcaactgcagagatgtagggtggatataaggcattatttccatatgttgttagacactgatctttcggggtacttgtttttgtttctttttctaaaaaatgtgaaaaagcaaggcacatcaatgatagctttgctgcagtggagctagttaatattttctaagtacctgagaactaggaccttggtagaaccccacagaagccagaaaatatatattccctgttttctgaaaggttctgatattaggattagctattctgattgtttttattcctaaaagttaaatgcagtggggtagagggtagagcaagtggaaggaagatgttgagcatgtgtcctggctctgacattcactaactctctgaccttgggtgaacataggggcctcatttacaatgtggtaatgatgatagctttccttcttaactcacaggtcattaagtgtgttaaacagcatcacaaatatgacagcgggccataaactgttgagtgctatacaaagacagaaactattcttaatttggataaaccatccttgatcaaatgtgtttccagctaaaaattcttgatggaacttgattcccaggtttgaatttcaaaacctgtgtagtccacgcattcgaacaacctcctgtccacccacccacttgcctctcagagaatgtctactctgtggtaggcactgtaacaggcatggcgatgccacgatgaatctcacacagtgcctggctatgtgggaaggcagatgacagtctggtcagggtggagagagaaggaaacaggtcattacagtgcagagcggtgagccctctgatctggccaggcataggtgctgcaggacctcacctgggggccccagatccagcctggtgaggacagaaggaaacttcttagaagtgctcgccaacccaggcttgagtgatagaagttagccaaatgaagaaggaatgggttggggaggaccctagcacccagaagcaaagtgaaagctcagtacactgcaagacctgctggtaaagttaaaggttacacgttgcccatgcaggaggacaggggagaagggaggcatgtcaaccagaagccaccccacgcccagcttgtctgccttgttagggagtttggactttatcttgaggtcaatagagagcctctgagaggttttaaatagggagtgttaagatcggattgaaatgtcagagatgtcactcctaatgcgatgttgaggatgaactggagtgggcaggacgctggtcaggaagaccagcaagactgttgcagcaattttgggaggaatggaggtggcctgactaggagacggtagattggtcaagagtttcaatgatgcaagcagataggaccattgttacagaaggaagaaaaggagtgagaaagttggaaagataggatgttgagatcagagagtggaagataaaatagtttctgatgatggctgggaccagggtgtagccttcagaatggagctgaaaaatgagtggagatgaaggtcatgtgacatgaggtcaaggatgtgggaggtttctcctagggctttaaaaaaatgtggtagaatatatgtaacacaaaattaaccatcttaaccttttttttttttttggagata

SEQ ID NO: 69624 - DNA, 3641 bp, Homo sapiens
agctccgtctcccaggttcacaccattctcctgcctcagcctcccgtgtagctgggactacaggcacccgccaccaagcctggctaattttttgtatttttaggagagacggggttttactgtgttagccaggatggtcttgatctcctgacttcgtgatctgcccgcctcagcctcccaaagtgttgggattacaggcatgagccaccgtgactggccccccatcttaactatttttaagtgtattaagtacattgtatgaagaacattaagtgtgttaagtggcattaagtacattcacatggttgtaccaccatcaccaccacccagccacagaactctttccatcttgcaaaacagaaactctgtactcattaaacaactccccatccctccccctctaccttggccagcccatggcaaccaccattctccggatttctggcaaccaccattctccagacttctgtctctatcaatttgaccattctaagtacctcataaaagtagaaccatacaatattcgtccttttgtgacttgcttatttcacttagcacaaatgtccccaaggttcaactgttttgtagcatgtatcagaatttccttcctttgtaaggctgaataacattccattgtatatactcctttctcttttagacttttgattatggcccacaacaagaaaagtagtttacaccatgacctattacacatgaaggtattatgtcatggaaataacctattattggcatatgttttatattatacatataattaaaataaatattttacccccaaaccacctttcttacatgtgaagtactctaatattttctttctactctgtttctttaaaaaaagattgctggccacagtcctcgaaatcaatttcgtgacacattaatgggttgtgattctgagtttgtaaatagttggtctgtttggacattgaagttacccacgatgatggcaagacttggaatgaagtggtgccaaagtcttcaatgaatatggaggggcagaggcacagctccatgcatttgtcctcgtgaatggcctgtgatttcagcacaatctattaggtaaaggtccaaactatcagtttacttctggtgtaaacaggataattcacagatttgctgtttttccccaatggtctccagctggcatgggtctttaatttattcactgccagtgaccattcccctccctttttccatcctagggaagaactaagtaaactgcccttcttcacgtgccccagctccgtagtctgatctggaaaaggggcaggggcacgggaacctcagcagcaggtgactgtggcctccagactctgccatgcttccaaaagctccagccatctcatggttgcaagaatctcccagagggagaggccatgtccaaggcgacggtgggtggggttcagcctcccaggctaaggctgggaacgtgccttgcccagaggagagggcagggtgggaggcactgagggcaagggtcagggctcccacagagccagtgtgtgtgggaggagaacgggggtaacttgttgtcctgccagtctaagaaagtcaaagggtttctcgttgtctccctgagtcattacacccccagctatttttgttaaacattaacacaaagtgtcaggagagcttcaccatttttaatgagctaatctctgtggcatccccatagaatgaggtcagaacaatcaccatctcagtagcaaggaaaaaataggcagaggtgggaagggaaatcgaagggaaattcacatttcatcaagcaattactgacacccattctgcactgcactgatattgcaatatatgatgcaaacaagacagtctctgctttttttttttttttcttttttttgagacagggtctcactctgttgcccagactggagtagtgtgcagtagttcaataataggtacagcctccatctcctgggctcaagtgatcctcccacctcagtctcttgagtagctgggactacaggtgcctgctaccaggcccagctaatttttgtattctttttggtagagacagagttctgccatgtttcccaggctggtcttgaactcctgggctcaagtgtcccacctgccttggcctctgaaagtgctgggattacaggcgtgagccaccatgcctgctggtctctgctttttgaatgctgacatgctgaccttagatgtggggtagggatgatcagaccaagtattctgaattatggacttggaatttgcaaagtccagtgatgagaaagaacttgacttgttttatttatttatttatttagagacagagtttcactcttgtcgcccaggctggagtgcaatggcgtgatctcggctgactgcaacctccacctcccaagttcaagcgattctcctgcctcagcctcccaagtagctgggattacagacgtctaccaccacgtccggataattgttgtattttcagtagagacgggtttcaccatattggccaggctggtctcaaactcctgacctcaggtgatccacccgccttggcctcccaaagtgttgggattacgggcgtgagccaccgtgcctggccaacttgtttagaaaagtgggactgaggttaatatcaggagtctagagttcaagagtggacagccaggcaggactgatcttgtcaagattttgatgtggttggatgatatgatcaacagatcacagagaaccctagggcattgcaatgcttaggctgggccatttgagcgccagcacctcgctatgaaacacactgagctggagagtcaatgatacaagagcttaaggattttataaaacatgactacatacagcacttcatattagtcaatgttctttcacagtaatgattgcattttatccttataacccagcaaggtcagtatagtgggcatttccttatgctaatacctctgttcttcaccaccccacacccttttccttgataaagattctggggattggagaggaagtaacttgttctgcactaaccggaaaaagaacctagacattctgacccagcctagggctctctccactacttcagacgcctctttagctcgactctcccctccaaccctgctttttctgcacagcccagtgagttcttgcttgctgaaagaacctggcccagccaggaaaaaggacaccgggagcttcacatatgtttgtcttcagaggcagcgctcgtgtgccaccaacataaatctgataggcactgagatctcggtcttcccttttattctggggagggaattgtggagcttaggctagaccatccctgccaccggccaactcactgaatcggttcctctgggaggagcactgggagttggggtgatgtggtatagccgaattgatgtcccatttctgggttaggatctggccctgccatttactagcttgtagtgtcaggcaaatttcttaacttttctgagcttcagtctaatggcaatagccaggattattgttaagattaagcctgcaccataagcttcattccttgaatagctagtgttacaaatggtgagctgttagccccagggagttcggaagtctctgcggttttatccgggggtcctggtattgcccgctctgaggatgggtca

SEQ ID NO: 69625 - DNA, 3510 bp, Homo sapiens
aacactgcagtctcggcaccttgctactgccctgatttccacagactggcaggacgtgatgcatgccacattgcaccagagtgatcacagctgtggacaattctactaaaactacttgcaactcagccacctgcgcaatcattttctccctttttgctacccttcttctcaatctttcacttccctctcacattttgctaggcaaaagaatgacctaaattaagtgctccttcccttacctactcctttaacccctcttttccgttctccctttcagctctctctcacccggttcttctcatcccccttcctcttcctgttctgcagccagctgtgctgggtcgaggggtcaagggagtgactaaagtgccgtgtgtccttgttggtgggtttgacactttatcctccaaatgctaaacggtgcctctgccatcgcacagtgccaccaggtgccttgccctgtggtttacgttatgcactgggggcacctttcacatacaatacaaagtccacggggccactggagttgtgcagctcagccaccttggtttcaatgtggcactcagaagcctccaaagcaacaaatctcttaggggaaaatggtggcctcttggtggagaccaggttctcagatggacgtctaagtctgtgaaaaatgcctctatgtacccaagtctccctgttactgttaacctgaggctcagagccttctgactcaaaaatcttcctacttaggctgggtgcagtggcttacacctgtatccccagaacttagggaggccaaggcaggtggatcacttgagcccaggagtttgagaccagcctggccaccatggtgaaactgcttcagaggctgaggcacaagaatcgcttgaacctgggaggtggaggttgtagtgagcctaggtggtgccactgcactccagcctgggtaatagagtgagaccttgtctcaaaaaacaaacaaacaaacaaacaaacaaacaaacaccttcctgatcccccctctccagcctcgccatccactgcttcccatgtgaccatgtctctggacagatggatggtctggacaggccatgtgctggcctggctccacacccagcttctgaaggtcttcttgatggcagcaccttctctctagatcggaatccatcctcctgtccatccctgctcagcaacacccttgcaccattctccagactcttttagagtctgctcccctcattggggacagttcactggtttccactacagttagaaagaaatccctcctcctgatccttatgaggccctgtgtgctttgaccccagcctggctctcccacctcctgctcctgcccttgtccactctcctcccaccacattggccttctgctcgcatgctcaccaccctcacacccctctcaaggccccgcacttgctgctgtgacttctgcttgaagaactcttcccccagatatcaggggctgccaggaagtgagatctgtaagggcagaagccttttcttttggcagagtcacaattgcattccaagtggcttagaacagtgcccgcctggcacatggtgggcgacgggtaaataaacactgaatgaaaggtgtaagcacacgctgccctatgttgtctgtctctttcttccttgctccatctttccttttccatcctcccccgaggggaagcctcctgagggcagagatctgctctgtgtcagacatccccctcagcatccagcctagtgcctccagcaaaggtgcttctgtcaacatttgttgacagaatggagaccaagctagtgggaacagttctttcacgcctttcccaccaggcgggctcagcagcctcccaggcagacaaagagtaacccttgtcctcccaggccgctggtcctttggttcggcaagcctgccagcagcacagcctcggggacgtctgctccttttgcagcagagcagatcttcacctgggtttccttcccaccatcactttctgagctgctcagcgtcagaaaaagggtatctggcctcctggaactacaactgtcccatcatcacacacctaatcctaggagaaagcagtgttctgctgaagtaactgctggatttaaaaagtgagatcttctagaaagatgtattaaaagatcatgactttggctgctgtatttcaaagaccaggcaggcatttaggtgacagagttaaatattccaaacttacctcatcctctctctctctgtctctcaagggtaaacattccattcctcttccaaaacccagtgcttctccatatttgggaatctggaatgggtactaggggcacagccctgtctcctctcggtgtctgctgggagctgtagtcaccagagaatgtcggctgcttttctctggccagcaagcaggctctcctttctcaggaggacatctgaaagcaggaaagctgtacacagtgagatgcgagggtgctattaggaggcttgccttctattttcagctctccatgagctagttttgagcaaggcctcactcttttcatggctcagtctcccaaactgtaaaatgggcataattctctctctcttttcctggctgcctgattgtttgttgggtggagtaattaggcagcacccattcagtgctttgagttcattctagaaaagagtgctttataaataacacttgttatctctaaaggggaaaatattaatggcctagatacctccataaactgacactttgcctataagtcaaaaaagatgccgtggaattccttgtatgtgccttccactcaccctgggtttaaatggtttccctgcatctccttctattttgtatcatctctagtttcatatcctcaagaataaacagtctccctccttcctctctgaaaaaaataaaaaaagagtaagacagaccaactctgccctatgccaaacacacaagaacattgtgaagaagaaaccacctagatcagactggagctccgagaactttatctccttcttcccaactagtgcatgagaactcagtctccacgcaagaggctgacctttgttcccatagaaaaaggcacacagatttcattgcagcaggaaggatttttgaaagatcttaataaggactcccctttctggagacttgagagaagagttttgacacccagcaccttctctttgaggagagagtctggtacagtgcagtggaaacagcagcagaggtggaatcaaactggttaggatcccagctctgagactcaggcaaacatgtaacctctccggccttagtttcttcagctataaaattgagacaataatataatctagaggtttttttataaagtactgcacaaagatcagtcgttataagaggcagtatgatgcagtggttaataacaaggaattttcaagtcagagatacctggattagaattccacctggattagctgtggaaatgtgatcaaactactcagcctctctaagccatagttctatgatgtttaacatggggataatgagcatt

SEQ ID NO: 69626 - DNA, 3817 bp, Homo sapiens
caacaactcatcccctgctacagcaggctgagcaaatctgcctcctcaggcaaggagccacactgagccctctgccaaatggaaggaacaaccccaagttccagagcctaggtagggctagggaaggggttgtaacgaggatactggcatctcaggtgctctgccagttttcccaaaataaaactattcaaacaatacaaatattaatatgggcctggccttatacatctgaaaggactgtccttatttccactgtgttttttgtctcaaagatgaggaaatgacagaagagatgatttcaaaggctgtcccatgagctccaacttagagacagaagtttggctaagtaaagacaatacgcatttatgttcccccagagggaatgaattcgcttctgtttaggatttctgtgtcttcgcttgagaaagtctaagtacttgtagacatagaggagatgatgtgtcccactggatgtgtgttgaggaatccatttgtgggcataatagtgctaaacagtggttacatacggactgatatgaagcccgggaatagttgaaaattgggtgaatcagaaatggaatacaatcatatttttatatggtttctagctctcctctctcctgccttaaatatcttgacctcattctggctgtctcactactaaataggcaaatttacttttagcaaggctgcttctgttaagactgtgcctccatctcctggacaaatttggaatagcaagaaatttgttaggaaagggacttttccaggcagcagccgcttagagctggccgcttctgagcatgttcgtcttcccaggcctggctcacattttcagtgcttaatgcgcatggcgctttatgcgcaatattacttaattcttccctcagccattgggagctaaggacaaactgttatcccaattttacaggtgaggaaatcagagcttatttaaataaattgccgaggtcacacaactagtaagcgacaaaatctcagtcaaaccgaggctcttttggttcaaagatgtgtattgagctctactctgctctgcagggacagaactaagtatgtttgctattcaggggatacacagtcattccatgagcaagttacacaatgtaaaataaggacattgtgaaaaacaaaaccataccgtacataatgcactttatagtaaagtactgggaacagagtatttggtaaattgtaactataataataattttaaacagatccacaaatcacacttattattatattctgtttcacccgggctttgccaagcttcccacatttgtactagatcctcttggctttagtttctccccagttctctaccctttgaattcactccaaagcttccctagaatctttgctctcctagaaattagattaaacaggcacctgctcacatcatacatcccctgcccttgtcaccagacatgcacacatccatcttctgggatttccgttctcttgcagaaaagtctgcatgggaagctgaggcagaaccaagtccaccagactccgaggaaagagaagtctggaccctgtaaccagataaaagtgaaaccaggacttcatttattccacaaatactttttgactacctatagatgacaggcactgttcaaggcattgaggttcccacagtgaacaaaagagacaaaaacgtctgcctttgtgagtttatatcatagtggaaggaaatagacaataaaaataagtaaaatatagacattggtatgtagatggtgataaatgataaggagaaatataaagacagatcggaagtgacaacagtggggaagtggaattggtatctgcatttaacgttgttttttaacagcaaattcaggatggggcagagagcagtgagaaaaatgaggcccttatgctcagcgcccccaaccccgcctcggtggggtcactattcattttggaacattgcccttgggaccaacatattctcagtggtccttgtgaaggtttccaccctaagtccctcatcctcaccaggcaatattcattaccctacagcaaactccggaggcaacgcggagaaagtgtgaatcaattcaagactaaggttgccaaaatgtttgatcagctctgcgtcagccttgacattacattacattacagatcccctgatcgccaccgtcgcagaagctctgaattaaaagcgtgcatgtagctgcacatccattgctggcacttcttccgttagcctccgctggaactggttagtgaggacccctccatttcacaagacagcttcggttttgcttcgttttgacttccgcaccccgaagctgtagcaccagtttgttttctcacggcacaggggcggcttccggggcgcggcgtgctgggggttgtagtccgcgctctgcctcctacttccattacagaaggcgatgggccgagagctgaggaactacaactcctagagtactccgcgccgccgggacgccgcgcggctgcggggctgggcgagcgcaaagatgtccgcgcccgctgccgggaggcgaggtgagtctttgatcgtaaccaggagcccggagctgaggcagttcctgcacgtgtcgcggggccggagaagctagggccaggtattccagggatgcaagaatcctgcaaatctgacgtgtaaactgcttccccagcctccaggcgagcccagcttttgcctcagataggccccttccttttccttctcggggaatcgacctcgggaaggggtgtgggcaaagagatgaggactctccctcttcgcccaggccaactcgggatatcccggagcctctggggaggcggtcactccgacgtctgaggacctgggccttggacccggactcgttatgaagagcgattcttcgacctctgcagcccccctcagggggctcgggggacccctgcgcagcagcgagccggtgcgcgcggtcccggcccgggcgccggccgtggaccttctggaggaggcggccgacctcctggtggtgcacctggacttccgggcggcgctggagacctgcgagcgggcctggcagagtctggccaaccacgccgtggcagaggaacccgcgggcacgtacgtgctgggctcggaaatgaaccgatttccgggcgctcttgtggtggggctcaaggtctcaggagttctgtccttcccagattgcccacaaggagctttacacctcgctttcatcagtggtttgtctccgagagggtggtcgctcatcgtgtgcccattctacagagaagggaagtcgtgtaacaaaaacttagtggggatcccacagccaattatttgctccttgttccaaggtacaatgacatgatgggaaggctgaatgtgtattaagtgctaagttctgtcagtaagcaggtggtaaaagtcctctcccaggtacctccgccctccccgccccgcccaaggttgtttattcctgaccttggctgatgatggggaatgggggtcatggcaggagcagcgttctggtccaattagaggactggattaaagaattaattcagggccgggagctggggcttacgcctgtaatcccagcactttgggaggccgaggcaggaggattgcttgagcccaggagttcgagaccagcctgggtaacataatgagccctcttctctaccaaaaagaagaaaaagaaaagaatccggagaaaaaaaccttgggcttgcattgctctttctaatgccaccagcctcgtctggcaggtgagggagtcatttctttgcattgtaaacttgggttaggccacgctagggaggtggtaggtagaatagc

SEQ ID NO: 69627 - DNA, 1192 bp, Homo sapiens
actcttttttttttttttttgagacggagttttgctcttgttgcccaagctggagtgcaatggcacgatcttggctcactgcagcctccacctcccagattcaagtgattctcgtgcctcaggctcccaagtagctgggactacaggcgcacaccaccacgcctggctaatttttgtatttttagtagagacggggtttcaccatgttagccaggatggtctcgatctcctgaccttgtgatccacctgcctcagcctcccaaagtgctgggattacaggcatgagccactgcgcctggcctgctcaggtcttagaagcaagcacagaggtcggggtcagggaagctgattcccatgacatccctgaagctgtgctctgtctccctggccaggctctgtctcccacaagttcctgtcactaccgatgttggttcgccagctttgggactctgcggtgagccacttcttttctctgcccttcaaaaagagtctcctggctgccttgatcctctgtctcctggtggtgagatttgatccaggtaagaggtggagactctcccctgtccttcctgggaaggggttgttgccagggctgggcctgtgggagtgggtgtttgtcagagtcctactggggaggggagtctctcctatgacatttcccctgagtctgttccacaaggaggaattgctagactgggcatgagccagccccacccataaggagaggccagtcctggagtctatgagagcagccaggagaaagtccacttggccctgctgactcctgaacatggactgagtcatagtcctccactttttctagggctgaactctgactagaacctcagaatttaaaaaaacttcctcttggccaggcacggtggctcacgcctgtaatcccagcactttgggaggccaaggcaggcagatcacaaggtcaggaaatcgagaccagcctggccaacatggtaaagccccatctctactaaagatacaaaaaaaattagccaggtgtagtggcacatgcctgtagtcccagctacttgggaggttgaggcaggagaatagcttgaacccgggaggcggaggttgcagtgagccaagatcgcactgctgcactccagcctgggcaatagagcgagactctgtctcaaaacaaaaaacaaaaaacaaaaaaacttccgctcatcag

SEQ ID NO: 69628 - DNA, 1662 bp, Homo sapiens
actcccgctctctattccccagtttcttgcccagaggcaacccttgccagtctgtttatccctccagatacagtctctgatagtaaacttttctttctcttacacaaatgatagtagtcacatacactacacacactgtgccacgtttaaaaagaaaaaaaacaattctcggctgggcgcggtggcgcatgcctgtaatcccagcactttgggaggccaaggtgggtgaatcacctgaagtcaggagttcgagatcagcatggccaacatggtgaaaccccatctctactaaaaatacaaaaaaaaaatgagccgggcatggtggtgggtacctgtaatcccagctactcaggaggctgaggcaggagaatcacttgaacccgggaggcaagggttgcagtgagctgagatcgcgccattgcactcccacctgggcaacaaagagtgaaacttggtctcagaaacgaaacaaaacacaaaaacctttctcagtcccagcatatgtggagcagcctcattcttcatagctgtgtgtcattccgttgcgtgatggggtcacagagcacagacctggtgcccttttcctttttaatatgtggaaacccctccatgctttccaaagcctacaagtacagcagccccaagtttagggtgagcagcagtggtcagagctctttactattacttttgggcaaacgcaagccaggctggcaaccaccactgccgccgaggggagatacaagcaggccagttcacactctggacgttcagtttctttctacatctagaaggtggcctctgctatccacttaaagcagcccaaggaactgtcagaaagcgaaagtgatgacatgaaccgcgagtagggcacctccctgtgccgtcgtctgctttccttcctccctcccagcctccctgtgccgtcctctgctttcctccctcccagcacggaaaagccgtggggccgatggactttggcctcacatccacagatggggcctgtgggaattctactgatttactctctggcctagtcaagcaacccacccacggcctggccaaggtcggcctcaccgccctggcctagcacctttggaaactgaatacatggagtgttaaccagaaaaatgtctggcccttttgcctcgctgcctctggaaacctcagtgtttcgggctggtaggaagctacaggacagacagtgggcacggtgcctagcagcctgtcgcgcccccgcccgcctctgcattcctccagcggtggtgtacggatccagacattgtttgccacctctaggcctcttgataaaacagcaagtatttttcttgtcttaaagcaatgcatgtatattttagaaaatattaattgcatagaaggaaatacaggactcgtgatcccaccactcagaaataattactattaatacggttgattttctttcagcttttttccccctaattaattaactaattcttttttttcctgcaactcctgcttcacagactttttttttttttttaacttggcatggtggctcacacctataatcccagcactttgggaggccagagtgggaggattgcttgagcctaggagttcaaagctagcctgggcaacctagtgggaccccatttcttttttttggggggggggtgggttata

SEQ ID NO: 69629 - DNA, 1044 bp, Homo sapiens
taggaagggatcaaggggggagatttgaaaatcccggtggaggtgcgaggtatccggggagagggtaaaaacgggaacagtcttcagcacctgcctgtaccaggagctctgtgtatgccatctcatttccgtctccagcaaccaggcgggccttggcggcaggaggcacaggctttgggagcagaggccctgcagcttgccaagcacacacggccctagggcgcccagctgagacggcaccttggcacccgggcccgctgcagcccgctccggtcagctgcaccccagtcaggagcctttccagcgggtcggaggagaacggaagtttggggagacccgcgcgattcgcctggctgcattttacatttctttctccggcagctggggtcacgaaggctgctctcgccggcggtgttggaacgtggacacgtgcgctttggtaatagggcagcctcccccgcgggcgcagtccccgctgcgagcgcccccggctgctgaggcgggaccgaggacccggagatttgagccgcgggtgggcggggaggggcctttgtgacctgcccgcccctccccggcactgtgatgccggggggcagctgcgggcccggcgcgcctgtccccggcgtccccccctcccggtgtgtcacaacggcggaggcggctgtatctggagcagtcggggcgggcaggcccagctgagaggtgcgcgggcgaggacagcggcagcgatggtgaggcttcccggggccaggcgggctgcgggcgcgcggcaggcgtaggaccgagagccgagtctacgcggaggcgcacggacccgtcttcctggagccgcagggctcaaggccttctgggggtggcagttcagggtcgaggagtccgcaccctcgggcgggaacacccggtgccctttatcgtatgggggaaatagagaccaggggccagttgttccttaaagggacctaagggagctttgcgtgcagacgagggggagggaggccctggggagcccgacggagaagggggcgagattctggggtccccaga

SEQ ID NO: 69630 - DNA, 1462 bp, Homo sapiens
cttaagtggagaaatatctgtatctgcatgcccacaggggagctcctaattacaccatgtgccgcatccaagccacaggccggtgatgtgaagacacccgatccaagaaatacaatagcattaagaaagaaaaaatgctgccatggatactaccaaacgccaaatgactctaacacgtaggctaattgcaaggaccttaaaatcgcaaataaaaaggcgcctgtaggtcgggcgcggtggcccacacctgtaatcccagcactttaggaggcgggcggatcacctgagaccagcctggccagcatggcggaaccccatcgctactaaaatacaaaaattagccaggagtggtggcgcatgcctgtaatcccagctactccggagcctgaggcaggagaatcgcttgaacccaggaggcggagtttgcagtgaaccgagacagcgcaaccgcactccagcctggacgacagaatgagactccgtctcaaaaaaaaaaaaaaaaaaaaaaagcgagggctggaagtctggagcaggtgcgcggctgcaacggcagccgcgggaagctcgggccggcagggtttccccgcacgctggcgcccagctcccggcgcggaggccgctgtaagtttcgctttccattcagtggaaaacgaaagctgggcggggtgccacgagcgcggggccagaccaaggcgggcccggagcggaacttcggtcccagctcggtccccggctcagtcccgacgtggaactcagcagcggaggctggacgcttgcatggcgcttgaggcaagttcggggctcattttggaagttttctttctagcacagacatccaactctgctcctatgccagtcagataattaaggaattaagtaataattgtgctctgcaaattatgatagtgatctgtatttactacgtgcatatattttgggccagtgaatttttttctaagctaatatagttatttggacttttgacatgactttgtgtttaattaaaacaaaaaaagaaattgcagaagtgttgtaagcttgtaaaaaaattcaaacaatgcagacaaatgtgtctcgcagtcttccactcagtatcatttttgtttgtaccttatcagaaatgtttctatgtacaagtctttaaaatcatttcgaacttgctttgtccactgagtatattatggacatcttttcatggcaggacatatagatgtgttaatggcattaaaaataaaacaaaaaactgattcggccgggtacggtggctcacgcctgtaatcccagcactttgggagatcgaggagggaggatcacctgaggtcaggagttacagacatggagaaaccccgtctctactaaaaatacaaaattagcctggcgtggtggcgcatgcctgtaatcccagctactcgggaggctgaggcaggagaatcgcttgaacccgggagcggaggttgcggtg

SEQ ID NO: 69631 - DNA, 1148 bp, Homo sapiens
ccccttagctcctatctctgtatggcctggtttttcctaggttatgattatagagtgaggattattataatactggaataaagagtaattgctaccaactaatgattattgatattcatatataatcatatctaagatctatatctggtataactattcttgttttatattttattatactggaacagctcgtgtcctcggtctcttgcctcagcgcctgggtggcttgccgcccacaccagccaccagaagctccccagccccggcccagcagctggtctggggagcggggagagggcagtctgggctcgcggttccggctgggggctgggcaccccggggcgaccacggcaggcccagatggggactccggttccaactctcctggcccagaggctctagggtggtcttgtctgtctcactccgggggcagagaggacgcagacagaccccaacaccactgctcggccgcgatggtgccttagacccaggtcctgtgggctctggcccgagacccctccctctgggaaggccggtgaccgggacagtccacctcgcaggcgcgccggcgcggagcccggacctcagcccgcaatgactcagcaagggccggtgggattctacatggtcctgcgatatccaggcgacggagtctcgcctctaaagtggcccggggagcaggaaggtatgagcctcagctgagcgaaaccctccttgcagccaccacggagggacggggcgcgtctccttctgaatgacgcaaggggcggggcgcgtggtggggcggggaaggcgcgaggcgcgccgcgatcggggactgtcctaagacgggcggggcgcgctgcgctagggactgtcataaaaggggcgggacgcgccgcggtcgggatgacgtgagctgggggcgctcgtcgctgcagccggcggctagcgggcgtccgcgccatggagcgctacgcgggcgccttggaggaggtggcggacggtgcccggcagcaggagcgacactaccagctgctgtcggcgttacagagcctggtgaaggagttgcccaggtacgcgggcggggcgggcggcggcctgccgaggccgcatcgtgtcccgccggggctcaccgcgctcctctaccccgcagctcattccagcag

SEQ ID NO: 69632 - DNA, 1029 bp, Homo sapiens
agtgggtcgcgcagaggccatccccaggcctcaatggccccagccgccatcccctccgccgcctgcagggccgccgcctcttcaggaatgcgcggctttgtctagggccgggtgggctgagcacctcctgctgcccggcctacgctccccggccagccgcgccgctcacgccccaacttgggcccgcgccccccagcccccgcccaggcccgcgccccccagcccccgcccaggcaggcgcctgcgcccaggtgagggccccgcccgccgccgcctcccgcgccctgcgcgcccgcggcccgagccccgcccgagccgggcggagcggagcgcgcggagcctagacccgctgccgggccggggctgggccggagcggcggcgcctggatgccggcccggggctgggccggagactggcgcccgccccgaagcgactttcggtccccgacccgctccgcctgacccctatgatgaagagggcgtccactggaggtgagtgtccacgcggcgccagagcccagcaggcggcggggcgcagagcggggtggttcgcccctcctcggagccgcagggcccgtccagggcttccaaggctggggaagcgtagccgggcggccgggagggccaccgcagtgccgcgccaggctggggccaagggcgccccggccccgggagggcggagccggaggcagcaggaaaagttgccgcttcccgggtaagttgacggcgatggcggggccgggggtggcggcccgggggtccccgaggctgggccaggtccggggtgggggccgcgggctggaaggacggggtccggcctcggcgccgcggccacgaaggggttaatgagcgggtttttttgcagaaacgcgggtaccgagagtaggtggaggtatcgggccgcctccgcccccgcctcgcggactgggctcagaacctcccgtttttctgaggtcaggcctcagggggatcaatgggggcgttggcggcagtagagggcgtgggggacaaggttgtcccaacgctgcc

SEQ ID NO: 69633 - DNA, 532 bp, Homo sapiens
ttagggtaataaaaatgttctggaattaaacagcagtgatgattgcacaccattgtgaatgtactaaaaccaattaattctaccctttaaagtggtggatcttatgtgaattatatctcaattgtatctaaataaataataatttgtaaaggcctcaggagaggagctgataatcaggacttaatccctgacttggcacactacctgtcacccaactgtctccagtccttcatactcatcaggagccttgtgcaacatcacctttgcacttgaggcttcctctgcttagaatgctgatctgcctgccccagcatgtcccatgagcctgcctggctcagctcagtgactctcggcttctgctctccccattccaggtatcacagcttgtattctgctttcagaaatcaggtagtcaatcttgctggtgcctaggggactggcattctgtcacatataaagagtgggtgaccgccaggtgcggtggctcacacctgtaatcccagcactttgggaggctgaggtgggaggatca

SEQ ID NO: 69634 - DNA, 894 bp, Homo sapiens
tctgggcctgagactggaagctgagaaagaacagaggggctttctggcagatggagcagctttggcaaagggcaaaggcagacatatccgggataaacctgaggccaggcctgagtgtggctggagaatgtcactgaacttaaattcaacatctccctctgctcaaatgggcaagacctgtggctccactttgtatcctggcctcttccccaagccaagcacagtacctggtaaaattgctcacagaaagacaagatgaactgagggcagaggaaagggaagagaaagaagagataacagagggacagtgctgccaggtcacatgggcaccaaagaccaggttgttacatgttgactgagtgaagtcatctgccccctggggtgggagaccaggtgaaatatttcagaaacataaccagaaagccaaatggtgataaaggacaccactctgttgagcaggcttctctgggtttaggtggcaattgtgagccctttcttttttccatcatgcatctccatatccaaatgctcacattcatcccctcacccccacgtttattcaatgcccattctgggcccaccatggaaacctgccagcacagacacaggcctttgccagcaagaaggggaagggcttggctgtcaagatgatgctgatgtcagacagtgtcctgggggagagtctgggggccaggctggggaatgcgcatagcacaggacagaacccttacagacctctcaggcctgcctctgacagtagagaatgtccctcttcccgcggagggccagcctttggtaagctggggggcctcttccacctccaccagggccatggggcccgagcagccctgcctcacagcccagctggggacctggtgcaggggtcactgtagc

SEQ ID NO: 69635 - DNA, 606 bp, Homo sapiens
gctcacagaagtactactcacaataactaagaggtggaagcgacccaggtgtacactaaataaacaaaatgcagtatatgcatacagtggaatacaactcagccttaaaaagaagttctgacacatgctacaacatggatgaaccttgaggtaaaataagccaaacataaaaagacaaatactgcatgattctacttatatggagtatctaaagcagtcaaactcttagaaacaggaagtaggacggtggttgccaggctggagagagagataaaagggaggggtagttactcaataggtactgagtttcagttttgcaagatgaaaacattctagagatctgttgcataacaaggtacatactctggcactactgaacactgaatgaactgaacactgaattgagtggttatgatggcatattttacgttattaaaaaaaaactgcggtagcagtggagccgcctaaccctgaaaagcacatataaaatacggagggatttaaagtcctaaggataatattacaactgaatgaagtaactcctgcaagaaagcaagactagaaatctgacgcatctaaaaggagactgagcctacagcccagcca

SEQ ID NO: 69636 - DNA, 2541 bp, Homo sapiens
gttctgcagggcaactcaagacgcctccaggggtagctgcaatgttctcatctggagagtcatggaatcgaaagaataagtttgctccctctaccagatccaccccacccatgccctactccgacctcagtgtgaggtctcctgtgacgccctcactgcttcacaggtacaaaaagatggccacctccacccacctctgggaccccacactccagggtattcaacacacaggagtgtgacaagtgacttacacctggcctctgttccacatcaggcactcctaaaaggaggggcttgttcttgtcacttggattccctagggatgggcagggggcaagcacccacaggcactttctcagttgctgctggccagttggcaggctatgtgaaaaggctggcaaggaaaaaggagtcggggacgtcagtcacctctatcacccaggcaggagatgctgggcctggaaccagaggcaccccaaagaagccaggcataatatggcctcacctgagcccggtgacctcatctgcaaaactgggactcaagaatcagaaaacggtgaccttctacctctctacacgtacatatatgttttctaaagaagttaatcacaagaatccacaaacccattggttctgacctccaagagcctatatgataccctcctccacaggtagcccttttcctggcttctgttcttaccaaggccaccccacaactagtcatcccgctgcccagagagcagccaaaagcagtgagcaactagctctacatggggagaccagagaagcatcactgaatctgtccaggttgagcaccggtcagggccttggccaccaggcaggcactagggaggaggcagacattccacatagatgacacaagcgcagagccaagaggtgcggtgtatctgggctgggagcctggctagggcacaggagagggccacacaccccgtgctcccacacccaggtcatcagagaagatggccctggcacttctgccttcatgggacctttcctccattaagaaatattaagagtcatgctttttcactgtattagtataaagatgactgtattaatatacatacgaaaacattttatttgacctaaaagttcattttttttctgctgactttaaaaaaaaataaaataacattcgaaggctactaaaagtaccgtgggcaagtgataccaggattcctgtgcctgatggatacatcggccctgcatttagggagtttgattttttggtgcagttcaaggggaggtacaccgaaataggtagaaaagggtctcctggttgccacggttctgattccccaccacagacttaagaacacactagctccgaggggagttccaaagcacggactcattcatcacatacacgcagcacggctaagggccccgcacagtggcgaggtctctgctcccgggacgctcgcgccggccacacaacgctaggctgactcctggtgcctcctctaggcccggtgggacctgaggacttccttagcgcaacgtctcactgaatgacagccacaaccaccgctgtccaggcgaggagtttccaggactgagaggctggcactaggccactgctgggaggacgtctgtgaaaccaggtgcccctgagagccactgtccccagcccgactccgacgctggactggcgagagggtgcgcccgtggcgtagctcctggccgccgccgctcccgggaagggcccagaggcaacatcctggacagcagagctgcacgaagtccgaggcgccgcgagcccaggtaagctccagcaggcgtccgcagagagtgccaggcggcccgcgagccaggccccgcccgcccctgccccaggcgcggcccctgcaggagggcgccgcgggtgaaaggaggtcccggggcgaccccggccccgctcgccgcccagcccccacaccgcccccatcgcgcggcgcacctggccgcagcggctcggtgacagtgagcacgagcaggaagagcagcaggaaggcgccgctgtctgccttgggcaccatttatcctccgttcatcgtccccggggcggctggaaggccggaccaggccggactgagggtcaggggaccgtgccaagcggagggtcaggcggagctgaacctgggcgaggcgcggagaggcggcgggaaagagcttcggctgggccgcgggctggcgcacactctcggctgcaacctcaggcaccgactccagctgcgcgcaagatggcggccgtcctgctcggctccgcgccgcgccgccccgccccgcctcccgcccgcgacgcaggcgcgggccaatgaccgtcaagatggggggcggggccagagccaaagccctccgaagagggtgaggcctaaggtcgcgacggcggagggcggggacctaagggcggggactgaggggcgggctctaagggaagggcgggaccatacggagtgaggcgtgccattggttaagcagagaggcagggccggggccggggcctgagcggcggggccaccgaagggagtagggtct

SEQ ID NO: 69637 - DNA, 1268 bp, Homo sapiens
gttgagattcccaagtctgcacctccagccagaccttgctcccgagctgcatatctgggcacccaaccgtccgttaaagccatccatctacatatcccaaaaggtgtcccgaattaaacaggtctaaaaccaaactgacttccgccaatccccgtttcagctcctccttctgtgtgcgtgtggtggggcgacgcaggtccactcactcgagatgctgtcacaactgcggtctctttccaggaaccccagcattcacacttgctgccaccgctctttagaaagccctctttgccaccatccttccagtttgtcaaactcctactcacactttaacagaaaatcttctttccctgacccccgtcccatacaaagagagccgctctctcttttccctgacaacactactacagcctcttccaccacagacgtcttcctctgccctgtttacttgactcgtgggaccgtccacacccggctcctccacttccacgaggagacggagtgtcaacacccgagagagggaacctgagaggagcttgaagcagaggatgggcccagaagtcgccggcgtccgcaccgaggtcgtacctcgatatactcttcctcgtccaggacccgctgcttgctcgtcgcagccccagcctctcccgcctcgcgcttcctcgggggcctggacgcggcgggaagcaacaaggacgacgctgatgcgcccggcgtctccatcgctatcccaggaaaaagctcgggcccagcaggcgcgtcacagggtggagggggcgggactgcaccatttgcgcaggcgcctccaatagttggccaatggaaaagctgtggctctagaaagccagcccgcgctccgttctgacgtcactataaatgctagactttattggaaatgtagtccttgtcctgccccgcgctattcatgcttgtcaatgctgtgaacacgagggggtgctgtggaggtggcggggaggatgctatagggcgtgttcttcacgcgagaaattctggctttgcagcgtccaaaggccttagaattctaatttcccacaaataagaactatgtatgcttcgagattattctacaaaaatacaaaccaggaaatttacttatataggagtttcaagctttatgcaagaaaagggccttaaaacaattttttttttgagacggagtttcggtcttgttgcccaggctggagtgcaatggcatgatctcggctcaccggagttcccgggttcaagggattctcctgcctcagcct

SEQ ID NO: 69638 - DNA, 2304 bp, Homo sapiens
aaggaaaggcccaaccagaatgtgccagtgtcgtgtgtggcctgtgctcactgctatcttctgtggggacgcaaccccaaccctgactccttctcctgttcctgccagcaggcccccagagtaggtggctcagaggggtgtgcttacacctgcctcctcctccatggagatgtggcaaggtcactgtgccttacatgagcctacaggcagcaacaagtggctggactggagctgaccaggcaggcaggatggggtgggcagtagcagaggagaggccagtggagcgctctgggtccccatcttctttcccatggctgagactagggacattggaacaaaaagtcccaagtggaggaaaagacgcagtcataagtacatttgtctttccttccctctcatctcccttcctccctttcttccttcagcagtgaccaacgattctcccatccaggccctgtggaggggacacaggcgtgagccacagacccaggctctgccctctgggagcttgggtccgaggacacagttagacaaccggatgggagggcgcccttcgggaaggggaaacaggcaccccacatgcacagggccaggcagggcctgaagggcagtgtgaattacagggaaaatgcggagggagaggaagagtgctccagggcgaggaagccgcgcccgcagcgatctggagtgcggtggggagcaggtgaggcgggagaagcccagttctgggacacgcaggccagctctaggcaggggaaaggaggggcgggaggccagggaatgttccctcaggctggtgcgtcagaatggcccaggcagcctccagcgtgggcccccgctggtcccgggaggcgccgccagaggctcggggagggtggacgatgtggctgggccggcgagaatccaggggctgcaggcaaggacggggactcgcgatgaaacccgaagatcaggggctggtggcagtgaccgcgaggggcctccaagcagcccaatcaatctcggacgaggggtcgagtcagtggcggtgcaggcggcaaaggcagccagggtctgagcagcgcggctccagccccagcagcaacgggagagcgcgtgcgccgccccagacgactggacgcgccctcgtgacgccatcagcgcgcgccgccccaacttccgagcgcaagcgtggtcgcccccacagcctgtgggctacgggaacgcgatccgactcggcggccctccctgcctggatggccggtccccgaggctgaggaagtccattcctctttcggaaatggtccccaggaagcttctccgtgtccccctatggccgggtactgagcggggcccgggtggtctgcggccgtggcccccgcccctcagcgcaggcgaccctcctggccctggcgggcacagcgcctctcccgtgacctgggccggcccgcaggatgagcccccggatcacgatcgctggcattttatttaccttcttccattacaaccccaggcgagtctcccgggccccgagaggagggggtgactggtcagggtcatcggtagcggcggcaggggcctgcatagggctgcctcggggcgactagcagaatggccgccagcctcggctgccccagcccccagcgcatggaatgtgccccgggccccaggagctccaggaaccgcgcttgtgagacggagcttcggctgcttggagctagtgagccaccggccacggcagggatttgagcagaacttgggggcagagggatgagatggtgcatcccttgaggtcacttcaggagatgacactcctgtggctaagtgtagcttcccaggtcatggctcccaggtcaggcctggtcaatggagaattaagtgggcgttgggtggtggatggatgtgatttggcagaggggacaaatgtgacaacagtgtaataagggccatgttggggagggtcaggggtcagggtccggcccaacctgagcagaagggaggctgctctcagggatatttgtcaggtaggaatgggtggagtggaactacagggccaccatgtttcccatgggtcacccatggtggccttgtcatgtttatccgtgatcctcagtgttctctgtggtcctcccgtcacccctttcagactgtcctttcagttctccactgtccctgcatcacctctgcccctgtcccgtttgtctgtgttcagtccatgttcccaggtcttgaggtggcccctggttctatgccccttacctaagaccctgtgcagggaatctgtgaaaacacagaggaaataaaaagtgaggaaaatagtactct

SEQ ID NO: 69639 - DNA, 1964 bp, Homo sapiens
accagagtacgtggctcctccatgctcgtggccccaagggactcagacccagctcaatcaacatttctggctgggctatctgatgtctgccgtgtgattcaaaggtgattcgaggtgaccctgaggatggcaggggtccagggagggtggagacccatgccatcctacaccctgctctcacctagtgcagcctcggccccttcctgtggagagggacagggacaggactcggtgcaggtgtgcagtgagtggctggcatctctggaggtcagtatgtgagggtgggggtcccctccaggcagctgcgagggcttggctgctcccagaactgcctggaacctggggagactgtaaacaacctcttgcaaccccaagaataaagctgccatgtgtgagggcttgctctgagctaagcatgattctgagcaccggcagggagtacagcaagtggatgctgaggcctggagggcaggccccagagagctgagtgcccctccaggtttcatggctggcactgtggaccagtgtggcccactgcctgcttgccaccccacaacaaagcttcagaggtgcagaaccagtggcctgagctccagggacaggaagcatcttggcgtggggttctcatggtggcacttgcatgccctagtgcacaggggcggaaggggaagctctgttgcctgggccctttctctgtggcaacagatggggaagtctgccgtgaggatagagagtgcatggccatcccatcacagcacaggttgagtgctgagccaccccgagccctccccagcccagcggctctccccaaggaggcttcaaaaccccgtgctccctttgtacccccaagcccatgcttggctctcagatccacctcgggccctttgcaccccagactcctccccagctgcacattcccgggattccaggcatctggtgctgtgtgaggtcactaggacagggcagtctccccagggacgggacctgttcacatggagtttctggctggcaaaagcttgttctccagtctgagccaaacgcttgcatgactcttcccccacggaggcacttggacaggaagctggcttctctgcacagccaggggcactaagtgatcccatcctgcctgagcgtcctccacgtggctcataggctgtggaaagaggggcttggccccatggggacatgccagttcagagctctggcctccagccagagggacacctttctctgaggctcatggctgtggcatgaggtgcccagagagccctggtcaggcagccccacctcctgctgccccagggcagctgcctcccagcccaggtgaaggaacaagggagggcccctgcccagagcctttgggtagcagatgccagacacccacccccacctggagttcagaggcctcaacgtgcccccatctcctcctccccacgagcagcccatttcactcactgaggagctgggcataccccagaggggccctgggcaacccaacccttccctaagcttccctgtgggtgaggggcaggcagtcgtcctgggggctccatctcctgggcccagccccctgctctgaacactctgccaggccacccctaggccttgtcaacacacccttttacccatgccacgggatcttgcccagaggccacagggaaggccagggtgcacccagatccttcttggcctggcgctgggcttctcagggagccaacactgtggccacagctgctctgccctgggtggacactaggctttccctgtccccctactgcagtgtcctcagatgggggtggcctggtcccctgcagaggcacagccaccaatgcccatgcatagatgggtccatacagggacgaacacaggacaggaggctgcaacaggatccggtttattctgccttggcagggtggtcctgagagtggtgggtgccaccctgtccggggcggagagagggcccg

SEQ ID NO: 69640 - DNA, 2645 bp, Homo sapiens
gcgcaggttctcggctgccacctgggtgggtcctggctagctggcaggcccagggcccatccagggtggagggaactgggaactcttccccaggaagcagtgcagccaaggccgccctgggctgcccacacggaccatgccccgggacacagggcagcccacacggaccatgctctgggacacagggcagccctgtgagcagcctctccctttatgtttgctgctcttttccagttttggcagtgaaggtgtcattttgttttctgctttataaaagtattttttaaagactttaaggctgcctttagcatagactcagcctccacgggtggcccttcgtggcaggcgtcctgccccagggccccgcggtcaccccgccggccttccctggcgtccaggagaccctccccagcttgccggttgccccgggagcaccgggccagcggggccgcccgtctccgtactccctgcgtgtccggggtcctcgccaggaccttccccaccttgatggtctccatggggcacacgaccaccacggcctcggccacgccagcgcccaggccgcacagcagcccacgcgtgctgtccagccgtccctgggcatcccgcatgtggttgctgaggaactcgaacattccaaacctggaggcgggaggcgggtgagaggggctgccgcggccgagcccccctcccgcagcagccaccggccgggcctcacctgacggccgccttggggatggaaccgtagagcagggagctaaggccgcggtacaggcccaggacgccatggctgcgaaccgtctgccgcacgcagtcccctgggggagggggcggtcaggaccccacggccctcggtgccgccgccctgggtacccgccccccgcggcgccgcggcctccccctcctcaccgatgccccggtaccgcggcgggtgcgagcgctcgtccagctgcagctgcgtcttcacgtactcggtggggaaggtgatgcagatctcgatgccacccgccaggccgcctgcagggaccgggaacccgctcctgagactcccgcccggccgctggcgctcgggcccctcccccgtcccggacttcggtcggcgcggccgccgcgccagtgccgcggggaacataggctggggccccacgcccccatgccctcaccccgttgtcccggcgaggcgcagggggtgacagacgggaggcgggcgagtcccagcgcgccgggtggggaccaggaccgcgcctccacgactccccagcccacggcccaacccggaagtggggcggggcctcagcgtcccgggcccacccagaagcgcggcgggagaggggtccgcgtcccggaggggcccacctgccaggatcgccttccccgggtgcgtcagcttggccttcccggacgcgggcgcggcggccgccagagcgcgcggggcgcggggcgcgggcatggcgggcgggaggcggggcgccctgtggcggcttcgggtccgagactccagaactccgcgctcggtccgcggtggcggcggcggccggttatggtcccaggggcggggcggccgcgtcagctccaggtcccgccccgcgtggtccgagccaggccccgcccccagcccgccccgtgcgggccgggaaactgaggcctgggcggggcgcgccgaggcaggcgtaggggcggggccaaagcgcagccaatggccgaggccgagtccctgggcgaccgcgagcggcgggacgggggcggggctgcgggaggcggagccgtggcccagctccgagcagtgggtcaaggtgcactgtgtgccgcgccgcgggatagcgggcctcgggtctgcgcgactgtcgagagcggcgggatccccagggatcccggaggccaggggcacaccctccccgaaaacacgtggggctagcccagtcccagaggaactctaacgtttcaaacctggaggcgggaggcgggaggccggtgagaaggggctacgccgccgggcccccctcccgcagcagccacgggccgggcctcacctgccggttcccacccacacctttcccggttgtagtttctgcgctcagcgaacaaggtcaggaaagaccacaaatgcaagcggctgtattctcctaggcagcttgtctgggcaacggaggtcccacaccccaaagaggacccagcaaatctttaatggactgcggggcctaggaaactggcccgtccctcctacccataccagcaccaagcagagcacctttgcctggataaaccgactttaatatttatgattgccaagaggctgagagtccttttatgaggtccggtacctccaaacaagacgtgttcatgtagtcttcaaactggcctggagggggcagctccagccagtcggaggcgcccaggaggaaggcctggctccagcaggagggcccacagtccagtctctgttgtcggctaaagctggtcttgcgccgtcagcctctaccctggcctccccaggctctgggatggctcagaggttgccgtcattgggtttcagcaaaaataaatattgtccaggtgtccctgcctcccattgcgtcccctgtgctgctggagtgacatgctccttggagaagttagtaactctgcaggtagggtgggtggtgaca

SEQ ID NO: 69641 - DNA, 1577 bp, Homo sapiens
tagttcccagtgttggagagggacctggtgggaggtgactggatcatggaggcagatttcccccttgctgttctggtgatagtgagtgagttctcacgagatctgatgggtataagtgtgtgtgtggctactctggacacactgcctgtgggttagccctgctctgcaaggagcagttaaaaaaaagtgtgtgtgtatggcactcccccttttgttctctctctactgctccgctacggtaagacatgcttgcttccccttcaccttctgccatgattataagtttcctcaggcctcctagccaagcttcctatatagcctatggaactgtgagtcaattcaacctcttttcttcataaattatcctgtctcaggtagttctttatagcactgtgagaacggaccaacacacaatgtttcataataaaattgacaatatcacacctgggccagtaatgcaaggtatctgccaactttccctataaaaggacataaaagacctctgtctgttttgttttgttttgtttttacaactcctcataaaaaccattcttggccaattgaggtggctcacatcagtagtctcaggactttggaaggctgaggtgagaggatcattttaggccaggagtttgagatcagcctgggcaacatagtcagataccatctctacaaaaaatgtttaaacattagctgggcatggtggcatgtgcctgtagtcctagctacttcagaggctgacgcaggaggatcgtttgagcccaggagttcaaggctacagtgagccatgatcacatcactgcattcctgcctggatgacagagagagacctgatcttaaaacaaacaaataaaaaacattcctagttcaggagcaaaaagcagaccgtttgccaatccctcagttaaggtgttccactaaaatcacaagcaacagatgagtaattctgccaccacttcatgctctttaagtcaaaggcaaaatgtatctggttttaaagaattcaccacaaatccgtcagcaaagaaagtatgaacagagactgggtactgggtaagtgaatctgctccaggcttctccagaaagccgggcaatgacgtgggctgagtatctctgagcacttgggagttcacggccaggcatgaggacaggctgcaatggtgtcccttttaatttttttttgagacagagtttcgctcttttttgtttgtttgtttgagacagagtttcgctcttgttgcccaggctagagtgcaatagcacgatcttggctcactgcaacttctgcctcctgggttcaagtgattctcccgcctcagcctcccgagtaactgagattacaggtgcacgccaccacgcccagctaatttttgtatttttagtagagaggaggttactccacgttcgtcaggctggtctcgaactcccgacctccaggtgatctgcctgcctcggcctcccaaagtgttgggattacaggcgtgagccaccacgcccggccttaatttaatttaatattatttttagggacagggtcttgctctgtcacccaggctggaatgcagtggcacgataat

SEQ ID NO: 69642 - DNA, 2433 bp, Homo sapiens
gtggtcaaaaagacttgagtctgaatcctgttcttattgaatgaagatgagttctttaacacttttgagactcggtttcctcatctagaaaagagtaagcgaatcgcaacgaatggtagtgtgatgatttaacacagagcactcagggaggagccgctggctatccctcctctgccgcacctcccagggtaaacgtggggaccagcaccgctcccgggcagacccgcgagcggcccgcacgacgcccgacctgagcctttgctcaaagcagggggccagtccttatgtttctgaacacaaacaaatggagaacaaactgggaccttattaaaaaggcaggctttgggggtgttactgcattgaaaagccctatttaggcttggccctgagaaatttttctcttgggtcacgcatgttcacggtcctcccaggcgaagccgccctggggacgaaaaccgatcacagaggcaaactcaggggcgaataaggaccgcaggacgccaaggaggggcgtggagctgtgggatccgcgcggcccttgggttgccctgcctgcagcgggaatttgtgtgcctcctcgcgggcactgagcggggcgtcccagggggcgttggcttccacccccaccattccccagccggccccgccggtaacgggcttcggcgacggcacccaagcgggtcctcaggagcggccgccgcgcccgggacgccgcagccccagcccaggtgggaggtcggaaatcggcgcggccagctgggcagcggctcagcggggctgggggcgcggggtcaagcctggcagtccggcccggcggaggcgcggctgacagggcagccccccagcccgccgggcctcacctggaagtgctcctgaaagcgaacagggaggatctgcgccatggctggtgcgggacctcggcggcggcggcggcagcggcaggaatgaacgccgacccctcgcgcgggctgaccggtggcgacggcgcaggcgcagtgccccgagctcccggtcctggcccccgccctcctccctgaccgcgccccggcccgcaccccctttccccgccccttcccccgcccctgccccgcccctgccccgcctctgccccgcccctgcccccgcccctgcccccgcccctgcccccgcctctgccccgtcccgcctgcgcggatccctccgcccgctccgagggtccgcggaaagtagtcccgcgcgccctctgccctgacgcggtgtgtgccagctacccgagtgaaaggttttcgggggattaatcctgatggggtctgcggcggcccttgcccagcgccttccacatgtggagcgggccagtggtgctagttctgccgccaactctggacggttgagttcagggccactttttactcaggcacggatgtgacagaaagatggaaaagggtcttggaagaaccacatgtgccgtataacgaacgaccttttggtctgaggaggaccgtgtatatgacggtggtcccataacatgataacggagctggaaacttcctgtcctctggtgagggcttagctaaggacatttcctctcctgtatttggagatacacgtacaggtatgtcattaccgtgccaggggaataacgcacctcacacgcggtgcgggtttgcggcctagcagcagcggaccgcatcagctgcctagttgtgtagtggctgtgccatctgagtttgtgtaagttaccttgtgatgatcccacaaccgagacgcatgtctcagaatgcatggatgcatgggacgcgtgactgtacgtgttacagacgtgtttcggcgtgaggctcggcccctgctcctttaggaaacacctttcctggctcatgcggtttctagagaacactgtgtcggaatatcaatgtagagagtcagcgaaggtcatctagcagcagatgaccagccccaggccagtgaggatcacccagagtgcccgtggctgcacgacagtagtagcaggtggaagctggagcccacacctggtttgcccagcagccagttgtttttccgaggcaccgttggctgatgttttgcatacagatgattcagctgcataaaagatgtctgtcaggaaagggaagcccttggcattcagcacaggcactccctacggggtaatcgatagccgtctctgctgcttcccatgttgctcactggtaattttaagaaatgaacggcccaccttgaataagacaaggatggtgcaattatttgcgcaatggcttgaccatctagtagccaaaaatatgttaaggaatagaacagactgttcactttcaaattaaatctcttttccagtattagccaagacctctgcagcccgccctttctaaaatccatgtggcctcatccgctaaatatagagctgggttttgctgtggttagtactacatttcccaaatctct

SEQ ID NO: 69643 - DNA, 550 bp, Homo sapiens
gcactttctcatcgtttgtccaggttttctttaatgactttaagtaaacgtttataattcttagcatataggctatgtacatcctttgttagatttattcttagatactttataattctcaaaagagacaatcttgaaagtggcaaaaaaaaagtgactcatgagagggatttgaagtttgtgaagaactacacgcacaattgctggcttaaagatggaggaggcaggtggaaagctaacaaggaaatgaattctgctattccaataacgactgagcttggaagaggaccttgaaccctaggtgatctcatctggccagtaatttgagtagagaattcaggaaccactgcaaaagcacaccaggaagaccgaaagaaatcacagatcctttgaaagaagtggcaggctgctgcaaattccacaagacaggtgaaaaactctggtgctctctcaaaagtgccatctcctggctggaggccaattaactcaggacattacagcaattcataacagaacaaccctgctccaaggaaggagaaaaacaacagct

SEQ ID NO: 69644 - DNA, 3386 bp, Homo sapiens
accctcacaccttccatgccaggcaaaacacacagacagtgatacagcacatctaccggggtaactcaggatgaacagtttcaaaagaaacacgtgaacctagtccctgaaaaatgggaaagatgtcacacaagatggaaggagagagaggtggcaggaggagaacacacacatgatcagttcagtttagttgtggtagtagagagcatcctgggaccaaattcaaaacgaaaaagccacatgttaaaatatctattctcgctcctaaagaaaacggtagcaccctgtagtcgcactgcaaagtagaaatgaggaacaagacagcatcagggtgaccctttgcctgtcaacagtcagacaggccagaatcaggccctgggctggaggagtctccctgggttgatttctgtgctacagtgctgtcagcagagtggggtgggggagggggaggcgcgcttttttcatctacccggggagcaaacaccaactcctgcagcagttctgccaacaaggcagaactatgacgaaactgattaccactagcctctctgtatcagagtcaagatatggggtggatgagtccgttccccaagggtgtgctttggagccactgccacagagctaagaagcccctctgctagaacacacctgtgccctatctgcccaaccctagttcaccctgatgtcccagctcagcattaatcgtggatccttcgcgggggcccggggcccccaaaccctcctatttagggaccacaattccccaactgggggcactgtccccagatccagaggggcagtaacagtccctcttgcagatttcggatcttcatcctgccactgaaaggccacaagggggatttcatcccggtttcaccttcaggaccgtctgagcacttctcgggcgatgcagaccagtggaaggcactggctggcaccaaggcccgctcctgggagccaggccgcggcccctccaaggaccacaggtgggcagcggaagactcagagcaagagccaggggcgaagatggccctcgctgcggtcaacccggagcacgtgctggggctcaccagcctctccgcgctgaggacaaagtccgctcccgccggcttcttggcttgggcaccgggtaccgggcgtcaggggcgagacaggcaggacttgcgcgcgccccgactcgactccagaccccgacccgactccgggctcggcctcccgcgacccctgcgcgcactcaccattgtggttgacccaggtcggcttcaggagcttcattgttcggccgccgccgccgccgggctgaggcgagcgccgggtccctcagcgcgcccgggccatggagccaccgccgccgcttcctcccgcgccacccgccctccggccgccgcccgccccgcgccctcagggccgccgcgccatcgccggcccgcgcccccctccgccgccacagccgccacccgcgctcggccgccgccgccgccaccacagccgcatcccctgcgccgctcctcctcaggcggctcccgggcaacgccggaagtcacggcgcgcacctgccaaatcgccccggcgggaaaccgctccccacgcggactgggccgccccggctcctccgctggcaggggcttcgggtcgggcccgggcgcgggcgccccagaaagggcggttcgcctggacggcggacagcgagcggggcctgcagttgcaacccgggccgcccgcagaggcaggcggggcccaggtggcgtggaccgcccgtcaccagctctgcctcgccagtctgagtccgacttattaactagcttccgtcattcatcaacacgcgctattgggcatcttgcgagcgccgggctccgcgccggcgccggaatgcgatccgggcttcggactcgaacgaatgcgggggacgagccaaccctggtgggggaggctggggcggacgcgtttattagaagatcggggccgtttgcctagacatgaacatttggactcggaggagcagagggacgccccctcggccgctccggctgcactgcggagccgaggcccgcgcgagggcgcagaccgaccaaccggctagggcctgactggctagactgtgcccgctgcagaggcgcgctcccagcacagggcggggacggaagggaggaccccgagccgcgtgaaacgcaaggccctcgtgtgtgcgcagctgacaccctaggcggggctgcgtcgggggcggggacaggcgcgtcccagcccacgcagccggaacgcctgagcgctgggcgcctggtctgccggacctcagcagggggcaccgcgggccggactgtggaggggcgcacgcccggaagcggcgagggtagccatgacggcctccgtgctgcgaagtatctcgctagccctgcgcccgactagcgggtgagtgcggacgctggccggatagcggagtgcccagggcgcgtgcggggtcttcgcgactgtccgccaggactcgcctgtgctccctgctcgcctcccagtccacgaatatctcagggatgagccatctggtcgtgactcttatgcatgaaaatctgagcaccctggcgagcagcggtcctgcttaagtcctctgtggtctgaacgaaagattttgaaaaaccttccacgttgaccttgctgtcatatcaagtagttagaagtgccccgggtttgggagcattgcaattttttattttcctgtgaagtgggagagaatcagatatttatttatttatttgagacagagtctcgctctgtcgcccaggctggagtgcagtggcgcgatttcggctcactgcaacctctgcctcccgggttcaagcagttctgccccggcctcccgagtagctcggattacaggcgcccaacaccacgcccggctaatttttgtatttttagtagagacggggtttcaccatgttggccaggctggtcttgaactcctgacctcgcgatccacccgcctcggcctcccaaagtgctgggattacagacgtgagcaaccgcgcctagcctggagaagcagatatttatacatactcttgtatctttcaggcttctgggaacttggcagacgcagcttagagagactcaccagcgagcgtcattgttgtctttctgggaactcattcccatgaggtaaaactcaatcgagggcctgacctctgggggtaaaggtgtcagtctatgtgtagagaacaaagcaagaatgctggatgtgtggtttgcaaaattaacagcctacaaagtttctcagttaaatttaggccgatgcttttctgtttttccaacattttccaaaccatagattgttgtttgtaatttttaaaatttgagcagtttctcaagaagtaagtattctccttgaagggattctt

SEQ ID NO: 69645 - DNA, 1960 bp, Homo sapiens
acagattgaacttcttttaccctctctcttttttttcccccctgagacaggtctccctctgttatccaggctggtgtgcagtggtgtgaccatagctcactgcagctttgaactcctgggcttaggcgatcctcccgcctcaccctcccaagtagctgggaccacaggtgcacgccaccacactttgctaacagactgatcttttaaagatataaatcgaattatgcctcccagcacactttagactaaactctaaactccgtatcaaaaggcccgccaggtccctggtataccgctctccaaccatccacctaccctctgcttcaggaacccaggccttatctgtttctcagcggtgtctaccggggctggatgaaggctggctcctggtcactcaggactcagcaacatcacctcctgcgtaggccagctgatgaccctaacaccggacggctgccctcttccctctctaaaccactctacaccccctcctcgctggtctcctcctttgtctttcacgccctctgaaagtcctgttgatatgctaatttacacaatctctcaaaagaaaggaagcgtgaggaggatagggaccccgtcagtccccggctaggtcgcggggcatggggcgtggaggggtggggaaagctgggccccgcaaggcgctccgaagcgccgccccgctccctcccggcgcacctgggcctcggcgttccggcgctcctcccagtcgcggcagctggccaggtcgcgctgccactgttcgcaggccggccgctcgccgtggacgtagtagtggtgtaggaagtgcctggcgctgcggcagagcttccactcggcgcggtaggcctcgcaggggcgcggcggctgcggcgagaggcggcgcctgagcggggcccggcggccgcgccctacgccccgagccagtcccgttccctccctccggaagaccccggtggttcccggctccgacccagcacactcacctgccagccgctgccgtccgccatgtctgggcgaccggcgcgccaagcccgcccctcagtccgccagccaatgaaaaatgaagaaaacggcacctcgtgatcgactgacagaagaactaatgagcaccgacacattcaatcacgtcttcgcccccttcttcgagaagcgccgacaaacaggacgagcaaccaatagcaaccgagggcggctgcggcgcgcgcggagggccggggtcgcagggtaaatccggggcgagacctggcgcgaagcctacgcgaccaccgcgacgacagcgccattcaccccgggccaggcgggcatcctgggccgcgcagctaccttacgtcagccgcctctcaaatcacacggctctggccagttcttttcagcagctttatgagattttctcaaatctcaacaatccggtatattttcaaaagtacatactgagcatcaaggtggtgcagcgaacctcccagatctgcagctccagcagtcttgcttgagcgtccactcaggatggaggtgaactcgcaaagtaactgagattggttgggcatgacatatggtggatctagggttgaatgacctccccagggaacgcaggcttgaagtggaggctgagaatgcaatccgagtacagccataggccggtcaaaggtatggaggcggtgtgtagcaggggtgagcggggtaggagtggcttggatgtctgtagttctattctaagggtgcgggagacatgtaacatttaccttattcatttttcgagacagggtcttgctgtgtcacccaggcttagtgcagtggcgtggcgtgttcatggcttactgcaacctcaaactcctggactccgaacagctgggaccaaaagcatgcacagcctcaccaggctaatttttaattttttttttttttttttgtaaagatggggtcttgctaagttacccaggctagtttggcctcaagcgac

SEQ ID NO: 69646 - DNA, 2299 bp, Homo sapiens
ttcttgacttgattccaaatatatatttagtagaaggaatgccacctactgacaaagcagtttactagcaactccaaaattagcaagctgaattagccatctcccaaaatgcaaacatagcatgttcccgcctaaaatctgggatggttctttactccctggcactctaacacagtaatttccaatcttttgtctttcttcttttaagcagcataactgttcagctaaatcttggccagaaccataacacaggaaatagcgtttctgggtgaacaaggccagaacagggtaggggcttgcttcccttgagtgcttctcactagccaacctatgtaagccatttcttctctttgaatataaaaggtaaatccgcacaaaggggcaacatacttaacaacctgcctgcagtttacccatgaacccgaccttctgccccttctttgctgctcccgatcccatctctcactttccttttcaatcccgagacctagcacactgcctggaacatatcaggtattcttgagtggatgaactcaagaatagaaataagccagggtttgacagtgacacacttgggataaaatctaacaatcattccttgtctttactaaaataaacaggtgacaggaagacaataccgtagagtgctttgcagccagacagacttggcttcaactctccagtccctacttctgtgactcgaataaagtacctctgtaaacgttagttttctcatgtttaaaatcatcatcatccttgcttccaaagggattgtagggattaaaagaaataagccgcgatgagggagtacaggtgttaaaagctgtgtaacaggaaatgtaccagcaggtattagcttccatcgttatcattaccgaacacaacaccgctgtacagattcgaaggcacgaacccgtaggcacggagctcacggagctggggcaagagctgggtgtcccccaagagcgggggatgcccactacggattctccctggggagcgccctgattctgttcccatccccagcaaccttgcaactaactttgggtttatggaaacctgttgcgcgtccagcacttgggaaacccgtgaatggacacaaaccttcctttctttcgtcaaggagggcaagtccggctgagacagaatgcgagccacgttcaggaccggcggacgcgaccacaggcggttagtggtcaagggtcctgcttgtgcccggtgcggccgatgagcctgcaggccggactcaggcccgggtgactcggcacctccgccgccgtcccgccccgccctgccccgccgggccctacctcaggccccgggccaaggcccagcccccgcccgctgcccgtcagcgcttaccatgatggacaccacctggcagactccgctcctctcaggcaatgcaacgaagaaaccccgccgaccgctctcccagccgccgctgccgctgccgccgcgccaagccggtacgccccagaggctcaccggaagtgccggacccgagacccggagggggggtgcccgggacaaagcgtcggctgcaaaagagaaaaggccaggcgaagacgctaggctctaaaacaccctcagtagaagcattaaaatgccctttcgtgatttatttccccttttataggtatttttaaacgttattttaaattacgtgttgacagtattcccctccagacgaatttagtagggcccattgtccttacgactacactacccacaatgcactacccagactgcctctgcttcagccatcgaggactcgggcggaactaagctacaaatccttcttcaaaccacaccaaaaacctattgcaaacgtaaatgctgccccattgggtatgtgactgagtttaatgtatggttagaagtatactttccctgagggttcccagtgggaggcagtaggcttctcttcccaaagtaaagatgtccgcccagcgtcgcttttctgggtaaaagcgagtcagagttgaagggggcaacagtgtttgcgttcggcctcagaggtgacgcttctttgggggcgggctggagttttctggccgtgaatggcagagcgctaatggccgcctccaatgtggcccaatcagaaagaaaggaaggctgggaactaagaagctattggttggtgatccctggaccaatcggaggagccgtgatttggcgggagtcttgaccgccgccgggctcttggtacctcagcgcgagcgccaggcgtccggccgccgtggctatgttcgtgtccgatttccgcaaagagttctacgaggtggtccagagccag

SEQ ID NO: 69647 - DNA, 1266 bp, Homo sapiens
gccaccgcacccagccacgtgtgtgtcttttattccctgctttcccttctgcctgtttggcacttataactactgtgcctatttcatggatgccctccaaagttaatatctgaggttaatgtttttccctcctcccattccaatgggtattctcccaataccagagccttagcatgtatcacctgctaccagctcacatgccattgttgcccagcgcacgtgctgggtgtactggtgtgcagagtccaacgggagggctgggagaaggcccccgacctccctgccctctcagactgtggccgcacccagcttgccagacggagagcccaggagcaggaagctggtgtaaacacagggcgggcacccacactgttcccaggagccagtccttagatcctatctggctctcaccctgcctttgtcaagccctcaggacttggcacccaggtctgatctgggtgggcgtttgtccaaacaagaagtgagccagagctggacatccaggaccagaccataccacacagagggcatggggacactctcccagggcctgcagcccttcccggggctgctcttggcagcccaggcaccctggaggatatgcagtgcctctctgcccacccacacccctctggggctggcagggcctggagtgtgcgtgggcatgcagacgcatacacatctagcccttggctctcctcattggaccccttcagacactcctttctcttcacacttttacggaaaaggcacaagtggggatgtcctgccctgtgactggccttggctggcctggcccctgtagcacacgctggtggaaggaatgtccacagtgcagaaggcgctgctgcagaccgtgggctcacccgttctcattccacctgcaggtggaccaagcctggggtggcggggacaggccccacagactgaagtgacaggggatggagaagggctggggacagaggggacacagccacctacctggcaagctaagaggtcgggaagagtagctgccacttacatgggtttagacaaacaaacaggagttcaccagggtgaagggaaacgggagacctggctaaaagcaggaaaaagtaccagcatgggagcgggggcaacagcagaaccccagggagggtcagatggggtgcagcgccgggaggccagccagttccctggaagagagtttgcaggactaaagcctagagcctagattgctgcaaagtttcccagaagcggctgttgaacaatagtcacggccgggca

SEQ ID NO: 69648 - DNA, 1880 bp, Homo sapiens
ggctcccgattagagcagaaactaagatgatgcctaggtttggaaaactgggtgaattgaatcattaagacactgaagtgtccaccaagtgcagaccttgtgccaggcactcagcatccaaagatcaaaaaagacctagtctctgccctcaggtgcttctacttgaatagggcaggtggacacataactaggtaattgtatctataccctgtgatgttgaggattacagctgtccctgcctgacctggacctaggggtgagggcaggggggcttcctagagaagtgggacctgagcttggcagaaatgggagttcacaggcagtgtgagatgggtcccctaggtacagtaggaacgcaagcaggaaggccagggagtttgtgatgtgtttggagaactagaagcagatgctggagtgtaaaaccggagcttgacttttattctctagagggtggggagccattgcagagccttaggcagagaagggcctggtcagatttgggtttagggcagcttgccctggtgcctcgtggagaacggttgtaaaggcgagaagctaggagcgagaggtggctgtaggaagtgctggtgaaagagagtggaagctggagctgacacagggagttcaggaaggagagtgggctgggggatggtggggtggggaagtgcaggatgaggagggagggctgaggtgaggtcagtgctgcacaccaggtgcatgaggcctggggagcatctccatggaggtacctaatggcaatttactagccaagtcatcttgaccagttcacttagccttggcgatttgcctcatattgcagaatgtggatgacaagacctacctcataatgttggagtgattcactcaacgagtatttactgagtatctgttggtgttctgggtgccagggattcagctggatggcctcagcagaaaatacacaggaaatatgggttgagctaaaaatcaagggcccaattagaacagatttgactatcatccatattaacactcccagaaaagagggagatgagcagagagagagagagagagacttttccagttgcaaggcaagagtaggctgcagggtcaccttgtgctggctggcaggagccaggggctggcatgtatcctgtttggccaaaccatcattaagtggcagttcgagaataggccctctaagctcttgcactggtgtcataacatctggggatttcctgtgtgtcagtgtttgtgtggatagagggagctggtggtaagtgttcagccaggtgcatccaagatcccagggtctcatgggaggacccagggctggaactggcctcctcataccgctgtacagctctgcctggagcctggagcctcctcctctgctgagtggtgctctcagcacaaaatgagtgttatcaaaggggcatatattctgcactcactagctgcacaagagaagaacagcggttgttggtatgccttataactactcttcagaatacacacccctttgacaacattcactttgttctcaaccataaacaaccacaccccttgtttatggttgagaagatgaaggcctggtggaattagcttcttgccagagactacactgtggccagaaggactctgccttttccttggctatctgagcttcatctcagaggtgtttaattgctccagccagatccatgtgaatagcaaattaagcccacacagtggctcatgcctgtaatcccagcactttgggaggccgaggtaggcggatcacttgaggtcaggagtttgagactagcctggccaatatatgaaaccctgtctctactaaaaacacaaaaaaattagccaggtgtggtggcacacgccagtagtcccagctactgaagcgg

SEQ ID NO: 69649 - DNA, 757 bp, Homo sapiens
gtgttcctggattcccaaagcaagttcacttgttttaggaacagttccctgaggctctgcaggggctgctgggctgccttgtctccccaggtccatgacgccaggccaccatccatgcatcctgttgtgtgctgggacggggtgccagatgctggcatccaggaacagagagtggattgcatgaacatggctaccatgcagttggttctctgctgctggggtgcaggcacctgaaagacacggaggagctaacccagctgagaagggtgtgtgccagtcaggacctggggtgcaggacacaaacatcacaccactgggttgcacaagacttggaggaggggcccaggaggatgacatcaaggtctggagggggttgctcaacaacacacctggatgtgcagtgcaggcatggcacctgcctctgcagcagggcccaaagactcgatggggctgccatgtggcctgatgtgagttggagtgaggctgtgacccccgggtgaaagctgcagcctgcatgcatcgatcacaagcgagggctggctgtgtcctcatcccaggaagggcggggtgagggcctcaccacagtgtgggcagggcccactcacgccctgggaagtgaatcaggaggtggcagcaggcactggggctctctaatctcttgcccgtctttgtccagttattgtgagagctccaattccctgttcttatttttctgaaagtgctgataagatgggtacagaataaatcaaatgcaaag

SEQ ID NO: 69650 - DNA, 5238 bp, Homo sapiens
tcaaaaaaaaaaaaaaaaatcattactcatgaggcaggagaatagggtctggaagcagggaacctaaatcctcaccttttctgcactggcagatgggaaattggctgtcttcaacaaatctgactgattgccggtggagtctttgtttgcaacttggtaacttcactctggccttggaatggttgctgtccacaatcaatcagactgattgtgggcagagtctttgtttgcatagaagtataactctgtaacttcatcctagcctctgattgctttttgcaaccaatcagatgtttgcacaggagtgtgacctttgtaacattacttcagcctctggttggctgctttctgcaaccaatcagaatgattgtgggctatcacttcatttacatgagatgagcatgaagtggccaatgggaaacttcttgggggtatttgaacccaagaagattctgtatctgggccctgagccactgcttgggcccgctcccacactgtggcgtgttctttcattttcaataaacacctgctttcattcttttgttgcttcattctttctttgctttgctgggtgttttgtccaattctttgttcaaaacaccaagaacctggacaacttgcagtcacgaccctctaccggcgacagtcaccgatcaccatgatggatacctaataaggaaaaagtatgacatattatgagaattaccaatgtgacacagagagccagaggtcacatactgttggaaaaatggcaccaagagacttgctagacacaggcttgccacaagccttcaatttgtagaaaacacaatatctataaaatgcaataaagcaaactacaataaaatacaggtgtgcctgtattctattttgccccaacctccacaacaaccatgaggtgcaaagatatttcacccccattttgtagaccagaaaacaagcagagagaggctaactgtaagggtgtgtttttagatcccaatgccaggaagggtcagagtgcaggttctgccacatttgacatcatgcggtccagggggccactgcacctgatgcccgtgtcatcagggctgggatttggtctccaatgcacctgtgtgatcaaggcccaggatgtgtgccggggggtggctttccttcctgggggaatgtgactggcccataccatttctggtttaactttctagtgaatcgattttcatgtctttagagtttaaactgtgcaggcagcctcagggagagccaagagttccgtggacagtcttgaagcttgatgggctcttctgagtgacagcgtgagcgccaggcacgagtccagactgtgatatgggctttgaccctctgacctcattgcctctctgtttatccgctttgcttcctctgcagctgatgtcattgtggttcacatttcgcagtaggatgatccctggggagtgggtagtgagggacacttgttggggagggcctgtctggacctagggacagagctgggatcatcagctgtgacctgttggccagatcccagcaccgctctaccccatggctcaggagcttactatgtttgttacattgctaaatggtcagaaagaaggaagaagaaagaaggagaagaggaggaggattattattcacgattggcctaaggggctcacacctgtaatctcagcactttggaaggctgaggcggtggactgcttgaggccaactcaatccccgtctctacaaaaaattaaaaaattagctgggagtggtggcatgagcctgtactcctagctactcagaaggatcgcttgagcccaggagttggaggctgcagtgagttatgatcgtaaaaaataaaaagatttcatgacatgtgaaaacgatctgaaattctaattcactgtccataaatgagctttactggaacacagtggtgcccattccttttgctttgtgtgggctgttttgctcccacggcaaggttgagtagctgggacagaggccatgtggcctggagagcctaacatatttaccaactggcccttcccacaagacgcttgccaagcccaggccctgcgttccctcccttcctgcgatgacaaagtcaggttggtagtcacatttcatggggttggcacaaaccgttggtgcttaatcggagtggaagaggctgtgctgggggccaactgcacaactgcacgggttccagagagaaggcagcggcccacatgccatcaactgtcccacacctgtggctgccagggcctgcctccgagggacgcccccctccgcccgccgtgtgttcattaagagggccggggtctgtggtggccccacaggcagcgggcctctgtcctgtgctcaggtggtgctctttgaagggtggcagggccgggggctcctcttgtgctgccagagctggtcccagagacccacctgcccagggccagcccgtgggatggcagccccgtgcgtgacagtggccttcgcatagtaccatctgctcccagtggggcggttctagacttgctctgggaagcagcctttccagataacaggagacaccccagccagtcggtggggaagcaggcctggggtcggccacggggactctggagggtctcttcaggccacggctggtgtttcctgaggaagtggggccgacacagaagggccagggccgcgtggttgagaagtaaggatgaggatgatgggggctgctaagatccctggccccatcactgtgcagcttttctactcacttgtggtaacaaacgcccaacatgacatttatcatcataaccatttttaagcacccagttcgataacctaagtatatcctaagtatatccttagtataacctaagtatatccgcgttgttgtgcatccagtctccaaaatccttttcatcctgcaaaactgaaacactgtacccactaaaccacaactctcctttctcccttcttttcagcccctccccagcttaccattctgctttctgtctgtgaatttggctattctagagaactcatgtcagtggactcactccgcatttgtctttctgtgactgacttattttactttgcataatatccgcaaggtccatccacgtggcggtgtgtgtccgagttccctgcctctccaggctgagtgatgctgccttctgcggatgtgtcatcttttctttatccattcatctcctcatgggcactcaggttccctctatctcttcagcatgggtgggcatttgccccaatcctgctttcgcttcttttggatctacacctggaaatggtgtgctggatcagaggctcttcttacttttaacttttgaggagcagccacactgatttccatagcagttgcaccatctcacattcccaccatcggcacacgagggtcccaccgtctgcacatgagggtcccaccgtcttcattcacatcctcaccagcatgtgtgtgtgtgtgtttttttaatagcagtcatcctagtgggtgtgatccgttttgttttaagtaaggcataattttcatacaacaaaatgcacagatcttgtttcccataacaggagttttggctgatgaactttcatgaaatctacatcccacccagggataggacatttccggtgctctgggaagctccctctcacctttccctgtcatccctctccacccggcaccgggttgctgtcacaccggaagagcagtgcctgcccctgcccttggtgccgatgcacccacagtaaagacagaaaggtttgcgtgggcccaagcctgcctccccattaggcagccctgctcagggctgctcctcgcacccggggaggaggtgcctgtgcctccaggagcagggagagggctgggtttgcaggtgccctgcatccagctccagcctctccccagcccgctgtgtttgcttttggagggctgagcacaggatgtgcccgtcctctgcctgatgacagtggagtgatgtcaggccaggtgcttcccggagggaggcagggcgtgcagcctgctgcctggcaggggagggggtgggcaaggttcccaaagagagagctgagctacgggccgactatgcatcagcgatgtttacaacagcttcccgccctcaccagtttcgaagtttgcgtttccattctgagagcctcattttcagccccacttgctgctaaagggcagtttatcttcagaatcaacattcggatagaatcgcgcaccctctaacctgggagcagaatgtgctcggctttgacaactatacagtttttatgagcagcaggttcctgaaaagcttgtgttcccaaggccaggctggtgccacgggaaggcctgtcccaggctgagctccgtctctcctcccgtggatttactcagtaacgttgcaggagtctgagccccgacagtgtcgtgggttcattcaaccttcagcaaatcattattcctgtcagacgcttgggatacagagttgagcaggctgggaaccagggggcagactcaggggatgacagcatcacacataaatactcatatccacctaagtgtgcattcaggctgggtggtcagggggtcccttagaggaagccacaccagaagggtggatgggatttagccaatgagaagagctgaggtggtgagtctcaggggagctcggatgcagcctctgtggggaggtgtgtgaagggccatgccctaaacagcgtccagggcagtggggtggccagcccctgactgagggggttaatgggggtggtgataagccccagaaccagaattgcttttcaggcctcagtggctcagattccagaggctttggtgtctttggcagaaagagactgaagtttctatttcagttctctcagtgaaaaccagcatttctcacccaggctttcatgctttggctgagttctaggctccttttctcccaagacatggagcagattccaggctggtggccgtctctgtgtggtgcctgagctgcgtggcatcgatggctgtgagctttgtccccactggctcacgagctcacagggccacactgccttctccacaccgtaccccacagcatcgcggtgccagtgcctcctggcctccagaggtggctattggctgcctcatgccttcctcagagatctggtttttaaagtaaagtgagggtcagtaaatggagggagacagaagcaaagaaaaatgggttggacacagaaaacaaactggctgtcagagctctgatctgaatctcaggcatc

SEQ ID NO: 69651 - DNA, 1080 bp, Homo sapiens
cacagacacatgcaaaacccacacataggacacatgcctacacatacatgttcacacacccatatgtgcacacacacacatgcacacacacaggcacacactcatacctacatacacatacacacacgcagactcagacactcaggcacaggcactcacgtatgtgcacacacagcacagagaagcacacacacagacagcacggcggccttgggcggtgccagccgaagcccggcccccacatgccacctgcctggggcctggcgggagtttccagaacctcaccagcagaaggctcattctcaggtgatgaaatcaagttctcctctattgtttccccagaactgcagggaacaaacccgtcacgttgttacaacaaccaaaatgcacaggccaaaatgatgcatcggcaattaagggctccatcatttcaagtaattaaaataaatgctttatttgaaaactaattaattctagctacatatttttcccatgacaatatcctaggattgcttgatttatgacatctaattattctttattaatctaattgagaatcatcacattcccctatcttgcctggccccaggctgtggagcaaaggccgcccttgcgcaaggcccgtgtgcgcccagctgtccttgcggtggccccggcccagccccggccctgtcctcccggaggcaaaggaacaggaaacttaatccacagagcacaactttggcttctgcctgctcttccaggtgtcaaagtgagccacattctttgaaaaatgaaaggcagtctgacacaatttgtgcaactctaacagcccttccagagaagccacaaacacccctgaaagccccagggaacaaatggacgacaacagcatctgcctgcaatgcaccaccgcggaggcagctcggcaggccccagggctctcccaagaggggtccagagcgctcctctgggtgtggggaccagcgggtaggtgcaactggcagagaggtccacagacaccccactcaagggaggcaggggcaggcctgcaaatgtcctgctggcgcaaacccacccacacctgcagggccttcctcc

SEQ ID NO: 69652 - DNA, 842 bp, Homo sapiens
cagctactggggaggctgaggcaggagaatcgcttgaacccgacaggcagagattgcagtgagccgagatcgtgccattgcactccagcctaggcgaagaagcgaaactccgtctcaaaaaaaaaaaaagaaagaaagaaaaagaaaatccatccaggaatggcattcaacctttgtgcttttcttcccaaaacccttaagctcagtctaatcgtgagaagaacacaacaaatcccggtggaggaacattttacaagagcctgaccagtgctcctcaaaacttaaggttatcaacaacaagaaaagtctaagaagttgtcctggccagaggagcctggggagacaggagagcaaacgcagtgtggggttctggatgggattctgcaacagaaaaggacattagggcaaattcaggaaccctggatgaagcctggactttggtcactaacaatgcatcaatcctagtccattagtcatgcgcagagcaagatgctgacaggaaaaagggctcagaaatgcgtccgtgcacaaggttcacactcaaccactgctcttggccacagtctcacaggttatgtttcaaataaaatatattgtacaagattcttgtgctattttttcttgtgttacagttaatggtatttaatttacactaatgtattatgaaacttcaattcctgtttctggctttggagtcaatttctatctctactcaaggtgacttaaacagacttaatgagcctgggcaacatagcaagacccccatctctacaaacaaataatttaaaaaaatcggccagttatggtggtgcccgccatgatagtcccagctatgttggtgg

SEQ ID NO: 69653 - DNA, 835 bp, Homo sapiens
ggcaacaaagccactctgaaaggagctgtgtgcactgcctgtctggaaggccatgccagagtccatcgttgcctccaccctacctgtgcaggaaacctggacatcaccacttcaaggccctaccttcctttctgggcagagcccaaccacaataaacaggacgcgttttaattaaaaaccaggtcacctggactctcccaaggactctcaagcctgcctaggtggatgctgcatgactggccctcagacacacggcagaccataactcacacacccccaggagctgcctgggtcccaagggcacaaaagccccaaagccccaataggacagggttcaaaagagaaggcagcaatcccaggctggagtatccacttcaggtccactaaagggagatggggaaggtggcctgtccagaagcctgtgggacagggtaaaggtcagctgggtgactaggctgtccatcctagagagcaactctgggttctactgccagacccacaggtgagccaggccacagtgcactggaggtaggcatcagggagcagtctgacccaacccacaaaaggggggatggggcctgagtcatcggacggagggcagctgtgacctggcacagaagcatggggctgggccaggacatccagggacttctcacatctgaccagaatcaagactgaaaatgggtttcttctgccagctcacttgctttgctaccagggctatacctgctttctaaaaatagcttcccacctatttccaaggtttccagttgttttacctacaaggtatctgtgccctgaaataactcacacataaaaccatctgaacccagag

SEQ ID NO: 69654 - DNA, 2895 bp, Homo sapiens
tgcagcactagaacctgccagggccactggccctacctccaccacccaaacactctggaatccctcaggtctgacccccctctggggggggggtcttcacctgaaagcccagcccatgaccctggcttcccaccttactgcaggattatactaaggcctggacgtgagtcgagtccagtccagtccctcactgagctctaaaaaagcagtgaccccgatccagggcccagctcccaccaccagccaaggttaggtatccaggttgcccacaatgaccacaccccatgcccgggagccacagtgtgctacccagatctctgccttcccttcttcccagtcccctaccctgcccactcacctgcgcacctgtgtcccctgcagtctgggagaaggcttccctgcaccagccagccaggcctgctttgggcctgagccttcctaaccctgggccgcactctcaccattttgagaaccttagccctcccacgcctatcagtctgttggtccccctacttttctccccacactgcctggcatagaagactttcggcccttctagactggacagcactatcctaaaggggcaggtaccacggcgcatgtgtgtttgcccccacaaggccaaaggcagcacctggaacgctggagccgttctctgctctggggagacccaggagccccaagaacaaaacctgcccaaagccttaaagcaagctgagtgcagacgactgcaccgcccgccccccagcaaccgccatgcaggaaatacgagctcacaaggcccacggcaacaagaagcccacccacctgaggctacgcgaatcgcccgcgaagagggtcctgggatccgtagccacagaccgtgggacgggcctccctctgagggcgagagtccaggcgccacctagaaagtggagaacgagatcggccgccgtgaggccaggcaaggagcgggcgcggcttcccgagactgcgagaacggcccaaatgtctccaggtgcccccacaaacccccggcgcggaccgagaaactgaggcccgcagaccgaaggcactgcgacccaggctggggctccgagtgcccctctgcggatcagaagtcgggaaaagacgcaggggcgcagctccaggcccgcgtgcacggagttcaagccggccgcccgggctcccgcctccacactgaccctcttgccggagtcgggaacgcctgctcctaggagcgccgcgcagcgtccagagaccgattacatcgcgcagccacgcccccagcgtgcgcgcggccgccgtgtacgacccggcgcatgctcccggcacgctccacgcgctcctcccatccaggccgcgcctgcgctgtatgccgtgtggccgctacctcgcaggctctcccggtccctgctggcgcggcagtgccgcgcggtgggtgatgggagagcgcgcccattcccacgccgcgccaagtgccacgggatcaggtggggccgcgtgtacaggcgcgagacggtcgggccaaagctgcccctcatgatccccagcggacggtgcccggcggtccctcagatccgggaaatctgcacccggctgtggcgtagaccgaggggccgatgctgcttcagcccgccgttactgccctggcgtcagccagacactggggtgctgctgggcgtcgagagggctgctgcggggccgggctaagcctggggggctgcaggtgtcggggtggatgtgggcatagcggggctgctgggcctcgtgagcgccctggaacggcgtgcccgcggagtgcctctcatcactcattgccagtgcggggaaccttgttagggcccggttcgacgtagctgcaggctgggcgccagaggcagggggcaggcagtccgagaggaccctctacctgcatacctgggggctgcaggcagggcctctgggcctccttgttgtggatataattgtgtgcttcccgactcaggccgaggctggacccggagacgacagcgagggcaggctaccaagccctccccacagggccgtgcccagcccaagcctgccgagtcagcacccagatcctgggacaagataggtgaggatgaagtggtggtgctcttctcacttgcacaagccgtcccacgccacctctcctcggcttcacggtgcctagagaagaggtgggagagggtgcaggcgccccagctcaggatctgatgcctgtgggccaaggacctggatgcaagccaggagtccttggggccacgggcaggcagccggattcaccggaaagtgacgcttctcaaggggaacacacacgtaacacaccagctccctttctgccctggtccagtgactcctttcatgaaagctctctgaaatgttatctgcatttacacccaaactcactcactttgatccctgaaacgcgaatcaaaggtcacattgtaccttccctgggtctgtggggctttcagcagcctgggccaaaaataataaaagtggcaccgagccaggaaacgcctccttgaagtgggaatgaaatttggatttttttcggttgtatctttcctaattgacctgataatttaaacttcctccctcaagggaaaggtgggggttcccacaaattcagcttacctcagcctcaaggcagctcagtctacagctcagcgcccatcagcagagtgggcagtgggcctgtggaagaaatgaatccaactgagccagaaaaggccttttttggtccaaattttttttttctttcaggccctctcctgtgtataactgtcatgcaccgcataacaacgttttggtcaactagggaccacatatgtaactggtcatccagtaagctatagttattttattattgaagaaagaaaatttttaggccaggcgctgtggaggctc

SEQ ID NO: 69655 - DNA, 3358 bp, Homo sapiens
ccgtgtctggactgtgagtatgggaaggggaagcttttctgtctgttgtccccactaccgcccctcacatccgtgattctgaaccccatgataaatgccctttgaacctttttcctccttttgatgccgaatccccttttatgggactccgccagcacgggtgcatttaaccttcctgagcttgcccacctgacgcatgcagccaagaagctttgaaagatggagtgccctggctgagggttccaggtctcagcaaggccacgaggtggtgactgcctcccagaactctgttgggccaccctccgtcctggagacccccaaaacctccatagcaccaactctgcccattcacacacacagtcagccctccctcccgagtccaccgcgggcagagggccagccaccatgcctcccatagccgccatccctgggaaggagccctgaccccgtccttacacccctctacactcactgcctgtggggagagctgctcgctgtcacaagcatccagggggctgggtcgaggggccccctgcatggtgggggaccatgttgtcgtgcatggaatgaaactggccacacataacagatatggtggcgctctggtcggatctaggggagtctgtcctacaggatgaggcttgaactgtcctgagtgaccagacacccagcctctgcttcgagtgctcagttatgattattgtcctgatttagttaactgttcttcaggggctccaggaggacgagtgtgtatcctcccattgctctgtgcagcctctaacctctagagtctaggggtctggggagaagttgggaagtctggccagtggggccggtgcctggtgacctcgggaggtgggatatcatcatcttcagaactgtagttgttactgggataccagctctgggagaccacaggtgcagtcagcacagcaggaccttagacaaggcacccagccccagtttccccacctgggaagggggctacttgtggctagaagcagcccggactcctgagcaagactagaccaagaggccggtatgtggacacccccgcgtgggcacccccacggggacaccctggccaccgccgcgcggacaccctcacgaggacaccccggccgcgcggacacctaccgcggggacgccccgaccccatcctacctgctgcgccccgcgccgcgccccgcaccccgcccgccacggcctgcgtccgccaccggaagcgccctcctaatccccgcagcgccaccgccattgccgccatcgtcgtggggcttctggggcagctagggctgcccgccgcgctgcctgcgccggaccggggcgggtccagtcccgggcgggccgtcgcgggagaggtgagagcgctggctagaccggggccgaatgcggccggattcggggcgggggccttcagacctagggtggaacactgggatagggtgtggggaattcggaccgctgtgaagtgatctgacgttgggtgggagtctccggacttggggtggggaatctggatgggaactggggaattcggaccttgggtggggatctttggaccggggtggggtccccagactccttgtggaaagctgaggttgaagatctgtgctgtgatgaggggctccagatagcggtgagagatcccgcttcaagactgggttgggggtccagaccaggaggataagcctctccctggagtagggcttgacctggtgagggtgtggtagagtcacaggggagggtcccacttggtccttgggctgggatcagactctcagagctggagagttgcaggaggcctgggggagggtctgtggagccccagactcagagggccttggtgacttctccaacaggctccctgttggaggccttggggtaccccagggcctttccctgcaagagagaggctgctccaccaggaaggggcccaggactccccagggtcggggggatgtgtggtgtgcaggaccacgtgggaatgttagagaaaggggaagtcactccgggcctgccctgctaacagacctgctttttggatttttccagccagggatttttgtgtcctgttgctttttattgtttaaagtgaccctccaagcctgagggaccgtaggagctgccctgcagagcccagtgagacactagttaatgcagaaaaaacagattttacttggtaactactgacaacatgagaaaaagctggctccatgctgatttgtctagatgtgcctggagtttaaagggagagtgagggagtgggaaggggtggggactcagtagagttagggaaacagaaaatcaccaaaactgggaagggagggttggcccctgtgaaaccaactgatctgggtttgccactggggcttaccgaagtcaggcccccaacctcccacagagactgggagacaggggccccatcctcaggtgttggctggaacacacaggaaattcttgtggcagccttgaacttctcaggcaggcactttagagggggctaggatcgttctgggaatgtggccttgagctgttaggagctatgttagtgttcgttccagcctagataggccagggtgaggcccagtggagaaggggactctaaggagcctggctggagtgtggggagggagggtctttgtcagcactccccctgtgcaagaagagcagagacctgcttctttcctctcaacagtccccgtccattttctgttctgtgttgtgttcataaactaccagcgggaccatctgttgagacttggtagcaaaggatttttgctggatgatgcaagcagtcaagcatttaatgaggaaacaaaaataacaggccaggcacagtggctcatgtctgtaatcccagcacttttggaggccgaggaggatcacttgaggccaggagtttgaaacaagcctgggcaacataaagaccccatctctacaaaaaatttaaaaattagcccggcgtggtggcatgggcctatagttccagctacttgggaggctgaggtgaaaagatcgtttgagcctgggaggcggaggctgccatgagccatgatcttgcctctatactccagcctgagcaacagagagcccctatctttaaaaaaaaaaaataataataaaataaaaaaataaaaagaaagaaagaaataaaaacaaagatgaatggagctgttgataaacccagtttttgagcctacagggcagcagttgaggtttctggccgttgggccctaacaaggccagcaggggcactcagggacttcctggtgtgtggtgtgaagtctgtgatgatggcataggcattggtatcccagttgtggttactttctggagagagcatgtggcatgcagg

SEQ ID NO: 69656 - DNA, 1200 bp, Homo sapiens
caaaaaataaataaataaataaataaataaataaataaataaataaataaataaataaaatgaagcagcagcagctttgttagtgtttgttcaaggcctgataggccaaggtgaggctcagccgagaaacgtgctcagaggagcctggccggagtgtgatgggggagtctttgtccaggctgctgccacggtgggcctcaggactcatggcctgggcgctgggggtggggctgccactcagccttgaggagagcaatgaggaggtcagattccactcacatccagtgcggtctggatgcaggcctggcccagagcctggtccagatgctggggctttgtttttttgttgttgtttttttgagacagagtctcgctctgttgcccaggctggagtgcagtggcactatctccactcactgcaacaacctccacctccacggttcaagcgattctcctgcctcagcctcccgagtagctgggactacaggcacccgccaccatgcccggctcattttttgcatttttagtggaaacagagtttcaccatgttggccaggatggtctccaactccagaccttgtgatctgcctgcctcagcctcccaaagtgctgggattacaggcgtgagccactgcacccagccggctttgtttacagtactcagcagctgccaaaatagtccccattcccaggcagggcaggctcccgggctcagtccagcggggcagatggccagcctgcacgtcaccccactaggcatgtccaggccctttctgcccctccctaaaggcacccctgtcctttctgtcccctccacactgagccaagccagcctccactcttgccccaggcctgccctctgctgggagccgggacactgagctcctgccacatgagcaggttgacctgcagggggcctccaagcaggtgccaaggcagaatcggatgtgaccaggagaacacccttgaaggataaagcgaatgtgcgaccaccatgcaggtctggcccatggaagggaggggagggggccccgacggggccacagtaaaggagtggaggggccccacaggcagggatggcccagctggccccctggggctgtgaatctgcaggtgcagtgcagcctcttgcctctctcagcccagcccttgcatctgcctcttggtgtgtctgtgaagacaaagtcaccgtggtccctg

SEQ ID NO: 69657 - DNA, 5291 bp, Homo sapiens
agctacttgggggggctgaggcaggaggatcccttgagcccaggaggtcgagactgcagtgagctgcgaccgcgccactgcactccaggctgagcgacagagtgagaccctgtttcaaaaaaacaaaaaaaaagcacatttcaaacatacacaaaagcagagagaattcccctcggtcctccggcctgcaccccaccgccccccaccacaggggcattcaaaactgtctttttgcctctctgtaaggtaaggggggactcttgacgctccccagaccacacagccaaagtagggcgatcggatcatagggggtcccgagtcggacactgagctggcgtgcccactctcgagtcctgggaccccaaactaaaggagctgttccttttccccatggagggctgacggggcaaaatcccagggctgggaacatccgagcagctttgagtagcacaggtgggtttctacgtggctttctttaaagggaggcctgattctcggcttttcaggacccgccctccattttctcacttgcctgctctttcgtcctgcgaaactgggcagtggccggtgacagcgcagggtcagccctcggatggccaggtgggcgtgatcccaccctcctccgtggctgggtgggcgtggtcccaaagtcaattggatgtggtcccgcgtccctcccggcccagtgggcggggcctccccttctggggcctcccatcccacaccagcgagcagagaggagggtgggcggggaggccctacggggctggggcggggcggagcggaggtggttagctgtcgggaggtggggtgggcaggggccagggctctgttggtggcccggggcagccagtccctctgctcagggcttcagttcacactcacaagggaatcccagcgctcttctcctctggcggttgctggagggccttgtgaggtggccgtgggcactgtagcccccaggcactgcattgtggcctgggcgtgttggcctttgagcctttggccttgagcacttccccatcccccatggctcttggccgttggggcccagttggccgcagagcctttggccttgagcacttccccagcccccatggctcttggccattggaccccagttggccacagagccgcgggcaggtgggacaggcgggcactgggtgcctccttgcaccagccaggcccagcctgcagagtggagtgggccggtccctcctgccaggcaaaggaagggggcttcgggcccctccctgctgtggcctcctcccctctgctgcctcccactaggccctgggagacactgcctgcagatttatgaacagacagacctagagattagagattcaaaagccaaattcttacacaattcaagtattaacgcagatttggatttataatttgggactccaaggtctaccaagtaatttgctgtttcagaatagcccttttaatttggggtatatatttctaacactgttttttaaatatggagagtaaacaaaatggcccattatctgaccacacaaatactagtagtcattatagataaaccatagcagataaataatagtaaacaaagcaacaggctgtgtcataggaaatccccaccatgaagaaaggagcaaggtggaaagttctggctgcttcaggtctgcatggtccctctccaccatggttccccctgtcatcttcctgccagaataaggacactgtccttagggaagcaccatctcttgttttttccccacgagccctgtgggtcatggcacgtcctgccccgctgggaaacacagtgggccacgggtttccctgcaggcctgggacccttcccaagggtagcagcagaaggcagcacgattcccactcctgcagctgtggacaggggcacccccactgtcactgagccctgcaccgggttccatcacctgctcggggctctggcctttggccttttcctgtgagctgcatgttggccactgtgacctatctgtctcatcatctttttcttactggtttgtgtatgttcttggtaaactagcccttggtcttacacatcatttccaaggtactaaggactcttcaggggaaatacaacttgagcagagtggttccctcctcttgtggttcacaaggtgcaggtgcacacacacatagcccacagggcagtgtggacagggaccaggagactgcccctggggtccctggctgggggacactagtagggatgtcccttggcctctctgaggccttctgctgtctcttctgaggccggaaaggcgaagcactgccctcgccctgctagggaaggctcaggccaggctggccctatccggggaaggggctcaggtatctggaccttggtcatcgccaggttagggtttatgttgatgattatccaaaggcaaaattgatttccacagaaataacatctgctttgctgccgagctcagaggagaccccagacccctcccgcagccagagggctggagcctgctcagaggtgctttgaaggtgagttggccaacggaagccggggcagtgccagggtgggtacagattccggcccggtgcatgggcacaggtctgctgagcacatgtccactctgcctgtgtaaataggccacatggcctgaaatcccctagaagcctggtgtccgcatgacctccccctagggcggagcctctgcttccctgttctcttctgctctgtcctctggtgccctgaggctggcctccaggggtgtcccctctgtggccctaggcctgcctccttgcctgggtgtgcctttctaaaatggagcgtccagcagagagtgggatctcctatgccactgggagcccagggccccatcccagaaagacctctgagtgagcacaggggccctagaagaagtttccttgtgtccttcccgttttagggtctgtgacctgaacccctgggcttctgcctcaggcctcctgtgctctgctctctgcctgctgggtcccctcaccaggcttctgtctggttcccaggctacctgcctggagggtcacaccaggaggatttcaaacaggtttcaagtggggtcacttgccatcactgtgccccacgaggtacactgttgtgggcggcagggctggcctttctcatctgggacatgccacgttgctgttcccaaggggagtggtgagtgggtctgtcctggtgtgcctggcctggggactgccagtgtccttacttggacactcaatgaaaaggccacatgaatccctggggcgtccagagcatgggtgaccagcacgggctcaccacatgaggccaaggggctgcaccatacagcctctcctttggccacccgtgactacccccaactccgggccatggggcttccctacccctgggtgtcctctaagccagctgggagacaacagcctgagtccgtgtctgcttctgtattttgtgtggttttagaggatccctgggctgcctggggaagcacccagggccagggagtgtgaccctgcaggctccacacaggactgccagaggcacacacctgctctgtctacccgagggcaccagagggcacgagaaggctggctccctggcgctgacacgtcaggcaactgaggcacaaggctggcatttctgaaccttgcccctctgcaaacacaagggggcgatggtggcactccaagcaaaggggcgtgtgggtgctgcaggaggagcacagagcactggcgcccctcccctcccgccctgcagatgccggaggccccgcctctgctgttggcagctgtgttgctgggcctggtgctgctggtggtgctgctgctgcttctgaggcactggggctggggcctgtgccttatcggctggaacgagttcatcctgcagcccatccacaacctgctcatgggtgacaccaaggagcagcgcatcctgaaccacgtgctgcagcatgcggagcccgggaacgcacagagcgtgctggaggccattgacacctactgcgagcagaaggagtgggccatgaacgtgggcgacaagaaaggtggggtccgggccagcaggtgctcagctctgggacagggacccaggaccaggcatcaaagcccttacaggagaagctgttatcaccccatttccagggggctgggaaccctgggatatgcccagatagggctggggggctcctctggagtcccagggtgccagggtccctgatgacccctgcaggccctgctgcctgctgccccaggacaacaggcccccacactcacagggtctgacggtggtgcagttccccttgaactctgttctggccaccatgggacctgcctggggaccagtcagacaggttctcctgggcccgcctcccgcttgaacttcagcctggggcacaggatgtgttaccgggctcacggagtgactcagggaactagtgccgccccagggccccaaggtgggcggttcggtgattcagagagggcagctctgtgttaggacacactggggccagccaggaagggtggaaaagatagggaccagcgtgagcatagaggctaagggaccatgggagctccaagcgcgctcacagtggggaccaggtcctgggggctggggacaccagggaggtgaaatacccctccagcgggtagggagggtgggcagaggagggccagcggccaggcatttgggaggggctcctgctctttgggagaggtggggggccgtgcctggggatccaagttcccctctctccacctgtgctcacctctcctccgtccccaaccctgcacaggcaagatcgtggacgccgtgattcaggagcaccagccctccgtgctgctggagctgggggcctactgtggctactcagctgtgcgcatggcccgcctgctgtcaccaggggcgaggctcatcaccatcgagatcaaccccgactgtgccgccatcacccagcggatggtggatttcgctggcgtgaaggacaaggtgtgcatgcctgacccgttgtcagacctggaaaaagggccggctgtgggcagggagggcatgcgcactttgtcctccccaccaggtgttcacaccacgttcactgaaaacccactatcaccaggcccctcagtgcttcccagcctggggctgaggaaagacccccccagcagctcagtgagggtctcacagctctgggtaaactgccaaggtggcaccaggaggggcagggacagagtggggccttgtcatcccagaaccctaaagaaaactgatgaatgcttgtatgggtgtgtaaagatggcct

SEQ ID NO: 69658 - DNA, 1423 bp, Homo sapiens
cagccccctccctgcctagctgcctgcccctggcgccagacctggcccgcaccactggggcactgtgttcccaggggcaccctcctatcccaccagccccaaagcccagccaggcacccttccctgccacctccctgggccctgccccagcagcccagtcggcctcctcgggccttctgtcactcgctcacacacagcaccatgtcagtaaacagctaactcaggcctagggagttaggtaggatggggggagtggggtgggggggcaggagggtgtccccaaagtcaggcttggctggggcgaggcgctgccaacccctgccgccagggggctccaagctccacggcacgatctgctcagggtggcccttcttccacgatccaagccctaagaacaagaggctgggcctgggccctgcagagggaaaggggatggtggacgctgcagccactgagtggcacaggaccacgtgtaacctcagggcagggcagccaactccacaggctacatggatggagatgtggatagaagcatctgccctgggtggtgtgggctgaccccaagggtcttggcaccagggctgatcctgacttgctggtccccgaagggcgttggagggtatggtgcccatccctactctggtcccatttcctcaggcccctgatcccacagtgcctgggacagggctgtgggcccagggagcaccctccctctctgacctctgcctggtctttccgggaatgggccactgggctgctggactggaggccaaagtcctgcggggaacgtgcgggaagagcagagcgtgcaggcagcggagactaacaagaagccctggcccagagggcaggaacaggtggacgaacaaccagatgagagaacgtaccaggcatgcaagctagacccaggaatcaacgggctgaggcttagcgtcccctacggcgtccaccagcctgaccgcgggcctgctgggcccggggggaggggccttcctgctggggtcgagctgcagcgcacgggtgggcattagaggcacaatagagcaggttagttagagctcctggggggacagggcaggggcagggccgaggctggcgatgtaagggttggcctgccaggacagcacaggtagcaccaagggcgcagggagccggaaacgtgtggctcacacgggcccagggcgggcacgtgcacacacacaggcctgcacaggaagccaggggattggcacacagcaggcagcaggtcctgccatcgctggtggaccctggtgggctctcacacgcacatgcacagaagggtgcacacacactagctcacaggctctggcccatgcagggtgtggccgggcagtgttgtccccagtgggtgggagctgcaaacttgtcagtacccacagactgactggcgtgaaggggctgc

SEQ ID NO: 69659 - DNA, 2194 bp, Homo sapiens
gctgaaacccaagccctggtgggtgggtcaggcggagcacattcccaggcagccagggcagggtcagcaggaggacaggtcctgctttgtggcccaggcccctggtccctgcacaatgggtcccttgcctgggccccctggggcctgcacagacactaagctctgccaggctccagaggcagactctgcccattcttgggcctgggaggtgagccaggttagatgctcagcgctgccctcaggacctgcctgccaaggctcgtgggctgggaagcctccccaggtcagggtcctatcctgggggaatacttgacccccaaatgcatgcagtgcaggtgtccaggaaggggcctgcaccaacatgttaggacaggtgtatccctcaggctgacagaggaaagaagtggccacagaaggcacctccccctctcccacaggcagggtcttggaggatgacagataactttatagatggggaaactgaggcctggcagggggaagaggatttacctagaacttcacagtccaagtgggatttcaagcacccccagagaaggcaatctggcaaggaaggctttgggcctcatctcgccctcagtcttgagatgtaggtggaatgcctgctgtggacctggctaggaaaaggggacctgttccctgggaaaaagaaatagactgaggcctagagtggggacaactggcacgctgccaggcagggcaggctgggctcttctccaaaggcactggggagctgggactgctctgaagcaggagaaggcttgtgtggcccatcactgctggggctgggctgccccatctgtatctggcaaatgtgtgtcaggccctgagctctctctgctgggccctgggcggggctcatctgagttcaagcaggggcccaggcactgaggggctgcagttctggcgacagagtgaggagggtataaagcaagactgaggaaacgttacccaggactctgccagtgggatgtagcccctcatatatgtatatatttacatctattaaaaactcagagaaaaaccccctcttccctagctaggcagtgggggtaagcgggagaggaaaaggggaggacatctcaggaccccgatgccactctgtggcccagcttatccctcccaccaaggctgtggtgagggtctgacaggcagagctggggtggtccaggagagccacgcccccgcagcaagacctggcaaccctgcggcaccacccatcagccccggcctagcagccccgcagtaggatccagaggccccaagagtccctgctggcaaatgacctcagggagctaaaaacgagggatgacttcacccgggtggcaggtgcatgagtcagccagtgatcacaggaaagcccggcccctgctacacatgcccaggcacacacacatgcatatacatgacccctcagacagggacacatgcatgtacatacacgtgtgcaagtacccagcccggcacaggccgagcacatcaacccgtgtgctctaacagcaccccaagggcacggcgcccactgttcccagaggcacactcgtgagcacacatcctcccgtcctccaccgtgtatcggagacccttatccatgcagggcctcacagagtctcaacacacagggacaggggccaccaactctgccaatcatctgcccagcatccactctgggagtctcagagctggctggcagatggagaaactgaggtgtagagtagtgagaggcccatagccagctggtggctcagctctctgcaacatctttagggtggggctgtggaatggtgggctgactctcaacaggagttggctgcagtccctggatccctgtctggccccagtgtccatgtctgacgtgcacctgcccaggctggcccactctcagggaccctggccctgcagccccacacagcctctgcctcagacccaactctgggctgctcccctctgtaccctagacatgggctctaccctgaacaccccacctccagcccaatcccacatgctgcatcctgtcagtcgtctctcatcaccccctccccagctggggccccatccttgctcctcttgcaccccgcccggcctcccagcactcatccctcccttggctcttcaatctctggtgcaccaggtctggggcccccaggactggcccagaaacaggctgctgcccagg

SEQ ID NO: 69660 - DNA, 1174 bp, Homo sapiens
aaaactggtccctccacctctgagggccagaccctgggggccacaccagggccgtaggacaggcaggggcctagttgcccaggtagcaggtgtgtgggagacctgcctcccaccacagagggtcttggctggtctctcctctgctcagtttccctgcctgttactgaacccagcactgctctgagcagaggacaaactgcctatgcctccccccacctcaatgctgagagggggaggatcccgttttccttagagatctcctccagcatccattagtgggcagggcctgtctctatccctcccatcacgtgcgcctcggaggcagagaagacttccattaaagctccggaagctcctttgcaggtcccgggagtcagagccggcgtagggggtgtggaggggagaggaggaaccctctcagggagcagaaggcctacccgggcttccctcttcagacttcagcctccttcctgcacagacagaagccgctcaggaaggccctggctctccacccgtgtccccaggcacctgtcctgggcgctggccaagaagcgtccatccggtccgggccggtgccaagaggagggtcaaactgccaggggtcccgacccccccaggccccgcggatgggctccagagaccctgcggcccgccctgcatacccgggggcaccgcgctcacaccgccacccgcccggccctggccccagcctgacgcagcccagccaggggcgcaagacaatagctgcctcgggccagcggctccgcggaacaaaagcgggtcctcccgggcaggccgacgccccgccctctgcctccgaccccgggccagggtccccccaagccaacttccctccaacctgtctgagttcggccggcatcgggccgggactcggggggcgctggccagcagcgggggaggcggtggctggaccaggctcggctccggcgcctcggccgctcgggctcaggctcggcggactcgctccccgcgggggcggatctggcggcggtcacggcgagcagccaatcgggcggggccgcgcccaggtggggcgtggcgggggccggggtgggcgtggcgggcggggggcgggcaatgtgaggtcccgccccccagagacagggggcggggccctgcagccccgggtcgccccctgtccccccacttccca

SEQ ID NO: 69661 - DNA, 2465 bp, Homo sapiens
ctcactttgaggcagggcctgagcctctgggctttgactctccacctttctgccacataggcccaggcacagcccagaggctacaggagcagcggtcccagctaatgcctctgtcctgttgggagggccccagtcagtgcccacctgctcaccctgcacaagtcaagctgggccagcccctcgtcgctggggcctggacctggatgtgagctcaaaggctacactggggggtggaagtgggggaggtggtgggtgtgcagggtatagtgctcaaatgcctagtccagggtctgggggtacatactgggaatggcagggacatcagggaggaaagagccgacctggaggccataaagtgaaggaagggatgaccaagaggaagatggccaggtccagaggtggggttgagtgaacaggatggggagaccaggacgcagtctgagggggccagtccggaagtgagcattcctgtacctcttccgagagaggccgcagggtgagcaggtgacagatggtgtccatgagggcatggactcaggggcggctgcgacctcccatggcgtccctgcaggcagggagccgcggagtccccgaaggccgctggatcaggaagcgctcagacgcccgcgcagcccgaagctttggcgcagccccgggggcggggcgccaggaggtggcagcctccgagcgacagcgcgcccagccaacgggacgccggcatgcggcgcgccgccccgcccctcgctgcgcggcccaatggtgaacgcgccggcttcgggctgggcggtactgggctggctgcggtggcgcgcgggcgcggcacccggaagtcggcggcggtggcggaggcggtgagtgcgcggctccggggctggccgactccgctagtggcccggccggcctgggctcgggggctccgggctctgggctctgggtgcgcggaccgggccaggctgcttgaaggtgggtgggctggccgcacttcctcaccctgcctcagtttcccctttctgaggtatggtatagaatcaggcggctgggtcaggggcaaccacgtcgatcccggccgacgaaaatgccccgcgcgttactggaaggtgtttttgataatccccgctggcacgggatgcgagggactctggcaggtgggaccagactcgctgcggggaggctgagatcggcagggttgggagctgcgtggtccctgcagggtgtgtgggctgctcggccttggccagcatcagggacagctctggcgcccggtcactctgccccctacccgcggcctgctgcgggccagcagggtgacagctaatgtgggtgtgagtagatagtaagtgctgggtcatccctgcgcctggatgcggccttcctggggaggtttgggtagttagatcccccacccccaactccagagcgtcagaggtaggggctggcagggctgcactcagggcagtccttgccccaccgctgggctttgtagcagcctgggctttgcccgttttcctctaggaagtgggcacagagggctgtttgctgagacccccaccttccctgcccctagcacctctcctgtgctcccttggcttcctgctggaccacaagctttagagtgaaccgtctgcccttggacaagtccctgggcctcaggcccccttcctcttcaggaatgtcacatgccctgccctggccaggcctgtttgcactgtcgtgtggctctagacctgctgaccactgttttgctgccactctgggcacagtgccctcttccatgaggcagatgtgacggcagctataagggggtagctgagtagctctttggaaggctttctcacgctagctcatttgcctctgggcagccttttggggcaagcattcattgatccagtcctgctcatacaaggaaaactcaggctaaggtggcagatcgtgttcccaaggtcattcagagccagggcctgctcccagtgcctctactactcctgggccactctcttaggagtgtccctgtgtctgtgtcctgcgtctgtgttgggtgggctgggagcagctggagagggtgaccatgttgttagatggacacagcagagcctctgttcccacaggatcctagtgctctggtggtccagggtagggtgccctggtgcccccaccccctttgacccctacacagctttgtgttacttgcatgtcctcagactgcaggcccctcagaccaagcccctgcctgctgtgatgtgtggtggccatagcccttccctgagctaaggtgaccagctgtcagctcttcctgggctgcccagcctcttgtgcttccttggtcttcacttgtgggctgtcattctgattacgttttgcagtgtgtggaatcacgtgcagtgtcctgggaacttgatcctgtgcccggcttctgcgccagacggcgaacttggagggcaccccggtgcccacccaagggtgctgct

SEQ ID NO: 69662 - DNA, 1950 bp, Homo sapiens
tgggagacaaagcgagacaccgcctcaaaaaaaaaaaaaaaaagaaagaaaatttgtagatactgggctctcactatgttagccaggctggtctcgaactcctgggctcaagtaatcctcctgactcgacctcccaaaactctgggattacaggcgcaagccaccgtgcccggccgaaccaccgtgcccggccgaaccctccctgttttggaaatcctgtattagcaaaggggacagcgccagacagttgagcacacgcgttctttataaatgatgatgtctgatacagtgatgcttttaacagggttgtgtaacgcctgtgtgtgcacggtctcttctgcagtgtccaccgaaggtggcccgtctgcgtgtccgctcccggcgtactccgcgctccctgttcccggcattccccgcgctccccgagcttcccgcgctcccctgctcccggcattcccggtgcttcccgttcccggcgctcctcgcggccgccgccctcagtccagcgagccccgcctgggcagcgactgttagcgcgaccgcggcctgggcgcctggtccctcccgcgcggccgcgctattgggccgcgcgcggcggacacacgcgctacgcgccgccgattggcggcctccgcagcgcgctctgcggctcccccaatgcggggcggccgcgcgcggggattggccgcacgccgcgaaggcccgccctccgctcgcccggcgcggcaggcgggtgccggcgaccggagagcctggacaggctttccagatggctgcggcggtcggtcggtgaggctttcccggctgtggtttggctgcgggcggcttgggcagcccgcgggcgcctcaggtaggtgcggggcgcgaggggcgcccgcgggcggttgggcgggcgccgcggcctgcgcgagggcgcgcccttccctcccgcctccctccgggaccgaggccgcgggcggggcgggggcgcggagcccggcctttgtgaggcaacatggccgcgggcggtggagagcgcggggtggggacgcctccggggctggggggcgggccccgggcccaggcgttgccgactctcgtcgctgtccgcccgggtaaagaggctcctctcccggagggcccgaagcctagcatcgccttcaggcgggaaaggtgtggacagggccagtgctcgcctgggaccctgccggctttaacacagtttgggaaatccaagaagtcgcctaagtctttttgtccacagaatgctcacgggttgagtgtcacgtagataattgggatacggttttattgtaacaatgagcatggcggaaataaatggaaggtggcaacctgttgacagtgatgcctgtctggtgtcaaccgatggacttgggtttcttgtggcaggagtctgatttgcctttttgcatgcttgcatgtaccttgttcctgcacggcagtcctgtctttggctgtcgactgttcgaggccaaccaccaggcgaggatccactgtttcctggccagactagactcccagctgtgggagtggcccaaaccctgctgcaggccttcactcacaaaagggagtgaatggccagcccggggtacccagtgttgcctctaagtgcgggatatgaggcctgttggaggatgacaaaaggaacggatgaggtcatactgccgctgggttgggcgggaggctgcagcgggagagacttgaccaaaaggcagcctccatggcgctggcactggtgctggcccgtcacagccagtgcctctgttagccaacacagcaagtgggctaggaggaagggtgctgtccaagtgtacgggttttctccccgtgccaagggtccaggggagcttgccgtgagcccgttcctgtccgatagtcctgttggcaaggcagggtttgcatgcggtgtttggtcagctggagcagtggggaggcctacgggcagagagc

SEQ ID NO: 69663 - DNA, 1038 bp, Homo sapiens
tgtctaaaaaaaaaaaagtagaaggcctctctactgagtgacagctgggccagtatgtccctccctagtcctggccctgcacatattcaggggtgtgcctagagccaactgggctgtgctgggcacatgctgtagtgcttgtttgtttttaaactgagcagcatgtgggcatgccaggagggaggagaagcgggccagcatgctgttggcatcctcccccagtggtgctggctcttaccggcactatttcctgagtcctcccactccatgtttgggcctagccacacagaacacctggcacagcgcagctctgggaaggctgtgtgtcctggcgaagacccactgcccttttggaccatgcccttgccgtttgcattcatgccctgcattcgtggtagttgacattctttcacaaaaagccatttgcctcagcgtccagggttagttggcttcttgtagggtggtgttgggtgtaccccaggccctcgcacccacaggttgattctcgaggtatctgtcattgccgtgtgttttccagaaggcctgctgcccatcttagattctgcctaagagacttttgcagctcaacaaagggggtgtggtggaggttttgacagataacttgcagtggggccttttgtgggggtggagatgccttgggcgtggctgtgtgctcttccctctgcgggatcacccgctttcctccctatgtgctggaacccacttcccttgcccagactcttggctgccctatagacagcttggctccatgtcttgccagcactgatagctctgtggggtctatggagccatcagcccttggctatggcaactccgaccccagtgggcatatccgtgccctgccctctagcagctccctctagcgtctctcagacctggctgcatctctccacccacgccagccactgctgctgccacctggtctaggtacctgcagtagcctgctctcaggcctccctgcatggtccagggcccgcaaagctgttttctcacgtgccaccgaagtggttccctaac

SEQ ID NO: 69664 - DNA, 2491 bp, Homo sapiens
ccacgtcggccactcgtgttactggtggctcactctcaccctcctgtcgcctcctcctggccatggggtcggccttgggccgggccaggcgcacactgagtgggcggcctttccagagggcaccatgcaaaacgcgcagggccttgtccctctctgcagcgctgcggaatgtcacaaaggcgcagggtggttgcccaaagagtttggttttgtggggctgcagaccaaagcggcccaggaagcgccggacgtcgctgaagctggcgtggcgaggcacgttctgcagctccagtttaaagatctcagaggtaaacaagtcatccctgatgtagctgtagagcccgggctgaggccccggccctgtagccgccccagcgccctctttctccacctcctccagggctgccggggctgcagggggcaccgagacggtagggcagctcagggcactgctgctctcctggccacagctctccatgggcttcgggccctgtgtggggacagatggggtgctagggtgaggactaggccctgggggcctggccccccaagcttccttatgggacacccagacctccgtcggtgcactctgcactcagccctgcccctcccccagtctaccctcccgaccccattcccgtctcctttcctcccctatcgcacctgcctcgtccccacctattctctggcaggtttcctgacccaccccgcctcctcccaccccatccccgtctctacccagcgtctccccgcactctacctcgttgtcgaggttctcactcatcgcccaggcggttctccgcctagaccagggacgccatgggggccgcctggccacctcgtcctgggcctgtcacaagggaagtggcctgtcacaagggaagtgctcagaggggaggtgctcacagagccggtgcaacgccgcgaggtcgccgccacccccggcttcgccccaggcggggcgggactcgaacctgcgatgctcaggtccgggtctcaggcttggggctgtaccgcccgcccgccaggggcccgcgccggccgctcgcttcgccagccactcttagtccgccagcgcgtgcggcggaggccgagcgtctctatgatcctggcttctggcaacgtcatcgtcacgcgccggatccaacccccaaccactttagccagctctagaggcgcgcgtggccgggacggaagtgcgcgcgggtgtcgccgggagtgcgcgctcctctggctgacgggcgggccgggcatgcgccgcgggcgttttggcgggaagcgcggggcgggccggacaatgagagtgtccgcctcctgagccaataaagctgtactggttttgaatcgcggcgcgtttcccgccgctggggtcaggggtcgaggttcgggtcgtggggcggagggaagagcgggcgggcgggaggcgccggcgccagacgcggagggaaggagctacgagtagccgccgagaggccgcggagccagcgacgaccgacccagccgagccgccgccgccgccgcgcccccatggcggccgccaaggtgccgccgggcccaagcggggacagggtgggcgggcggggccggggccgttatcagcggccacgtgggcggcccgcgccgccgccaccaacctccgccggcctgcaggctcggccgtctgctgggcctcggtggcgcggagtcggggcgcgtggggtttgggggctcgaggcctgcggagttggggcgtttgggggtgcaggctctgcagaggcctgggggctgcagggcccccgcgtgaccttggggtgggttggggagcggccgtcgccacgcgggacggccccagcctccaggaactggtgcgggcggcgggtttcctccggctcggcccacttggggctccccactagtacggtgcatttattctttccgtcgcccacgcagcacttcattcattcggttcttacgtctggaaccgccactggcctctgtggcagaagctcgcgttccagcgtggggcacaggtcctagatgcgccgacccaggcggcggctttgttggctgcggtgtctggttgagtgcgggccgctgcagagccgcagtgctgtggggaacagtgaagagcagcgaaaagcttatgttttcttttccagtttgagtctagtggtgaagtcttgggtctcttacggacttctgggtgaccaaggcatgtgttctggaagactcgaacctaaaatatgattattggtgctctcttatcctctaaattgggccaggatttcatgactttcaccggtacaatttatctagttattaacttagttttctgaactgtgaaaaaattgctggcagagctgtgaatccagtgtaaatactagcagtcctgtagcgacttttttcgttttactaagcaagagcacaactatttcctaattagtcaaaactgaaagagttacattttgctttaaagtaatatttcaaaatctatttcgacccatcattgtgt

SEQ ID NO: 69665 - DNA, 1138 bp, Homo sapiens
tttggtgggtccctgtggcagagtggcccctgcagaggaaaaggccagctcaggagagaaggctgtgccgactcctcatggtttccagtgccctacatgttcagagaaacgtctttggtaatgaactatggaaatggtccctgaaggtatggtctttgctctagaaaaagcccaactgatgactcctcactggcatcttgactgtgttctgtgagctgtggccctcatgctcatggactgcttgcctccagcaggttggcagggggacagtggtgcactttgcacccaagaagaggtgaagcctgtgccctatgccctgtgccgagtgaggtcctcgtgttgggagggtgacgccgtccactgcagatggtgccttgctgtgctgcactcttggtgacacccggggccccaggtcgggtacaggtgtcagttggaggctttgatgtctgtgaaagggagggccccttgcactggctggagcttccaggagagaagcccttggctaggacaggcaccccccagcacagaaaggatgtttagcattctgtatttgatttggggttccaataaaattccaggctgacttccttcatctggggatgggagaaatgtctccaagggagagtccccagcagtgagaaggcccctcggaatggctgggagacagtgccatcctgtggtggggctgtgttgcagggtgcatttgaggatgcagcttgttgacactgcaggatgcgatggtgctgcgggaagggagctgtgctgggagacagaatgcgtccgcgtgctggccccacgggaccacagggtaggctatacaaggacgcccatgtgggcactcgggccagccgtccagcccagtgtgtttccattggcttccctttggcagacaatggtgagcagaatggggtcctgccggtgctggggactgtgtgagaatgcagtgtgcttcagccttccatcccatgtctgtctgccgggctgcaggctggggagcctcctgctttctgcttcattttccttttccctgggatcttagctcttcttgaggaggaaactaggccatgggcttggcagccatgttgggtggggaggccggtgccaacctcgcttggttctctgtctccagtagtgggtc

SEQ ID NO: 69666 - DNA, 1835 bp, Homo sapiens
ggcttcagaacaggggacgctcggggcatgttggcgtggccgaggacaatgaccctcactggggacgctccggagcttgactgagggtctcccgctggcaccgcctcctctgccggcgtgtgtgtgtctgggggggggacccacacgaggccccgccccaccccgcccacagcgccgtcggccccggcccggtccaccttaagcggcggcggggcgggtgggatttcctgcgggaggagacgcgccgggcctatcgggcagggccggggcgccgggcttcccaaagggccccgcctcggggaggatgggggctccagccgaccgtctctcaagcctgcagctcgggccaggacgtggagggcccggcgcccgctggccgggctcctccagcccagtggcccgagggagggctgcgaggcggtcagaaggcaaacagccacgacgccgctgcggtgtcacacccgcgccccctcgtgaattccaaggggcttcagaccagaggggtcgttagggaaagggctgcgcccacagacgcccccgaggccacctgcacggctccgcggcccgggaccaggggggcctggccttcgccgtggtgcccaccacccgggccgcaggggtgcgtgggtgcccggcccccgagagccgcgggcgcccgccgggctggggtccccgaggccgcggggtcctgccccctccgaaggtcccgcgaaccggtggcggtccccgggccccatcaactcgccccgcccggtcccgccccgccgcggcccccagcgcccggtccaccttaaggggcgcgctgacataagagcgcagcagccgccgccgcccgtggggtgggatttcctccgccgccgccgccgccgccgccgcgggtcctgcgccgcgtccagcccgcccgcccgaccccggcccgaccccggccggccctgcccgcccggccccggggagggatgcggcggcgcggcgcccaggatgccccgcagccccgggacgcgcctcaaacccgccaagtacatcccggtggccacggccgccgcgctgctggtcggctccagcaccctcttcttcgtgttcacgtgagtcggcgccgcgtctgggggcacgcgggcagcgatgggcagggcccgcacagcccgggcacgggggcagcggtcgcgggggctggcggggccccgggcagtgggcgggcggggcgccggctgcaggcgatggcagtccctctccacccgctggggctgggggagttgaagcggtgtgccggcgtcccgggcaccggggtgagtcccttgtgtggggacaccagtgcgggctgggcacctcgggagtgtccaggcaggccctggcggggagcgctgggccctggcaggggaggaggccgggctgccctgggtgtggctgcagcccttccctccccatgggacccccgaggggacgtgggccacccacaaccatgagtcttctctgcaggtggccgtgggtgcctctcgggtctcctcctggctgcccgccccgggccagagtcaagttgttcccacgtaggtgtggcctggcctcgttgccacgtgcctgccccacagccactggtgacccgggcctggcccttggcctccttctcaggaagacccagtggtcatcacagctggagggcccaggccaggccacacccagggcccgatgttagcacatcacctccgtgggctggccatggtgcacaccaggacccttgaggtcctgtttctgggagtgagagcccgcgcctgcaggacactgggcccctccagcctcaacttcttcacccaagatacaggctggcttaggaccagagaggc

SEQ ID NO: 69667 - DNA, 2153 bp, Homo sapiens
agcagctcaggatcaccgcggtggagtttccagtcgcagatgcccttggcaggggctgtgggactgcaggggagacggaggtctgggccctaccatgtgggggcagcatgcaggaggggcccattcctgccccccggcaatacaagaagcctacgggggtgcccaggggtcagggacctgagagatgtgctcactgagacctagcatgctcacccccagctgccagagggggtagttcccaaagaggggcaggccctcagagtgagctcctgtcctgagatgggcaagggaatattcctgggacactgcagaactgttaccaagccaggcacagatggggccaggcccctcggcctctaagacaaggccggcccatggatggagcacgatggccctgaccttgggcacagacccgacgattgagtgagatggagacacaggcttggcttgtccccaagaagaaagaggcacagaagcagctacagagtttcttgcttccctgtttgggttgctgctggctcaggtaccacagctggcaacagaaacagaggtcaaggcccagagggagggaggggtcgggtctgctttgtccagggctggctggccccaggagggccccgaagctgtggcagaagcaggtaccagatggtcagtgtagcactgtggctagcacccaaaactggacatgggctgggagcagcctgagatgcagggcagaggacagcaagccacgagtctgaatggcccctgttctggaggcagtgctgggaggtggaggctggagggggtgtctcgcagagcctggtctgctgagacataggctgggacaggctgctgggtgtactgtccctgggaagtgcaaggtggcgagtcaggaaggccccaggagcagggttggggcaggagccagtgagcagggcaggaccctcatctggaggggctgggggaggtctccagtctgggatgggggtgttcccggcaccagcccagtgtttctggtgcagcagccacgtcattatggttggaatgtgaccccattagccctggggcggggctgttcaacatcctgaggataattgatcagagggaggaggggctgcaccgcttcctagcaggttgagttaattatcagcctgcattagcacttgacctgtggcatgtgtcaactcattactgctaattgcagggactcagtgacctctccgaacttctgtcacccctgtcacggcccctgccctgtggaggcctgtggaatgggaagtggggaggggaaggagaagggggcggagtcagccggagcctcctggccaggcctggagtcaccctgtcctgccacagctctcatgggtttagagtgggccctggggcagagggtttgcaaggataggggtgggtggctctgccgagggcggtgttctgagtaggtctcattccccagtctgcccagcctggccccaccccagctctgctgccctgttactttgtccccctgtgttcaccctccacttcctgccggggacactccaaggcctgccaaggttggagcaggggtgggactcagccattcaacaaacgcttccttggttatgcagggctgggcattggggtggggggctgacctggaccctccaagacatcagattgtccaactgctcagttttcattggggcaagtgcctcgctgagggtgaagggggctgtgagtgcccatcagggagcctggacaggtcccgcctctcacagctgtcccactctctggagctgccttggtggcagatggcactgtcctagaaaggtgaggctggagctgtctcttccaccaggggtggccaaggacgcttccagggtcttccatgcaggcctccagggtcaccctgggcgtggctgagggcatgcagaccacgctgtgctcccccccaccccccatgcccgtcgcttgcctgacatgctcctcagctgtcttgccccgcagaagctgtgtggtctcccctgtgagtagagtcgggctccatgatcctccggagcagcgccagggactctccccaggcacaattttaaagggggccctaggacctgccaggtccacggaagtggtccttgtaactctctccctggtggcagcctctggtgcattccggcaggggcagcccctcc

SEQ ID NO: 69668 - DNA, 1065 bp, Homo sapiens
agctccagcaagtccatgcctcctgggacacagcctggccccgatgaaccctcagctgccatcatcctcaaagtcgcagcaggctggatgctgaaggcacagggggccgcatggactgtggctgcagctctctcattgtcatggggagggaatggcctgcagccccatcttgttcccttctcttaacagcctctttccaaagatggcccgagctcccatccccgcccccacagggctcttcctgcacttccccaggcatcctgggaggagaggtgggctgtggctggaatgtgccgccctctcaccctcctgccaggaccactgtgctggctgccttggtggcctggaggcctgcagagctgcccaagcgggggctccatgcgcagctcccactccatgttctgtccctggggaggcccacacagcactgcccctctgtctcattccaggtgcctggtccccagcgatccgccttgaccccagatgctcagacttgctagcccagggccagaggggcacaggacagggctttggagagggggcttcctaggctggtgctggcccagcctgcccagccctgccctgctcggcccctgcctgtctgggtgctggacctggcctgatccatgaagcttctcctagcgaggtgttttccaggcctttggaatcttagggatgatttcgtatggggaggggccttctccccagcctgctgtcttatttttgtgccgattccccgcagcccgagctcctgcccccagcacctgcctttccagcctgtgtcctgtcttccaccagcggactccagcctggctcccactgccacgtggctgcctggcgcatgctccaccccgtgtcctcccagggtcccagtgagggcccagccccgcagtgcgcagtctccgcagccatcgagtaggcggccagctgagcagaggtgctggccggctgccagcccagcacccgtcctgctgaagttgctcctggcacgcttccggccccaggcttccctgggtggtggggcagactttgtgttgctggtgtgcaggaagggcccacgacccc

SEQ ID NO: 69669 - DNA, 1401 bp, Homo sapiens
atcctaattcttttgtttagcattgtgtccaagccaggcagacgcagccgggcagtgggcaggtggccatggagctgggatgtccactccctggcccctggctgtggatgggtcagagggctcatgtgctgtggcagttggccagggaaggtgcatttggagagtgtcaacatactgtttgtcttctgctgtgcaaactctcctcgacttgtaatttaaaactaaaagtgtttccgacttaatttctgagaaagcaccaagtaatgggatttgtggatggacttgaagagccaagaaatcaacactgactgcctctcgacctggagaattacggagcccatgaattctctgggcctcagctctggtcccaggctctgtgcacaaagagaggtgggcctggtgggtggtgcggagcttggccttgtacttcgtggctggctcagcctgccctcctgggacaagtggctctgccgggttctgtgtgcctcctggcatctctctgaggggagctcccagcctctgcctagaatacctgggcagcgtgttcagacctggggccccctgcaccatcaccccattccaggctgggaagcttgaggacccaggcagggaagcttgaggacccaggcagggccccagtgtgccacagggcttggccactgtgcaactgcactgcagctctggcctctggccgggccttgcttaccgacctctgccctctgccgtgtgtcctccaccttggccatgcacagcgggggctaggcgggcacatggtggaggctgccaatggtgccctggcaagttctcttcgccctcgtgccagccactccagggagcaccagggattgaataaataactgccacgtttattaaaaaataaatttggtgcctaacggaagtgctgtttctatacatagaaaaaaatgtttaaaataaaaaccaaaacagttctcaaaggcgctgtggcattaattattcatcgcttgctaatgaaaacatggctttgcaggcgtggcccccacctccctccaaataagactcgggctcagggaaagcctggccttaagggcagggagctggtgacccctgaataaaatgggggtggctgtgatatcctccatgggtatttagggagcacccagtgtgtgccaggctcggctggcctgggggagtgcacagtgggcactggtcaccaggcaggcacagggggcagtctgcacccctccttagtcagcctggggaatggcttggggtctgacctggaggagggagggagcagcaggaggggctggctgggcagcagagccacctcttggaggaaagaaatggggacagaggccactctggccagcaccagaggacagtggctacatgtctgggcacccaggccaggggcctggc

SEQ ID NO: 69670 - DNA, 653 bp, Homo sapiens
aggaggcgcatgggttcgttgaggtgatacaggagtggaagagcttggtcccttgaaatgaatgatagggaaaaggggaagtgctgcgtagaggagggtgtgatccctggctggggctccatcccacagacctaggtgaggacaggcatttttgcatttcccaagaccaccctggcctgccacacccccatcctatgactataaaaactcgcgagaccctggcaggcacgcacaagctgctggacgtggagaggagcggattggcagaggagcactcaggcggctggacgtcgagaggaacgcactgacgggcgccggcaccccggcaggctaccaaccggcagcagaatgacctggagtttggctggggcagccagaggagagcccgggcccgactccaggggaaaaccgtcccactccatcttcttctgccttcccccatctgctacctccactcaataaaaccttgcactcattctccgagcccacgtgtggtccaattcttacaccaaggcaagaaccttgggatgcagaaagccatctgtccttgcgataaggcagggctctaactggggtttaattgagctgagtaacagaagccaccgatagagttaaactaaaacagcaaaactaaaagagcaccctgtaacacg

SEQ ID NO: 69671 - DNA, 631 bp, Homo sapiens
gatgggttctccagaggtgagagctggggtcgtagggtggaccggcgtctgctgaggaaagggagctgcttggagcgcggggcgagggactcacgtggagaaggcgtgggccctacggcgggcggggcggggcctcaagaggagcgggtgcagatgctagggaggggcggggcccctgggatggggcggtgtctcccgaggagtgggcgcggctcggagcgtgggacttctaaggagagagcgcggctagggggcatgcggggcggggaggggcggggcgggaccaatagcgcatacttaagcggcccgggcgggtaccggcgtcccgccatggctctgcggcgcgtcttgcccgcgctgcgcccctacattccccgcttcgcgccgctgtccacggcgccggccgccagcgagcagcccgccgcgggcccaggggccgtgccaggacgtgggtcggccagggcagtgcggccgctggtgcccgccgtggacttcggcaacgcgtaggaggcgtactgcagctggcgaacctgggagctggcgcgcagcctgctggtgctgcgcttctgcgcctggcccgcgctgctggcgcgccacgagcaggtgcgcggggtgcagccggggcgcgggg

SEQ ID NO: 69672 - DNA, 1286 bp, Homo sapiens
cgggtaggggggcgcggtgagccccggcgggaaacgaagccgcctccgcaggcctccgcccgccccgcctgcgtacctgggcaactccttcaccaggctctgtagcgccgacagcaactggtagtgtcgctcctgctgccgggcaccgtccgccacctcctccaaggcggccgcgtagcgctccatggcgcggacgcccgctagccgccggcggcggcgacgagctcccccagcttcacgacatcccgagcgcggcgcgtcccgccccttttacgattgtcccacgcgcggcgcgctccgcccccttttacgacagtcccgagagggcctggccgcctgccccgccctgccccgcgccccgccgcctgcttattcaggaggcgcgccccgctcctctgcggagactccaaggagggttttgctcagcccaggctcgcacctgcctgctccccgcgcgacattaaaggcgagactccgccgtctggatatcgcaggaccacggagaatcccaccggcccttgctgagtcattgcgggccgaggtccgggctccgcgccggcgcgcctgcgaggtggactgtcccggtcaccggcctccccagaggcaggggtctcgggccagagcccacaggacctgggtctaaggcaccatccgcggccgagcagtggcgctggggtctgtctgcgtcctccccgcccccggggtgagacagacaggaccgccctagagcctctgggtcaggacagtcggagccagagtccccatctgggcctccgtggcccccagcccgtgagcccagactgcgctctccccgctccacaggccagctgctgggccggggctggggggcttctggtggctggggctgaaccgtctaggaacaggctttaataggaggggctcgggtggaggaatggctcctgcaaaggccctgccagagtcaggtcaggtgggtgggcgagaggaccagtgtggccaggctgcggaagccagcacaggagacaagggcgggtgctgtgcattacagaggctgctgggggcttgtccatagagcagcagggggcacggaagggcttggggacgcagacacgatcagacttgcatttcatcaggcactctttagctgcctgctgggtggctgggctgtgtgagatgaccctgctttgaccaggttaggaattatgactggtttccagagagaacattggttagtaattggctatggggaagagggggcgttgagccaaccaactggggtccccctgaagtgccagcaaagtgtctgg

SEQ ID NO: 69673 - DNA, 1309 bp, Homo sapiens
acttctggctgtgtgatttgcgacacgttaccccacgcacctgtaccacaacttcctcatctcccaaatgggatgacagtagttagcaaacctccctggactgctgtgagcattctgccagaaaaatgtactccaagctcttgaagtaggcctggcgtttggttggtgctcagtacatattcaatgtttctgtcgctggcgtcatcactgtgttcatggcagagctctgtgccgccaggactgggccgccacccagaccttcctttcccgccccaggggtgaactgtggacaggaccctctggggggactaggccaaggctctcccacctctggggacccgcgcccatgggcctcagatatgtggctcgagaagggggagtgggggcagggcccctggaaaacccctcgaggccagacccaccactcccaatatccgtaagaccaggggcttgagtctttcctgcagacagatgtgggcaggaacccacccgactcccagctacgtggggacgtggacgaactaacaggacaaattctagttcctggacaccgccctcccagtatcctcgcaattagacacccatgcagcggcactacactgatccgcacacggagatacacagcgacatccgcccgcaagagcatggtgggtgccggagctcccggctgtgggcccaggaactacatttcctagaaggatgtgctagatactcgttcgcgtcgggacgcaagcaccggcccgaactcgctctaggaaatggagtctgacgcctgcgcggcgcaaacgctcccgggaggtgtagtttgcgcctatttcgcgcaggcgcgctttcccgcagcggccgcctgctgctctttgtggcagtcgcagtccttttgtgggagtccggtctgtccacttgccggtccctcagaccgtcggcggtctctgtccgcttcgggacctgtccgctggtcgctccgcgtccgatggctcctggccgcggaaccttaggcctggccctggtctccgagcgcgggttcgccgggaggagcgtgtggcgggggtgtgccggggcgtgagtgcgccgagcatggggctgagcctggtgtggggagtgggtatctgcggagccggcctgaaccccacctcagccgggcgcggggagggggctccgtgcgtgtgatcgtgcagctgtgagcgcgtggccgccccgcggggctccgctgcaggcccctcagccccaggagcagtactcgctcttcagggcctgccctggatcctggaggctacacagctgcccactcctcctggggaggctgccgtgg

SEQ ID NO: 69674 - DNA, 2467 bp, Homo sapiens
cacacccagctaatttttgtatttttagtagagacggggtttcaccatgttggccaggctagtctctcctgacctcaggtgatctgccagccttggcctcccaaagtgctgggattacaggcatgagccaccgcgcccgcccccagtctcatatccccaattttagtcatcacaagccaagttccccgttttgtactgttcgaagtttcagtggggagaagaaaggaagcttaatgtgccacatagctacaaactgaaggatacaagatgaatttttatgaagtgatggatggcagagtcaaaatcatttcagaggaactttcagttcggtacgattttactgagtagataccctcagccttctgtagggcccccgaacgagcagtatcccctcaaagaaactcaatccttggcagcatgaagcaaggtcggccacaaaggcaaagggggcggctgcggtagaggagagggagtgggtgctgattcccagcggggcagccttccaaagggtgcgctctggaagaatctcccagggagccgtcttggaggcactcggccccgcggagggccggagcgagggcgcccagtgaggagcccaggcggaaggtggcggtgccccgctgcccgccccagatccactcggctcggcccgcaccggatctaaaatggtcagaactggcagccgacgcttcgcgctctggtgattttgcactgacagcgcgatctccggctcctctcaggaaaccgggagagctggcaaggctgggctcctacggctgcagtccccgggcccgatcgagggaactgaggctcgtcaggccggccccaaatcgcccgcctgttgcaaggccgcccgctccagcgcggagggtcgcggccaggaaggccgcattcggacctgccgcaggcaacagggcccgcccgggtgccaggaggccggcgcgccagcagccgcgctgaggaggcctcgcaccctggcccctggccgagcgccagatcccggcccctacgcgcccgcgcccggggatcccgccggccgcgtccccgccacgtcaggccgcgggctctcctcaggtcgccgcccccgagcctccggcccgcgcccgcccccgcgcccctcggactccgcgccgctagcttgtccccggcccagcgatgcctgcttgccgcccgacccccgcgttcgctgccgcccggcccgttcggctcacgcctcgcagctgacctggtgccgccgccagccgaggccgcactcgcagctggagggaggcgggaggcgggaggcgggaggcgcgaggcgggaggctgggcgagaggagccggcggggcgggggcctgggccgtcacgtgggtgcgccgcgcaggcgccgggcgggccagacgtaggcccgggggttcccggcctggccgggtagcagcgcgggggcggccctggggcggggagacagggggcggctccactccggcgctctgcggaggacagcagcgatcgccaaggctcagtgagtccccgcactagcgcggcacctggcacttggcggggccgaaccaacgaatgagcgaatttgccgagagtcgccccgtctgaatccattgactctttccttgcctcggtcctaccctcattcctcgactcacttcctcctgcccttcctcactatctccctccccgctcatatcctccctctcctttcctcattcccttcttcactctcttctctcctctcttactccccccctctcattccctccctccttcactctctcattccttcccttcctatcttacccaccattcccttcctccctcactcattcactccctccctgtctccccctctcatcccctccctctctcattccctttccctccctccttaactctcgttctctcctccctctctcattccttccctccctgtctcatttccccccttctttccctccctccctctcctcttctcccattgcctccctccctctttgattcccttctttcctcctctcctccacttgttcccttcgtcacgcgctcattccctccctcccgcggcctgctccttccccgctccctccgcggtcggtgccgctgaccgtagcgcgccccctgcgggatatcggggagaatcgcttaacaccgccagagtgaacaggtgctagtttgtgtgcccgttcctttactgagattttgcagtaaatctaattcccagtcttaaagcctggtcccagaggtccgtgcgcgggtcttggcattcattgttctccacctcaccttcgagcaggtcccatcctccgaggcgtatccgtaatggctgcgcccagagcttggagccacagagcctcctgatgggataaggttggagtgtcccacactgtggttttgagagggactgtgaagggtggagagagtggtagggggaggatgtggctggagatggctcatggttaaaaagaaaggtggggccgg

SEQ ID NO: 69675 - DNA, 1157 bp, Homo sapiens
agtatggtggcgtgcgcctgtaatcccagttacctgggaggctgaggcagaattgcttgaacccaggagctggaggttgcaatgagccaagattgcaccactgcactccagcctgggcaacagagtgagactccatctcaaaaaaaaaaaaaaaagaaacaataaccactccctccctacctccacatacataagtgattacaggctccaggccaaacacacagaggagttacatctggctggtgctaggatggaaggtggggcaggtcaccacctcccagggactgagtgccaaagcaaggaggaagattggaggtgaggctgtatggagacagccacaggctcacagagcttgtgctgagctctctagggggaagcttgatctgcctgggaagcttccagctcctacctcctgcagagcccagaatggtgtccaggaaatatgtggccattgagtggaaccagccttggcatggtagcctgcaggaacccgcaggctagagacatggccacatgagcagtgaggatctcccccgagatgaggatccccagaacatagtgtgggatgcaggtctggcctctgcataccctcggcttcctccatcacttattctcagacatctaaaccactaacatccagactggggatcccaggagggtctacagtgtcaagagagggcaagtccacttcaggatcaaccttcctgtggccccttactttccttggtccacctttccaggtcacccatccagactgtcaccagggatcactgccctgggcaccaacccaatgcggggacaagtagaaaaagagctctggggaaaataccaaagggaatagtcactcaattttactgtgatgataaactcctggcaaagttccaggcctctctctgtctgtgtctgtgaattatgtgtctgtgtctccatcaaccatagtgcagaagggggagggttgtcctaagtatcctattaacatgtttgtttgtttgtttgtttgagacagagtttcgctcttgttgcccaggctgcagtgcaatggcataatctcagctcactgcaacctccacctcctgggttcaagtgattctcgtgcctcagcctcctgagtagctgggattacaggcacacaccaccatgcctggctacttttgtat

SEQ ID NO: 69676 - DNA, 3066 bp, Homo sapiens
aattcgtttgacatctggcctccagcaactagctaggctgagttctccatgaaggggacgtggctgctggtcaaaagggaaagcccatgtctaaaaattaattaacgtggtttaggggcctcacattcccaacccccaaatacagccattgtgagatgtgagattcaaaaaatcgaagagtgaagcggtgatgagagtccatctggtcgctcttcggatgcggcgctagcaggcagttgcatgaaagcagatcccagatcacgttgcactggcacacagtaggtacccacacatatttgataaataaacactctctccctagcattactatagatagctggcagcttggcctggcatcccggaggggtctggatctcagggactagataaggccagcacactgaagagttgcagaaaatgcaggcggtcaggcgcaggtctgctgcgggagcacctgccgtgtccgacagctgcactggaagaggggcgtgtgtctcccagccgggcggaaccgagaccgcttcgtccccggcggggaacttcatttcccacaagcctgtgcgcgagactccatttcccacaagccctccttcacttccggctcggccgaggcactgcggacggcttccgggtttgggcctggctctgtgactgaggcggcggcggtggcggccaagcgggatacgggcggcgggagctggggaacaggcatggacgtttccgggcaagagaccgactggcggagcaccgccttccggcagaagctggtcagtcaaatgtgagtagtggtcggggcagggggctggattgtgggaccttcctccttagcgtggcgggcgaggccagggccggacccgtgagaaacctacggcgccgggagacagaaggcgccggggacttgcgtgggtcccagggctcgggcccccccgtctgtcccctccgttcccgacatggactgctcgtttgctttcctggggccgagctctgcaaaccaacgagccctggcttatgaatcatcgtcttgagctttctcattcgtcatttgtgtgctttgggtgcagactttcccccgctttttgaaccacactgaatagggaaagggagagaagcagccggctgtagtgggtttagcagggctgggtgcttcatggtttctcttccagaaaagcgcatcaacggtgaaagaaagtgatgggaggagggtggatgtaagatgagattgggaaggtagttgtttggggtgtgggcggtgggacggaggatctgagggtgaccccccgaaggaatgtggactttgccgaaggatggcaggaagccgctgtcaggaagcgatcgtcgtttctggaggagagcgtgaagagctggggtcagtggccccgctcagaggaactctagcccctcaccaccgactgcttgtttctgttagcagtttttttcatgcgcgtccgtgtgaagagaccaccaaacaggctttgtgtgagcaataaagctgtttatttcacctgggtgcaggtgggctgagtccgaaaagagagtcagcgaagggagataggggtggggtcgttttataggatttgggaaggtaatggaaaattagtcaattgttctctggtgggcagggatggatctcacaaagtacattctcaagggtggggagaattacaaagaaccttcttaagggtgggggagattacaaagtacattgatcagttagggtggggcaggaacaaatcacaatggtggaatgtcatcagttacggctgtttttacttcttttgtggatcttcagttacttcaggccatctggatgtatacgtgcaagtcacaggggatgcgatggcctggcctgggctcagaggcctgacagtttttaactgagcttattggcgtgttgtgctcgccacagatttgcctgagacacagcccctttcctgagggatggtaaaggaaccgtcacagcgcagtcttgtcagtctgtaatgtgtatactgcaggggtttcttgcgaagcggcggttaacttgagcagaccaggggcagtctagtgagtaggtgacgaataaattgagtcctagaaagacaagtaggagtgtgaatagccaccattccaagctgaggagttaggaaacatgagcatttactgcgtggagggaggatcttgtaggctgagagttctggggctcgaggagtaagagagcccaggagatgatggaatgagggtgagcaggtactagcactttagtgggggtgttgtgccaaggaattgagcctgtgtttggcatgtggcattctttggagtagtgaaatgccagtgttgggaatatgcctagagtccctgtccctggagatggatgcagggcagagaagagagaccagttaagctattaagagagtttgaacatttggagggagtagggaacctgtcctttttcatccttatattctcactgctagctcactgcctgccacattgctccgtaaaatgattgtggcatgacctagtcgggcgggagattataaaggcctgcattagacagtggtagaaactgaaagaggaagacagattccagaggagggggaacgtagacaattcttgatgactaactggatggaggggggtggggtgtggggtgaagcattgtggaaggaaggaagccgggctgaatgctgggaaacctttcagtacagtggaaagagtagggactgtagagttagtagctatgggctttgggaagaatagccttgggatatttctggggatattgcacaatcagtgaacagtgttttactgataaaatatagttatctgtaggtgaaaacttgagagatatcccacttcagggttcctgcaagaaaagtccccagggcaagggttcttctctgggaaagcccagaattaagaactggaagggtgagttgtcatcaaagaaaatgggggtaggggaagtgttaagagggctgggagggtgattgaagagtttatgggtgttgagtgactggatacttcataactcagctttattttgcttccgggagaattgagttctttatttttttcgatattgct

SEQ ID NO: 69677 - DNA, 446 bp, Homo sapiens
tcctacatgtgggtggagagttaaattctgaagtatatatttttatcttgttaaaaaaacacttttatgtttctttaaaaagtaaaagaaccagaatgtagaagtttcagtaaaggaaaaagttacagtttgtttgggatacagtttgacaaatgtgctcccagctgcctgagagatagagaggccagatgtttgctttggttacattgatgactgaacaatcggtatctcatcatttcctgccttagagatgaaagcacctgggcactggggcagtaaattggttgcaggattggaagaagtccaaggacagtgtgggatgccaccctgtagctgtctagagacctagtgaaggtcagaaggctgggtgagaacaagccctgcactgatggaggacagggaaggggcttttctggctgggagtgtggtgaggcatttgagctgca

SEQ ID NO: 69678 - DNA, 694 bp, Homo sapiens
catcagtcctggagagcaggtggagggcagatgctgtgatcatcccagaagagaggacacagttggaggcagatgcatggtctctactttcagctaccctcaatgcagcctggtccccagaggcctgaagagcgccttgtttatgtggtgacctcaagaggggctgctcctgcaccaaggctatgtgtgcatgctaacacagtaaccgtcatatactcaaagtgtcagctctaagaactggagatgaggagctgcaagccactctacagttatcaaaggcacagctgagggggtttgtgctgaccaagctggttgcctggtgtttggattgggacttatttactttggaaaatatgcagcaacagcccagcaccaaagttcacatcaaaatcccactgatgaccttggctgctttcatctctgaagcgccacttctcagaaacacagaggtaagttgggtttctaatgtttctgctgattataaattatttttggtgtttacggataggcaactggttcatttttctagcaaactaagaattcagaagctttctacactgttttagaagtgggaaatggtttcatttttcagtgtgcctattataaaattgtgtcagttccattgttgggagagttgacaaacttagaataggagctgtggaatagatgaaaatattgtacttatattaaatta

SEQ ID NO: 69679 - DNA, 1298 bp, Homo sapiens
agcactttgggaggccaaggcaggagaattgcctgagctcaggagtttgagacctgtctgggcaacatggtaaaaccccatctttaccaaaaacacaaaaaattaactgggtttggtggcacacacctgtggtcccagctacttcaaaaggctgaggtgggagggtctcttgagcctgagaggaacaggtggcagtgaaccaatattgtgccactgcactccagcctgggtgacagagtgagaccccgccgtctcaaaataaaaataaaaagaaatcgtttctagaaactgttttcccgtgtgtaaactagtggcactgcagcctgaggcaggtgctgagatggggacctggaaaaggcaacaggcattttgagtcagaaacaatgtgactttcctgctccaaaatgtgcaattcaaaagtctttcttagttgtgactaaaacaaactttgaacttactatttcaacagtattataaggggaagacccaaggaatgggactggcactgggaaaacagctaggaagctgctctgcacggccagggagtctggaagcatcctggtactccagagcgaacaaggctgagcgcttgatgtggggcttagaggcttaaccaacttggttcgaatctagccactgccacttattagtgacagtgacgaaaggctcagtctcctgatatataaaatgttgggaggatgaaactaagttacacgaagtgccttatacagcgtgtcaggcatccaacagaggccattatcaacattaaccacactgacagcatttcaagcagagtatccgaacagttaccccatcttcaggcctactgagttcaaatatttgcttaacaagagcagccagtaactcttacctggcctcaactggcagcagatattctgggcctcaaatatctatctaataggaaatggtcacagacacaaaataagcttaacaaaaggcagtttttttttgttttttttttgttttctgttttttgagataaggactcactctatcccccaggttggagtgcagtagtggcgtgatcacggctcactgcagactcaagtgatcctcctacttcagcctctcaagtagatgggaccacaggcgtgtgccatcacaccaggctaattatttttcttttcttttttttttttttgagacggagtttcgctctttttgcccaggctggagtgcaatggtgcgatcttggctcaccacaacctctgcctcctgaattcaaacgaatctcctgcctcagcctcctaagtatctgggattacaggcatgcgcca

SEQ ID NO: 69680 - DNA, 5764 bp, Homo sapiens
cacccagcctatttatttaatttttcacagagatgaggtcttgctatgttgcccacactggtcttgagctcctgggctcaagtgatcttcctgccttggtctcccagtgttgggattataggcgtaagccacagcgcctggccggcagttctttctggggtgattagaagttgggaccatgtattacctgtctgagtcagcattataaacacctatggtcactgtcctggcaaaacatggaatcatcaaagctcatctaaccagagtgcagttaataaccaggaagtaagcaagagaaagacaaaggatttggcagtcaaaacagatttgacaggccaagtcagatcctcctctgaacgagtcagaggaacaaataaagacaggattgccataatgcctctgtgctaaaagcttatcttgtttacttaaataaagggagtgcccctcaggtcttgagtaagagcttgctgacatcaccctcacacagactttatctcttgtttctaaccctgtgttagaagcagtaacacagaagatttagttgctcctgacagcagtgggagctattgtctaagagatacaaaggagaaaaaagtatacctgcagcaagtgatatcacctctggggctgccaccacatcacctcactacgccctgagggggtctcagcactagacaagttccaaatcttttgcaaattaaacaaccccaggtcaggcgtggtggcttatgcctgtaatcccagcactttggggggctgaggtgggtggatcacctgaggtcaggagtttgagaccagcctggccaacagagcaaaaccccatctctactaaacaaaatacaaaaattaaccaggcgtagtggtgtgcacctgtagtcccagctacttgggaggctgaggcaagagaattgcttgagtccaggaggccgaagttgcagtaagccgagatcgcgccactgcactccagcctgggtgacagagtgagactccatttcaaaaaataaaaacaacaaaagccaattacaacaacaacaacaaaaaaacaacgaattaaacaaccccaaagattgcacaaatttcaagtatctttagaatatgttttcagaaagcctggcccatggacatttttcaacagcatctccattgcaaaggtggaatggtgtgagtcacacaggcatggctgagtcccactaatgcacatcccttctaggtactctccaatcaccagccccaggtgcccactcaagcccagctcttagtgaggtttccctgactctctgggcacttccactcctaccacacagggtagagccacacccctttccgtacccccatgtgctctggcagcattattttgagagccttcgctttactgcacgtctgtcccatctgtcccctgactggtccatgagcccctggtgggaactttgtctctggtaactaaacactgtctggaggtggtggacaaggtgtctggagaaaaacaaactcctccctgggatgcctgagctcccaggattctagaaggttagttttgcaaacctttaaagaagggattttcatcaaggggcccacagatccttcattgaggtttatgagtcccacatcaaaggttgggtgtctatctacatcagattctcttaaagtccatgatcctaaaacagttaagaactaatgctgtgagggcctcttcctgggtcaaagccacagggaacctgccatgtggatgctgcagcggggtgtggatcagccaggccgcctttcactgtgttctgttttccctcccagctttagctccgccaaaatgaaacactcattaaacgcacttctcattttcctcatcataacatctgcgtggggtgggagcaaaggcccgctggatcagctagagaaaggaggggaaactgctcagtctgcagatccccagtgggagcagttaaataacaaaaacctgagcatgcctcttctccctgccgacttccacaaggaaaacaccgtcaccaacgactggattccagagggggaggaggacgacgactatctggacctggagaagatattcagtgaagacgacgactacatcgacatcgtcgacagtctgtcagtttccccgacagactctgatgtgagtgctgggaacatcctccagctttttcatggcaagagccggatccagcgtcttaacatcctcaacgccaagttcgctttcaacctctaccgagtgctgaaagaccaggtcaacactttcgataacatcttcatagcacccgttggcatttctactgcgatgggtatgatttccttaggtctgaagggagagacccatgaacaagtgcactcgattttgcattttaaagactttgttaatgccagcagcaagtatgaaatcacgaccattcataatctcttccgtaagctgactcatcgcctcttcaggaggaattttgggtacacactgcggtcagtcaatgacctttatatccagaagcagtttccaatcctgcttgacttcaaaactaaagtaagagagtattactttgctgaggcccagatagctgacttctcagaccctgccttcatatcaaaaaccaacaaccacatcatgaagctcaccaagggcctcataaaagatgctctggagaatatagaccctgctacccagatgatgattctcaactgcatctacttcaaaggtaagaggcacctttacagttctcacagcaaacccacaacatactatttttgtatgtgggtagattgaatgccaagaactgtactgtagctataatttatccaggaaaactagacacaagattgactctggaacggggacagggaaggccaagctgaagtgacagtagcatctgacacttactgagccctaactctgtgctttaacacagccttgtgaggtcatcactgttattagcatccccattttacagaggaagccaccaacacatgaagtaaaaggatgggctgggcgcggtggctcacgcctgtaatcccagcactttgggaggccgaggcaggcagatcacttgaggtcaggagttcgagatcagcctgaccaacagaccaacatggtgaaaacctggctctactaaaaatacaaaaattagctgggcctggcggtgggtgcctgtactcccagctacttgggaggctgaggcaggagaatcacttgaacctggaaggcagagattgcagtgagccgagactgtgccactgcactctagcctggacgacagagtgagactccatctcaaaaaaaaaaaaaaaagaagtaaaacgatgctccaagggcacccagttattaaggggcagagccaaagctgaacccagggaggccaaccctagcaatctgttaaattggaagaaataatacaaaaactgttttagcatttggccagcctggatttgagttttctcttttcctttcccaattatcaataagcaggaatatagacaaaaggctaaagaaatgcacctgtgaactattcagcttgagcagctgacattgacacctacaagtgcttttcaggatacttttgaactactgggcaggtgggatggagaaataaattactatttccccagcaactgttctgggctgagcacaagggcactttttaaggaggtcaccccacacccatcacacacacataggacccctggaatcctaggaataaataagcatggatttgtaaaatccaaacctctcttttcaaatatcctcacctggaccagaccagaagaaacctctactttactctctaagctgagagtgtggaaggggaaacacgaggaatggttcggcttcaggactaattgcggtgacacacaaccacttctctttgccaccaaggactaccaggtacctgcaaagggcagtacttggaggccagtgctttctgctagttagctcccgtggttttatagcagcccaggcgaaggaaggagaccccccccagctcctggcttctgttcagggaaagggggccagagcccctcctgatctgtccacacacctgctctgtgccttggctgaggcccctgcagctctacaaggcaggcattctgctggataggccaagcagggtcactctgacacccaggtttccaccccaaggcatggcacaatgctggcctcctgtgggtggaatcaaaggctgagttctaacaggcttgcggcagacacacacacagagaccacatgtacatgatgaacacacatatccttttcattacaggttattagtacaagttttggaattgagcaaacaagagtctaagcgctggtttcaccacttctcgtttgtgtgacctcagacaagtcattcaacatctctatgactcagtttccttatctttatcacagagatgacacccactctgacagggccgagggaagaaccataagcgatggcaatgcaacagagtggcacatgacaagagctcagcgaatttgagggaatgaaactgtagattacaatactagtacaatatgataaacatatgatattgttagtgacatttattttacttctactagcaaataacctatgtttaggactgactttagaacaggctggcagaagcatttttggcagcatcaaagtcctccaacctactggtctgttggagccccccaagtacaccaaagagcctctgcattagccctggctgagggttcagggacaggcagagaagtacagcagtgagccatccctgcctgcatggaggtggagaaatgatcaggcatggtcagttgacaatctcctaaacacagtaacccgtgtcataccacagtgtaaacacacgtgcaaatgcttctgcttcctttccccatcatgagaatagtcactcaatgccgggcatcacaagggatcaaatgctaggagtacccaatcattcatggatgcttctcaaaggggacgagtgtctagaagtgtaattttaatttcacttaatttcatatggaatcatctccattactaattttgttctaattttaatgtgataatcactttgtaaagcacaataaacagaggcaggctctcatgaggaagtcagaaggaaagaatcccaagagacatgggacagctccatccaaactgaaagggccgtgattcccaaaagagcaattttgtccccaaggtctgaagacacttttggttgtcacaacctggggggttggagtaagcattactggtatctagaagggggaggctggggatgttgctaaacaccctaccatgcacagggcagcccacattgccacaaactattatgtggcccaaatgtcaaaaatgctgaggttgagaaaccctgggtgaggcagactcagggagaagggaatcgagcttcactcacaggcaggcaggagctgtctggtacttcaacctccaagacacctcctgctcatctcatcctggctgctctacccaccagctagaaaccttgaacaagttacttcacttctttgtgcctctgtttcctcatatgtaaaagagggataacaaaacgcacacaacttgcatgttgctaggagcagaaatgagataatacaggaaaggtgctgagaagaatgcccggcacatggccagttctcaactactagtcacccattactattagttactcacatcttagagctaacatagacatgggcttattcctggatacacagcactgtccccatatctacagtggtgatcctaagggcaacatggcatcacccaaatgtcttgttagtcactac

SEQ ID NO: 69681 - DNA, 667 bp, Homo sapiens
cagagtgagactctgtctcaaaaataaaaataaaaataaaaaaatttaaaaaaaacaaacacacacacacacacacacacacacacacacacacacacacaacaaaaaaaaccacctctggaaattagtttcttccagaaggtccaaggggtaaccataaagtaaatgcaaggacccatgatctctgtgctctttgttgagcaataaaatcaaatatttgtttcctcctccataatataaccattaactttcactaaaaatacacttattcttctcatgtaagaggtcacatcaggggagtatttaaatgagcatgtgctaagctatcacagataacagttctgcctgtaccacccaccccagcagcccggagaggcgcaggctcacacacgatcccacatgtaggaccaggagtccaacctggaaccctgtgaccctcaaatttgtgtaatttcaaccaacctcaccactcactgcttccctaaagtgcaaagtgcccgacagatttccactatgcatatattaagctctaaatgacaactgctcaacatatttgaaagttcacaagaatacaggtcatcaagttctgatggtcaaagatcctggaactcactgattttagtgttgccctaagcatcctccctatctgcctaaaacttgctctcct

SEQ ID NO: 69682 - DNA, 518 bp, Homo sapiens
ccagcagaaagtgagtaccagtctgcaaccactagcatgcgacagtggcctgggagccagtcttgctgtactcacaaacacatgggcaaactgtcctcacccttcatgtagtacagagtgtcacgcagcatcttgaacatggtcaggtagagagggtcactgaaggaagtgtagtagagatcagcactggggttggcctgcagggaaggcagacacacatgactatagaacagaaatgcccttctgcccaccctttgccttcacagcaaggcccagcggaatggtgattcgtgacttagcattctaaatgaagcaactgtttatcatgactcatcacttggacactctactgtcttcatcctcttaagcatcagaccaaggaaaacaggaggctcatgcagtccagagatgcctgcgggggagcagccatctgcaccctagtaggaagaacctccttgctgtggctgaagctcaccatctttggccatcattggcccagacagggacatgggaagtgg

SEQ ID NO: 69683 - DNA, 2041 bp, Homo sapiens
gcacaccactgagttgcctttcacctttctcccaagatgaggattgctctggcatgacttcacctttctcttctgaagcaattccaagttcacttctctgcccactgacagttcactctcctttccctgccactgtcccttctgcaaacgcacaatcttttacccaacctaacgcccccagcctcgtagaataacactgcgcagttggtttacagtcacaaagcactttcaagacagtgtttcgtctcctggtcaccacagtccggtgaagccggcaaagcagataaaagcatccccattttacaagaaagccatcttcccaaggtcgcggaataaaaagcaggtgaaatcggaagcagaaccccaggtcttgacccctggtcctcggctcatcccactgctccgcacagccgcccacgatccagcctccacctccgcgatgtcacaagatgctccctgggccagcagctcacatcccccacccccatcccacaaccacccacctgcagcggccctgcaggccccgccgacccttcccccacggtccctctctcttcaccagcccctcccactagggcctccttcccccgctagatccctccgctcaggcgccccctcccgcacaggctgccggcgagcccagcctcggcctcccacagaccctcgtcccgcctccacgcttcgtcaccccagcccctcctcctgtcagcccgcggcccagcccgccgacgttaccttctccaaggatgctggtctctgcaccgccagggagcgggccagtgacaggaccgtgttgaaatagaagccccgcgaggcgctggagccggagccggagcagccgccgccgcctccgcctccgcctccgcctccccgggccggggccgccgccatcacctcacgagccgcggcgctgcccgccggctccccgctcctggcccgcgagcgcccgacctcagggcgcaggcgtaggtgcatccggctttcccgccacgtgacctctcagttgctgacactagatagggcgtggctgcggggcgggcccaccgctgcaggggagagaggggatggacagtaggctgcggttgcgcgcgccggatgtgggccccccccagccgacctgcgcgatggtcggctccgagggcggggccacctgcgcgcgacgcgcggaaggagttcgcgcgacgaccgcggggtcggcgggcggggcgaggccctggacggcggcggcagtggggctcctccttctgtttcccagaccgagagccgcgccggcaccatgtcagcttaccctaaaagctacaatccgttcgacgacgacggggaggacgaaggcgcccggccggccccttggagggacgcccgagacctccccgacgggcccgacgcgcccgcggacaggcagcagtacttgcggcaggaggtcctccgcagggctgaggccacggccgccagcaccagcaggtccctggccctcatgtacgagtccgagaaggttggggtcgcctcttccgaggtgagcctggggcagggctggtgtggactcgccggtctctgtgctgtcaaacggagacgagaaatgttttgctcacaatcttttgagaattctcaagttgcctagcatagattcttgcaccttagtgactcgatggtggtaacaatctgttaactatgtaaaggtatgtgcatctggagtacttgaagagggcagtttaccccagaaatcttccttagctattagtctgcttcgttgattttttttttcttacgcctagctcacggggaaacgccagattattttctgtccaggtgagtaaaaattctgaacagcaggtcctaggtttgggaaatggagagtccgtttcttcgacattatttcctgtgcaaaatctggcacagggttttggccattccttccggagtgagccagaaagagaggactatgtgcctgcgagtgtcaggtgataccctgaagcatcagggcaggtggtccacgagttcttcccgcatcattgacatctccacctaaccaaccaatagaggt

SEQ ID NO: 69684 - DNA, 906 bp, Homo sapiens
gtcaacaaatgaaaagctgagattgaacctcactcatcttgctctctgttagactgtaaacaccatcaggacagagacttgggattgtttcgtggacaaagagagaactcttgttggggttcaagggagtaagaagggcatcacctgtaatgcttagtaatcactgaaacaaggaagcactttgcatgtgcgtcctttacactgagggcacctgcggagctcactcccctagcagccacccaagtccgttcagggacctcattctcccacgggaagttggagaagatgggccgtggctctgcggaggggggtgtggacctgcctcggtacctggagcggttgaggcctgtcttggtggtggctggggcacaggtgtctgcctggcctgtccttacagactgtcagtgttctctttcctggtattttggtgtttgctctgtcaaacccttcttcctcattggttggaactaggtcacaagcacattaagtccggtcatttcctctgccttctgggggtggattttagcagaagaaacaactcctcccttgctggcctcatgacctctggtgaacactagctttcagcaaacagaaacttccagaggccagagcagcactcagtcgcctggccttccagcctcacaggcaagataagccaccctcacagacttctctgtgctcccatctaaacatctaaatcagccatctggtttccttaacagtagcacagactctgggagtttgagagaatgtgtctcttgtgaataagagaaaataagtccatactggggaaggtagctctccaaattgagatgaggaggtcagggtgggagggtgagtggtcgtgggttggccctgatgggaggagctcaccatcagggaagctgaggacctccctcctaatgt

SEQ ID NO: 69685 - DNA, 2187 bp, Homo sapiens
tacagaaattagctggggatggtggcacctgcctataactgtaatatcccagctactcgggagactaaggcgggagaatcacttgaacccgagaggcagaggttgcagtgagccaagatcacgccactgcactccagcctgggtgacaaagcaagactccatctcaaaaaaaaaaaaaaagaacggggaaacagtacaaaaacaggaggtgagccagatgtgatcagcaggtcattgtttgctgactgtagtctaaagtaccggtttggttgttccatgtgcttttcatctgcctggtcctaggaatccaggtttccctgagagagggccacctaactcgatgctacactgctttttttttcttttttttcagtaaagacaaggtctcattatgtttcccagatctcacactcgtgggctcaggcaattctcccacctcagtttcccaaaatgctgggattacaggcatgagtcaccacacctggcttagctgccacacttctgaggcaggggtcttcataagcttactgcttggcccactgtgctcctgggagaagctgttgaaatccctactttggtcagaaggagtttggcacagaggaggcatttgatttttagcacacaggcattatgtgaaaagactgataacattgtcataggggtttttcctttttaaacgttttcttttttgtgaacttttatccaaagattgaaagaagctataagtacaagtaaagaacaggaagcaaagtaccaggccagccacccaaaccttagaaagctggatgatacaggtaagtggatacctgtgtgcacagccacatttgaattctggggggagacctctaggtttggcgttggtccttggggggcagtggcaacctctctggggaggtgggcaggggccccagctgctggcatcacccatgctagccaaagggccttagggaccccgcatgctcttgcggagctgggggtgtgcattatggtggggctcctccttctctccctccctccctccatggagaggagaacaaggaagtgagggcctgcattccattgaaaatgagcctgcccggccagcctggtgcagtaacacacgcctgtaatcccagcactttgggaggccaagctgggtgaatcacctgaggtcaggagtttgtgaccagccttactaataacgtggtgaaaccctgtctctactaaatacaaaaaaattagccaaatgtggtggcacatgcctctaatccaagctacttgggaggcttggacaggagaatcacttgtatctgggaggcggaggttgcagtgagctgagatcacgccactgcactatagcctgggcaacaagagtgaaactctgtctcaaaaaagaaaatgagcgtgcccatcattggttcctgcctgtgtcattctcaattgttccagcagtaaaaagccaactgcagaaaaaccccttggtaaatagaatactggcccctcaaagctgtccacgtcctaatccccagaccccgtgagtgtgttaggttatatggcaaaggtggaattacagttgcagatggagttacaattgctaatcagcaagatggggagattatcctgggttgtccagttgggtccagtgtcatcacaaaggtcccttttaagtggaaagagaagcaggagagagagcagcagagtcagagatctgaagatgctgctggccttgaagatagagaaaggggcccacctgccaaggtacacgggtgaactgtagaaactgcaaaaggcgaggaattagattcttcccaagagctccagaaggagtgcaaccctgaggacaccccgactcagcccagtgagacccatgttggacttctgacctccagaaccgtaagacaagtttgtggtcatttgtcacagcatcagtgagggactaatacagcctccagcccaagcagaaggagcagcagccacatggacaaggtgtgcaagacagtgttgatcgaatcattccacttctatcaagtgataggcccagaaacatcccttatctggaaaggaatttagggctcctggggcctcctccataggcccccacaatagccaggtacattgaaattggtgctagaaaccaaaggcttactgtgctgccttcaagaaaacgatacaccatggaagctctggaacccaccatggttgtggttg

SEQ ID NO: 69686 - DNA, 636 bp, Homo sapiens
acctaggtaagactgagcaccacaccagcttctgtaagccactgtccttcaggcagcttacgccaagcatagcccctgcatgagcatcctccagcttcagttccctcaccacacatcacatcccacgccaagctgggtccatcttgccacctcactgtctctggaatctctccacttctcaccatttcctacttctagcccagccgagccctccccacctctcactttcatgaacagcaccagggacccaggagtccctgagaggccataaagtatagcctggacgtgaccgctcacttcatccttcccacctggccactcagagccctgttttcctccttgtgaaatgggctacctctgagaacagtggaaaggttacctgagccagaaagtgcctgggatggtaagagttagtgctcgtgttgcaattggcactttggccacacagcctccagcatgatgtttcaaaacggaagggtgtgcagggggccgggcgcagtggctcacgcctgcaatcccagcactttgggaggccaaggcgggtggatcacccgaggtcaggagttcaagaccagcctgaccaacatggtgaaaccctgtctctactaaaaatacaaaaattagccgggcgtggtg

SEQ ID NO: 69687 - DNA, 1022 bp, Homo sapiens
ggcaaagtgtaggggacaaataataaaatcctcccctgctgtaaaggtatctagtggaaggcaaaactgaaacccatgaagatgcacatggagtgtctgtgcacgggttttctcctgcttgctgtctgggaagccccagacagctgccacctccttctatgccctggactctgtcctccagagccaaagacttatctgaggcagaaggtgtgtctgcccagatctaaccactccagagaagcccagagaggcgtgaaagccctttgtccttcactgcgagaaagggagaggttagggctagtggtatggttggtgcctgctggcagaagtgggagaagggactttgaggaaggatactgcattcagaggcaggaagaagtgctgagtactgcccgccactaggaggtgctgagggtgcacagttggcactgtggacgagcagctgggcagttaccggcaggacgcagtctagagtaggaggtgggcctgggcagaagggcgagtggctagttcagagctcagccctctggccctgctgacacaggccaggccggtccactctggtggggcagggagtgttgcctttgttcacactcttcccgtcttaacactatctccctgctatttcaggatctcaggcaagctctctggactccagcgccctggcctggtggttttacattatcacacattttatctcagcctctctgtttgcttatcctttgctgccctggctgccagtgagcttcctcctgaggcctgaggcaaccacaggctctgctctccatggagcacgaggccatgaattttagtaagcttaagaagcaaagagctgaagacttatcttttttttttttttaattttaattatactgtttttctctttcttttcttttcttttttagaaatggagtctcgctttgttgcccaggctagtctccaacttctgggctcaagtgatcctcccacctcagcctcccagagtgctgggattacaagcatgagccactgtgcctgacttg

SEQ ID NO: 69688 - DNA, 1779 bp, Homo sapiens
agaaggggtttcaccatattggtcaggctggtctcaaactcctgacctgaggtgatccacctgtctcggcctcccaaagtgctgggattacaggcatgagccaccatgcctagcaggaagccagagtcttgtatgagctcagtcaagcacaagtggtcccattcttgctggtccttgccttaggaatgggcatgtgccctgatgggatgggatgtaaagggagagctctcaggtttctggaggaagtgctctttgcccttaaaaagggacacaagggctggccttggtggctcatacttgtaatcccagcatattgggagggcaaggtgggaggatcatttgaggccaggagtttgagaccagcctgagcagcatagtgagagacctcatctctgcaaaaaagaaaaaaataaaagaggacacaaggccaggcatggtggcacataactgtggtcccagctacttgggaggttgaggcaggaggattactggagcccaggaggttgacgctgcggtgaatgatgatcgtgccactgcactccagtctgggcaacatagtgagaccctgtctctaaaaaaaggacacaaggaaatgactgtccttctcccactgggcattggcataactggatgtgaggcctgggataaccagccagaggatgaagccaaaacctgaaagaaattagaaccaaaaaaaatcacacagaagcagacccacggcctggacatcctgcatcttgagctgcctgctacagagttcatgttatgaaaaataataaatgcccttgcgcctggctcaaactattttgaatagggatttctgatattgcagccaaagcatgctaatacagcttgttagttaagatgattacatcatgaatccatggcgagtaaacttttgtaagaccattgagtcactctggtgttgcaagtatagacggatctgattgcctaattccaggagggttaggccctgacctcagtcatgactactttctgaataggcttggcaccaggaattgagtgggaggaacctaggtgatctaggagtttaaacaaaaataaaatcttcaattttagaagaaaagatgtcccaagaaactgctccatgatgggtaggagataaaaaagtggaaacaggtacctgagcaggaaaaactatgttcatgattttatactagctcttgaggttttagtcttgtgttaggaaaagtggatttaggattaaagtcttctgtccgtacacaatctacagcattaaaagattttaccctatcagattggcacatgcctgtgggaacagctaatcgggaggctggtgtgggagcatcacttgagcctggaagttggaggttgcagtgagccaagatcaagccactgcactccagcctgagtgacagagtgagacccctatctcaattaaaaaaaaaaaaaaatcttaccctatcaaagattcgagttcagtgaagatccattataaaatacttcctccttcaaatagagatgatgataacaggcatcgatgcaatactcttagtaagcattgactcttggttgttttttagtcaaagatttctaattctggctctattactgaaagaccatctggccacccattatggtacacaggttatataacaagaatgctatggttattgactgaaagccattttataatgagacaccctattgctattacataaaaggcagtctcagctatagaacgaattctcccttggtcagtcactgtggtcctactaatcatggagggaaaagatg

SEQ ID NO: 69689 - DNA, 2140 bp, Homo sapiens
ctactcgggaggctgaggcaggagaatcgcttgaacccgggaggcggaggttgcagtgagccgagatcgcgcccctgcactccaacctggtgacagagcgagactccgtcgaaagaaggaaaggaaagggaaagggaaaggaaagggaaagggaaaggaaaggaagagagagagagagagaaagaaaagaaaagaaaaaagaaaagaaagaaagaaagaaagaaagaaagaaagaaagaaagaaagaaagaaaacaaacaaaaacaaatagggattaataaataggcagaagcaggcataatccggggcaggggaagcctcggggccacgcccgagaggcatttgtattttactttcagcagttcagagcccatgatagccaggttacccacttgtggacttccttgaccacttaattgagtcaatctaaccctcaccttctctctcctctcactccatttagcgggtcacgtagccactagggcttccttagcctatcaggccacctggggactgagtcattcagtcagtcacctatctggtggtcacatctgcccctgggctcatccttttactgggccacctcggcccatcgggacctgtcagtccttgacctccctcaggcccctaggctggccaggtcgcctcagtgccacgcctccctggcccgcgattcagcctgcacgttacgctttgttcccagaagcaggttttcgaaacgcggttccctctcggctccagctgttttcctgccagcgctgggagacccggcagccgcagcgcccccagcggcgcgcagcggcccaggaagagagtgcctaccgccggcgcctcttcagcctcctcctggaacgcgggagcgggcgcgaccagcgcccaccctgatcgtcgcgacggtgctcctgattggctgcgctgtgtgacgtaacgggagggccccggcggccgccgggagccggggcccagcgcgtgcgcagacggagcgcgctgagcggagggggaggtggctgccgcttctcccgcgtccgccattttgttgctgtggctattgggaacaagctgggcaaaagcaccccggaggcgcgacgctccttcgagttcggtgcctcgtgtgacggcgggggtcggtgaagacccgtcgagctgcggcgccggcgcgttccaggccgggagtcactggaggcacccctgggacgccgagcagcccgagaaccccggggtggcctccgctgcggctcgggtttgcctgccccgaccccccggctctgccgtgcattcccgggcggctctctccgtgtggcggccccggagcaggcgggcggcgtcggaggatgctgcgggcccggagccgagaggaaagtgctggcccagccctctgagcgctcctcgaggtgtgcgagaggcccttcctcggccccaaagccgtctgccgggctaaggcgtgcagagcaggcgaggacagccgccgcccctaccgccgcagagtccccggtccaacaccatgtcctccgccaggttcgactcctcggaccgctccgcctggtatatggggccggtgtctcgccaggaggcgcagacccggctccagggccagcgccacggtatgttcctcgtccgcgattcttccacctgccctggggactatgtgctgtcggtgtccgagaactcgcgggtctcccactacatcatcaactcgctgcccaaccgccgttttaagatcggggaccaggaatttgaccatttgccggccctgctggagttttacaagatccactacctggacaccaccaccctcatcgagcctgcgcccaggtacgcgagagccctccccgaccgcggaggaaggtcgagaaccgggtctgtcgaagagtgcttgtataggggggtggggcgcgcttgaacccatattccccgcattctgaaccaaattattttccagaaggccttcctaacagaaagctagtgtcaggatctgggtcactggataagaggatgcgttttttttttttccctctcacgaggctgtttctcaatgtgaagaggatgcgttttgaatgtttaacggtggttgcatagttaaaatgcacgctttttgcctttcgtgactttctctgggtgtaatactgatgcagggatttgt

SEQ ID NO: 69690 - DNA, 855 bp, Homo sapiens
attcccctagatagtattacagagaatgatgatggcttaggtgactttattccttaaattattttacaattttttttaatcttgattttcaaaagaggattcctgtaagtaaagagatattttaaaaccagtttgtgtttagctattttcttttcttgctgacttttctgcaaggaaagagttgatcctgagatttgatttgaaggggaatacttggtatctgtaaggtgagtagagcttgtgtgatgagactaacgtcactgaatagctgtagacaggtgagcatgctgggcaaagggcaaaagtggcaaaagacagccagggcagtgggctgttgccatatcacgaagggctgagctgaggagattaacaattttcttgcattgccttcatttgagtcatgaaacagccagtttctcacaactgacaaggtcaggtttacaggcaatttctttttatatattaatttttaaatttagagcaaatgcttgactgtcatgtaataatatcattctcattcatttgcattccagtatgcttttctgactaaaacggaagaaatagcaactttagaattgtacttaaccctgggtacacacacccatgactatttgtatgaaaatttgtatttaagtgtctaaatgcagcctcacctgtgcttttcccccatggtgtggcataagaaaacaattggtgacacaagctggggatctgtgggaattgaagtcagtgaaacagatcgtgtggaggaaaaatagtttcccaggcttacaagtgagacttaaagtgatttgggatggaattggtataaatcaagcagaaaggttgtattgataccttaggtcatttagttca

SEQ ID NO: 69691 - DNA, 2051 bp, Homo sapiens
ctaagtaagtgtctgtgatgctcccaagcaaaggaaatgcaagctctggaaattcgttaatgtatttgatgtcttagtgttttagtgactagggagaccattaactagtttatcattaaccacttatcagtgtattgatgttaaagcatttccctgttagctaaaagaggcctgttcatacaagccaactggtatatacgtgtggttcatccatcatctgctgcacatagcagactagaattctgggaaccctgtgcaattcagtctgctctcccttgtggaccctggtaaagaaaagcctcagctcatagtgaacacagcagacctagaaatgtagcagcagcctactgagtagctttcatttactgatcatctgctgtgactgtggccctgtctggaggttcctaggttttgagatttagagcaatgcattctggagacagaaccagcagaacagccatttttcaatttttctttaaatcagtattccatcaggcagataactgctgtattcatgaatcttgagagtgttcctgagacagaattaatggtcatttgggaaaactatcgccatggcttcccatctgtggttttcctctaaaagccttggagattagcccttccttgccagtgagaacggtgaccgcctcctgctctgcacggtctgcggcagttgccgcttctggttaggtgtgtcaggttggcttattttgggttcaggcctggcgtagcacccacaagtggcagacatatcacaagagtccccagactctgcctagaaacagtgtttgccctttggccagtgacgtggttcatcccggcccatgttgagccatgagtggagtttccaacagagggaggaatgtgtgccttgttcaaggagggcacgacccttaggcctttttcaaccagatttagctgaagggcttgacacctttgaattacagcagttgactcagagtgcaagaagtctggccattttggaaagcaaggtttcctttcagccctgtctactgaccaataccccgactcaccttgtgtggcgcacttcagaatcagatatacctagagtatacctgtggtttggttttataattaatcagctcgttacttcagcccatgaaaatggcatccagggctgccaggagattcagagctcaaaacaaggcgagcttgagttctgcactccagatatgtgccaaaactagtaaaacttaacggacttacaaccttgtcagtttttttaatgaggcagggatactctgtttttcacactaaacatatgaatgcagcactgctgcctcagctcagcttcgtgcctgggttccccactggtctgggaagactgttgtgctccatagagcagtgcacatctgacccagagggtgggtgttcataactgctacttgctctgctctaccatgtttaaagaaatatttggatgttaaattaactcactatggtttttcacctgggaaggaaacaaattacgtactagagggcattgactggttaaaaacttgtgtatcccgggaaggacctgcggtacaggagtcagccatgtctgtgctgtgtggaaccacctgatgacatggttaacgaggaagacgatgtgttgaccggctgccgtttgaggactttggtcacccagactagacaccttctgtgctcatgtttggaaagctgaaagggaaggacagctgtgccctcctgggagctcatgtgtccctggcgctgtgctagctttcctttacagctgtttacagacaaggcaggcctgaggcagatggccactgctcttgtgatgtttgctcagaggaatatgaacattttatttttgaaaagggatgatgtggttttttgccaggtgtttataattaatcctttaatattatggttattaacctcttaaacatgaatgaattcttgattgttttaacacagtacctaagactaatgctttctgtggacaccactgagctctgcctcaactccaccctctgcgaccggaggactatgcccctagtaactgctgtcggtgtggacgctgt

SEQ ID NO: 69692 - DNA, 776 bp, Homo sapiens
tcaaaacccttgtttccatggcctgtttgtatattgtctcaataaaacttgcatcagccggtggtggcggcagcttcggtgtttcagtgtctcctcagtccgcccccactagcctcctggcagttcatcagtggtgaaatctctgatgcttctcagagacccttagtgctgctgctgaccaagagctagaatgaagtcttggcatccgcccattccaacactcgggcacccagaggagagcacctggggtctccctccaaaagagaaatctgcctcccagagtgtctgtcttgtaggtattgtatgggagcctagtgcttggccttctgagcatgaggcaatagttcccacaggttgcaccaccacagagaacttggatctttttccttctaggcacccatatctgaggcttctagtaaatatttcttcagcatgagctaaccagggttgaatggtatcaagcagaagtcatgggaagtgagcagcctcattgcaggtcagggcatgatatctgtgcggctttcttgaatccttttctgttcttggctgtaggtggttctcctgatgaactttgggagacctccaagtggattggcttgaggtgttgggaggcccactgacaccccctcagccagggccttgtctctcctactcccagctctcagtacattttatctttcacttcactgtactctattcccatgcctatttgtgtattttgaggtgcatattttcttgtaaaacctcaggaagccatttttaaaaattatggctgg

SEQ ID NO: 69693 - DNA, 1367 bp, Homo sapiens
tggaggatcgcttgagccctggaggtcgagactgctgtgagccgtgattgcaccactggactccagccttggtggcagtgagaccctgtccccaaagaactgggtgatctcgaccctccacatcgctggctctccacgggcgctgcacagtggagacccaggatctgattgcataggactgggcactggagtttaagttctccaggggggtttaatatgcaacgaagttgggaaccactaccagtgaaccccttcattctgtgcggctccagctcccggaagccctcggacaaggaactgtagcccatgtaccgcgtgacgtgagagcggagcccgggtctgcccgggcgcgggcccgcggccacggcgtttggatcccagatcccagcccccgcgctcagtccgggcttcctgaccggcgctctccgcgtcccttctcgcgcgcccttacctggggctggggaggtggggacagagccgggcgcagtcgggggcacagccctgaggcggggctgagggccaggccgccacgtccctggaccctgaaaacgggctcggacccccgctgcagcgtggactccggtgtggccgcggggcgtgcaacccggaccctggccagctccgtgtcctccagacctttactcatgtccccgcatcgccaggccgagctgcaccttcggtccccgcccgcggcagccgaggtagggcatctccagcgccgactccggggaaggtggacatcgcacggaagggggtgaagggcagggaggatcccagcttgggatgggggtagagggtggcggaccttgcgcggggcgggtgtggagggcggcccaactctcgtggcccctggtgcttccgggagctccgtcctcgctctcggatcccaaggaagaacttgacctttccctgacatcctccagtgcccatggcttctggcgtccacggatggcggggaggggaggggggcgcattcagcgactgcagagactgggggctgtgggccggggcagctgcggggcggagggtggcgtgtggtggggttgggtggcgtggggttgcagaaggcggggcatggggcccaacggccggctgcgccgcccttctccgtatggctcttcggagccgttgcatttgccctctcagggcttcctgggctctcggccctaagtaacctgtgtcccagagtccctgagggaggcgcaggatcactgagctctgccctccctaagatggaagcaggaccgtgtggaggagggacggccgcatgggatggccagggtgggggccccaagaggacagcctccgcccgctcgcccgcccgccaaggaaagccctgggggaacacactttcaggctaaggggtc

SEQ ID NO: 69694 - DNA, 2116 bp, Homo sapiens
ttcagccacctggctcccctcctgggaggcctctgctggatccagaagatgctcaaccctcaaggcctctgctgccactgacagctggcactggaggcaggacaagccctgcctcttctccctctattgggactggtcccctgaagaaccctgcaacacgttaaacattaccgtaaaattaaaacgcacaaatttgcagatctgtatgactcccagtgtaattgggccaataggcacaggaccagaccacagggaaacaggcacaatcacagaatgccaggtgccacaccaaggaaatttggcctgtgaacgcccagaggaggtagcaactaattctgcgccccaagccctcccacatccctctccccctctgcgatcagcgaacgctttttgcttttggctctgagttttgaaggaagggtattccaggtagaagggacaacatgcccaaaggtcttgagatagtaaatgctccttcagaggtggctcatgcttgacactttggggcatttgcccacttagggctgtgggagctgtgtcctgagacagaccccatgcttttcatagccggagcattctcaatccccatgtcggaggtgaaggagctgaggccctgctaagtaggaatgagaatccagaggctcctcgccgggctgcctctcagtcagtaagaaagccaaggggagaggggagttgctgggggtcagggctgagggcgctagcaggaaagggagcgttgagccgcctgcagaggccgctgcgagcccggaaccctccatgggggatcccggcagcggcagacgatccaggccggagccacgcgcagacccagggcatgccgggaactgcgagccggccgcgggtcttcgggctgcgtgggcctgggaggcgccgggaagagcagtcgcgacggggctagggacgacacactgcattcactggaagggacaacgcagcgccagtacatagcctgaaacgctccccagaaggtcccacgctcgccgcgcggtcgacaaccgcatcctgcgctcgcccgcggtgtctcggcaagcggtaggcttgtcgggaagagctggagggcgcaagtgcggcgctggccggacgtgccgcaccgtcagcgcagggctcgccgggaaatgtggtttctccagccggcccggggcggtggccgcaagttgggcttacagcgcggccgatccggcgtggacccgggatggctggaccgggcagcacgggggggcagatcggggctgcggccctggcaggcggcgcgcggtccaaggtagccccgagcgtggacttcgaccatagctgctcggacagtgtcgagtacctgacgctcaacttcgggcccttcgaaacagtgcatcgctggcggcgcctcccgccctgcgacgagttcgtgggtgcccggtacggtgggcttcatggggtcctgaggacaggaagggcgatctgcgagggtcccagggcgggtccaggggcgaagccggggggtggtgtcctggggtaggatctggtaatgaggtggatggtgctgtacaggacgctgttcagggcaggggagagggttccgagggagtcccagagcccgatgtcccgggacagggtactggaactaagttgtgtttgtggatattgggctggggtcccaggtgctctgaggtggggtgaggagtccagagagtcctggagccgtgtcaggggtcctcacttgcaggatgattggtgttatcttagaagatgatggatcttagcagttgagaggtgatacctaacttccgtggcagctctcctgcttagtcccattccttgggtgccccccaggagggtcctgtccttaccgccctccactcctttctttccaggcgcagcaagcacacagtggtggcctataaagatgccatttatgtatttggtggagacaatgggtgagtgagtctcagcatcagtgtttggaccaggtacggagaagtactgtggtcagggactgggcctgtccagctccattactgtcctttcagatgctagctggtgcctctaagcttcagtttccccatctgtgagattccttgcactcacctccctggtcgtggtgaggattaaatgagatcct

SEQ ID NO: 69695 - DNA, 2618 bp, Homo sapiens
ctacaccaatcgcttccccgcaggactcctcacagtccaggtgtgtggaaagcctgcataagccgagctgggctgaccagccagaaagaattctttgatttgtggacttgctggcaagactggggctctgaaagatactctctggaaaggctcctgttttccccttgtgtcacaggcacagtgatcctgggggtgggtttcactgtgcagagctgggaacaggaaacagcccccttggacgcaggctgctcaagggacttccatgacctgcagctgtcccagtccgccgggagccccacatcctaccccagcgtcggccggcagggaggcccacctgattcccaccagctcaaagcagtcctcctcaaagtgtttggagcagaagtagatgtactcggatgccgggtcccacaggccctggccgctggggtccagccgctggcagttggccagccacaagcctcgcctcgggttgtccttcttgggaagtctgtggagccacaaacccgtgagcaccaggctgtccacagccctgggctcatgctgcccaagcaccccagaggggaaacgcagacccaacacgcgccgccacgagacctccctgcgaccccgccgggtaagcaccaccgcccgggcacagacgaggcaacggaggcctcgagaagaaaagcagtttcctcagcgtcatctggcaggtaacagagtggggcgggtccaagccggctagacttcccgtcctccccttcccgactgcattcagtcccgccgggaccgttccgcttcacctcccacccacaggttcaagcctcctcagtatctgagaaaggcgcgaagcctctacgcagttgcgacccgaggcgagcaacaactagcgcatgcgcacgtgagcccgcggcgcacgcgcgctgacctgtggaaggagatgccgcggttgcgcgtctcgcgcgtgtcccgtgtgcagcagccggcggcggagcagtgacgcggcatctgggaaagaggcgggagttaagtcgcaagcggctctccgggcatccggaggagcctcgcgcctccagccgccgctcctccccaaggggctctggcctgtcgggtcccccccggcccgttgtcgccccaaccccgtcccagccgattctcttgacttctgtcagcggcactcacgctctggccattgctgcgccgccgaagtctcgcgaggggtagcgcgcgccggaagttggtaccatagagactggagagccggaggtgcccccgccaccggggcggggcggggcgaggtcctagctagctgggttagtaagcggcgcgagcgtgcgagtttctgacgcgcccgcgtcgtcccagctccctggactaccagtattgtcgcccacgtgggcttctctttcgtccgctcaggcctcacttttctccgtaaacaccccggcacgatggagcggccccagcgttcgggagcggcccgggagcggaaagcggcagtgtcctgggagcctcgaaagccgcaggggcggcagctcgcctcggaatgacctctgacggaagaaataaaacggggcctgggacgcttgcacgaaagaacccgacaaaaaccagagcccgcactcactctcgtactggggaggtggacttcagggagggttatctggaggaggaatctctcaaagtacaacacaggagaaagacagtatcgcaatacagaaattttattttttattttattattattttcctgagaccggagtctcgctctgtcgcccaggctggagtgcagtggcgcgatctcggctcactgcaaactccgcctcccgggttcacgccattcggctgcctcaccctccacagtagctgggactacaagcgcccgccaccacgcccggctaatttgcaatacggaaattttaataggtaattagctctcctagcgttatggtggggaatacagagggatggttgcctgccgcaccctcccctcactattcttcgccttcttcagcctcagcttccacggaatccatgcccacatcttcataatcctccagagctgccagatcctcgcgggcctcggagaattcccccactgccatgccctcccccacgtaccagtgcactaaggcgcacttggccgaacttatggtccaggcaggcccaggcctccgtgatggccgtggtgttgctcagcatgcacaccgcccgctgcactttggccaggtctcccacagggaccaccgtggggggctggtagttaatgcccacctgtcagagatgggcagcatagaatgaagtttatattggcctcagaaatgggagctcattaaaaatcagagctgtggaccagttccaacactgtgttttaagaattgcttctatattttttggcattatctgttatctatcgacaattaatatcctttgacgacttttttttttcttttcttctccttcttcctccttctcctccttctttgttgttgttgttgagacagggtctagctctgttgcccaggctggagtgcagtggtgcaatctcggctcactgcaacctttgtctcccaggttcaagcaattctcctacctcagcgtcctgagtagctgggattatgggcatgtaagatgga

SEQ ID NO: 69696 - DNA, 980 bp, Homo sapiens
aggaaagcatccttggtagtgctgagtgctgtggggacactgttgcaattggggatgagtggcctgggaaggcttcccaagaaatggcattagggtgaggccataggaagtgagggaggggctaggcagaggaatgagcaggcacagaggcctgtagcagcagactgcacagcggcaggagcggtcctggcggcgccgggcctaggagccatgttggggtttggacttgtgctctctgaaggtctgagaggccctactggctgctggaggaagacaaggtgggggcagccaggctccttaggagctctcggaatggtgcagtccagagccatagtgttgaaggtggtaagcaggggtcagaacttggaggttcacattttatttaaagctgtttagtgagcacttgtgagtcactgacactttgtaaacatcagctcgtttactctgtgtggcaatcaggctgaggtggacagcatctcctgaggaagtaaggtgcagatgggccagcagtttgcaatggaagagctcgagggcttggggacaggctggaggaagggtgtgaggcggaggggaggtaaggagagcatcagggtttctacgcctacacggaagagtgggagaagagcaggactcacccagggagccgtgggggtgccgcgttgaagaggaatggctgcgaggccagaggggacagtgtccaggagcgcaagggtcacttggctgagtgtggcaagtgggcaagtcagggacagctgacccccaataatgctaaaacaaaaatcaataagtgcgtaaataaaacacagttcattctggctgtagtggaaaaatggctgaggtccgtgaggctggcagggcccgaaggctggaggactttgactgccctaggcaaggattttggattttattattatttttttttactgtttcttttttttttgagatggagtcttgctctgtctcccaggctggagtgcagt

SEQ ID NO: 69697 - DNA, 1998 bp, Homo sapiens
ccacgttggccaggctggtctcgaactcgtgaccgcgtgatccacccgcctcggtctcccaaagtgctgggattacaggcgtgagcccccgcgcctggtcaactattttatgcaatcagtatttattatgctcctactatgtgccaggcactggttgtaactgccatctgattggacgatccgtaaacgctgaggcccagtctgtgcggttcacttgcgttcctccacgcgccccccagcacagtgggaagcacacagtaggtgctccgctctgctcctgtgccccgccccgcggcccctcccccgctccaggaagtgcgggggctccagccgcccggccggccgcgatgcattctggggaaggagcagcaccaaatccaagatggcggccagcaggaggctgatgaaggtaaaagccattctctggcagcggccgggcgtggggcggcgtcctaggctccggatccccgaggcaggcggcggcttctcagggcgctgccgtctggcttcctgccctacacggcctcgtcggttccctgggccgcgcgcaggctcaaggtgctaacggggctggcctaggccgcagcctgggcgggagcgcaaggccgcgctgggagccgctgtcggcccctcagcccggcccggggcgttcacgccactctccgcccggagcttggccgcgtccccctgtcgcggaggccgcggtccgatctgagggcgtcgttaatgtgagagcccggttgggaggctccaaaccgggcgccttcggggaaggcccgagcgccggagcccctgcccggagcccgcgccgcggaaccgccccgccctgggccgcagcgcgccgggcttgcagctccgcttggcccggccgcagctcgggagtctgggaggttcgggctaggaaagagagaaggaggccaggcggccaaagttaggtcagtttgttggtgggtcgtttggaattgcgctgggtcctagcaaactgtcgccttgtgactgcagagtcacacagcgggtaagttccaactccaggaaggcctgaggtcggccccgatcgcggcgcggttctgcttccctctcctccactcagtcatcccgatctcccctccctgataaagtgccatttttggggggataacggttgatttcagtcgttcgaatcaaaacgggccaaagtttataataataatttggtactttggatcttgaatgcagcagggtgctttctcgctaattggcaccttttggtgaggaacacatgctaaattggcttagtacttttgccagtggatttgccaaggtcctctgtagcccaccccgccagcatctgtgagtcggcggctgggtagtgctgccggcctgcaacgggccggaaattaaaaaaaggcccaggagccagtttcctgaggggagataaagagctggggttcgttctaggcggagcagtgcttggtagagctagacattgaacttggagccacagtctctgagcattccctccgtccctgggaacgtttcctttcttttgttccctaagggctagagaggacattaactttataaaactggagtggaagtgggcacaaaagaacagtcagaggacttcagacctctcctcatctcttaagctagtgacaccaccattcaccagataaggggtcggttaatggctttctttcctaccctactcccaggtgcagtcgtccattaacccttgtggatttaaatttagaaagatttctggagtgcaggccgggcgcgatggctcacgcctgtaatcccagcactcctgggaggccgaggcgggcggatcacttgaggtcaggagttcaagaccagcctggccaacatggtgaaaccctgtctctactaaaaatataaaaattagctgggcgtggttgcatttgcctgtaatctcagctacccgggaggctgaggtggaagagtcgcttgaacccggcaggtggaggttgcagtgagccaagtttgcaccactgc

SEQ ID NO: 69698 - DNA, 1250 bp, Homo sapiens
ggggcctccagccaagtgcagccacccacaccgcgctccagcggcagtcgcgtaaagcgcaccccataggcctgcagcgcctcggcgaacacctggcacacgcctgcgggcggagcgggtcagggaggagcacgtcctttcacctgggggcatcgaacttcccctactcccccagccccgcctgggagtaacgccctccaaactgggatcactaaccacgcacctgggagcacgtgcacgtgctggtgcccgtccgcgtgcgtgggggccctgcccagcagctcccggaagcagcttagttgggcctcgagctcctcccgcacctagagggcgagcgagagacaccttgagcgaccgggagtagctgccgaggataccctcctcgtgcttccgtgtgatggctccagtgtttgaatgcggaagtcatccaccgccagctcctaacggcctcacagtaccctccgggcggagctctgggggtcctcgcgagcatcctcctgtagctgcggctccgcacctgaggcaaatccacgtctccggccgccaccgcctcccggaatcccatcttgccaaggaagaagccttccgggccgagcagcgatgaggcgccacggcgggccggacccacggggcggccctcggacaggttggcgtggaggcccgtggggatgctgtgcctgagggcggagcgcgagctggagcactagcggccgcggagccgcgcgccccaagccgatcgccgccctgctagaggccctcccctcacctgcgggccagctccgccgcgctctccgtggccgcaccgttgaccagcagggacacgctggtcacagccccggccagaaaggcctccacgataccctcatcgcgtcgcgggcagtaaccaaagtcgtccgcggtgaccaccaggcgcatgcgagggcgggacatggccgcctgggtccaccgctcgcgctcccaggggagtgggccggacagcccaggccccgcccccggacgctgcccgggccccgccccgacgcacacgcccaggtgcggctgcacttcgcctttgttctcgccacctagcggtccggcgtgcccctgcaaggacccggcaactgctcccgcgctaaccagaccagtgatggattcattgcaatgcggaactttccttgactgcaaaagtgatatttaatatgtaaaatatcaaaaggaagccgggcgcagtggctcacgcctgtaatcccaacactttgggaggccgaggc

SEQ ID NO: 69699 - DNA, 2122 bp, Homo sapiens
atgatttaattaaatatgaacttttctctctgctttgcctgtgcttcaactacaccctagtcagactcttgagcccagagctatttgctctgtgaccccacaggatctggagtgaagctgctgtaacaatgtcccatgaatgaataaataaacagaggtgtaagttttcctcccttgaaggttgagctgacaacactctgagaaggcggcaagaaggagacctactcatggccaggagacctgggacacggtcgcccaggcatggttcccacagccccttggtctcctttgactctggtttcctaagacagctttgggactttctggtgagaagctgccattattctcaacgctacagctccctgctgccctctcctgcccgatgacccagtgaccacgagatttagccacgaaaggagtcaaatgtataagtggccaggggaattcagaaaccccagggtctagggactgtggtgacccagtatcagagagggcctagggccgaatgactggaggtttcattaatcccggggtccagggacttaaggactgatcccgattcagtgaccccgggatctgtcgactttgtgaccacaaaatctagcgatccaacaacctcaagaccctgcagctgcgggcccaggttctgaggggagagactcattactgagtgcccaggagtccaggatcaaggggcgtcgtgaaaacgtgcctgcagggtcctaggatcctgagccggtgtccagggactcaccggctgcgaggagccgcgtcttcaccaactgttcacgctcactctccgcggctcggagactcagccgcccttccctgggcactcattggtaagtcctcggaagcgtggaccaatcaaaaccctcctcgtgtctccagtccccgcccagctacggctctcgcgaaccgggggcgggccctccccgcgctgacccagtggcagtgcaagcggagtgccgcgcgggccgactattggctgccgcaagcgggcgctgtcagaaccggattgggccgcggcggggacggaagcggcccctgggcccgaggggctggagccgggccggggcgatgtggagcgcgggccgcggcggggctgcctggccggtgctgttggggctgctgctggcgctgttagtgccgggcggtggtgccgccaagaccggtgcggagctcgtgacctgcgggtcggtgctgaagctgctcaatacgcaccaccgcgtgcggctgcactcgcacgacatcaaatacggatccggtgcgtggggccagcgactgggagagcgcggggaaccggggctcggggttgggagtgtggagacagggtggtcatgggggtctgtgggccgtctggaagccgggcggcgggggctctagagtcgttgggaggtcgaggggccaaagctttgagggtgtcgaggatattgagggtggggacggtcgtcggggaactgcgggcccaaagactgagggggtgtcaggcgggggctgggggtgagcccttggggtcccctgggacatgttctggtcccagggcgagggtccggggttccgcgattgacggagaccctgggtgtgtggggtgtcactcctcaggcagcggccagcaatcggtgaccggcgtagaggcgtcggacgacgccaatagctactggcggatccgcggcggctcggagggcgggtgcccgcgcgggtccccggtgcgctgcgggcaggcggtgaggctcacgcatgtgcttacgggcaagaacctgcacacgcaccacttcccgtcgccgctgtccaacaaccaggtgagcccctcccggagcccccagagagactcctggcctgtgtgaggggccagagacagagccctgggttccaatccgagcctcagcttcttcgtgaaatggaaatttcacttcagagatggttactgagcgccccctcgggggacacagagtaactccgccaggatcctgccctcaggtgctcccggcccggcagggagaacgacgggagagagatccggagagatacgcctggatagctcttcctctggtggcaagtgggacccaggaggggaatccacacagccttgagggtggggaataggaaactccactgggga

SEQ ID NO: 69700 - DNA, 1842 bp, Homo sapiens
tacatggctttgaaggcatctgccacggaggcgggaagggatggggtggaggctcatgagacttgaagctctaggaggacgttgaaaaagacctgagcgctggccgggcgcgaagcctcaggcctgtaatcccagcactttgggaggccaaggcgggaggactgcttgagctcaagagctccagaccagcctgggcaacattgtaagagcctgtctctacaaaaaattaacaaattagccgggtgtggtggtgcgtgcccgtagctactcgggaggctgaggtgggagaatcgcttgagcctgggaggtcgaggcagtagtgagctgtgattgtgccactgcactccaacctgggcgacagagcgagaccctgtctcgaaaataaataaataagacctgagaacccagtatgggaatggccctgagccgtggctaggggggtagacaaggcggtccagacagacccctcaagaagatggggcttcgaggctgagggagctcggccccgaaaagacgcctgcgggagatggcacacctagctaggaccccatactgggcaggcgatccttccgagcatgagcacctggcgctagcgaaccacaattcccagcacgccaggcgcccgtttccggggcgcgccgcggaacccggaagtggtcacggaactcggctgcggctccatggtctgagttgtcagccgttgttttttcgtgctcgctagtcgccgccgccgctccgccatggggaagcgacagcaccaaaaggacaaaatgtaagttgagccgcagtcgggagcggcgctccactctgcctcagtgaaccgcctgtcccgcactgcgcgccgctcgccttccctctcagctactccccagagcacagcccaaaggtcacttcctcccggaagctgccgccctgtctccagtcagggtaatgaccctcgggccgccgcgctctcccggggccgcggctccgatgacgtcagctgcgggctcgagcgcagcccggttttccttactctggttctgcccggaccgtcccccgtctgttcgcgagtttcgcccttgaatgagtagtctctacctcttccgtacttcacgtctcgctgtgttctggttcatgcctatcagcctgcaaacgtgctgcagagccttctaatttaaagcaaaccaggtcgggcgcagtggctcacctgtaatcacagcactttgggaggccgaggcgggcggatcacctgaggtcaggagttcaagaccagcctggctaatacggtgaaaccccgtctctactaaaaatacaaaaattagcggggcgtggtgacgggcgcctgtaatcctagctatttgggaggctgaggcaggggaatcgcttgaacccgggaggcggaggttgcggtgagccgagatcgtgtcactgcactccagcctgggcgacagagcgagacgctgtctcaaaaataataaataaaatttaaaaatccacccgtgccccgtgccccacgtcccacgttcccctcccgctgccgccgtgttgtttctcttaagaacaagtgagagactagtggcttcatgctgttttctgagtctcttgaaaccactcaagtcagaatttcgaccccagaactgttgggcttctcaacagtatgtcacaccgttgaccactccctctttctgaagccctcctttggtatctgggatttcacctgctctttgttttctctcgacttcagcggcctctcttttcaggttcccagcgacttcttgttgctaaatatagtattcaatcctcagtcctcatttttttttttttttttttttgagacgcagtttcgctcttgttgcccaa

SEQ ID NO: 69701 - DNA, 700 bp, Homo sapiens
aaaaataataatataaataaataaataaaagaaaaaagactggcataagatacaaaaacaggtcaatgtgacatgaaagagagcccggaaacagaccacaggtggatacagacagcacagaggagctctgcagcgcctggagaacagttcccaggggaatactgctggaccaagcacatctgcaggagaagagaaaccaagctgaatccgatttcattaacaaaatcaacagttcatcacatttatcaacagagatgacttcatctagcaggaattttgtggaggaaatttctgtacaaaggtatacacgtgtaaatacacacacacacacacacacaccatcttctaaatgaagtccatttctttctccaatattatgttaaagaatttctgaaaaagtctgcctatattggatattcctgatgggtgatttccccaaaccttaaactctttttcttactagctgctattaagtcatcttgtgccaatcctgaaattttctcttgggtttcttagaatcaagaagacctcacatttagcgttaacacagtacattttattagatcttatctattgccctgaactactgggcccttcatgaatctgaaccctgccatctcttccatctggcatctcttccatgaaacttgctgacatgccctggggaggtcatggggacaggtatcagctcggccaccac

SEQ ID NO: 69702 - DNA, 1070 bp, Homo sapiens
ccctgtttagatctctgaagctcaggcttttgcaatctctgttaacgaaacctatgccacaagtggtaaataccgaggacgctccattttagtcatgatctttatgtggctacttgaaaagcttttccgcctttctgataaacattcctaggagacctcttttgccctcatttccttgcccagttgaggctgtattttttaaggaaggaaaatccaaaaatcagggatcttgtccattttccctatcttttcacggcggggcgggagaagagggacagcgggggaggtggagagaagaaacggcgggggaatcaaagattaggcgttgttgtctgtgccaaaacggagtgagcccaatatcaacaaatcaaaatccaaaacggaacaaaaaagtcacaggcccgccctgctcgcgcccccgcccgcccggacgcccaacaggtgcttcccgggcccgcccgcagccacagtatccttgggtggccacaaagtaaccgcccgcgcagctgcagccaggcccgcccgtactcacggccgctccgcggtccgcgccccggcccgcagcgcccatccggcccgggccccggtcagcgcgggctcggctctcaggcgttcccggcgcggcccgggacgcgctgaggccgttaacgcctaggcagggcgcgaggcatcctcccgccgccgccccgcgggccgcctgccctttgttttggagccgtagcccggcccagacgccgttaacagccttggagcgcggcgccggccaatcagcgcgccatgtcgccagcgccccgcccccatcctgcctccgttccgccccgcgtcccgcctgccccgcgcgcccccgccccgcgcgctccgggccaaggagctccgccagctcgcacccggccgggacgggcaggagcccacgtgccgcggggcgcgccgcactcccattggctgacccgccgggcgcggcctcggagccagcctgtaagggccgagggacacgggggcggggccgcgcggggcggggcgagagcaggggcgggttccgcgaggagcgccgcgctcggacgcaggctggc

SEQ ID NO: 69703 - DNA, 1205 bp, Homo sapiens
aatgcccaacaaatgggggcaacagttatataaataacctgtttttaataaaatttaacattatgttgatgttacatgttggagtcagatacatagaaaaaggaaaaaataggacacaatagtatgggataatcattacgtaggtttaaaaaaacaaaagaatccttgctgagaacaggtctggcagagcaaagtgagctttagcctgaagtgggagggagaaagtaaaacagtgggcagggctctggaggaaagaaggatggtagtgcttcaaagggaagcagaagttttggctttgttttatttttaggacagaagagtgatcagcccctaggaatttggatgagatcatccagagagtgtgtatgggacacagagggcccaagaactaagaacaaagagtcaaagacttgggaaaaccagaggtgtctcagcaaagtagtagatgtaactttttaaaaaggaaatggcttataacatcaagtgctccagaaaaaatcaaaatcttttgattttccagggagaatggcaaaaaaaggggaaaaagaatctttggtgaggaaggccttcaggaaaaagcaaccagtccagaaagatcaaaatcaagaaagactgtacatagagtgtgcacaccatcagttcagagtgcaagagtgggggtagggggctaaagtctggctctcgtgggcagaagaggtgggcacagaaagcagagcaagcagcacgaaccattcccgagagagcctgactatgaaggggagagaacaaatggcacttgtctcacagactctggggcagtgcccaggaaattaaatttaggactatatatcaatttaaaagtactggatagagtaacgaaagtgatgttttcagtaagtgttgtacagcagaaggcttgtttttgttgattttaaaaatctttcatgggagattggagagatgctggtaaaaaaaaatacagcattaaaataaaatctttcactataaaactagctagtacggccaggagtggtgactcacacctgtaatcccagcactttgggaggctgaggcggggtggatcacctgaggtgaggagttcaagaccagcctggccaacatcgtgaaaccccatctctactaaaaatacaaaaattagccaggccgtggtggttcatgcctgtaattccagctacttgggaggcggagacagaattgcttgaacc

SEQ ID NO: 69704 - DNA, 2134 bp, Homo sapiens
cccaggaggcggaggttgaagtgaaccgaggtcacgccactgcacttcagcctggagacagagcgagaccccgtctcggggggaaaaaaaaaaccgtcactatcatttcacttttctaagggacctgaatcaagatgagggagtctacgtgtgattctgcaagaactccattaaggctgcatacataatgaccactaaatcattaacaggagtccatagcaattgggctaaaacatctgggagcatttatgctggtaaaagagctcacttgggggctaaaaaaaaagtcaaattaggcccaactctaaacggatctttaacaaatcaagagagtaatgttagtttatccttcctgaaacgccagcagtacgatattaaaatccacttagaagtaaaaacttcaagacggaaatatgccaccaacactggcgtcagtaatccattttagaaagcctgcgcggagaccaccattagcaccgctgaggatatttaatgaaagccgttggctgcaaacagaggcgaagagagaaaaacgattatttcggtgttctgcacacacgcggaggcaaaacgctttcaggacctcagcagccaccgccgccaacaccgacaagcatctgatggaattcacagttttacaatcgaaagtccaaaagaaggccatgatactagcaaattgaggggtggggacccttccgttgccttcccgagggtccagactttaaaggccgcgctgcgcccggggccaagggtccactagtaccggcctacgccccccgcgccactccctgagccccttcccgagcgaccgaaggcccgggaaccgcgagcaacaacacctaaacctcaaccggcccggggccgcgcccgagccctggcgcgcggaccgcggtgaagtccgggttcgaggtcgccgcggcgcctgaggccgaggcgcgggcgaggccgaggctgcgtccgctgcggccccgggcggtgggggggccgggcgtggccggtcgcggacactcaccacaccatgccgtaggcgccctcgccgatgtacgagaggttggtgtagcgcggccccacgtcgaacacctgcccgcggaccatctccgggcccgcgcccgccgccgccgccgccgccatgttggctgccgggccgccgccgcctccgccgcgctgagctcgacgctcggcggccgccgctcagctcttgtcgcccctcccgcagggactgcgccgccgccggtgcagccgccgacgctgaccgggaggaggaaggaagacgccgagcgggagagctgaagagccgacagccactcggaccgattgcctgcctgcctgccagactgacgggcgggccggcgggcgggcggagggaggggcgcgcgccgaggagggtgccggggcggggacaagaagtgtgcatgcggattggttcctcgcggctgggggcggggccgcgcgggccggcggaagcggcgggcttcgggaggggcactgcgacggcgttgactgagggggcgccactaggcgcggtcacgtgcattcgcggtgcattcgcgggggcgtcggtgcgggtcgcgtctcttaagacacccagggagacagacgtggggcagaactcatgggctgaagtgagagatggctggggcccaggcgagcgaccgagcagggtccgaacagagccagcgagggaccccgggctgtgcttgaggcccgacgacgcgccatatcccggcagcgccgcagctcaggcctctgcgaatctgtggtccacacgctgataaacttagaggcctctgcactggggcagaaaccgaaaggcatgacccagaccgagaaagatatttgcatactgagaaagtgtgaaacacaattgtcgagactaaaaggagacactgagaggatacgccaatcaggttagttcagatgtttgttgagcacactccatgttcctggggatccacccttatagaagttaccttttagagagaggagacagacaaatacgtgtaatgctcaagttgtgataagtacgatgaagaagtacaaagcagaagggagggcgcggtgtctcacgcctatcatcccagcactttgggaggccgaggcgggcggatcacttgaggtcaggagtttgagacca

SEQ ID NO: 69705 - DNA, 2063 bp, Homo sapiens
gccacaatactcatttgaaaagaaaaaatacccaaatcctacctaagcttggcttctcaagaaaagatcaaccagtaacaggcccaaaggaaaccatgggggctctggcttcagggactcatgtcacttcaatgcacaaactctcctggaactcctgccagcccaggtgcatgtggcaagcatggtgaatcagggccagtcagccgagggcaggagttgagtgtcacaggccacacccaaaggacatggggaactgagaggaggaaagagctcctgcctaaaggcggaggctgtggaagaaaaggagaagggctgaggccagagggggccaccgaggaagaaccatgaacgcgagggcttatgcacgcaggaggtcacagaaagacaggttcttgggaatccatgcatcaaggcaggggtgggggcatccagagccagctgctgccgccatggccaacacaggggcctattcaagcatttggcaagaactggggactggcaaggctatgggtgaaggaggggcctgagaactcattcaggcaggcccagctcagggaaggcagctccacacaagtttggccagtggatcccctgcaaaccagcaggaaacccccctcgtcctgccagtccttgtagcgctgcctcctcttcctctcgtctgagggccactgtgcccagaaaactgcccctaaatgccatggactcctcctcactccctctggaaactgtgggctcctggtgcttaccaggcctgagctcgggctgggggagactccggccgccgctgtggctcacggtctcgccccgggtgctactgctatttccaacagccgcttagcctagactctgctcaggaaaggccagcggctgaggcagtgctgcccagcccacggactccccatgccaagggctgcagccccgcaacctcgcttctggattcttcgctgatccagtcaccggggaggggctgactggcagccacacagaggtttcagccactcgctgctcttcagtggcaattcttataatacaatccccactctgacgcaattttgtaagaatggcttggagtccaaaaacttgactacattctacttccgtgacagggagagcatgatcaaggccgctaggcaggcctgcatgcgaggcactctgacagacggggaagcaagggcaggcgagacttccttctagctgcgccctccctccttcccaggcctgcaggagccccgagcgtaggactgggctggtgccggcgcagcaacgctccttctcaccggcaggtggcgctgtctcccgcgtggacggacagagacccatcaggcggggagggcctgggcggtggcggcgcccccttggtggggccgcagagcggaggagcagcagctgccaccggccggaagcctgctggctcggccgagaacaatggccgcctgtcactgtggacagctgtctcccaggctaaggcaaggctgcgctcccagggaatgcgggcagggagccagggcggagggcagaggacgagagcgaggaggagagcgcgggcacccactgatgctggcggcctcgggtattcgctttctctctcttctcccaccttgttccttttccccggatgcacgcatgcactagtaatgccgaatttagaacaacagggaaaggaaaggaaatggcaaaggaagggaaaggaaatggccgacaggaaatggcaaggaagggaaaatccactgcaactctgctgcctgctggcctgtccagggacaactattcagctgggtgggacgttgctacccccttgtggcacccctgctgcagcctgcgattcttacgccctgtatttctggtctaacatcaaccaacactttggcgaaatataataaaatgaaattactaggagaatgaaagaaagtcacatgaaataaaagccctgctttttaatgattatatcctctgtgaaatggatctgcagccctctccatttctgggttcccctggccacaccatgcttatggctgtcccaggagcaggctgacagacaagcttccaccagcatctaaccatgg

SEQ ID NO: 69706 - DNA, 1243 bp, Homo sapiens
tgtgtcaagcgctgtgccgaaatccctgcagccggagccagttcttcctgttgtacagacaggttcaggggcttgcctgaccgaacccagcggcaatgtgcccggcctccgcgcctgaggctctggctcacagacctgtggctgaagcagctgcagcccgagcacttgtgcagctgacgctcgcttcacggacgcttgggaggccgcggagccgggggccatcaggcagactgggcccctgaaggtgcagggactggggggatatggggcaacgtgccggcccagaggctcctggggggtggggagaggccaaatctcggaaaatggggcgcgtccccctcagcacccgattctgcctcatagccctcggtccctaccaggccctcggctcggccacacccccgcctgccccccagttctgcccccttggctccccagccccccaactcccagcctcgggttcctcatgtccgcagcggcccctcttgctcctcggccccccgcactgcacccccgcaccctttcggtgcacccatgtgagcctcgtctcggcctccttgcctccccagccctctgattccacccctccggttcctcggtcccatttcacccctgtgcgccttgggcgctcgcctgaccctcgtcccagccccgtcagccctctaatcccgtcccccccggcctcctcacccctggtctccgcgggcctcagctgtctcctcgcggctccgtgtcccgcaagctgctgccggccggccccgcccacttcccgtccctggccgccgcgggcgccgcgggcgccgcgcaggcgcagtcgggcctccaggctggcggggccggacctctgctgccccctggcggctacgtggacggtgactgcggccctttagtggtaggcgaactgcggctccacctgggctccggagccgccccagtcaccagcctcttgcttctcttctgcagctttgggtgggcggctggatggggaaagcaatccctaggtcacagcgcccagaaattaagcaacttctgccgtcaatagctggtaagtgacagagcagggatgcaaacccagactgcccaggcaggctcatccgtccgggaaggaggcacagtcccaggctcattatgagttgtttgtttccacaaacgttgaggcttttgttatctttccgttctggaggtcagaagtccacttagcctcagtgggcgaagatccagggatcgccagaatgcgttcctt

SEQ ID NO: 69707 - DNA, 1117 bp, Homo sapiens
cgtggtgtgggctcctctgtggcggctctggtcaggcccttttgacacactcctgggggctcagtcacagggccaccctgaccactctcctgttcagaaggtaacaccagagccctcttcactgtcacaaacttgtattggtgattgggtctggctcactggctagcatagggctgccaggagccagtgtcccatcaatgcgagagggcagaggacacgggggagcagagcccacactccacagtgggctgagggctatttcaggaccctggcaggtgccctggacccctgagaggagcaagcccagagctctgctctcctgccaagatcgccatggtcaccaggaccccagcctgggaagagacactccctgagagtccacctatatgaccactgctggagcagagcctggacacagtggctgtgacatcccacaggtctccagagcctgtcagccaggggtagtgccccagggaacaggcagtgcccagcggcgcgagtgccacctggggagaaggctccggcagtgaggctggcccccaacatgtgagacatctcacagctccaggcctggggacttgtgaggccaccactcctgtgaggagtgtgcactggtgactacacttttgctttgataaactccctgggctgcccatttttgcgtggaaacttcctggtcaccctttggggagccctgtgcctgggacaggcatttctgttctctcccagggaagcagctcctgtgagatctcatttccctgtcacctgatttcaggacagcccaggctggctgtgtggactcaggggactgccaatatgatttctatgagtcacctggcatctgggccaatcttcagccttgtgggcgttagtcggtgtgtgcacaccccacagtgcacgagggcacatctgggccttcacagggaaggccaggtcctgaatggaggcctcaggaggggatgcccgctgtggacctgcctggctggccacacactgggtcaccagtttccagataccagcccatggaggggtgctgggctgggcacacagggctggcggggcagctttgtgagtagactcgaagcctgagtactggagacggagccggctctggggc

SEQ ID NO: 69708 - DNA, 1324 bp, Homo sapiens
aaattcctaggatttaccacctcagtaactttaccaaatgcttctagaatcaggaaaagagggaaacaaccatttcttaagctcctcctttgtagtaggcacaccatagctatcaacactattcaatctcgccagcaaccccataaggcaggtgttgtaattttttaaaactgtgagtaaatggaggttcagaacaagtcacactagtgtcaggtgaccttggcaaaagaatcccaggactggctggccatcaagcccaagttaggctggcctctcaggtcctgtttcaaaaggtgagaagataaaaaggcaagactaggaacatcttacctttcacttctgcgagaaattattgcccctggattccagctaatttgttcacaaaagtaccctacttcatttacagataacaggtcagagaacctgggtgccctcaaaacccagccagggcctagggggcggcgagtggaagctgcctgggtgtgtaccgcaccgatctgggccccggtggctgcacagcttccctgagcctcagtttccctacctgtgagactggtacagcagatctcaccctaaagagctgtgggagggttcgaagaagaaaagtattaaccacagcgcctgctccctgcaggcacatggcgggcccatctccacctccctgaacccccacagcaagccccgcgggagagtatcacccccgccagggaagaggcaacaagaatgcagagcccggcccgggcgctctcccgagctcgcgggtcctccgccggccaacgttcaggaaacaagccagaaaaatgcgtgcgcttcccgcctttctgagccgccgggcgagggtcccgcagcccgccgctcacccacagccgcaccgcggatccagctccggtccttgttcccggggcggctaccgacaacccctatttccgggtccagccgcttctggcgtccccgcgtccggtgtgccagcgtctgccctccggctccggcgggtcggcgttcttaggttccgtggctcgcggattccgggagcaccccagggagtggcacttgcacgccgcggaccgcagggatccccaagccctgcacccagattcttccccgccacggagagacaatcatgacaattatcattacaatgattatgaaaactggcatgaaaacatttatgctgttaataattaaaataataaaaatgtaccgatgtgtgtatagcaggcttcttttcgatgctgtaaaaaaatctgtggaatgaatgaatgatctgtgtaaaatatatttggaagatgaattctaaaattaagttatttatttatttatttat

SEQ ID NO: 69709 - DNA, 1084 bp, Homo sapiens
aaggacaggcaaacaaacagaaactgacaagtggactagcagaatggactgaaggctgctctgtaaacttctcccacccagcagtaatactctggctttctatggccctgtgtgtcagtttggtccaggcctttctatgaagcccctgtacatatcttggtcactcataagttcccctgcgtctgccttctgtctccatctacatcagccttgactatattccacccacatggtgctgggggcctgggcctgtgaacctctgacctgtcctctcctgccagactcaggcccagctctcagctgctgctgttgccgggcccctcccagggtgcctgactccagatctctgccacagattcaggactggactcaaaggtctcctctctgaggtgccttccctgacctgctttggcagccactcctgattcttctgactttgccctgttgtagggacttcctaaacggttgtgacccatgctctccatgtatgcccggtctgaggacagcagcgcctggcccaagcacacgctcgatggtgatcagctgactgatggccgcgtgctctgggtttggtgccaggcatgtgcctccttccagtctcccaacagcccccagagctgttcagacctccagtgcacagctcatgtccaaaggtggggaagtcagctaaggacccacttcattctacccagaagcataagacaaagagaaactgagtgagtggccagaagagggagtgttcgccagggagggctggacctctggggtctctggtgatctggcggtagagccacctggataacgtgtgccgattgaatgaacaggtgaaacaggccaggctttcgactggggaaggggagcgagaggaatgaagaaagcgccagatagttcccatggaagtttattttatgttccttgcaaacaacatgtggcctcagctgtgattccagctgccctctctgacttctgttccctgagcctggctcctgttcttcattcaaactgcaccagctgcataagcaaagacagtggaggggctccactgcatgtcagcctgctgcatggcttgcagctgcttctgtat

SEQ ID NO: 69710 - DNA, 1438 bp, Homo sapiens
gttgagcctgacaccaaaggatgtctttctaaagtgtcagtttcatctattctgcccccagttcacaacctgaaacaacctccgatagtgaatcaagccaagcccctcactctaaagcacagagacatgccatgaattcctaaggggatgacagaatacatcattgatgagaagattgaacaagtgaagtgtgagtggcaagtcaggtgaggacatttgaatccaatctggcatttaaaatgtctcttcatttccaaagtcctatctctccctagtaatgttgtttgactgctagtcccagagcaggaccccacatcccagtgacagccaagtcacagtcgcctccttccctggcccctgtggaaagagctgctcagggctttgctcccagagccctctgcattcccaacttcctgcagcctcctttcattggatgggggtgatagtttgcacatgcctttctagtaatccaagaaaaacttactgaaaaagtctgtttgttcatgtcagtaatcaggggcatgaccagggcatggcccataaatgcctctggactgatactcaccaggctcccaggccaacaccacatacatgatttccactgagagaatgcagtctggacagagagcagcagggtacactgtaggtctgcccagtgggcatccacagctgtgccaacccctcccaccccacaaattcctcagggctgggcagtggaccctgccctcactgagcctgactcagcagctctgtcctccctgggtgtggtcccagcacccacttcctcccaggtctggcctgccagactcccccctccaccagaccctaggacttgaataaatacatagggtaaggtagaggcaggcaatgtgggggacacatttgggtccataactcctcctctgtgaggtcagtggaggggataagaggcctgaggcagcccactatggctgtggacctcaggaggactgtgttgaccatggcctgggcccctctcctgctgtttctctctcaattctcaggtaggcacaggcctcccatgtccagggcatgtccctcaggcttcaccagtcccctctggctaaaatcttacagcaactttatgctggtaggtggcccaactcccatgtgcatctgtgtctgcaggttccctctcccagcctgtgctgactcagccgccctccctctctgcacctccggatcagccagactctcctgcaccctgagcagtggcttcagtgctgatttctgctggatatactggtaccagcataaaccagggagcctccccagtatctcctgagccactaccaaaattcacttcatgaccagggctccggggtccccaggcacttctctggattaatggaaggccggtccaataaagggctcttgctcatatctgatctccagtctgaggatgaggcttactattact

SEQ ID NO: 69711 - DNA, 1149 bp, Homo sapiens
ccactgactctgttcagtgcttggaggacagactcctaggagtgagaagttgaccacagcatctgaatagctattaccccaagtctgtggaaattagagaacaaaattttaccagaaatgccccccagagcttctccccataacctcaccacccttagagaagagagctcctgttctcctcagcgctgcagggtccacagaggaggaagagctctggccagcagggaggagccacagaagaaaggacctggtgtctcccgtgaccagggtagtgagtcatgggaaccagtcactgctctggacttgacctgacctaagaggacttggtatagagtcaccacttcagtcctcaccaaggaacatccaaaaagccctggacagattcacccttaaggagaccagtaaagcatgaactgccctgagttaatgagaaggtcacaaaaagggtctgtctggcctggtgctgagcctgggggcagtgatcagagcagggggaatgcacagctggctctggggacatctggtcatcatgtcacaggagagtgtgtctggatgtggacacctggggacatgaagggctcattaccaagtgatctaggggagatcagagctgcgatcagctaactgcctgcatggtgccctctgctcagtgatcacagtggtgagctcctgatgccccggaacacacagtttcacccttgcctgtatccctgatatccacgagaggggcctgacccaaggccagcgtgtcatcagaaggctggggggctctaatttgcatggatggaccctcattctcagagaatgaagaggggaagggagagatttggggaagctctgtctcagctgtgggcacagaaggaaggcaggactcaggacaatctccagcatggtctggtttcctctcctcctcactctccttgcacactgcacaggtgactagatataaggccatggctaaagccctaggaagcccatgggccctgctttctccttttgtctctcaacccagaatcaccatgactgtttctctcccacttccaggatcctgggctcagtctgtgctgactcagccaccctcagtgtcttgggccacaaggcagaggctcactgtctcctgcactggaagcagctccaacactgggactg

SEQ ID NO: 69712 - DNA, 1365 bp, Homo sapiens
agggctctgaggctcccagccacatcttgggatctaaagatgcgtcggcctgtgcaaggattttgcacgttgctgtgctgcagcctgagaatgggtctgtctcggggtctgcacaggggcagtggatttcacagtggctctgaggcttacacagggctccaggcccatgggaaagtgagacacaaatcttccctctgctctctaggcctggtgcagtgatcctggctggaggctctgataaatctagctcagaatgtaacttctgttgtgaacatctgattttccttggacaaatagttctgacaatatcttatttcagttcgactagtatatcgatccattgctcatacttctcattccattcttgctttcgcaatcggtggaccctgtcctgtgcccacagttctctgcatctctccctgctagtccagcctcctgcaaaggttcagctcccagaagagactcctacatccactgccctggaagaagcaacactatgagtagaatggcaagattttgtcacatcagcactggggataactcatcactactctgggcccattgaagcaatcacatactctctgaacctcagttttcatttttggcagcatgtaaccctacctcagcagctcttgctttcaacatggggatgagctgaagaagaggcttgtaaatgacaagtatcagtcactgttcaccgtgcaggggtgtctgtgtccttctgtgtcaggctttgtgccagcagggctgtgccccgcaaactcttccaaggtcctccatgcagtctgtgttccctcatctggccacattgtctggaagttaaggtcacctcctcatgcactggaacaagcagcagagtcgagtggacagcgtggcctggcaccgccagctcctacgggagccccagatggtaatgcctgctggtctccagcttgcagggttctgattttgggctcttgctctaggtctggccacttgggcttctgcaatactctgggatcctgtatgaggatgagggtgatgatcagtgttcaggatgtggaaagagccccaggttaacccaggacacctgtctcatggggacatgaggcacaagcctcccatctgatcccacagcctggcctatagactcactttaattttgtgtgactgtcacctgactcaggacattcctgcagtcattttttcctccaggactgatggaatgaggccattccctgggtctgtcgcctcatatgcagtcgacctatatactgggctttcaggataaaacattcccagcctgggcattgcaatacagacaggcaggtagctcagacagaaaatactcttgttgattccagatttctgggcacatggacttgg

SEQ ID NO: 69713 - DNA, 4675 bp, Homo sapiens
actggggtctctgtctctctcattatcacaagggaggataccaacagctctctcctatgcagaccgtagtcatgtttcccaattgcacaagaatgtctcttacagttgtttaatttccttcccagccaggacgcttaagtttcccatgctgatacttggttgctatttctctctgatccaacatttttcaaacagtattgcttgcaacccaaggcttatgaaacactttaccaaaagttccacaagaaaagctcaagtttctcatgcaccgttggaccaggttcattgcgtgcagtaggaccttgctcaagtgatgagtccatttgatgttttcaccatcaaggtgaagggtattatgacttttgggcactgagttgatagaaggaagacagcagctgatgatggccctgcccaccgatgtgtgtgtgtgggcaggacctatcgatggatttagaagttgagggaactgtttattctgcagatggaatttccagcactgaatctccaccaaccagacactagcactcagcaggtgctctgtaagaagaagcccttcactgccaatcacggccattacacaggtgaaggagaggatgatttttaacagccattgaccctcacagtaaactgaggtcaaaactctggtacacaaagtgactttgagagaacaggctgaggaagcaggttaattagtagcagaaggctttgccgagagcaggaacaaaacagggttggtgaggaactagtgatgccatggtgtggaaggaacaaggcctgtaccaggagcaggaaggggcatgggaaagaccacactgccacatgtgatgagtcagcacatggaaggcacagcaaatgttgcacaaaggtttttgtgtaataacctggcaaacagctgcttctctatcaagattgatgagtcaaaaaatgttactgatgcattgctgtcacatgtgaaggtgtgtgaagaatggtgacattcaaggaaacctgttctctgcagacacctacccaccagtacagcagacaccccagctatgccaagggctttgtcttcctctggggtaagagcctgggaacaacaagttggcccctgaaaggggtgccccatcatgcgctcttcatggctgagttaagtggggagctcccagagaactttccagtaaatggtcaatctgtttgttctgggtgcattgagcatgacccaggatcaatggaagtgacagaagcttaatttccccaaggctgcaaggcgggcactgggaggacggctgaagcagtttagccaccaccccctagtggctccagccccaggtaagcagggacagttgaagggcctgcctgagcccacctgtgtctaattagttccagcatcagcagctgcatcctgtagaccaccaaggagtgtgtgtgcccagcccctcacagatcacctgagcataaacaggaaattctccttcttacacctgactgcaccacacatctgccccttgctcttcatttacaagacgctatcacatcagacacggactgatctgagtcccgggttccctcaggtttctgctgtcctctcagatccccacacacaaaagactcttcaccacagggcgttgagccagctcttcccctaacactgcctcttacaggttactcttctccaatatgatgcgggtttgatttcagtgtttctacatatatacttttgtattttattgggtaagctgagccccttgtacctgatcttgagtcaggcaggggccacacagagaagaggtgttcctcccctgggaccagcagtcctcggatcagggcatcagggacctgaacagcaggttctgaatccacacctagacccaggaagtccctgagcccccagcccacagtgtggagcggccaccagggggaagcagagagttacctggcaaagccacctggcgatggggcgggcctgggtgacagggagacgctgacatgcagcaggagccagtgaccatgatctcacacctggaatgaaagggtctttattttcatagagtattgtccttgtgtacttgacactcatgtagaaattctagaataggattttaccttcagctcttgcagatgctgcctctttctctgccacagctccaggcacttgacttctcacagtgccctctcctcacacacccagttgtgctaaaatggtgtccctgccatgtgcagtgtcctccctgaggtcacaggtgtcccctttatctcccctttgctctgggagcccctgtcctgcagacacagtggcttctcctttcctggctgctcctccactttcattgtccctggtctttccggactctctcctggggaagctgccaaatcatggctcttgatttcctggtgagtcacaaaatagttgctcattaacctttagttgacttaagttcttaatcattgatacattttccccaacaactgacgacaacttagttataataaacattcacttctgggggtcttggagtttgcagccccctctcattctctcatggagcaaacatttccttcgcctcctcatctgtctctgatcctgacagcatcctggagatactgaggcacagcagctatgacctacccaggagcttgcagccaaggcagaaacttccatcacctcatggatcttccagcactctgtgtgcacttgacaaataagaaattccattgtcctctaccactcaggagctgtgccctgcggtgggacctgcacctttccaaggtgtgtgttatcatctgcacagtggagatgaagagggaacctgcattgggttctggaaagtaccatctaaaaatatatttagacctgcaacagaaatctcctctctaacataaaatatttatgatcaggacacactgagaggcctagaccaaaattaagcactgccctcctgagccaggatagaatggaggaggggactggggaccccagataattccacagttaccagcatgactctatgatcacctcctggaccagatcaaagatcatcccatatgaaggacttcatattccttaggaaatacaaagtcacctctgagctctgctgtgaccaagtgagcccaggaatgaggctgagcacagtgtgatgtggagatgtctgcagagaatatggaatcaattgataaaggagatcctgtgggcaaagggtgggagggcaaggccacccctaacctctttgggtcccttggggctgagtccttctggaaaccacaaagctcctccagcagcagcccctgactctgctgattggcatcacgggctgttctctccaacaaggggttaagagagacctgggaggagcctgcccagcctcagacttgagaagcagcattggaggcacttcagccatggcctggcccctcttttccttggtctcctgactcactgcccaggtgctgcccccagggtctcacccacctgcccagccccaggcctccaggttcagcctggccatcagtctgagctcagcagggccctgtgtgtggtgggcaggatgctcgtgaccctgctgcagggggaggggctggttgggctgaaatgcccccactctgtgctcctgtgctcatgggtgccctgagagctcttttattcctggggctcactccagccctggcaagtagcaagatatcctggggttgagcctctcagtttcaaattttttatctcccctttccttcttgcaggctctgtcacctcctgtgagctgacacagccaccctcagtgtcagtagctccaggacagatgactaggatcacctgtggggaaaacagtattggaagtaaaagtgcttaatggtaccagcagaagccaggacaggcccctgtgtgggtcatctatggggatagcaggcggccttcagggatctctgagattctctggctcaaactcagggaacaggaccaccctggccatcaacagggcccaggctggggaccaggctattactgtaagatgtgggacattaggactcctcatcccacagtgacagaggtagatggggaagtgagacacaaaccccttccccatacgtgtcactcttgtcctccagcccaggaagactgtggacaaagccatgagcatgggtttcccaattcacctggatctgagaccccccaggctgccctttccacaggccctccaggcaggctctgcagaggggacatcaagactgaatttagggcagaggtgaccaggatatattgaggtttgggggactcagttgtgatttggggaaatggggccagaatggaaggtcaggccaaggtcaacatccttagttggtctctggatttccatagggggtgaaggccagtccttgggctgaatatcctgagtcagtttccagaactgcccagctcaggctcccatggcatcctgccattctctgaaaagggccctggcatgccaggtgctctgggttctgagggagagttggaatcagatcctcctgcaggaatccagggtcaggagaagcagcctcacctgacacagggaccacagatgcacccccacagggtgagctgcaggatggatgctgctcatctccaatcctcacatcctatgcaaaaaatcattcttttcacccctccttcagtgtatcaaagttgacacttaaaaagccttaagagcccactcttgtcaac

SEQ ID NO: 69714 - DNA, 4529 bp, Homo sapiens
tacctctcctcactctttccacagatgctgccccaggttaagcccccacaggactctaagcctattcctgaccctgagctcagcccaagtgatgcttcaggagatgggatcctgagaatgagcgccaacgtctctttaacctgaggtgtgaggtcatgagacacctgttggccataagacacctgtcccccacctgctcaggagacagtggagcaggcaacagtgcagagagaaccagcaggagccaggccaggccctgcatccaaagcaggccccaatcccacagattctccagctccagcctggggtacagccccaactttctgtaggctgaaatgggcttctcaggatgggcaggccatgatgggggatggcagtgtgtccacaggacacagccctgctgcctgcctggccctcatgcccactccttccccaccctggttaatctccacccaaaagggcccaggctcagaactcaggacacctggatcagctcctggacttgcccccactgctttctgttcccctgagccacttagtctcttttggcctcagtgttacctgctgtgaagtgaggaggcttatactgaactgaggaagctcttttcttcattcaaaattaaaagacagaaacaataaagtcatgtgaattaaagccttctaaggggatgtcatttaatgggctccaatgggcttcagacatggaacttcttgtctttcctctgcagagattccaagaaagggactcaaaagggcttgctttctgtatgatgggaacagtgatctccagctgagtataagcaggagagtcctagtttcatcagcaagacagacaaggctagggtagaaatcctcctggcacaagctctgagaggtgtggaatgaaataaagataaacatgaaattaatgtgcctatgatggtgatgttagctcacaactaagctgcagaaccagaaacctggtgattgcagtgaatcatagctgctcttactgggtgggaggtgcaccagtttgcttcctaagtgcatagaaagcctgggtccctgtaggatggcatgcacatctctctggactttgaaagtgttgcagaagagcttcagttgactcactctaattagacctgactgaacaaaaccattagaggagggcatttcaaccctgagacacttctatagcaattgcacctgccccaccccactgaactgcgtgtgttacctctctgtgctgggctgggcagggcagattgggtcacactggcacagaatggggctggactctctggtcctcaacttctgaggtgacaggtgctgtggggtcacctggaagaagaaagctcctgggctgagtctcctccaccagttgggggcagcagagctgcagccaggagcagtgaggagagaggctggggctgcccagctggggcgaagaggaaggccagcctggggttcaacaggtgtccaagagtcagtcttcagactgaaaatgaagacagttcatcctatcccctcgggctgcagtgaccacgttctgagggtcagattcatacagtgtcacccaaggacaccgacagaagcccggcacagtgaaggcctcacctgggaaatgcaactagaagaggctgggcccaggtgtcagcttgggcagcttccttaggaaggggattccctgggagaagtcctgaggccgaggtgctctaggaggggcacaatgtgaggtgacagggctcccagggcccaggttcttcacccaggatggcggcctgagcctcctgccactctcagggccttgtccctccctgtccagcagtgtcctggggagctgagccctctatcgtgggcacttccagatacacccgacccctcctgcctctgcctttccttccagctccaggtggactctgactcaggacgcagctcctgtgctcaggggagattcaggtgggtggcgtgaagcattttggggccctggtccctgcatgaggcatcaccagcctccttcaggagatgctgtccagaggaacagggcttctcacctgcctcaggccacagctctcaccacggggctgtcctttgatcagtggcaggatctgcatggctggagggactactgaccacatgctctctggagctcatgtcttgtgtggagaccatgacctggggaccctcagaaagaccaagcagcctaaagttagattttcagtccagtgtgattctctggttcttttcgcaagtttacgtaaaacgttgatgagaaaaagtgaataaataaaggaagagttgaggatggcaattgctggtctactgtggggctgggggataccatggaaagagcagcaccacatgtcaaatgagactagagattgggatgcatccgaaatatgtgtggttgctcaaatgacaaaactcttccaactgcaatgattcataagtgtcctacagacacagtacatcatgtacataacattaccaggatggggccaagtgactcgggggtatcaggagcagggatgaaagaggagaaagatgatgcatctttggtgtacttgctgctgagtcaggcgtcatcagtgatttctcaacagggcccagctcagccccaggccaggctcctggaaggtccatagtcctgctcaatgcagcccaggacaggccacatgacacagaggtttgagacagggaccatgttgtcaatccccaggacggtgactgtgatcacaggccttggaggccaaggctgattttctgactggagaagcagacgaaggaagctggggattcaccccttcattttaagtttctcatgctgcccccagagctggcttgagggatatcccgccatgaggagtcccagagaagtaaatttgcataaacaccaaggatgcactgccccagtgggcctgagaggaaataagagaggcctgggaagcccagctgtgctgtgggctcaggaggcagagctgtgggtgtctcaccatggcatgggccacactcctgctcccactcctcaacctctacacaggtgctgcccccagaccctgccccaggctcagccctcctaagcccctggtcttaccctgaaccctgagctcagcccaggcatagcctcagggcgatactactggaatgggtttgttatcttcaagccccctctcttgtcctctcttgcaggctctgttgcctcctatgagctgacacagctaccctcggtgtcagtgtccccaggacagacagccaggatcacctgctctggagatgtactgggggaaaattatgctgactggtaccagcagaagccaggccaggcccctgagttggtgatatacgaagatagtgagcggtaccctggaatccctgaacgattctctgggtccacctcagggaacacgaccaccctgaccatcagcagggtcctgaccgaagacgaggctgactattactgtttgtctggggatgaggacaatccctcagtgacacaggcagatggggaagtgagacacaaactcctttttcatctgtgttgtgttcttcctccagcaccaggaagactgtggaccaagcaatgagcaggtctggccaagttctactggatctgagacctccaggccatccttttttccagctgtccaggttggctctgcagagggtggagcaggagtggatttaaggctgctataatcagaatttatggtgttttggggcctcatgagtgacttggggaaataagaactggatggaagatgaaagagatgtagagaaccatcacttgaccttagatttccatacgatggtgattgggtcactccttcttcaaaatatcctacatcagtcccgaaaaatacccacctcagctcaacacctgagcttccaggcttccatggcagcctgggattttgaacaggaaaagccaaggaggggacactgtggcatctgcctcaatacccttttctgagctcacccaacctcaactgctgggagcttctaggagctcagagctgtgccctcactgggaagtgctattagctccaaagaaaacttccttcctcatatttaggcccagttttgagagttttggtttgatgactgcctgagccaagaacccaaggccctgtcctaatagaggatgacactgaaaggccttccagatccagacatcccagtatggatgcctgaggcctcagttgcaaccctattgtgggtcagggtctccttctggtgggcgatgcctccctcactccttccagatcctctgtgcatgcacatctttttctcagagtctacttccaggaaacccaaactaagatggctggctatcaccaaaataaactaccatagacctgaggtggaaacaccagcgaatttcccaaatttccattgtgaacatccaaatgcccatttatatctgagtgttccttgtattcttataaaatgaaaatggagcctgacataccaggtttttggagtcctgaaggagatgtggagacagatccttctgcaaggaatccaccgaaaggggagcagcctcaccccat

SEQ ID NO: 69715 - DNA, 1699 bp, Homo sapiens
tttgagggaacagactgaggaagcaggttaattattcgctgaaggctttgcccagagcaggaacaatacagggttgatgaggacgtagggatgccctggtgtggaaggaacaaggcctgaaccaggagcaggaagaagcatgggaaagaccacgctgccacatgtgatgagtcagcacatggaaggcacagcaaatgttgcgcaaaggtttttgtgtaataacctggcaaacagctgcttctctatccagattcatgagccaaaaaatgttactgatgcattgctgtcacatgttaaaatgctgggaagcatggtgacattcaaggaaacctgttctctgcaaacacctacccaccggcacaggagacaccccagctatgccaagggctttgtcttcctctggagtaagagcctgggaacaatcaggtggcccctgaaaggggtgccgcgtcttctgctctgcatggctgagttaattggggaactcccagagaacattccagaaaacagtcaacctgtctgtgctgggtgcattgagcatgacccaggatcaatggaagagacagaagcttaatttccttatggctgcaaggtgagcactgggaggacggctgaggcaggttagccaccgcccctgagtggcttcagccccaggcaaacagggacaggtgaagggcctatctgagcgcacctgtatctaaccagtcccagcatcagcaactgcatcctgtggaccacgagggggtgtgtgtgcccagcccctcacagatcacctgagcataaacaggaaattctccaccttacacccgactgcacaacacatctgcctccagctcttcatttacaaggtgatatcacatcagacagggactgatctgggtcccagatccctcaggtttccgctatcctttccagtccccacacagagcagactcttcactgcagggtgttgagccagctcttcccctcacaatgcctgttacaggtttacaagttactgttctccaatatgattggggtttgtttcactgtttctctatatatatatatttgcattttcttgggtaagctgagccccttgtacctggtcttgagtcaggcaggggccacacagagaagaggacttcctcccctggcaccagccgtccacagatcagggcatcaaggacctgagcagcaggttctgaatccacacctagaccccggaagtccctgagctcccagccgacagtgtggagcagccaccagggggaagcagagaatcaactggcaaagcgacctggggatggggcaggcctgggtgatagggagatgctgacatgcagtaagagccagtgaccaccacctcagatttagagggaaagggtctttattgtcctagagtattgtccttgacactgatgtaaaaattctagaatcacattttgtcttcagctcttttgcatgctgactctttgtctgacacagatccaggcacttgacttctcacaacgccccctcctccacacccagttgtgctaaaactgcatccccctcatgtgcagtgtcctctctgaggtcacaggtatccccctactcccatttgatctgggaacccctgtcctgcagacatagtggctggcttctaacttcctagctgcccctccacatccaccgtccctggtctttcccgactctctcctggggaagctgccaaatc

SEQ ID NO: 69716 - DNA, 848 bp, Homo sapiens
aactccactccaggtgggtacagccaaggacacagcactgtctccacccagctcccagtcaagggctatggtattttcccaagaaggaaaatccatcagcatttttcttcccaccccagctacctgttgcagagactaaattccaggtgattgtagtaatcggttgaggctctcttcttttgctcagcccctacttgtgggacaaaagccctgccttgggtgcaacacactgagaatactggcaccatcaaccagctcatttgtaaagtagaggttccatgctatgagaagcaagctgggaatacaatagactctccaataagcacccacctcctaaagcaggggtgtcactcagaaagtagctacctaccactgtccccacccagccccagagccatagccaaaagctcctgaaacatttccccaagaggaaaggcaggacatagagagctctaaagcccttcccgaatgaactgactttatttgcaaatgagtacaaagttcaacattaaggggactttcaaaacaatgaagcttgggcaaaaagcaattgagaggaaactggtaagttcattagtgacataaactagaccataggccagctagtttatcagagagaaccaggaaaagacatggctaaaaacagacctcttggggtcaaagcaaacctcaaacactgacctcaaaaactatccctgcaaatgagcctcagtttaattggataagtcatctcaataaaggtgttttttaaagaaaaaaaacagcaataacaattatacattctggtcaacatggagtaacaggagctggatttatttttaggcctggaataattttaaaaacaacac

SEQ ID NO: 69717 - DNA, 2275 bp, Homo sapiens
aactgaggcagagagggagaggtggtcaggactcaagcccagtaattcatttgccaaatcctgtttccttttcccccaacccagcgggctggtttgggtattttcagtttgtgcccatcagagtccctgcagagtgctctccactgtgtctcagatctctgtgtccccagagaaccatcaaaggttttgtttcactccctgctctgggctgtcttccacccagccctgtgaacctcagtgcaggttggccgcccccttagagggaggctaatcagggaagttctgagtcaggtcgtcctggaaaaactacattgacctctggagctcaagagaggccaggggacaaacacatggctcagcacacaggaaggcaggtgtgggtattgagtgacctgagggagaaatccctatttatcatccatcatgtggtcctgctgtgacaaacccgtgtggcagccacccacagcagatccacaacgtgagaggcccgctgaaacaagggtgctggcattggttactcagcctggccctccctgccttgcggggtgacctgcctggtcctggcctctctgtgagttgggccctgctgggtggtccctagtgtgcccagccctgaggctggtgagaggccaggctgtgaggtgtgaggaacttacctgcgtctccatggaaggtgccctccgcatcgttgggccagatctgcctggtcttgcagatgcccacgatggtggcctctgacacgacgactgggcagtgccggtgacgcttatggcactgcggcgtggtaggggcagaggggggaggttgcttctgtcggaggactgctgcgagttctgccagagagagcagctcttgtcccggaacatgaggtaggtggtggggcttggggacacgcggctggactggccggagaagtcctcctggccggaggggagccaagtgttcctgttccaggactgcagaactggcccagacctctgtattggaaaggtctttatggaccagggagtccggtgtcttttttacgggggacccctgggctgcgagttgcacagtccaattcgctgttgttagggcctcagtttcccaaaaggcacagggacggggggagggtggcggctcgatgggggagccgcctccagggggcccccccgccctgtgcccacggcgcggcccctttaagaggcccgcctggctccgtcatccgcgccgcggccacctccccccggccctccccttcctgcggcgcagagtgcgggccgggcgggagtgcggcgagagccggctggctgagcttagcgtccgaggaggcggcggcggcggcggcggcacggcggcggcggggctgtggggcggtgcggaagcgagaggcgaggagcgcgcgggccgtggccagagtctggcggcggcctggcggagcggagagcagcgcccgcgcctcgccgtgcggaggagccccgcacacaatagcggcgcgcgcagcccgcgcccttccccccggcgcgccccgccccgcgcgccgagcgccccgctccgcctcacctgccaccagggagtgggcgggcattgttcgccgccgccgccgccgcgcgggccatgggggccgcccggcgcccggggccgggctggcgaggcgccgcgccgccgctgagacgggccccgcgcgcagcccggcggcgcaggtaaggccggccgcgccatggtggacccggtgggcttcgcggaggcgtggaaggcgcagttcccggactcagagcccccgcgcatggagctgcgctcagtgggcgacatcgagcaggagctggagcgctgcaaggcctccattcggcgcctggagcaggaggtgaaccaggagcgcttccgcatgatctacctgcagacgttgctggccaaggaaaagaagagctatgaccggcagcgatggggcttccggcgcgcggcgcaggcccccgacggcgcctccgagccccgagcgtccgcgtcgcgcccgcagccagcgcccgccgacggagccgacccgccgcccgccgaggagcccgaggcccggcccgacggcgagggttctccgggtaaggccaggcccgggaccgcccgcaggcccggggcagccgcgtcgggggaacgggacgaccggggaccccccgccagcgtggcggcgctcaggtccaacttcgagcggatccgcaagggccatggccagcccggggcggacgccgagaagcccttctacgtgaacgtcgagtttcaccacgagcgcggcctggtgaaggtcaac

SEQ ID NO: 69718 - DNA, 452 bp, Homo sapiens
agcagccttcctgtaggatcctggttgtgtctggcttcctgcagtaatgtggattggggtggattggcctctgtgtgcacccttaatgggaaccaggacactgctttgctggctgatttgttgtcctcccttactgcccactggccagtctacaggtcaccaccaggactggaacagatttcagaggccgtgcaggtttcatctggggcaacgtgccaaagtgcagagcgtgggcagcgggaggccctgccgtccgcgtggatgggggagacggcagcatgggggtgtctgccagggcggaggtgatgatgtgcaagcaggtggttggcagcaggaggcctggtagtgccagctggtgtcttgccagccagagcacagccccgcttggtcaggaatgcatgtgctgaggccagcactgagatgagcaggcatgcgtgtgtggccacccctat

SEQ ID NO: 69719 - DNA, 711 bp, Homo sapiens
cggatctgccggtgttccctctctggaaggcttgcaggagagacaggatccctccctttactggaactttgcacttgggtttggctttgtgctttgtaaggggatcccattcagcgtccaggatccgagccttgctctatttctgcaaggagctggtggttgctgctcgccaaggggatactcagacagccaaagcctaggcaggatcagaagctcaggcagcagagccaagatttgaaccaataatttttttttttttttttttactttactctacagtattgggattggctgaactttccttaaatgaccagatagtaactaattttatgtttgtggctgagaggcaaaatcgatgctactttgtggatacttacataaccatttggaatgtgagcatgtgaaactataaagagcattcttaaggcctaggtcacatgaaaacaggtggcagtgggctggatttggcctgtgggctgcagtttgccaacctgtgtttcacagcgagctgcctccaaatgcctggtggtgatgcaatcgatgacagagccaggtgtgggcgtctcacatctgtgctcaggagctcacaggagcttctctcctatagaacctgtgaggcaggtagggtagtcttccaaaccccatgaggattctttcctcagagaagttgccggaggaggaaaagctggatgagagatggtcacttggttt

SEQ ID NO: 69720 - DNA, 558 bp, Homo sapiens
taaaacaatgcgatttaatcgcagtgccatctggcttggtatgaggtggttctgctgtcacacaggcttggtcatgtgactgtattcagtttgtggtttgactgccgctggcatccgaggtggcctaaccgttgtagctaaggacttggtagggacaccggaaggctgagacctctctctccttgtggtccgtcattgttctgcagtgaagcctgagttgcttctcatggaggctaggttccaagagcaaaggtggatgctgcagggcttcctgaggcctgggctatggaacttctcagctgaacttccaccggattctgttggtacagtgtgtcgcaagtcttgcccagatctaagcgggggtagaaagctggactctacctcttgatgggaggagcagcagtgtcatgtggacacacggcgtggacacaaggcatgattctcaggggctctggtgattgctcccaccacaggattttagttacacagtcacaggacaaggactggaagtgattgtgggaaaatgatcctagaccattggtagaggaggtgaggttg

SEQ ID NO: 69721 - DNA, 1025 bp, Homo sapiens
atcacctgggacagtgctgcaggtcagcagccggcaatgctagacaccgggttggggtcgctcagcaggtctaagccctggctgccagctagattcccccaggaagcccctatagcttcggattcagcaggtctgtgtggatcccggtgaaatcgttttcaaagcctcccaggtgttgccgacgtgcagccagggctgaggacacctgttagagggtgctgagtcctgtgggacgagaagtggagaacctgggagagggagaggcagaggtgtgcaaggaagccggaacttcggccacctgcacccacagctagtggcagatcactccagacacacggctctccccggccttccacgtggaaaggactgacaacagtctccacttcaggattgctgggtcagttgctctgagtgcctgagggcagccctgtgcccacccagcctgggtgtgtgtggtggcagttgtaaactcctgaatgaacaccaaggtcacctctgctggtaacctttgggcagggctgcttacaggtgactcatggtgagagtgacgtcaccccatcagggtgagctctcagaagtcccatgggcctcaaagtccccctttggaaggagtggagaagggatcctcacatgagccatggattgggccagaagatccttgtgggttgacagtggtcatgatgagtccactggcttagaaaactcaggctgagaacaggccatggaggagctccagatggctaaggccttggaaacacgtgttgagctttgtcattcagcctgggaggaagggagtgattatctccaggtgcctctgggaggaatgaattactctgtataaccagatagtcccaacaggcagggggcctcttgtaggataagccactctgtcctcctgcgggtactcacattggggtaagggtggtctgggatttcgacagacctgctggaaggtggtctatgactcagccagaagctgggccagactgggggatgggggaacctgtagccccagttccctgggc

SEQ ID NO: 69722 - DNA, 862 bp, Homo sapiens
actgggctcccccagattagggggactaggaggagggactagaaggggcctctttgcactctgccctgtcctgaagctcagttccagctcccgccctcagttcacccgtgggcctggtagccagctgacaacagttttattcacctgttctctgttggcttttcctgcttggttgtcacaagcccagtttgttttgtgggttctttattggcttttatttagcctcaagttttgtgtttgtacccacctaggtagggtcatggtaggagggccttccttccatgtcactgacttctttttccaatttccctttacctccggcttcctacccgccccagcctccttgcctgcctccatggccctccctgcattcacgtcctttcccataactggcacaagcacagccctgagttataaatagccccaggccaggccctgccctttgctctctcgttttctctgcatggacttggctgatttctgagccatccctgtctgatgccatcagcactattcaggactctagaagattcttagtctaaggagaagtgcctcatcctgagtcttgtctccaccccaccccgtccatgccctgagccagatgttccctgagcggccccgcccttcagaacacggagggagagccagattctgccttcctgcctgtgctgtttttcctcctggctttccaaaccatgtggacagaacgagacacagtgctcccacccacgccggcacaagcatctcacactgggtggggctgtcatgggccctgctgccctagcagcctccctgggccctacaggccgcctggtactcatagtagcaagattgtccttagaacatgagcacggctggcagg

SEQ ID NO: 69723 - DNA, 478 bp, Homo sapiens
ttggagaggcaggacctgctgctttagaggagtgcagctgaacctcggccctgcgactctgtttggccagagcaaggatctggcctggagaggcccatcctacaccccttattagagccgtgatagcctacagagtgaggtgaggttctcccgccttcccaggtggtttctttctgccacttcctggaaagaaaggtgaggctgccaatagcccgctagcaccagccagacctcacgcttgaccaacctctcggggccagaggttcattcctggggcactgtggcctggttttgttttgaaaccaagagagggcaaagggaacccagcagttctgagtgagttctagccagccctacctcaggctggctgttgagagattttacaattttcatttttgtaaaaataaagcttgattgttcacagaaaaaaaaagaaaaaaaacctagtggacgtgacttggcctgccgccctcctgag

SEQ ID NO: 69724 - DNA, 986 bp, Homo sapiens
agatgctctgtgccttggatctggccccactcccgtcctcccagccctcctctcctccagctacctgccagccggcacttttggtcaagctgttttgcattcactgttgcacatatgctcagtcacacacacagcatacgctatgcacatgtgtccacacacaccccacccacatcccacatcaccccgaccccctctgctgtccttggaaccttattacacttcgagtcactggtttgcctgtattgtgaaaccagctggatcctgagatccccaagacagaaatcatgatgagtatgtttttggcccatgacactggcttaccttgtgccaggcagatggcagccacacagtgtccaccggatggttgattttgaagcagagttagcttgtcacctgcctccctttcccgggacaacagaagctgacctctttgatctcttgcgcagatgatgagtctccggggctctatgggtttctgaatgtcatcgtccactcagccactggatttaagcagagttcaagtaagtactggtttggggaggagggttgcagcggccgagccagggtctccacccaggaaggactcatcgggcagggtgtggggaaacagggaggttgttcagatgaccacgggacacctttgaccctggccgctgtggagtgtttgtgctggttgatgccttctgggtgtggaattgtttttcccggagtggcctctgccctctcccctagcctgtctcagatcctgggagctggtgagctgccccctgcaggtggatcgagtaattgcaggggtttggcaaggactttgacagacatccccaggggtgcccgggagtgtggggtccaagccaggagggctgtcagcagtgcaccttcaccccacagcagagcagatttggctgctctgtcgagctggatggatactactttttttttcctttccctctaagtgggggtctcccccagctactggagctgtc

SEQ ID NO: 69725 - DNA, 583 bp, Homo sapiens
gagacatactgcttacagctgaagtggtgccagaggtgttacacgtattaaacaaaaatgagatctattgtgaggcttggtatgctccagcctcacccatcacaatctgcagagtcatcacgaaccagaaattggcttcagaggctgcagccagaccctggcaaaacccaggagtggccaaaagattctctgtttgcagaattggctagtgtcacaagcgggcatgtgatcgagcagtggatcaagagaagaactaatccttaccttttatattttgcgaacacagcaccgtaaagtcttcataggccaagagccagggccgtttcccgggttgcaaaggtcagctggctagggcaacaggcaggatggttaacaggcacgtgtgtgtgcgtgtgtgtgttgtgctgagtgagtgagactagccttgcggatgtgtggtggtattgtggtggacctttactggacactctgccggaaaactgaagtggcacttgtgctttagtccagctggatatccctttcaccctggcaattcatcaaccagaggaaggaaaaataagacgtcgtaaagcgagagaagtcc

SEQ ID NO: 69726 - DNA, 602 bp, Homo sapiens
ggggaggtcaggctccgggagggcagccccggggcctgggaagcctggactgcgcctgagctccggaggatagggctggtggcccgcgtcccctcggcgaccccgcgctgagcccagggtctgtagttccgaaaacgtctgggaccgctgggccgggatccctaccccctcctctcccagccttcaacgcctggaaaccaacgaacccgcccggaacaaaggcaggccggctttccaaaggcaaacaaagaacagtttgtcttttccctccccccaccaccacccgagcaggcggcgggaataggcctaggggtccggatggccccggcgcggcgcggcgccagggcactcccacggcgccccccaaggtcccgctgcgaatgcgcaggtcggggcgccggaggccgcggcagacagcgcggcgccactccggcccggtctccgtggcaacgggctggtgggaggggccgggcggtgcgggcgccttggccgctgttcctcgcgggcacgtcgctatggcaacgatgttactctctgcggccgctttccggctccgctagctcgcctgaccctggccgctcgagccccctcgtctctcactt

SEQ ID NO: 69727 - DNA, 444 bp, Homo sapiens
aatccacctacctgttcatgcacagataaagggataaagaaactgcagcacgcagtggaatcctcttcggccgcagaaattcatgaaatcatgtcatctgcagcaacgtgcagaaacctggaggacatgaccttcaacaaaatgagtcaggcagagaaagacaaacagcatgatttcatgcatgtgagaatgagatcaactttctctctaaacgactttatctcctagaactagaaagttccacagtggtgaagagaggcggggggttggggagtccgggcaggaactgggaaatggatacaatgttacattcagatgacaggaataaattcagctgttctactccacagtagggtgtctagagttaacagtatcctaccatattttccaaaaaaggctgaaaagaaggattctgcatattgcaacgacagagaactaataaat

SEQ ID NO: 69728 - DNA, 1240 bp, Homo sapiens
tgaattcttggcctcaggtgatcggcctgcctcggcctcccaaagtgttgggattacagacgtgagccacgagcccgaccaagtttgtttgtttgtttgtttaaattagccaggcatggtggtcccaggtaacttgcaaggctggggcgggagaatcgcttgagctcagaagttaggattgcaccactccgctcccacctgggcagcagggccaaacccggtctcaaaagcatttcaaaaattaaaattaaacattagaaagaaggacactgcccgggctcagccttcgcctaggaacgggactcgacaggagcgcttcttcctcctcccgcctccaccgctccggccctcgcgggtcccccaggtactcccgttctccaatcccgcgcccccaagcccgttgacctttaacctcctccgggcccccagctccggggcactacggtgaaggaggctgcagggcgccggggcttaccccattcccaccgccgggcttccgggcgactcctggccctgccccgagtccgcgcctccgacagcggtcgccggtacctctgctcctcgaagccccggcgtcggttgtcggagaagtcggcgcggaagcttcagaggccgtccagctgcttgcgctgccacgacgggctctctcggggatacagcatcccgtccggtagcgccaacgtgcagccatacaacagcagccggagagccgcccaggccactgccgccccccaggcgaggcttccccctccccgtctcggccgcagtctacggggataagagctgcgcgggaggagcattgcggcaaggtcgcgtgacgcgccggtagcgtgacgcgacttaggtcgtccgcgccatctttgttgagggcgattgccaggcctggaggggcggggcggcgcctgtggctggaaccctgggctaggcctttagggaagcgggacccccaccctcagccccaaccaagaagggcgtcgtctgctccccatcgtcgtctgctctgtgctggatgatccagggccacaggccaggacagaacccctgagattggtgggatccccgtttcttcaaggggcacctccacttgctttccccagcaggaactagagcaggccccagtggagcctcttccatgactgctggatgcagcctcttgcaggcatgcacgtccttgggaggcggcggtagccctgaccctgggcctctgggacctcgaccctaaccgaggggccagaagctc

SEQ ID NO: 69729 - DNA, 1241 bp, Homo sapiens
ttccccgcgattggggacacgcacacccagggccaccggagggacaggtggtcaggcggactcaggtcacaccggcggacgcggggccactcacctgggccggggcggggcagctcacctgggccggggcggggccgcaggcgggcggggcggggccgcacctgagctgctccaacccgcggccgacgcggccgacgctgcctggctccacagcagctgctgacgcggagcccgcggccgcccgagcacccagagccccgcccccggcccgcgggcacttccgggaccactctaggccgcgcggaggtcccggcgtctcggtggtcccaccgcgccggttgtcgccgcgcgaagccgcccgggccccgggacacaaggacccgaatcaggagagtctctccagtcggcatggtggctctggccgtccccgaagcgcgtgctggacgtgggggaaacagagatgggcaggcgttggcaggagagcagaggaggaaacaggtccggacgggcgggccgacctcgagccgccggcactcggggcatctgcgctggtgctgggtgcaagccagaagccactgaggcagctggggtcttcagggaaaggagagtggagccccagagctgtcgaccctgtcactgtccacaggcaccggggtcctgttaggatccccctcccccaacctgcttcaagggtagccctgttcctgtctgccctccccgcccccacagaaatagagatgagaaggggcaggcgaagaactaggagtgtctgcgagaccatcccaggaccctgagccccccaactctctgcatcccagggctgacttcgacatgaagcgcctcctctcaggcgcaccgggagggaagaggaatgtgttcttgaaatggccgcccccttggccgggcgcggtggctcacgcctttaatcccagcattttgggaggcggaggcgggtggatcacgaggtcaggagttcgagactcagccagaccaacatggtgaaaccctgtttctactaaaaattatccgggagtggtgacaagcgcctgtaatcccagctactgagacaggagaatcgtttgaccctgagaggcggaggttgcagtgagccaagatagtgccattgcactccagcctgggcgacagagcgagactccatctcaaaaaacaaaaaaaaaaaaaagaaaaggaatctccgccccctccttgctgctgatggcaagactggcccctccacccag

SEQ ID NO: 69730 - DNA, 1339 bp, Homo sapiens
gccggaatgtcctcaggcttcacagatgtggcataggggctggcacacagtaggagctcagtgcacaactgctggatgaactcaatgaaggcggcagcatggtgtgtgatggcacggcccacactgggtttgaagggcttgttcttccattctggcaggcttggggacctggcacactactgccaactagccaagttggactcagacccaagggggttagccatgacctctgccttgtgtgatcaggtgcaaacagacaacaacccagcaggactcctcttgcagaatctggaattgctgagaagttgcatcagcaagaggggcaaggtcagacaggatttgaggccgccaggggcacctaagctgtgggtgcagagaatgggatgcagaggtagagacaagaagggtagaggtggcaggtatccctgataagggggagaccatgggttcatcctgggattccaccctcagagtcagatgcccttgggatcaccgactaatgcctctccacctcactctggactgcccaaggaatctgtcctgtgctacccacagtgcagattgcaacagggctcctcctccccacccagggccctgattaaggggatggattgcacactgtagtgagacatccatcctgaccccacctcatcagccagggagctccctgaagacaggccatcgagagaggcacacaacaggctgtggtctaaaataaacttttaattgcacatttgtgtcttgggttatctgtggggtgagaaacctcctcacttccaatcccagctatctgggtacaatctggtgttgtggtctggctgtcggcgaggggtagaggtgggtgcaggactggcccccgagtctgcaccgacctcttcagggcagggagctcagacctgggaagggaggggcagcacaggctggtggtcagcctgcaggtgcaagaggagggttggcctctccccctccccgcctgagtcggggtccactcactcaccatggtagtacttgcactgcttcagggcctcgctgaagccctcacacagggacaggtcactctgagtggtggaacagtccaggaactgcctgatctcgtaggcgcagggccccatctgcaggggctggggggcagcgggggtgggggcctgggggtacagtgcaagaggctgcaggatcagcttggagttggcacctggaggtgcgtttcaaacctggggccacctgcccctccccacatccccagcctgggtgtcccaagggtcctaggcaggctgagtgatccagcagcagaggcggctacagacagcatgtttctgctgcctttttttttttttttttt

SEQ ID NO: 69731 - DNA, 2196 bp, Homo sapiens
ccaggctggtatcgaactcctgaactcatgatccacccgccttggcctcccaaagtgctgggattacaggcatgagccactgcgcctggcctctgctgccttctaatgggcactttgggcgggtgcaggagagggaggagaaggctctaggaaagcccagtactctgcctgtactctcagagtatgagccccacccccacaagttctagcaccttcctggctcagctacactaatcctcatgacccctgacctagccacaaagccacatttggcttacggcggtggggttcctagcaggggaaaggtcatcagggaagtggctccccttcgcccttgcgcccagcggccacagtgcccagacctgggtgtggggagaacaggggctcaggaaatccaacatccctcccctctgctagggtgaggtgaccttgggcgagtctctgagccctcagggcctgggtttcccatctttaaagggctggttggtgtctctccctgggagcttagggaccctggcctcaagggagaggccgggaagcctgcctctaagtgacagtgaactcaagaccagtggactaggacccttcccgggcagagtcctgggctgaagcaatggtgaatacacgcggacactcctcactggacacttgggcagctccctgtgtggcctcgagataatcctgcctcagtttctcttggactcgctgctcacctgctggacagcaggctgggagggctccgagctccccccgctgaaggctccggtcagggcgctgcccatgacgtgtcccacagccgagcccacggctacccctgcggccgtggtcgccatctgagccatgagccccggctggcccgaaggggcgggggctggggcggctgccgagggcggtgggtgcgcgggcgggtgggcagagggcgcggctgggcggctgcgggggtgggaggaagcagggttaatcctggccagaccccaggctggagggctgcagctcctggaaacgacccccggagagatggacgacccacgtctccacacgtgggtgctgcacccccacccctccccccgccaagatggcgcagcagcagccaaggtcactctgcggacgcccttaggggagtgcccacacttccctaaccccctccccacagggcccttgtccccctcacacctggctggccgggaggccgcgctgcggcttccccgaggcatggtggcggcggtgggacccgggcgaccttagagacggcggcagcggtgctgtcgcggggacaaatgccgcagcgcttgtcacagccggcgcaaaaaaggcggggccccgggcggggcctcaggaacacgcccccagcgggaggcggcactgcccccaaccctatcccccttctcccgtcctccggacatctcccttccagcagctccgggtctcggctggaaatgggaccctgctccctccctgcgcctggcaggctgtgcgggttctggggacaggggccagtgtcgcaaagcgccgagggcttaaggagggcgacagtgccttctgttaggaccaccgcagagggcagggagcggagttgggggttgttgcgagccctggaggggagaggagacggggaggcgacgggatggggccagctgggaaggggacgcgaggctccaggctggactccgctctctgccccctcccggactcggctgtctgtcccctccctccagacagggtctgctgaccaccgcgtggcctgggagtctccggtggcctagggaagtgaagcgcggccctggggaaggcctggagcaacccatccccagaactcccacgagggggcgtcccaacccgtcttcgactgttggccaaaatgcgctgccaatgctggcagccttacgcagtgcccgcgggggatatgaggccccccgcgcggccctgaaccccaccggattccccgggccggcccgaccgcccccacctagtccctggccccgcgagtgcaacccccgacactaacggcctttacgcgacatccgagcagcgtgtctatcccaaaggcctaggagcatttgcccggctcggtcaaatctagcgcaagtttgaagcctgcggcctcgcaattttagcagcttcgttccaggccaggtgagctggagcgcggatttagaatgctttcctgctcttcgagaacttgaggttttaatttta

SEQ ID NO: 69732 - DNA, 603 bp, Homo sapiens
cctctcagactctagccaagtctaagactttggacggccaccacccagaggagaaactgagacccagagcggcacgggttggccagggtcacccagcaccagatagggactttgccagccccggggcaggaccctgtctccggccctcgaccccgctgggccgtaccctccccgttcacctcccccacccgggccgcggctgctaggagagttcagaacaaaaggcggcggggggcggggccgaggcgggccgggggtggggcggaagctataaggggcggcggcccggagcggcccagcaagcccagcagccccggggcggatggctccggccgcctggctccgcagcgcggccgcgcgcgccctcctgcccccgatgctgctgctgctgctccagccgccgccgctgctggcccgggctctgccgccggtgagtgcccgccactcgccggccgctcctcgctgagggggcgccgggcacgcgggctgggcccagcggcggatccggaccgaagggggcgccccgggtggcctccagcgcccggtacccgaaacgctttctggttccctctaggcgtgatagacagcgagcttgcagtccct

SEQ ID NO: 69733 - DNA, 1641 bp, Homo sapiens
ttactccctgcattattcaatcatgattgctttcagactttcattagtttcactagcttcgcgctgtaagagccaagaggcagagccacagggctgggctgcctggtttcactccccactgcagggctcggttaagcagagtgtaggctaagagaggaatggagaaggtggaaggtgtctctcccttccaacgctcatctgatgcaccagccaaaccaaataccacctgggcctttgaacattgccaagcctcatccgctgttgtcattttgcccacctccacagctgcagggacagccgtaggcccggaactgggatatctcttcctaggggcctgcctatctgctcagctgcactgcgttttaggggtggggaagctaaggcacgagattggggtcccaaagcatgcccagaccacccaggcttccagatactaggtcctcctccttcaggcctcacttcgttgcttttcccctgggctcagttccagtcctggctgtaagactgggaaagccactgcttgagtcaggacctcattggctatttttgtccgtgagaagtcctctacaccacgacttgggaggcagcctgggagaaagagaaattagtcgtggctcctttaaggggtccgcggaggcgcgcccggccttttgtttgagcggcggcgcgcgcgtcagcgtcaacgccagcgcctgcgcactgagggcggcctggtcgtcgtctgcggcggcggcggcggctgaggagcccggctgaggcgccagtacccggcccggtccgcatttcgccttccggcttcggtttccctcggcccagcacgccccggccccgccccagccctcctgatccctcgcagcccggctccggccgcccgcctctgccgccgcaatgatgatgatggcgctgagcaagaccttcgggcagaagcccgtgaagttccagctggaggacgacggcgagttctacatgatcggctccgaggtagcccggggcgcgttctcgccctccccgggctcggccccgcgggagccccggggcgggcccatgcgccgagagcgcgcgtctccattcatcggggcgggcgggcgcgcgcgcgcgcgctcggggctgtggggcgtggcctagtgggcgtgtcgggtgtggcccccgccccctcatcgacctgggatttccttacttatttcgccgaggtccgccgccttcagtgctgccaagattttggcgccgcgaggggccccagtggttccgcgctgggttggtttccagtcagacgcaaagaaacgggatattgagttagcccctgcgacgcttgggggactgcactgctgcctttgaccctttttagatgtcgtaaatttcacgtgcacccctccccgtattgctacttgtgggaacctcaaatggcaggctggaaaccctggacttagtgagggctcatccccattgtgtttgttgcctcttaggtgagcagtggaggtcttttgacctttgtttaccggtgaagaaacagattggaggaagatgtttgcttttgggtgaataagggccccatgcctaagctagatctttcagcagttctgaagcgattgacactttccatatctgtgaactgattctgaattattacaggggaaagagcct

SEQ ID NO: 69734 - DNA, 1416 bp, Homo sapiens
tgctgctgcctgagccttggctccaggtaggaggcacctgtcccaccccgcatggagcagagaggagagccacgcaggcgggccgaggccggatgggactggcgtcaggcttctcagctccccagggtcctggcccacccggccccgcgcggctggatgtgaggacagggcaagtgaaatcgcaccggggcgggtggcgcagggcaggaggctgcaactcggtacaacggccaggactggagcgcccaagagctgaggggcagggagggcaaggcagaaaggggagcctccccagatgaagtgccccctacccagcggcgcctgggcgcaggcctcctttgtgtcaccgccaccactgaaccttcgcgagtcggcggcaatcgctggtgctgggttccgcagagcccgggctctgtcgccccctcgcggccggagccggtctgggcggcgtcggggaaatcccgaaaagcctgcggggaagaagctgaacgggggcgggacccgggcgcggtgagcccattcattccccgagggctgggaaagtctccaccaggagacggaatccctgggatgtccccaacgctgggccctgcctccctaggcccaggtaacaggcattttctaagacagttcagggacacggaggcaccccgctggaagagccggtgggctcccgggtggggtacgggccgggtgggagtcagtatcaccagcgggcttcgctggattgattgtttttatttatttatttttaaatatttatttatttatttttgagacggagtttcgctctgtcgctcacgctggagttcagtggcacgatcttggctcactgcaacctctgcctccccggctcaagcaagcctcctgcctcagcctccccagtagctaagattacaggcgcccaccacacacccggctaatctttgtatttttggtagagatgaggtttcaccaggcagacctcagttgatccgcctgcctcagccttccgcagtgctgcgataacaggcaggagccaccgcgcccggcctgtattgattgtttttagtttgagctgcgctcctcccttggcaatgtgaggaagaccagctctgccagccgggctgtagggctggtgcgggcaccggcttggcctcacagagcctcagggactcccctcgtaaatgaggctgacatccacatatgggtggttgcacctagcactgcacaggacggatgtgagcaccaggctgctacaaatacagatatgactttcacatgcccaaggttaaactcccagtcaatgtttgctgaggcgaaacctagagcttcctggccaaaggataataattaatgtctggggagcccacacatggggacctgtctccaacgagatgggggtggctttagggcatccaagaggcatttcaagga

SEQ ID NO: 69735 - DNA, 2268 bp, Homo sapiens
tgatccagttgctgccttgtcctcttcctgctatgtcatggcttatcttctttcacccattcattcattcattcattcagcagtattagtcaatgtctcttgtatgcctggcacctgctagatggtccccgagtttaccattagtggaaaagacatttaagaaattcaccaagggctctatgagaggccatacacggtggacctgactagggtgtggcttccctgaggagctgaagttgcccagaggcccagagaaggggagctgagcacgtttgaaccactgaacctgctctggacctcgcctccttcccttcggtgcctcccagcatcctatcctctttaaagagcaggggttcagggaagttccctggatggtgattcgcaggggcagctcccctctcacctgccgcgatgactaccccgccccatctcaaacacacaagctcacgcatgcgggactggagcccttgaggacatgtggcccaaagacaggaggtacaggggctcagtgcgtgcagtggaatgaactgggcttcatctctggaagggtaaggggccatcttccgggttcaccgccgcatccccacccccggcacagcgcctcctggcgactaacatcggtgacttagtgaaaggactaagaaagacccgaggcgaggccggaacaggccgatttctagccgccaagtggagaacaggttggagcggtgcgccgggcttagcggcggttgctggaggaacgggcggagtcgcccagggtcctgccctgcgggggtcgagccgaggcaggcggtgacttccccactcggggcggagccgcagcctcgcgggggcggggcctggcgccggcggtggcgtcacaaaaggcgggaccacagtggtgtccgagaagtcaggcacgtagctcagcggcggccgcggcgcgtgcgtctgtgcctctgcgcgggtctcctggtccttctgccatcatgccgatgttcatcgtaaacaccaacgtgccccgcgcctccgtgccggacgggttcctctccgagctcacccagcagctggcgcaggccaccggcaagcccccccaggtttgccgggaggggacaggaagaggggggtgcccaccggacgaggggttccgcgctgggagctggggaggcgactcctgaacggagctggggggcggggcggggggaggacggtggctcgggcccgaagtggacgttcggggcccgacgaggtcgctggggcgggctgaccgcgccctttcctcgcagtacatcgcggtgcacgtggtcccggaccagctcatggccttcggcggctccagcgagccgtgcgcgctctgcagcctgcacagcatcggcaagatcggcggcgcgcagaaccgctcctacagcaagctgctgtgcggcctgctggccgagcgcctgcgcatcagcccggacaggtacgcggagtcgcggaggggcgggggaggggcggcggcgcgcggccaggcccgggactgagccacccgctgagtccggcctcctccccccgcagggtctacatcaactattacgacatgaacgcggccaatgtgggctggaacaactccaccttcgcctaagagccgcagggacccacgctgtctgcgctggctccacccgggaacccgccgcacgctgtgttctaggcccgcccaccccaaccttctggtggggagaaataaacggtttagagactaggagtgcctcggggttccttggcttgcgggaggaattggtgcagagccgggatattggggagcgaggtcgggaacggtgttgggggcgggggtcagggccgggttgctctcctccgaacctgctgttcgggagcccttttgtccagcctgtccctcctacgctcctaacagaggagccccagtgtctttccattctatggcgtacgaagggatgaggagaagttggcactctgccctgggctgcagactcgggatctaaggcgctctgcccgccggaatccgttgtacctagggccaccacgtggggtgctggaggtgagccgaccacggaagagggggaggaggagttggagttgggaggagtccgaggtcttctaggcctagacctttctctcagccccaccttccccagccttcttgttgggcagagggtagccagaggacagaaagatcccacccagagccactcactgccatccactttgttaggtgacttcaggagagttttcaggcgggtgggtgggggaggtgcagagttcttggtcataccg

SEQ ID NO: 69736 - DNA, 1694 bp, Homo sapiens
taacatcctcttgggcagtaagtcctaccattccagacccctcatccaggcctataatgattccagcctgtaagtgctagtggggctttggcattaagttggtccccacctctgtaggttgtgttaataaacctgtgttgtagagtggtcaactctcttgtctttaaccctcgtcttttttcaaaaacctaacactcatgtgtcctctccctcaccttctcctggcatcccttgccactgtccctctgtccctctttcccctccttaacccaaagggaaatctctcccaaaggtaaaagtctcccaggggttaagagggagcttgaggcaccagaaagagctatagtcacagccacctgtgaaagccatctctgaggtcccttcctgtcacaacagctgggctcctgactcagaccaagacagcttttgtttcttttcctttctagccccccacttcccacccacctttctgctttctcatatgggctcattatggtttatagggctggggaacgttgcctcttctgccctccatttctcccatctcccttctttcccctccactttttctgagtccacttctcttcccttcttcttccttccctctgggacgctgcacagttccttccacccggcacggcctgggactctagactccctctgaaggcacggaagtatttccttccctccctccgacccgatctttctgcccttgattcaaaacaatctgaggtccctaggcccttccctttccgcctctgcgctccccatggggtccggtgtagttttcccgccccttccctgcagctcccgagaccacccggacacaacggagccatccagcgccctcagaggccctgggcacacgggcagatggtcaccgcctcctaagggagcagcgcgcgcccgttgctcgctgcccgttggttgttgctggtagctccggagggcggggttggcgaggaaagtgagtccgtatgtccccagcatgctccgcgcgggggcggggctctaagggggcaggcgaaggcggaactggcgtggtcaaaccaacctatcagcctccagcatgctccgtgtgggagcggggttcccgggggcggggcttggtttgtgtgcccttccggcgtttcgcccctgcgttctctgagatgctcccacgcagatgtatgggcctaattcgctaatatccactctatatcctgttccatcctcttgtaatgggcgtttggagtgttgccaattttttgctgttataatgattgtaatagcatattaaaaaacttgaacatagtttgattgtaataacattaaatatagcatcttaaacatacagtttgagcgtgccaacctgatgggtgtggaatgtaatattcattataactttgattttcatttccctactttgagtaagtttgaacttctctttatgtaattattgactactctgttttcatgttctgagaattgcctgtttgtattttatgcccatttttctattgggttgtggtttttattgattggtagttctttataattttatggataccagtcttttactagttcagcgcattaattgcaaatatttgctcccactctgtggcttgcttcctttccacccctaattcctagggtgtctttttgaagcacaaatctaaaattgtaacacaggcgactatcaatcttttcctcta

SEQ ID NO: 69737 - DNA, 935 bp, Homo sapiens
tgtggagaagagagtccgactacgagctggtgctctaagcctccagcacgctaggactgacgacggggatccggaaacaacaagctccactcccgcaacacacacacacacacacacacacacacacacacacacacacacgcacacgcacacgcacacgcgcacgcgcgcacacacgcgcacacacgcgcgcacgcgcgcgcgcgccgcccaagggtagccgtctgcagggccccagctaagcagcccgcggagagcgagcggcgcgtgcgcccccgctgattggctggcacaaccggcaccggagccaatgggagcacgccttgttgtcaggcgcgcagccggacggcgcggtggtcgggacagactggccgttgctgtggagacgcctggtgagttcctggaaggctggtttgaaggcggtgccggggtgggggtgaggctcagcagagcccggggcacaggccggaggggctgcaggcgcgaggctgggttacgtgaggaagctgggggtttcgcgggcagctttagagccccagtcagggaaaccgaggccgggcttcctggctgcctcgcgagcctcttcatggctctcgccgccgccctgaggtgcctagaatgggttccggcctccggggaggttcccagtaaccgcaggagccaccattgatttggcgtctgctgggtgcaaagcccagcgcgctaaccctttactcgcgacctttcgcttcaccttcacagcagccctgcgaggtgagtgttgttattggtgccatttacaggggtggaaactgaggccgcgggtaggtgaaatgatttgctccaagtcacccagtgggtgagcgcgactccagactgaaaattttgaccgttctgcttcactgcctccccgcaagaggcgggccctggccagatggaactcacctggcattccc

SEQ ID NO: 69738 - DNA, 726 bp, Homo sapiens
acttttgccatttccctgggaagttcaagtggctgtgccagtgccgtgctcctcccgtccccggggtgcatattcaaggagagatctgactgtgtgtgtgtgtgtgtgtgtgtgtgtgtgtgtgtgtgtgtgtgtgtgtgtgtgtgtgtgtgtgtgtgtgtgtttgccctctgcttgtgtcgcttccaggcagtgatgctggactccacagatgtcaacctctggtataagattggacatgtggccctgaggctcatccggatccccctggctcgccatgcttttgaggaagggctgcggtgcaatcctgaccactggccctgtttggataacctaatcactgtcctgtacaccctcagtgattacacaagtgagtcatgctttgatgctttcttccatgtgccagtggtttttggaacagcagaggaaaggcagtttgggtaaactgaaagccaaagttaacactgaaggggtttgccagactgtcagggagaatggcaatgttcttagatttctgctttattctgcatctctttcttgatttgttaaatgccttgtagtaataaagtagcatgttttctgaatgattttactttttttttttttttttttttttgctttgcaaggttttgtttgcttgacagaagtggctatcttatttcctccctgcactgtcccattttgtgtgtcttagtctgtttgggctgccattaaaaaaaaatacca

SEQ ID NO: 69739 - DNA, 540 bp, Homo sapiens
aaaataaagaccaatgtgttgaagaaaaataacactagccttatgtttgaaacctcgtgtgccctcctgaatccttctgtgcttctgttcctcaggaggtaaactcttaccaagagcctgccagggaactggcagctgctgggtgctgggcagttattcaacctctctgagctcagttcctcatttctaggatagggatgaccaatgtccttagctcagagtcctgttgtagggattacacaaggtaatgtgtgttggcaccatgcctggcactagcaggtgctgtggaggtactgctgtcatcgttgccaccatcctcaggagggttgagttggcaccgagataaacatggaagataatacgcaaaatatgcttagtggcattgagtcctggtcccttatgcttcatcctactaatcacattgtgttttgtatctatggggtacttccctttcaatttggaaagagagtccagtcttctcccaggctttttgcacagattgcacgaagcattttaatcattaacattgttgaactggga

SEQ ID NO: 69740 - DNA, 603 bp, Homo sapiens
aaggacagctcggctgtggccagtcgtttcccccacacacctacacttctgcctgccacagggcactactggcacaactccagggggcgccattcacataggcaccgcctgcagaggggggatataaccctcacacacagttggccaatgccatcccggcctgccgcactcctggccacccctacaccatgctctctggggccccacagcttcctgcagtgagagctgcacccactttgcccggcagcggtccacagcccgccaccagcggccagtccagggaaccggagaggattggccggcaaaagtcagttgcgctcctgggcccgcttccagtagagtgccggcgccccgtccggccgcgcctgccccgccccggcccgccgcgagcgagagagcgaacgagcctccgcggccatggcccggcgctcgccctagctccactgcacagatgccacggcggagccggcgggtaggaacttggcgggggcgggggccgggactggggccgggactggggccggggctggggctgcgcaaccgcttcgcctccgctgcccgtctgggtctccactttgctggcgcttttgctcaatcgtcccc

SEQ ID NO: 69741 - DNA, 632 bp, Homo sapiens
cggcccgttatgtgcgctgggctaggaccttgccccgcagcggagtgggaggagtgaggttaggggtaacggttgcatgggatggggggtgggcacatagagcctacagcagagttggcggcggggctctcccatgcacttggttgtttgtcgtttctgcttttcccgggagggggaagggaggaacagcccggcagttctggggaccttagcgctccacgtcttatttggcaggagaggctggaaacgagcgggcgccagctgcaggcaaattgcaggctttcccagcccttgtctgcagagagaatcattacctgtggatggcgcggggaatcccttgccctcagtagccccgcctggagagacaggaccgcgttgtggggggtggggtgtaggagtgggcggaggccagggcgcccctggtggcctgtgtacaaccctgcggccagagaggcccgccctgataggtttgtggtagaagctgcaggaacttcctgtccctaggggtgttcaacctggcctgcttctggggcccctttcctcccaaccttaggggaggaacaggactgcgggaggggccagaccctcagctcctcagggcatcaggaagatagggagctgctggtctggaa

SEQ ID NO: 69742 - DNA, 2384 bp, Homo sapiens
acagtcaaagacaggtttattctccagaggggcttctggctgatttcagtcaggggcactctctcttacaaacagtcatttgtagttttctttctgtgaacagtgaatcacatccctgtgcatatttctactggatacttggtctttaatactaatagtatttattggttttttagggttagagggcttatcacaagcttggaatgtttctgtgtgggggagaagtttatgggggggttggaatgtctctggtcccaggggaggttatcttggggctaatgtctctctggccggaggggaggttatctcggggctggcatgtctctggtcagggagggctttagaatgtttctggttggagatgttatttgtggtttatggtcatgctgaccttagccattaggctgatgccctttggatttaggcagtttttgatcaaggtgaactttaaaatgatggtgcttgtccaagatggcaatgctcctgctctgtcaatgacagtcttatgtcctcctttccaacctttatggcttttgtttttctcaccttattacattggctaaaacttcccctgtaatactggaaggaaataatgaaataattcttagcttggtttcaatctcaaaagggaggctttttatgttgtacctttaagcatgacatttactgtaggtttttgtagccacgatttatcagattaaggaagtttcctttcattcctagttgctgagagtttttattgtaactgaatgttggcaaattttatcaaatgcttttctgcatctactgagatggtgagtgacttttcttctttattctgtgagtgtggtgaattgtgttgcttgattttcttttttcttttctttttgttttgtgacagggtcaggccctgtcatccaggctcgggggcagtggtgtgatcatggctcactatagctttccacctcccaggctcaagtgatcccccaacctcagcctcccgagtagctgggactacaggcgcatgccaccatgcccagctaatttttgcattttctgatagagacagggttttaccatgttggctcggctggtctcgaacttctgggctcaagcgatccataggcttcagcctcctaaagtgctggaattacaggtgtgaggcttcattttctaatgttcagccaatcttgcattcctggaacaaacctaaattggtggtgacgcatattttttcctttcaagccctggtttcttcatgttttaagggctatgcatctctgttcatgaatcaaatagccctagacttttccttcttgacatttttttggccaggttttgctttcaaggttatgctagcttcttcaaagacgttgagcaacctttcctcttttctgttctctggaagtttgtgtaagactggtattttttctttcatcagggtttcaaagaattcactgaggaagttctgggctcggagtcacttcctctggccctgtgggatctcactgttgtttgaattggcaatgtttatttatgagtaggcttgagaactttttgtctgttgaaacagccatttgtagttttctttctgcaaacaatgagtcacatccctgttcatatttctactggatacttggtctctaatattaaatatttaagtatttaaatatttcaaaaaccagccccacatcatgtattgaaactgtttttctccaggtttttcactggtcttttgttgttgttgttgttgttgttgataatagagatgagatcttactgtgttgctcaggctggtctcaaactcctgggctcaagtgatccacctacctgaggcacccaaagtgctgagatcacaggtgggaaccattgtgttcagctttatgtaaaaaaaaaaaaattctgaaaagaccagtgaaggctgggcacagtggctcacacctgagatcccagcactttgaaaggcttaggtgggtggattgcttcaatccaggagtttgagaccagcctgagcaacatggcaaaaccccatctctatttttaaaattatttttaaatcaaaaatttttggctgggggcggtggctcacacctgtaatcccaacactttgtggggctgaggcaggtggatcacctgaggtcaggagttcgagaccagcctgaccaagatggtgaaaccctgcctctactaaaaatacaaaaattagccggatgtggtggtggacgcctgtaatcccaactacttgggaggctgaggcaggagaatcgcttgaacccgggaggcggagattccagtgagctgagattgtgccactgcactccagcctgagcaacagagtgagactccatctcaaaaaaacttttaatatttaaataaaaataaaaattaaactaaatttaaatttt

SEQ ID NO: 69743 - DNA, 2132 bp, Homo sapiens
gtggcagggtggcccggatgggggccgatggaactcgaactcccccagaatttctttaatattttatatatatatatatatatatatacatatatatatgtatatatatacacatatatatacatatatatatacgtatatatatatgtatatatatacatatatatatacgtatatatatatacgtatatatatatgtatatacatatatatatacatatatgttgctcgcttattctttttgtctgttcccttatgtaccgggagtgccaggaggacagggctttgtgttttcctcactgctgtctggctcatgcatagcacagtccttggcacacggtaaacacgctgaggagaacttttgggactagcggactctgagcatcattccgctgggcccagtggggcctctgaagggacccgccttgcccggctccagcccaagacctgaggcatgcgcaccggctggccggctactttcttgaccggccaagtggcagagcggctgcgcgacccagtgccgagacggacgcgagccggagatgggggaaggggagggggtggtggtgggggacggcggcgcctgcgcagtgaaggaatgtaggcggggcctccacgacgcctgcgcagacggccgcagccctgctgggcgcgaaggggctggccaagggcggggcccgcgagggaggccgggcggcccggcaagcggcgctgcggggtaggctgctttcctgaggccggactcaacgggtctcggctgagccaccgggtgagctcaccgcccagcccaaaccaggagattgcgagggagcgatgcggtgcagcgcggtaagagcagcagccgggttcccgcagtgttcgctggcgggttggtttatcgcctcagcgccgcccgcgctgccgcgcccgggcgtccccgcagaccccggcaggcccagcgcctgcgccgtctctgctcctgggcccctccagtgtgtcccgcgcctgcgcctttcccttcccgcgccgtcctcgttctgggcttcggggcttctggaacaacccgcaggcttcgccgccgagacccactggccttcgtccgttggtgttggggttcagctggttctgggaccccgcttgcggcttgactgtgtgcagacaggccgggtgcgaccctcgtgcttgcctttccgccgctccgggagaggctggggctgccgccccatcgcccgggtcccttgcctggggcggggacagcgttgttcagtggccccgagggcgcagagcggaggagcaggggccacaggcggcggaccccgggcctgctgccggtgctgcttctgctgtggccggcgcccgaggcggacggaacgtccttttttcttgagacgtggttaattgcatcaggttggatgtgaataatccggtacctgtctgaggaaattttgcgtttccaggaatttggtaattgtattaccttaagtagttaagtctaagacatcatagtcgcggcacgttgggcaagctgccctggagatgacgaaaagaaatcagtttccagtagttttagcccatttacagaacacgcaaaaattctgtgatcattcaaatgcggggaaccttgatttgttgatatccttgatcatttgtccaagtaccagaagggcgaggaaaagattcccgtgaacagcccaggtgatttcagggaacagtgttttcttttgtcaaaagagcctcttaagccatgataatatttcccaagcttataacagatacaagcctttaaaaaatggcatttgctgtcacccagtaggacacatcttgagatgaaatcagagctgtaggctttgtagacaacagcagtcatttctggtggcttcagggagtggagggggactgcaattttgccaatgtaggtgataccaaagggactatagtaattttttcttcgtaattaaaaaccaggccaggcgcggtgcctcatgcctgtaatcccagcactttgggaggccggggcgggcggatcacctgaagtcaggagttcaagaccagcctgaccaacatggtgaaatcctgtctctactaaaaatacaaaaagcgcgcgcctgtaatcccagctactcaggagggtgaggcaggagaatcgcttgaac

SEQ ID NO: 69744 - DNA, 2004 bp, Homo sapiens
gcctcctgggttcaagcgattctcctgcctcagcttcctcagtagctggaattacaggtgtctgccaccacacttggctaatttttgtacttttagtagagacgggttttcaccatgttggtcaggctggtcttgaactcctgaccttgtgatccgcctgccttggcctcccaaagtgctgggattacaggcgtgagccattgctcccagccaattataagctttttagaaaggattttttacattgttatatttgaaccattaatgaagtgcaaaatgaaatgtttcatttagtatttcacatcagaggttgttataaatgtacaaatagattgatgttttgaattaaaactatggctgacagttaattttatcgataccaaattgtgcaagtttaaactgcctgccaagagtctgagcataaagctgtggtttgaaaggatcctgaataaacgttttctttttgtaaatattcagaaactttggctaaggaggtagtggccagaggagacgcaaaattttttgcattctggcagtttgaactttgggaacgaatgtgttttggactaaatctggaaaaatcacttatgtactgttgccagacattcttttaggctgtccttttccaggcttgtcacttgtctggaatgttaagtgttgtcagtagtttaacgtcctttccagcagcttgcattaaagtgagagaagatctccagaaatggatctgaagaggtcttggcataagattaggacttttatttcattattttttaaaaagtagaaagaaggagaagacttacatggttctaagtttaaaaaaatccaggaagcttctaatcgtttctaattattttcttgggttaagcctcatagaataatagaaatcataagttagtgtgagtgagcttttcgttggccaaaacaagtgggaatacagttgtgctgtttagtggccatttgagttggtattactgataactacctcctttttttttttttttagcatcctatgtgtagttgtggttggtctagcatcctatatgtagttgtgcttgctttcctctctaaccaaagtttgtttttcctttctgtccacgtggggttattatgagaatcagtgccctagtatttgtgcagtgtgggctttccacattgtctggctggtgctttccaggcagcttactttcatagttaaacgacaatggcaacatcaacaaagtgtctctgcctcctcattacccccggctctctccccttcacacatttttgagatgttctttatccttttctttcctactcagctttttattccactccactgcagcatgacttggcctccatccctccactggggattcattggccctgctcaccatcacctccttatcttgattaaagtggccactcaggcgtgactgagcagtctttctcctgtggattcaccttgagactttcttaactggttggacaggcagaaaggagggaattgtgagaagaactgggttaaagcagaaaggagctgcattttccttccgtggccatgaggctgtttaagggggagtgcctacctggagtggggagaggacatagagtacagtttctttcgtcctggagttggaggtagaaacaggggaggtagatctggatgccatctttcctcataagtcataaccgatatcgttgattcctggaaatgggaaactaccctgttaaatgtactacatgttacaattttaggcatagtataaaatctgtctttaaaaattaagaaagtactgtcttataaaaacaagcatttaaaagttgtgcctcagtcagtaagcattgaagttttttgagcagtactggacttctgtctggattcagactgagcagagaatcacatatctgaaggcatcttacccctgcttctctctccctcctgtctgtttcatgcaccttgaatatatgccaacttgcacatgtgcagttttttgacatgacaaggctcagactttccctctt

SEQ ID NO: 69745 - DNA, 621 bp, Homo sapiens
atggttttaaatagcagtacattttggaaacatttgaggggaaaagattctaatggaggtgaataggaggaactgaaagaagaaagtagtgacagcaatcaagatcctggtgtaactacagaatggagagattggggactgtccctgtagttgccaagaggggttcccgtcccaccctgtgccagggctgaaggtgcttctcagccagggaacggccttggagctctcttgtggtatccaggacaatttgtgttgtcctctaatcagggtggatccttctggatgcagtatgacaataagataaatttacaatgtccttttggtatatttctgaaacttgattggtgtgtttttcatgggtggatggttggtgagggtggggtttctgaaccactgaaataagttgctgtccctaaccttggactgttacaccatttttcctttgacctttgatctgtgatgaagtaacttctggaagtgggatatcaggagttatgttcttgttggtttacacatgttattttttacaagaactctataaactagattttatcagttcttttttataggagaagaaacagatttgcagatacataaagtgattaagtgatttgtccagag

SEQ ID NO: 69746 - DNA, 832 bp, Homo sapiens
aggtggcattttctgacctaactggttattcagttgctggggctctctttggcgtggagtgcctgtgtgactaggtgacctgttatttatgtgactggaagaacaggttgaaatgttggcattagatgtgcactgctgccttccttctgtggcctcttcgtcagaggcaggcagtgtctttggaggtttactatggaatgtgcactgagcaggcatgttacaccttctgagtcttggatctggagttgctgggaatttggtcttgaacagtgagtacttttccactgtaaagcaaaactgtacacttactcttgccagcacatgccagctgtccatagctttggctctgctgcattaacaagtttaaatagggtgtgtgtgtgtgtgtgtgtgtgtgtgtgtgtgtgtgtgtgtagcaggaaggtcaggacagaggtaaaactatttggcaacacttttcctggagtggagcaattgccttcacttaagagaggggaaggaaaaagtcattaaatggagattaaagtaaaaacagagaaggaaagaagaaaatagtgggaaaaaaatggaaaacattgaagggctttgagaccccacagtgttattttatttttctaacttttttttttcctgtgcttctctggcacctagatacttcctacaatttgaattcctttaactgtcatggagcattgatgattaaccagatgaatgaagtgtttggcttaattattgagacagcatgtgcacacacccattcatttatggacacccacacctgtgtgtctgtcactgcacaatattctcatgactctcttcttgtagtgacagg

SEQ ID NO: 69747 - DNA, 2097 bp, Homo sapiens
gccttggcagccacgttagaggaatacaaagccacagtggccagtgaccagatagagatgaatcgcctgaaggctcagctggagaatgaaaagcagaaagtggcagagctgtattctatccataactctggagacaaatctgatattcaggacctcctggagagtgtcaggctggacaaagaaaaagcagagactttggctagtagcttgcaggaagatctggctcatacccgaaatgatgccaatcgattacaggatgccattgctaaggtattgtttaaatagattaaaatgttccggacagcattaggcagctgccatgcacagtgtttactgagaacctgggttactggtttggtttggtgtgttattagcttttttttaaaactgatatttttaaaacttgggaatggtttccttttattggaatagtgtgaaaagtattcttaagataatgtcactttctctcacttgtattttgtttctgttttcctgcctgtgagaggatatggctggtattacagctaaaaccagaatttgtccctagttctgagtattcctatggagcgggtcatgaaattttacctccccccgcctcatctcgaatctgttttggtgtaataggtggagagtcagtattccagtctgtagcatcagcagtgcatgtttcctcttatcttgctatagtaatagtttttcaaatagagatctgttgatagttaaaaaatatttttggcatatagaggctcctgtttctcagaggcctgtgatttattgctggcagggaccttagcaattatcagtccagacccttgttgtacatgcctccagcataatagtgaggactcagttggaactgctacccagggccactggcattctggccagggatctatctataccccatgtggttgctgatgaactgtttatttccatgagttattctagttatactagttattctagcttacattttatttatttgttattttagtgcaatgattttaaaataaattttcatatatctttggctaaaatttgagtaatttagattttagggtgtttttagtgatcacttttaaagttacagtttaggagatttgtattagttcttggcacatacatgttgagaggctactgtgaactaatacttttgtaaaaacactatttgagaattgttttccctttttcagtttgatactggaaccgtcacaaatatgacatcatttttgttaggacaacatgttaatcattaaacaaacgtacatgctttcagtccaaagttaggagaaacgaaaatttccaaagtttccttgtaaataatcaggttaagttcaatgatacatcaatataatttcagtcagtgttacagcaacagtttaagtgtattagataaaatcttaccatggagtgctttttcatactttttaacagttattacacaggttgttttagtttatccatagtgcctcatacttagctccccttggaaactgtgtgtacctcaattctggaacgtaccttagaacaactcttaacttttctaaatctgcatcgtcaattttacgtaggtagaggatgaataccgagccttccaagaagaagctaagaaacaaattgaagatttgaatatgacgttagaaaaattaagatcagacctggatgaaaaagaaacagaaaggagtgacatgaaagaaaccatctttgaacttgaagatgaagtagaacaacatcgtgctgtgaaacttcatgacaacctcattatttctgatctagagagtaagtgataagaacttttcattcttttttgtcctactcttttaaacatgcggggataatttgcatttagtaataaaatagggctgggcacggtggctcatgcctgtaattccagcactttgggagttcaaaaccgaaccaggctgggcacagtggctcacacctgtaatcccagcaccttgggaggccaaggcaggcagatcacttgagttgaggagtttgagaccagcctggccaacatggtaaaaccccgtatctactaaaaatacaaaaattagctgggtgtggtgccaggtgcctgtaatcccagctacttgg

SEQ ID NO: 69748 - DNA, 1502 bp, Homo sapiens
gcctccttcttgctccctctttaccatgtaagtaccaacacctgggctccatgatgagccaggcaagactctccctgaaaatgtactgcttccccttccttccccttccttccccttccttccccttccttccccttccctccccttcccttctctcccctcccctgacctggagcagagattggccctgcttcagggaggagataagcactgtagtccccagggcagcacccttagatcagcagctagagggcctggccaggttaccccacaggcaccaccggccccaggcaggtgcccattcatcactcccagggcattctgtgtttaacagccactacccagagatatcaatcaacagtctcgatggtttttttactctctttcagacattatatcttctcccaccatactacacagaaaaggaacctcactcacctcactcaggctcccaaactctgccacagtataggggggcatcgtgagccagggttttgttagtaactcactcttacctcatgaggctgggctgtgatccccagcaggtttcattctgagtgcactgggttgcagcttaacagtgtggtgtccttgtgaagctggaggaccagtgaggaccacctctgcctgaaggtggacctggggacagcgctctgcacggctcagacaggcatgaggaagtggatgcttgcatgtgtcagcagagagatgaatcagagcccttggcttcttgccctgtgtccataaaagtggcatttccttaaatagaccagaaccttaatagctatttaaagagcatgtggtatttgggagtatattttatggcccttaattaaacttcaaacaaattaaaacatttagagatcttttatgacatatttttaatcttttttgtggagatttgtataatctcttggctttcacatcccaccctaaggccacagacagaaggcagggtcacatctacagttggggtttccatccttggtcaagaagcagtgagtggaaaccacccagccagtcccttggaggggtgaggctgtcaggagtctttatgagggtagaaaggacagcaaatggcactgtgaaacaggccctgtctgtcccctgtcacatctcttagttgacatttcctggatgaaggatgtgtgcccttaggagaaaatggggcagagcttctcattcgagtctgtgcagaggccgttttgaaagtttcttctggcacatgtcatctctcttgttttgtcgaccctaatccaaacatggaattatctcgtagagtagaaaagctctaaattgacctgaaaaaaactaagtgcaaaatctgaattcatcggtaagaaacttgcattataattagtaagtaatatgttttctatgtctctattattttaaaaaagttaatttttttcttcttagattgccaccattgcctgtgaatagtgaacaatagaaattccttccgttaatgtgcattttcccctcaaataagtgtgagtttt

SEQ ID NO: 69749 - DNA, 2408 bp, Homo sapiens
caaccaggcttgagttgtatctaaagaaagaatttaaaaatatttcaattaggctctgtgtcagtgggatggcctctacatgttttctttggttttattttctcctcactctccactggtctctattatcaattctgtttgcagcaccttttccacggaaatgaagtgtgattataaagtaacaatgctgaagtttaagcatacaagaatttatccaaaactgattccaaaaatgttgtttttgctttaacacttttctggaacttctgtgttggagttgctttcagagtccatctacaatcccaacaaggaagccaattatttcacagtcatactttatttgtgaacacctctaacctgatcatccattaacttagctcagagttaatttctgttttttcaaaagtaaaatctaccctcgaaaaaaaaaaacacagatttcttgagtaaccaacactaaggttattccaggggttgtgctccttaggcaacttcatgagaggctttcctgtaggggagacatggagaattaacatgtctgagcccttactgagagctgggcattggactgctaattatttcccagacctgcttttcatgtaatccttgaagcaaccattcaagcaagtactgtcatctcatgataaagaataaaagaaagttcaaaaaagtaacttatataactaatacatagcagagttagaactttaaaaacacaattttgctactgtaccatgctgcttctaataaaataagaacaccgcttcccaatgaacagaaaaatgatcagttaaacagtatcattactatataatcctatattatatgcctatagctttaatactcttttaacatcatttggttccctgccactttctgtactgattaactcaggaaaatactgagagaaatatgagcaaccagccatgagagtctgtcatagattttgagttaagtctatctgatagaaacagaatgtaagaaacagaaatgtctttggagcatcaggcttgactctctctaattatactagaataatatgggttaagtacattataatccaggtcaacaagcaaatagtatttcctttcccttatacaccttcaaatggaggctactgtatatttaccaccagggctttattcatgcactcttagttgaacacagataatacgttttacttattcctcctttgaattctactcatttatcactggaacactatccacatttatatatagcagactcaaactatcttaaactgaattggaagactgcaggcttgaattatttaaaagaaaaacatttccacttgtcctgccaagtacttgatcaatgctcacttaagtgatgtaatcatctcctctcattttgtaagctctattctctctcttcaggtgactaagcagtctgcaatcttccttcctttaattgaataattttcaggcttgtgtcttatccttccggtttttacaaattcatgcaatcattttctcctgtgactacagtaaagggttttatggctatggtcctttcgttagcacacatgtctctagaactctctagatctgctacacatacactgtctcaacgcagactttcatctactcttatgttccagatagactagctactctgcaatggctatctttttctgcttgtggtcttgcttttccttctttttgattgaccttcctgtgccttccacacatccctctggctcaggtattttttttctcctaactcagatattttttttctccatacctctcagatattttttttctcctacctctctggacctgcacggtacttttggtaatgttatcacctactattgtaaacacagctactgtttatcccacctctggacctgcacgatacttttggtaatgttatcacttactattgtaaacatagctactgtttatcccacctctggacttgcatggtacttttggtaatgttatcacctaatattgtaaacatagctactgtttattaagcactaaccatgtgctgtgtttggagccttatgtatgtaacacaaactatccagcttttcctcctacccctcacaatgcactttccagcccctataaaatctgtcacttacaggcctggcacagtgcccggcacatagcaggtgctcaagaaatggaaggtattattatcataattatgagaagaagcaccatatgacttattcatgtttgaccccaatgtctggttcgtttaatatttgtttacaaaactaggcaatgggctgggcacagtggtttacgcactttgggagaccaaggcgggcaaatcatttgagatcaggagctcaagaccagcctggcaaacatagtgaaaccctgtctctactaaaaaaatggaaattactgggtgtggtggcacatgcc

SEQ ID NO: 69750 - DNA, 601 bp, Homo sapiens
ctgcatattcaagatgatctatatgtcgtgtagctatcccagagctagattaatttcaggtgtgctctggtcagcacagaacagaatgagatagtcatcttccttgtgttctgcacactatacttctcataatgcaacctaagattatatcagctttttttggcagccacacacactgttgactcacattgagcttctagtcaactcaatacccctaattcagccacacgtactgctgctaggcccaatgcatacttctgcaattgttttagcggggaggaagtggtaaagagaaagatttatcacattgatacttcatgaaatttggggcccaaaaattcaacctgggattttgcattcctgtcatacataagcctatgcttagtttgctatcctaaatgattagacaaactagtgatgagtcatggactggagttcagcttaggctagtcagctttgctttgtttcatggtctcatgcagccttctcaaaattaccgatctttcaaatgtatgctatttatcccgagaagaactggtggaaagactataaatgattcaatgcaaagccattatcaccactgaaaaaaacaacgcaaaga

SEQ ID NO: 69751 - DNA, 2414 bp, Homo sapiens
accaccatgataggctaatttgtaaaacattattttgtagatacagggtcttgctgtgttacccaggctggtctggagttcctggcctcaaacaatacccctttctaggcctcccaaagtgctgggtttacaggcatgagccaccgtgctggccttttctgacttttaaacaaccccgcagcgtaatctttgcattcctattttacagataaagcaacagaagcctccagcgactaagttaaactttcctggggtcacaaggtttacaagtggctgaataggatttctacagactggttccttcacccggctgcccgccgaagtaagcgggccttactgccctaattctcaataggaccccaaagaggacgcttctttgctcctgaagggatggcaccctctggattcgcggtaacagcaaatggggctctcactcctaccatctcagtgacagtttaaagcgcaccctaccgcaggaaagtgcccatatttgcacacacgcggcagagggcagggctgaaaaggggccctagggtgcagggggcgcgccctcacccggggaccccgcattttacaatattagctccaccgaggcgcacggaaccgcaggcgagcaactgaccttcggctccagcggccccaaagccgggggtgggaacgcgcgacccaggtagcggcatggactccgagcctggcccctcgggggttaaaactccccagacataaaggctccggacgacagaggtgcagccgccgcgtgcccgtgggacactgaaactcttcccttaccttcctcggtagtcctgtgagggaggctggcccggccggctgccctacggtgcggacaggaggtcgcggtcgggaggggccctgcccggcggttgctgctggaaccagcccccgcaagggcccgcagcggccgggccgtttacctcagacccgcgccgcagcctcccggagcccgcgcccaggactccctcacgacctctccagggtcccggcccgacaccaaggggcaggtgaggggtggaacctggaggcacccgcgccagggcccctgagggaggcgggagggggacagcctcagtcctgactcgcagccgaggcgcgacgactccgcgcagtcccgcctgtggaggggcgtgcctcatcgcttgctaaccgagaggcgaagggcaaggggcgaagggcaagcgccggatcctttcgccccctccccacgtgaggccctggaggctgattggccgtgtgctgcggaggcggcaagaggaacgtgtcctggcacgtgccgaaggagcgctaaaggccaggggcggtcccacccgcgaagccctggaaggcggattggctgcgcgaggaagtggcgtgtcctcacttgagctgtctgggagcgagagtaagagataaaggcaagggcgcctgaccgggcctgggcacctcctcccactgcgggcaaagggcaggcagttcgtgcgcggacacaagcactggcggaccgtggccatggcgggcgctgagtggaagtcgctggaggaatgcttggagaagcacctgccgctccccgacttgcaggaagtgaagcgcgttctctatggcaaggaactcaggtccgcagccaagaggctaagctaatggggtcttggggccacagagtgtgggtctgggggagcaggcagggagggcctcagggtctgaagggctcaggggaggcggtgagaagtcctgagttggcgggcagagaccatagtaggtcttgatgggacggccccggggtccttgggggttgcagaatcctggcgtgacctttacaaatctcttctcccccacgttgcccagaaccggaaggaaaaggacgggattttactctccagggctttctctgtggccatcccaaccctcctccccggagccgggcttgtcttctggatgtctggctggatcactgtctccaaccagagcacccagcaggtgtactgattgtccggccccagaccatccttcttgcggtgacccgacctctggctgacccttggaaatagaggctgtctgcatttagttggcgagggaacctttcccactggcaagccatgggcgctggtttttccactccctgcaagcttgtgcatcaccaggactttctgagggctgtatactgctggacactgtgtccacaaagctgaaaaagacacttcctggccgggctcacacctgtaatctcagcactttgggaggccagggctggaagattgcttgaactcaggagttcgagaccggcctgggcaacatagtgagacacccatctctataaagcatttaaaaaaatagccaagcatggtagcatgcatctgtagtcctagctacatggcaggctgaggcgggaggatcacttgagcttgggaggtcgaggctgcagt

SEQ ID NO: 69752 - DNA, 1523 bp, Homo sapiens
tgaacacctgggcccctccaagcccacccaacaccagatgtagaactggcctcccccagcaggagcagcaggacagagtggccagggtctttattcaccataaggccatccatgtgatcccaggtcatggcctctccatccaacctgtctcctgagccccattttccaagcccctcggctcccacagcctgcctcacaccctaggctcagcatagccctgattctggttcagaaacacttttgagaatctgttccctcctttctgtgctgactgccaggactttaattcctaccgtgatttcagcaactctaaaacaccaacctcttaactggcctccccattgccaggcctaaccgtgctgactctgctgaggtctccctgccaattgcaggtaaagtccaggttcagtgtagtgttctgtcatggctggaccccactgctcgccagctcccttgggccctggcactgagcgccttctagccaggacatcctcacctctttggctgataaatagctacaagaaatgggagagagattttaagtggagcagactgcatcaaaatccccttccctcttttttcctgcccatctaggaagcttgatctgcccagggaagctttcgaagctgcctccagagaagactttgaactgcagggatatgcctttgaagcagcggaggagcagctgagacgaccccgcattgtgcacgtggggctggttcagaacagaatccccctccccgcaaatgcccctgtggcagaacaggtgcagactcttttgaccataataaatacacaaacagggttgtggcctgcccttggagcacacctgcaggccctggctggccgcatactccgggtctgcaggcttgggcgcctcaagcagtagcagaggcgcttctgccctggcctccccacatccctccagcctgcatctctggctcttctgtcttcctgttcttattctgtctctccctcctcctcactgatctttccacttctctccagctattgatctgaagctccatttaccaaccgggagggtgcccttttggcctgctcgtgctctccacgggacgctgcctctcagctgcctgccaggaggcggccagccagcacacgctggttgggaccgtctgtccgtgtgttcttctgccttaatcctcagggcggggactcgctatacccagaagtctgtcagttgtggtgcctacaggattacgggaatagataggcattcgcttatgacctcagagttagtaaataaaggtgacagcatcttgtatctccctaaagaaacatgttgtcacaggcgcaggtggtttgctttatacacttctccacagcattcctccagctgctcaaactttcagggattttcctgcacaggtttcctcaggatacggcgtgtttgaggattcttagggattctggagaaacctaaggcctcttggattccaggtttggttctgcatcatcattcacattggtccttcctttgcttttgttggattcacagatgt

SEQ ID NO: 69753 - DNA, 1746 bp, Homo sapiens
aggcttagagtacaatcacagctcactgcagccttgatcccaggcccaagcaatcctcccacctcagcctcccaagtagctgggaccacaggtgcacaccatcacgcccagctaattgaaaaaaaaaagtttgtagagatggagatctcactatattgctaggctgaactttgatttcttttcctgaattattttctgttttccctagagtttgctttgttttctacttgccacgcattcaaccccaaactttctatcaattcctaaatctcccttaatgtgttttagacgcatcaaacagtctatcagtttcatctcctccaaggaatctgccccagagccttgtgactgctgtggtctgaatcaggtgccccctctgctggccacacagttattgtcctgggatcccccctcatcatcaccctggggaatccctttgccttgctcttgtgtttctctgttcccacagcttcctctttcttggtttatacccttattttagtggagtggtgtagtggatccttatagatttatgttgcctcggcatccatgttgaatacaagtttaactctctcataccagcggcagggctcggtcacgctggacacagtttccagatctacaccacaccgagatggctcaagccaagtggccagaggtaagaacttaagaggcctctctcccaccagcagactgggctgcccactttcctgctgcttcctttaaatggaccatccaggcatttggccattaacttaaggtgaccacatcttagtcattatgtgtactgctagttgccccatactctctctgactcttcatttctccctcatctgacctggggacagaggactgccctcctgactcatggcactctccttgcccaggatctgtaagtaaaaaaatctttaaacttgtttcctattgcgattgtgtgttgaatttgcaccttccatgagaagaaccaggggctgccccaggctgggttttccttgggataccggtggaaacacaaagttgggctcctagggccagagtggtagtcaggcagggacaggtcaggcaagagctgccacacagcatgtgccagtataaacaagtttcacgtatgagggaccccctggtcacgggttggacagacaggcattaggctgtccaccatgtacaagatgtatcctgtgaaaggcacactgtagagaccacatccagctcccttcatttcctgttagtgctgggttgccaaccgctctggtactggagcccccatttagctagggactctcagaacaagtagttccctgaggaagaacacatcagaggtaaactttttgaggccttgcccatctgaaaatatgttccttctacaattttcttgatagtttggttgagcatcaaattttaggttagaaatcattttccttcagaagtttgaacacattgttccattgtcttctagttttttgggcattgttgagtagtccacagccattttaatttgtgacccattgtctatgacttgtttttctctggaagactgtaggagtttctctttttcaccagtactctacaatttcataatgatattccattgtgtatatctattttaatccactctaggcactcagtgggttcttttagtctagaaacttgggttctgaagctctaggaaatgttcttgcattatttcattcattattttcccctctttttttctctttctagacagtcctactattaggatgttgg

SEQ ID NO: 69754 - DNA, 727 bp, Homo sapiens
gtcaccactttgtctttttgctcaattttctggtggatttgatctgatttgtcagtcagccctcctattcaacctttcatttctgctgtcaaattttgaatttactagtgttcttttggtctgaaagtccctgttgtattacatcctgttcttgcatcatggttgcgatatcttctcttacctctaaggatactaatattaagtaaattttgttttctctcttattccaagagtccttattccaagttggacgctttgtttgattgctcatattttaagaattggggattaaaaatctgtgagctctgagtttgtagtaggggctcacccactgagctccattatagggtgatctgatttagtggtaattcccaggtaatcccagtgttagtatctctgggtcattcttttcaggctggtcagagtccccagagatttttctgcccttgtgccaagaagggaaggagaacaaaggttcagcatgctgatgtttactcaatccctctgttttgacacttcacttgctttcatctgccctgctccaaagccagagagcctctgctgaaccatctctggaggatgagcctctggccttcttctggggtagatggggcaggtcccagcctcttggtgtggagaaaggacctggatttctaactgcttctttttttatttttatttttatttttttttgaggtggagtcttggtctgtcacccaggctggag

SEQ ID NO: 69755 - DNA, 1301 bp, Homo sapiens
gagtagctggaattacaggcctgtaccaccacacccagctaatttttgtatttttagtagagaccaggcttcaccatgttggccaggctggtctcgaattcctgacctcaggtgatccgcccacctcggcctcccaaagtgctgggattacaggcatgagccactgcgcccggcccctaactgcttcttaaatagacctttgaccagtccttgtttatcatacttccctgcttccccaccttcagaggtacctggtgcccctgggtcctgagctttggataagcaggagatcttctctactgctagcgggactcagttttctctgatctgctgagagatttgcctgcatctttccgccttccagcttcccgtgtttccgtgcctcagtgcaccatccttgttgggtatatgcctttgcatgaacattgctttcctgtcatgttaatggggtttcaggaaagaacacgtgtctgtgtcccagaagttcatgtcgttttcctatttttgttacctttgtactctcactcttcattagactatgagctccatgaggatagtatctgtgtttgtttttcccaactctccacccacccctgtttcatctttagtggcaagaataatccctagtgcatgacaggcactacaaattagtattggctggatagttgaactaacatctcccctttcttggatctggaactccccctcatttatcaaagtctagcacaggtacccctcctttgtggggccctggggactcccccaggactccccctgaccactctgtattgccaggttgtgtggccgcaccaggttctaattcatctccttccctctaggctggcagttcctgagggccaggtgttaggtcagtgcatgtggaacctcgtcccctctagttgaagaactgtagttgggactttgcagccagcctcacccaacctcacttccacatccttcttttgaaagtgtgtttacattagagtggttgtgtaaacaggaaaagaagctgcttattctctgggggcacttgactcactcctaatgctctgaaagctgagaattaatggtcattaaggagcatttgtgttttcaacagcttttctgttggcttccttaaaataattcatctctcttcacagaaggcgagcctggggagccttgagcctgctaccaaggcccccaggactgttgctggcagtgcctgccgcctgcttggcaagatggtggtggtgccattggcgggatatttactgtggtactctcttaggaccaggcttcctgggaccggaaggaattga

SEQ ID NO: 69756 - DNA, 1243 bp, Homo sapiens
tccctttttaaaagagagttgactgatattccattgtgtatatatatataccacattttacctatcagttcatctgttgataagacacttgggttgtttccatcttttggctattgtgaataatgttcctgtaaacatgagtgtgcaaatatctgttcaagtccctgctgcaattgtttttaagactttgggaaagacatttggcccagccccttgttttgccatgaagcccagaggtaagggctgcccacagccaggaacaggacccagaagccaggccatggcactcctgagactgtattcttttgcagtgacttcccgctgctgggctgaggagcccccctcagaggctgtgcatgttggatataattctgccctttctcctatttatagctatgccctttgccttctgtacgagagagaagcttccttggacagaatttgctgagtcagcagaggatgggcccaccaccagattctgtcagaaggtaggacattaacggtgcctctggcagcagctgccaaatatgtgcaagtcacagagcatgaccacagctgccgggtttggcctttcaccatggaaaatgcacccatttggtgcttgttttgccagataagattagataagactatctgccacttttttttttagcgtactcttagaattggggcgtgtaaggctccagaagggccattagctttttcaggcaagggagctgcagcccagggagggtggtcggaggtgacttttgtagcaagtcccacagctggcaagtggcagagctggcattcagggaccagagaagccagtttctcatccagagctctgcatgctccactgcagtttgcttgagtcacagaagcttcgatgcatggcctgtgtctcatcagcatagaaattggttttgatttttcttcattaaaaccttataatacatattgtatgatcccatttatataaactgtccagaataggcaaatccatagagacagaaagtagataagtggtggctaagggctgggggtgagggaggaagggagtgactgctaatggatacaaagtttccgtttagggtgatgaaaatgttctaaaattagatagtggtgaaggttgcacaactctgtgaatatcctgaatactactgaattgcacacttcaaaagagtgactccttgttctgctgtttcccacctctcgctactgtacttgaccaatcttaaagtgaatcttatgctctgtgaat

SEQ ID NO: 69757 - DNA, 787 bp, Homo sapiens
acatgcatgtctgtatactgtgcattatgtgaagtttcatgtgcccatgatcagggcataagttgggggggccattttggttggttaatgccaacccctgggtgggtaagatgggagcggtggatgtttgaaggagggaaatgacctctgcctaatgcctaagatgttaaatctgaacttgatttgccattaatgcagttgttcaggatgtgatgtccccagttctctctccatgaatgtgggggtcctggccgttctcaggctggtcaggcagataagaaatggcctgcagagctagaggaggtttcccagggagaaagaagaacccagcgtttctcagtaacagctggaggtgggggtgggaagacgcgcccctcacctgtttaccctgggattaatctttagctccctgcagatagcacagggcttgtctcagcacagcaggatctgctccggtgttcaccacgtgcacacatcctggttgctgcctgaccctggccaattttgatggccaggatcaggaggaggtggaaggctcctggagcagatctgtttgggaccctgatttgccctctagcttccctcagtgctgtccaggacagtgtccctgccctggcacccttaggagcagacagagaagcagggatgggaggatggggtctggtccgcctgccccacagggacctccttaaccctaggcaggatggagaaggtgcgctttcagggtgtgggttccactagaagctttggccttaatcatttgggcgagctatgccccctcaggaag

SEQ ID NO: 69758 - DNA, 672 bp, Homo sapiens
agcattggctcttggatggggaactgtggattcctagtcctcacatctgcagcatcctgcacaggcaggacagacatctggacaagagaagctgcaaatgagggagttggagatcagtcgaggaaacttgtctttaaccagagaagggttttatttttataacacataacaagtgtttcggtgttagcctcacccctaaacagatagaactgcccttgtcaaggcagggctgggggatgaggggagggtggccccggaagcccgagaactgggcagtaccccacccctggggcccctcatttaggaggggcatccagcgagctgatctgactgcatgactctgctgctgctgcctctctcttccacaaaggctgagcatttgggtggtttccagttttgcatcactacaagtaacagaactctaggaatttatgtgcaaatacttttctccccaactcacttctttccaagcaggattcctgcagcaggaggtgctggctttcactttctgtggtcttggctgccagtgtccccagcaggacaggggtgtgccctgtcctgccatgggtggggagcagggggagttctggtgggtgtgcagctttagtctctgtcagcctgcacttgtctctcttgtcctcattcttgactaaatttcagttgaatttcttc

SEQ ID NO: 69759 - DNA, 1045 bp, Homo sapiens
tgagagagtctcctgacctctctctcctcttcctgggcaactaggatgaatgtaggattccacccaaatcagaagggagccaagaatgctggccaactctttttaataagtatcccaggagcagtaaaccaaatgttttctcattagacacttcttagaagcagaagccttcccaactttggtaatgggcctgagctcctgtcaaggcttttgggagtaatccaccttgggaaaggagggagggagggagggtgtgctgggtgtgagcactgtgggtgggctttccaactccaccagcctctgtatccacgatgagatgccacatggagtagacagaactccaggcccatccaggagcccctggttcaaatcccagccttttctacaactggctagtgacctggagcaggtcactcctctctgggctgtaggatgctcttctggggagcaacaggaccacgggactccccttctccatcctgcctcagcagaccacactttctggatagacaggtcgaaggggtcacagcagccaatgctgggctgtatgagtcattgtagcatctgtgaactttgccacagtactagaatcagtgccaagaggtcactgtcaacgagccttcctgatgcgttcctgccccatgactgccctccagtggcaagaggtggtggcgtgtaagtgatggggatttataaaaccagaacctctaaagtacatctgtgttttgctttcagatgacgggcaggtatgagatgtacgcacgggagctcgccgaagctgtcaagtccaactacagccccaccatcgtgaaagagtagccggcttcagtgcctgccttggggtgaggaagacacctctgccccagtggattagcaagtgtggcaggcttaacatgtccaggttctccccaataacattgtccaggttggttttaaaattcccaggcagggggagagtggcatggggagtgacttcttaatgggtaaggggctgcttacttctggggtattggaaatgtttggggactaggtagaggtgaatgta

SEQ ID NO: 69760 - DNA, 683 bp, Homo sapiens
cagcctgggcgacagagtgaaactccatctcaaaaaaacaagcaaaacccccccacacacatacacaaatagtattttccattgtgcccagtccatggtggtggatgtgttgccatgtccggcataatgatggatcccagtagcaatatggctagtgcaggctccctcaacagccttatttccgttggtctaatcagagaacaggcttcaaccatggacatctacatgtgtgacccagacagagcaatcacagccaaaacttatttccatagttcatgaccccaaagatgggtgtctttaatctgccagttgaggttttctaagtgtcagaccgaacacctaggccattggcaacaccccaagagtcagtaaaaatataacaagggttaccaagaggagtattggctcagggcctactgagcagagttactcatcaattttctgttctgcgcagctgtttctgagggtgaacagccacagcagccctgtggacaccatgaggcttccacttcatcagaccatcagtgaaccaggccctggcatttaggagaacctctgtgaacttaggttcctgttgacccagtgactttgctttggtggagtgggggatataagtgtcccccaaagggttagctgccagttttttcatgtaaaactgagatgtcagcagggctagactagct

SEQ ID NO: 69761 - DNA, 1853 bp, Homo sapiens
aggtggtggtggtatcatcaaccactgggcacaggggcatatgcagcacttccaggagagaggggcctggaggggtcctcagccctgggggattggggtcagctatgctgtctccagacactcacatactgtcctgacaagtggcatccgtcaagcaacttctctctccaggctcagtcctgcggtctgtggggagaccattgccatggatctggctcaaaggcaacaagggcactgtcgggactggacttcctgtgggcgcagctggagtcaaggcttggggtcttggggtatgcttccagcagccagcaggtgcttggggtgagtgacatgacaacacacggcactggcagacaaagcagctgtgccagtctccgagttcctgggactctgccagatgggctgaggctgcagttccacattccaaccccagcagccccaagcctgggccagggcatcctgagcgggcccggctggggtggggatggggtccgagggcctaggcgcaccaggctcctgctgtcagctgtccaagtagacaaagaggatgtcctcatctgtgccatagctggttctggcctcctcaaagttactgatgctggtgctgcacattcctgctgggggtggggaaggcagaacggggtcagtgggttgtgagagagcacctacaccaccgacacagtgcccaggggagctgagtgaggtctgtttcccatccacatggccattcctctcaactcaagtcctccacccccaggaagccctccttgcccatcctggtcttcatgaggtttctctgactcctccccagtaaagcagttggagaaaggcccagagaggggcagaaacgtgctccaggccacatagacggggtaagtctatgtggtcagggcgtccaggggctgtctatgtgaatccagtctatgagagtcagggcagcccttccctgtgcccggagggcagtaggcaggccaggatgggtctagagcaggggctgggtctggccgggcttttctttctgaggaatgtgccggccatcctggtggttgggggaggggtgcagcctgggcagcatgaaagggtaaggcagggacctgggcagtggcgtggggcctgtggtgtgagagggaggggtggccagggtgtagaggaggctggcacagtttgcggcaggtttgcctgcatggcctgaggggtggccacagtgacaagagcccaggaggagcaggggctttggggaaaaggtagggagggaggccctggccacactagattgaatgggtgggaactgtgggcactgggcatacagaacagtgaatgtggaccactctgcctcacccaccccacccagcactcacggtcggcataggctgggttgttgtagaagatgcagccagtggcccggttgtagccacgcagcacgatgaagtggccctggtagtcaggagtgcggcagaagcagtggtggccactgggggtgaagcagcagtacttgacagggctggagcacaggtcacagtgcagcacccccgagttcaccagcacgatggccacatggccctgagccaggtgcgcctggatgtccttcacactcactgtgctgtgggcgggaggggggtcagctggtgctgctgggcccccattccccatccctcaaatggatccctgcttgtgcctgtttctctgttacaaagcttggggatcggctccttttccctttgccctgaactccctgctctgtcactgtggcccaggctcagcctagagccaagcaggagaccggtggggggggtgtgtgtgtgtgtctgaatgtgcacaaagatgagctggctctgtcaggcccttcacgggga

SEQ ID NO: 69762 - DNA, 794 bp, Homo sapiens
ctgtatgacagattaagaccctgtctcttaaaaaaaaaaaaaagaaaagaaaagaaaacacccagagggacagagggcagatggggctgtgggcagggggagctctaggccaggggctcctgcatctttgctggaggggctgctcacccacttggggccttccttaggagtggcagcatcagtaccatgtggcctgacccagcttcagccacagctgagtcacgtggcagtttggattgctgccttggccaaggaaacatgccatttttccatttggtctttgaaacaaaatagctggctgagttcccagtggcagtgcacaggagtgggatttcagctatagggaaaaagcaggggcttggctggaaggaaaaactacaggcttcaaggaataacaagcatgggttcagatcatggcatggccaagatgctgggggtgaccttgggtgtctctctcctcctcagtttcctcccccgagaagcagagatagcaacagctttcccactcaaggagacagcacctgttgagggctgctaaataaacatttgctgcctttccttccaacatgtgcccatgtggtcatagtatgaatggagatcccaccccactatattctttttttttttgagacagagtctgtctctgttgcccaggctggagtgcagtggcgcgatctcggctcactgcaagctccgcctcctgggttcatgccattctcctgcctcagcctcccgagtagctgggactacaggcacccgccactgcgcccagctaattttttgtatttttagta

SEQ ID NO: 69763 - DNA, 3655 bp, Homo sapiens
gccaccccaagcccccagacattactatcatggagagctggaaggcctggtccaccccttgctcacttttgcagatgggactaggaccaggtagaagcttggcctcctgcaagccccaaccaaagatagctacatggaccatggatcccacccaggtctctcccaagccagagcagaagatgtagatgggaagcacctgggcccccagccctggccccactcaccgcagcaccatcctggagcaggccaggccacagtcccagtggtagagctgctggatgacgggcacaggcagttgcacaaagtcccctgtgcagaaacagagggaggtcacagaccctcagcgcagagcccaccactcccaccctcatgggagccagtgtcactgcctcctgcctagaccctgcaggggctgctcagggaccttcccacaatccttcaggaatcccctcaaatccaggctcctataatagcagtgatctccccaaaacaccggccagagcaggtcagcccaactgaaaatcctccagtgagctgggtcccacattccttaagacaatacctccatggctgctgccctagcaccctctgcacccttgcctttgcttgtcataatccctcacaccctggaggtctttgcacacctggttcctctgcctggacatacctggcttcccaggtgcctgagctaactcctgcccttggatgtcacttctccagtattgcccctctcaggcccagtgacccacatgtgcattcacttcccaccatgcctactcaaagcccttcttttggtgggagctctgaggaggagggacagagtctttttcttttttttcaacagggtcttgctctgtcgcacaggctggagtgcagtggcatgatctcggctcactgcaacctgcgattcccgggtggcaagtaattctcctgcctcagccacccaagcagcctgtagtccacaggcgtgcgccaccatgcccagctaattattgtaattttagtagagatggggtttcaccatgttgtccatggttccatggctggtctcgaactcctgacctcaggtgatccacctcagcctcccaaagtgctgggattacaggcgtgagccattccgcctggccagcaggggctgttttgtttcctgctttcattccagggctggcacatgggaggcactcagcagataatgtatctgagttcatgaggcccctggaggtttgcttgactccaaagaccccaggaccaccagggtgtgagaccatggccaggagaagggaactgtcacgtaagctatgaagcatatgtaatattcttgtgagctccatcccccaccaaccctgggcgacctctcggtctgtctttgccaggctgtgaggtggagcagaaagggcctgacctagcgttccagtctcaactgtgccactgctggctggctgtgggctgggcagctgacttcctcttgctggaatgagtctggccatccctaaacagggggactttggtctgattcagtcattcagtcaacaaatatttcccaaaagcctagtaagtgcctggtgtgtgtactggagatacagcagtgaatgacacaaagtcactctcctggtggatagcaaaaataagcaaacatagcaaaatagaggcctaggctggggaaaacagtgggggtgtgccttagaggggatgggggaacagcatgtgctaaggccctgaggtggggcaaatgggcttgtggcatgcaggaccctcctccgtagccacctcatgaacctggacaaagttcagagtctaaagaggaagagacttatctctgctgttactcactcatgacactcattcagcacgtgaaaaccttgcccacattgtttccccatctggcaggtctctcctggactgtgtgaccagctctgtgtagagccaccccaggagccctcctgctgtgccagccccagttcccctcacttccctgtgtgcgccagctaagacggccactcactagtcctgggatctgtcctggcctttccaacctaccaggctttgaatcccaagttcctcccttcctatgtctgaccttccccagccttcaaggcctggctcagaggccatttccagggccttccctgatcacagactggctacaccctttcactcatctgtacttctctgggcttgagttcacactttgcctcctaggatgcggcccttgcattgagcttgtctgtgccctcctgtgttgcttatacgttcccaagaggcagggacctatcactgctcctggtgtctttctactccatgtgcagcagggcccatggaaggcacaatggcatgagcaaagcaggccacctgctagctaagttgcctggcctctctgtgcctgcttcttcctctgtgaaatggactaccagacgccagcctgcagggtgatgtgaaccctaaggacaagaacgtctataaagccctttgcaggtgctaataatgtgaacctgcccccagctggggcctggtatgctaagcccaggctggactgaggcctcattctcttccttcctcttaacccagatgcctccaaaagatacccaggccgttcactcaaggcgctcacatgttcccctgctatcactgccaaggattcagtggcactgacccctgcctgtccctgccccaaattccactcccagcacctctcccacctctacatacagcagccgtagggattcccattcagtttcccactgctcttggaataaggttctcatcccttaccggggccctgcctaacctggcccgccagcctcatcttggctgccctcacctgtggtctagttaacctgtgaactcatcaaggcttcattctaccccaaggcatctgcacgtgaggatccctctgtctgaaactctctcccggctgctgttctcaaggttgtgtcccttctagtcattcaggtcccagctcaaaatctcttcttagaggtttttctgactaagcctttgagaaacgagggaactctccttcacagcatcctattcgtttccttcacagtgcttggcaaaagtaacaatagcatcaagccactctcttgagacggcaagcttcctgaaggcaggtgctatggtatcctctccaaaatttatgttgaaacttaatctccattgtggtggtatgaagaaatgggtgcagaagatatccacaaccaaaaatataaataaataagaagtgtggccttttgtgaagtcaggagggctctgccctcatcagtgaactagtgccttataaaagggctggaggaaactagcataggccattttttttgcccttctgttcttctgtcatgtaaaagcagtgttcatgccctttctgttccttccaccatgtgaggacacgtaggtggcaccatctacaaggaacaggcctttaccagacacagaacctgccagcgccttgatcttggacctcagagtctccagaactgtgaagaattaaatttctagagctgggcacagtggcacacacctgtaatcccaactactcacgaggccaaggcaagaggagccaaggagtttcagaccagttcgagcaaaatagtgagacctccatctccaaaaaagaaaaaaagaaattaaatttctattgtttctaaattacccagtc

SEQ ID NO: 69764 - DNA, 4252 bp, Homo sapiens
cagagctcactgcagccctgaactcccaggctcaagggatcctctgaccttagcctcctgagcagctggaactatgggcacacgctaccacacccagataattaaaaataaaataagccctcactgtttgctaggctctggggacacaaaggtaactaaagacccacccaagccctgacccctagggactcataaagagctgagcagtgggagagctctatgcaggatgttgtgctgtcacggtgaatgcctgcctgttcaagaacccctcacagcagccacacactgcctttttgtttttctctactcatactgtttcctccccagcttttgctcttgcacatcccttagtctaggagtgtccaatcttttggcttccctgggccacactggaagaattgtcttgggccacacataaactacactatcactaatgatagctgatgagccttagtctgaaatgttaatgttgtctccatgctctaatccctctcactctcagggcccctcaatatggagtccttaaagaggcaatgagaattcttcagtggcagatggggatgaggttgcatttgcctccttccaaccctcagcccagagtaggcacttagatatgcttggggaatggaaggcgttttccaaaaagacctcataccttgagatgcccaggcctacttgtcacttccctgctctgcacccctcctcccccaggcttccagactacagccctctgtgtgaggctccctccttactctgtggcttgggctgtgacactgactagctgggctatcttctgccaggctatgactgtccatgcctttccatgtccagctataaaatgtggcacaagacagcagctctctctcagagactcagctgcgcctcctcctcttgccctgcgctctagaactccttgatcctgaggcctggcaggccccacagggccatctccagcctcggcaagggcggatcggacctagaggtgctcatgttgggggtgataaggttaggcgaggccttggcatctgtccccataacagctttagccttctaaacacaaagccacagccagacgttgctgcctggagccaaagggctgcctggaaggccctggcctgagctcagttagtggctgtcactaaggaaggcaagcagtgcactagcctttaatacttaacccatctcagactcagtctgctcagctgcaaaagtgcaaatcacagtgggcacctacttcactggttcgttatgaggattaatgaggcactgcatgtaaacaactgcacgcagcgcgcgcctgcctcatagaacactccctgtgaatgtaagccattcctcctctgaggctcaggaaaggcaagtatcttgtctcagaccacagggctagacaactggaggaggagggttgtaaatcccccaccaactccacacagcagacacaaaagggaacactccctgggagtgacacctgaaggtcagggtcccacatgctgttgacctcttccacagttggcacttcacttcagagtttactagctagaactccgtttgtcatcaaccccgcgccttcagcaggacaggaatcacgtcttccccctcccctacgtcttgggcaagcaaactaacggccaagacattgaataccagtccgggtctccgccccaaaggggctcaggctaccgcgtggcagagagaacgaaagtgaagaacaagagcaagacaaaacgccgagtctcggaggccagggcactggcccttccattgctcggtgctctcggccagtttcctgcccttcccagcctcagtcctccacggtttcccaaggcatgggagctcccaaggcggctccagcaggacttttcgcttctggggaaggtggtgcccctgctacccggaccttcccaccatgctgacaagggtcgcaatcctgcgagtgtcaggaaacccccactgactggaaccaggcgggtgtgggggcgaggcgggagtcggcccaaggtcgcgcgactggaccctgccccgcgctagggaggggtccctttcgttcctagggtgaagactgggcccacagagaggcactgaccgggctcgagcggcggccccgctgcctccgcctccgtcctcatgacccgggcggcgcggggcgcccatggccccggcccagagcgggctacagcttccgcttcggctggggcgggagggcggtcggtgcgtgtcgagttccttctccgccaccgccgccgctgcggaggagagaacgggaggcggcggctgggccgccccaagcgccgccccagcccttccaggtctcgaatctggaggccccgccccctccttaggccccgccccaaactttgatcttagaggtccccagcctcttgatttaagtctgctccggccattcgccgcctcagcgttgagtggccccaccctctcgcccaatcctcgcgcagacgcgcagctcaccaggacgcgggccccggaagccccgcccctttctttgagccccgccccaaagctcgtgcatttcctgaatagaggctcgtcccttcggcaagccccgcctctgccgggtcccgctcttttgccagtcctaggtgtaagccctgatcccgcccagtgcatccccgaggccccaagcaactctcctccaactgtctttagggataaccctgagcgggcagccgctctactctatacctaactttatccgtaccagatacctagcctcactcagggccccccttacctggcggtgccgggatcaacaaatgaaattgtgacgggaagtcctggcccttggcccaacctcctgctgtccccggtctgagggcccaagccccgcgtctccgccttgccgtccagcctgtccttggtgtggggtgcttggaagtgtgagcaccctctctggctctttgccggccccaagggtcgttgcggcggcccccgggcccagtcatcagccctcttttccggtgccggaactatcgtactggtgccctagtttcccagccggcaggcggagtgaggaggaagcggaggcgagaccgcgctcaacactggggaaaggaaggaggcgggccctgcgcgcagcattttgggaaagagtggaattctgggtgttaggcccgccattcgcttgactcacgccttcgccgtagcatctttcgcagcggaccgaagagaagaaaagtaggccagagccggtgaggctggggacgggcgaggggaggtcgaggcgcctgtgaggggccaggggctggagaaagacttgctgcatggaactctgcggggctcggggagggaagaaagcgggaagcttgggccacccaaacatcagcgtcgcctcactagctcctggaagtaagttcattagctttcccctcaacgtgcatgcttctcacattctgtatctctccaggtgagtgtttttcaaagcttccaggcagtaatctcgaagtcatttctgattgactatctccttcccccaaatcctatgagtttttttttgtttttttttttttaagtagagacggggtttcaccatgttgccctggctggtctcgaactcctgggctcaagggatccaccggcctcggccttccaaagtgctgggattacaggcgtgagccaccgcgcccagccggtcattttttaaaaagttctttgtatctctgccccagtcccctttcaggcaatggtcccctcatgctttccacactgttgcagcagttttaactgttgcagaagttttaacaagtttctctgcttctaaaccttacgttctatccattttgtaaataaatgctgctatcttttcattgcgtcattctttacatataattctgcagtggttctccactaccttcagcataaaatctagactcctaaggctgaaagccagggatcctcaccaaaggagcctgtcctttcaacctcatgttctcctgtcttaggtacgcttaagttgaaacttagagttgttgctcatctcaataaaaagttcactgcttgatgcttttgattaggtcaagtcaggtgctttccctgattttcctccatgacaagcatttcctgcatatagcacgttgtcactttgatattttctcaatatccttgatagtaaaataagtgaagggttaaagggctgaattaaaagtacagcctgctctcctagatgtgcatggtcctttggtctgtatctgcaccttccatagggtagccactagctacatgtggccgttgaggactt

SEQ ID NO: 69765 - DNA, 425 bp, Homo sapiens
tcaaaagttgctgccttgggcttgtgatacaaacacaggtcaggcttattagcaagctctagcaggcatgtgtgcagtgagactgtggggttttgtccacagcaagctgttcttagccagtgctacagggaaagcgagagcagtagtgagcctggttgttagggttaaaataggagtcagaggacactggactctcctgcttcagccaggacatagttcatttatggaaatgcctagattaagtcttgtcggacttatgcaacagcttctgtcaggaaaggagtgagatgtgcccctgtgctggagggagtgtggcttagcagtggcacagctcccaaaacacattttagctgtcaatcagatttagcatgtactgagtctctattatgtattaggcaatagagacagcatttagacatactttg

SEQ ID NO: 69766 - DNA, 1165 bp, Homo sapiens
tctttgccctcagcatgctgcctcccagcctcttgtagagagcagtgtgggactggaaggcaagagtgtgctgctagctcctgctttgatgccagtccccagcccctgcccctccgtctccatcccccctgttaaatgcagtggctgtcagctggacgtgttggcttatgcttgtaatcctgacactttgggaggccgaggtgggtggatcacctgaggtcaggagtttaagaccagcctggccaacatggtgaaaccctgtctctactaaaaatacaggaaattagccgggcgttgtggttcacggctgtagtcccagctactcaagtaggaggctgagacatgagaatcgcctaatcccaggaggtggagattgcagtgagccgagatcatgccactgcactccagcctgggtgacagagtgggactccgtctcaaaaaataaaaaaaaaaaaaggcgggaggtggaaatgcaatggccagggtggtgttggaccaggtaacccttcagaacccttctaactggtgtcctagggccctggctactctgtgctatgagcattcaccgaccacactgacctggcctcatattttctcttccctttcagtggccgcaagaggaagaggacgtggaatgggacgtggaaacatctttcaaaagcgaagataattttctaagttgaacagaactttgtccttttttctttcaggttatctgagttcattggagtgggtgcttgtgcatatatgctaggtatcttttgccatctttctctttagatcaggggaaatgtttaagctaaataaatctggggggttttttgttctgttttgttttgttttctttgagaaaataaggactttgtgttcatttgaagtttgctttggctaaattttgacaccctgggggatgtcctgggagaatgccagtactttgaaatagcacagctattgatgagattttaagctgctgttcctggccagttgcaggttaagccccagaaaagttcaccttggagaagctccgagaacacacagattgtgtctcattcatcttcagacacaggcacatagtgtggcactttgttcagttaacatttgtggagctgtcatcagctcagctttaacaacacaggtgactctttcccttgataaagtcataggt

SEQ ID NO: 69767 - DNA, 561 bp, Homo sapiens
cataatttatggaggattactccaagttgattctctgattgttcctttatatacgtagatatatagggacagtaccttgttccttgttgcaacatctttgaggatattaatatgctctgtagaagctttcatctccctgcatatgtctttctgctttctgttcttcaatttaatctttcatgttacagactttctttagctgcctggcaatcgttggtaatcttgcttatatttaagagtggagtattaaaaagaatatgtgattgtaaggtgatctcattgagcttctttggggaaatccccagtgtccatacttctagaactttgctccaggctggacaggttctcttggagaaacttttggtttcacatcaggagggtttactctgagctgctggattgagagctctgttggggaagagggtgagaatttcagcattctagtatgtccacattcagttccttcatccaggtctctgggagggctcctagtccagaaaccttctaaccccctctggagaataagcttccaacttttttgccaagattggggaagtcagg

SEQ ID NO: 69768 - DNA, 1011 bp, Homo sapiens
aaagaattggaacagtgcttggcgtcatgctaggctgagactaaacattttcctatcagtcagacaagaaattcacaggatatggagtacagtgttgttttaagatgtaccatatctgattttgttttaatcaggtatggtaagacccagagacagctgccttgaaagaatgtattacagttctcaaagaagggggcaaaccacgttacgtgggccatatggggagacaccagcctgagtcaggaggcagaaggagcaatggcagagcaagacccagagccttcattgtagttttctcatgaaggaatgagtgaggcagagtaggcaagtttgagcaagtttaggattggatagtctgaataattttcaactgggttataagtggtctctgtaaagtaccttgccctgaggtgattgagggtaaaggaaatactggcttagtgtatgagagttagataaaggaggcagttttgggtgtggactttggattgtttggtttgtacatgaaagacacgctgccagcaagttgtttactatctctaggaattagctaaccctgggaggagcatccttcaggattagcaaggcccaagataccaaagcatcataaaacagaaaacaaaaggcatgattaatacaaatatccaggaaggccttgcctggtaaatgaggaataattagcccaagactgagcgctggacctgaataacaagtcataaaaacaacacattaaaacatgaaactgtttttccggaccaattaaatatatccaagaataagactcaaaaagatttataggaatataaaaatgtccagtaccccacacagtaaaattcactgtctggctccagtcagagattgctaggcatgcaaagatgcaggaaagcacagcacataatgagattaagagatccaaaactacacagatgttagaattagcaaagaaggacattaaaagttataactgtgtatttcaaaagctgagcagattttaaaagaagactccctgat

SEQ ID NO: 69769 - DNA, 562 bp, Homo sapiens
tagcccagtgtggtggcacatacctgtaaccccagctactcaggaaggctgaggcaggagaatcgcttgaacccaggaggcggaggttgcggtgagccgagatcgtgccattgcactccagcctgggcaacaagagcaaaactctgtctcaaaaaataaagaatttgcaaagctcaataataagacatggggaaaaaatttgaacagacttgagaagatacagatggcaaacatgcacattaaaacatgttcaacatcattagtcattagggaaatgcccaagttaaagccagagagatattgctacacacccagaagaatggctaatgtttaaaaaactcaccatgctatgtgctgttgaatatgtaaagcaacaagaactcccaaacactgctgatggggatgtaaaactgcaccaccactttggaaaacagtttgacagtttcttaagacattaaaaatacatctaccttatgatccccacattccattcctaggtatttacccaagagaaaaggaaatatatgtccatgcaaaaacttatacatgaattttcatagca

SEQ ID NO: 69770 - DNA, 2143 bp, Homo sapiens
ggatcctggaggagggggaagttaccctcttccattgtctctcaatacaagatgatttgacctcacttgccactcctcccgggcccctcccatcttgccagggcctgaatttgggctcttaggtccaggctaccgggccaccctcaacacacacaacccctctcaaaccccaaagacccggacacactcagcagccccctcctccacacggtccgccgacctcacccagccctcactccaggcggtcgccctctcgcccacgcaagaccccgcgtgctgcagcctgtcgcgccctcggaacccgcctgcgcgcgccagagaccagctccgcctcgcctcccggcggatacaggcccacaacccatagccccgcgcctcccagacccccagacccccagaccctccctggccgccagcccaggggcggacggctccttctctcgcctggcgcaggaggcgcagcagctgccgggcgcgctccggccgccgctcgcggagcgtggactggatctcgcggagccaccgcacccggcgctcgtagggcgcgggcccgcagccggccgccgccccggcctcagagccagcctcgggcccggcccgccggcccagccgcgcccccatggccgccgcgcgatggtcgccgaacccacaggaggccgggctgtctgcgccccgctcccggggccgcccctagtcgccccgcctccaatcaccgcggccctgccccgtccgggtccgaaggctgagcgcccgccccaccccgcgccggagcgaggccagtgggttcctcggtttggcctgatcacactggaggaggccctgcttgcgtcagtcttggcgctagaacccgagggcctggagccgccaggggagacgcggagctcggccgagacgaggtggcttttggcacctctttaccctctggccccagtgctgactggggaatagtcgctttgaccgtgcaaagagcattctaggcggggtgggggggttctgctgtgtgtgccagtgttaggtattgcccccattgcttttagaaatatgccctgcatggtgaatctccgtctctactaaaatacaaaaattaggccgggcatggtggctcacgcctgtaatcccagcactttggggggccgaggcaggcggaatctaaggtcaggagttcaagactagcctggctaacatggtgaaaccacatttttattgaaaatacaaaaaattagccgggcgtggtggcgggcgcctgtaatcccagctattcgggaggttgaggtaggagaatcaattgaacctgggaggcggaggttacagtgagccgagatggcgccaccgcactctaccctgggtgacagagcaaaactctgtctcaaaaaaaaaaaaaagaaaagaaaagaaatctctgcagctggcagttgtggtgtaggacctgctcacgctacatggacactcctgcactggcaaatatttactgcctcctgcttcttggtttggggcaggcccccacctctgaccccagcctgggaaataaaccggacgaagagtcaggttaaccgttaagcccagctctgggcaagctggcagcaggcgggctgtatctgccgctggcttcagtctgcctccctgacaaggggtgggggtggcggcaggcagagtgagatgggggccctggctcctctgaggaccagggtgaggtacggacccacccagctcaaggtgtatcccacttcccagggctccctcagcagaagcctaggtctctgctgcaggcctgctgggcccctgcagccccaatcccggctctgggacgctcacatctcctgcgtggggaacgtttgaggcactgatctgcagttcccacttctctaagcaaggagcacgtgtttagcctgtgaggactggtacctgttgtgcaggaagggctgagcactgtccgagggcatatatgagggacgacagccaagcacccgtgtgtatgtgtgtgtgtgtgtgtgtgtgtgtgtgtgtgtgtctgctaattaccctatgaagattcaaggttccttcctttgggttaagcactgcctgcccagagatggcagtggggagagggcagggtgctaggctctgtcatcctgtggggctgggcccctgagacaaggcagag

SEQ ID NO: 69771 - DNA, 1161 bp, Homo sapiens
ccccgccatggccctcaccatggcccactcagggcatgaggctttctgggtgattgctggtattcagtgttgtcagcttcttggacctgtcagtgggggtggggctgcaatgagatgccagttgcaggaagtggtttgcacagccttcctggtgtcatgggtcactctcttgccgagtggctttgggcaggtcccttcccctctcaggctgcaggttcctatgccaggagctcccttcttgccccaccagggccttgttttcccagatacagaggtggggcagatcccagcccgttgaaacagactgggctttggaggccacagtgggcccatttctcagagggactgtgtggctggatgctgagccaggcactggactggccctttgagcctcctgtctggccaaggcccctgaggcactgtgggctgctggtgccagcacacaagggtgataaggagatgaaagtcactaggatggtggggcggcacccgccccgggctgtgttggcagctgcccctggctggaggccagcttggccctggaaccctcctcaaggaacaaggacacaaaagagccagctcagccagcctctacctagcaccccaatcagcactcccttcttcccatgacccctaccctctgcccagctcctgtaactggccaaggagctaatggacacccaccagggtcttaatgagtgagccagggttaatgggttactgggcccggtgacacattcaccagcctcccagggctctcaaagtccacactggcctggccttgaacgtcttagctcggccacctccttttccagctttgacacctcggggctcaggacgggcctagggtggtcaagaggtcccctgcagccctcacttcctggaaaaggctccatttcctggccttcaggctcaggtggttccttccgcctggcaggtcctccccaaatccaatcccagctcgggctggattcccaaggcccctattctggtgtctgccccttccctagggctcttccccctggggtgaccatactctcatgcccagccaggtcagggctccttgagagaagaatctggaggggccaggatttgatgggagaatgaatgatggaatgaaagaaggaacgtaagcgtgagccttgctaagagtgacaatac

SEQ ID NO: 69772 - DNA, 842 bp, Homo sapiens
cagtgttagacacactattggattgcttcttctaaggtcagatggaggtggttagtccttatctagaaaggtgataagtgctttctgatgtacctgtgtgtgttttaagcaataatttgggaatttccttttccgttttctgcagctgcccaaaccaccttcccctccacgcccccaagtttggctgtcttccagggatcttgggtgggctccaagtcttcgtgtatcttcctcatccatgaggcccctgggtctgtggagatgggggtgctgccagggaagccagacgcaagcagtgggcaggcacccaggaggaggctggccagtctccagggtgtgggctgggaatggaaaacgtgcaggctggcttctctggggatagaaggaggctggggagtgtcttcacagctccatcctctcctgtgcatgggcgtggcagcctgaaggacctttatacaagaatgtccccgagagaatgccttggaatcaggccccgggggagccttctggtcaaggggtgtctgaggaacctgggcagggtgataaggggaggctcatttgtaggaaccccagccccagaacaccccttccaggtcatggcaggttggctggccctcacactgtcacaggacaatgctggtgcctatttatagcaagccagtgaacgattaactcgggccaggttggcagcagccaagttagcggtgtttgcttctcccataagccccaataaccatgtttagggcaggttatgcggggaggaattggaggaagaatttttctaatactctaaaggtccacaggctcttatcatttttcattcccccctccccactgccacc

SEQ ID NO: 69773 - DNA, 1870 bp, Homo sapiens
atgggcggctggcctcggggagcgcgggggctggggaaggtcagggtctgcttcattgggctgttctaagagtggtgaagactgggtgtctggggcctggtgacagtctcacccctggctttttctttaagagtgtgcggtgactttggaatcagacctgaattcaaactctagtcccaccatttagtagttctggggttccctaccagtaccttttcttctgggcctcagttttctgcatctgtaaaatgggaataatcaggtgtagaggaggttcgtgtacagtccaaacaagacaatgtatataaagtgcctggcgcactgcctgactttcattgattcaacaaatgcttattgagtatctactatgtgcaggtactatcaggaatatcctgggatatcaggaatgttccagtgacccagacagactggtctgtcctcccagaacttccagtttaatagcccaaagtaggatctcagtaaaaagtaggatctcaccacccttgactgagggtggtggctcacgcctgtaatcccagtactttgggaggccaaggcgggtggatcacctgaggtcaggagttcaagaccagccttggccaacatggtgaaaccccatctctgctaaaaatacaaaaattagctgagcgcctgtaatcccagctacttgagaggccgaggcaggagaatcacttaaacccgggaggcggaagttgcagcaagccgagattgcatcactgcactccagcacgggcaacgagcgaaactccctctcaaaaaaaagttaattttcttcagcagtgatgatatcagtcatcaattgccacaataacagtgtgtaacaaacaaccaccaaaaatcaatgacttccaacagtcagcgtttatttttgctcacaactctgggtcagctggcaagttctgttcttaactgggctaggcgaggcttattctggcaccagctgtccgtaactggtcaactaaaacatttgtttatcttggttgggctctcgtatttgcctggggtgactcagctgtgctccacgtggctcactgcccagcaagttaacctggacgtgctctcacggtgaaagcagatgccacagagagaaagcggaaatgcacaagggtgttctaagcctctgctgagtcaagtttgttaacatcccattgacaaaagcaagccacatggccaagtctagtgtcagagtaggcaaggactatgaggttatagggcagaagcatgtatacagggatcatgggaaaaaaaaaagtggagccattaatagaaccagttactctgtgagttgaactgaaatattggccagaagtctcaattacagagcagttaaaggtggggtgctctagttgcagaggtgagaggtgggaacccagaggtcaaagcggtctctgaagaggctccaggaagcagggagtggtgcccccctttcattttacagctaggaaactgatgctctgagagaggacttgtgcaagttaggaatagagatgcaactagactttctggctcccagcccagcagtccttcctgctctgggccagggtgcagcctcaccctccctccctcctgctctttcttttctcagtcctcccagagctgcagttcgggccgccagaacatccgcctgcacagcgactccagcagcagcacacaggtgaccttgtggaggcctcgccccctcccacccactcctctcccttctgcctggggtcatgggggttgggtgtccgtcatctgtaggtcactttttgctttatttgttttagctttttatattagcattaaacattgttttttgttttttgtttagtaatgcaagaaatatatggatctatcacccctgcaaaaa

SEQ ID NO: 69774 - DNA, 2524 bp, Homo sapiens
aatatctgtaagctgcacaacagcctggattttgccagctgcccaccactgggttctccagcacccagcatgcaataggtgcttaataaagatctgctgaatgaaatgagtaacggataacagaacaggtattttctctttcagaggcgacttcctacgattctctcaacttgtccacaagttcctgtacccattaccccacaactcacacccacaacataatggcaggaggatgcgcacacagtaggcgctccagcgaactctcaggtgcagtgcccttgcttggcgcgaggaggcgccagcaccgcgcacagaccttgcccgcccccgggccggcaccagcagcccaggcaagtcagtgggcccacatttatggagcgcctcctgaaatcctgggttgcattaggctctcggggtcgccggctgggcagcgggtcggtgccggtggcgggggatcctggctggtgactggggaacatccagggaacgcgggagggtacccggagcaaagttcccaattggacagagcggggtcgggcctcgaggggcgggagcgcttccggcaggggtgtccaagcgagtcgtgacctctgacccgccggagaggtcccaggcccaggcgccactgcggactcgggtcctgcctgctctgctcccctccgcgcaggcgcggccggcggcagttcccatggtgacgggggcgcgtccccgctcgaggccccgcccccagcaggctaggctgcgcggggctgcgggctcccagggcaggtgccgcgggctgcgggcaggtggcggcgcggcgcgggctggcggtggctccacggtaggttgcgcagcggctgcgggcagtgggggccggctggccgcctcctgtccccggccgacgaggtagctgggggtgacggcggctggcgagggccgccaagtttctgcccggccgaggccccgggagaaaagttggcaaagttggccggggaagaggcggggagccggaggatttccccagactccgggtctgcagggagggaggatcccggtttgggagccggggaatccgtctcccgagacttgagagtggatcccgcgggaagatcccgcacagggcaaccaatggatcacgtgccacctggttggcgacttgggagtcgatccctggaggggatcgggcgctggaggcctggggtcccactggatccccagtcaggggtgacggcgaagggtgattcgagactgggagcgagaggatcaatctcctcccatgccagcctgagccttgggaatggattcagagagatcccgtggctaggagctgagggatcgctggagatctgggttactcagcctggagctgctagggtctggacatttgtgcgggttggaggccccggaggtggaagtgggaagcaagggcggcgagcgagacggaaccctggtcgaggggagcccggaggacagcgcggtggttcggggggcgtgagaggggcggcgcgcggggcccctcggacgcggaggctccggacacgtcctctcggcctggcctgcgccccccctccgctcgtcttcccagggcggaggcgccctgatgggattaagcctcagtccccctgttaccaggcaggcccgcgtggtccccgccccgatggcggcgcggcccacccgggctcacgggtggggccctcgggatgggaagcggctcgttgacccccacccgagcctgaccttttcacaccctgctggcacaaactcgcctgggagtggggacgccgcgccttaaaaccctgctgtttgtccagtcccggagcaggcgtgtgacctccaccgcgcgacgcctaggtggctagggcttcctgcctgccgggactgaactttctctagccaggagcagccattatcttttggaagggaaaggactgtacctgttgcacaaagaaaaacactttctttgcaccttttttgtgaccttgggcaaaacacttaacctatctgaatccagatggggaccctctgggcaaaatgggcttggcctaggatggatcggaatgaagggtatgaaacaggtaggggctctataagtatcagtgcctccctcagtctatggcctctcctttcccgtgccccatcccctgtgcttgccttacagtatctaaagattccagaaaccctacttgctatcttttgaaaccgcaggattagagagctatttagcttaacctttcttccaaatgggttaattgcccctctgatccccccttgcagagagaagctctgaggtttggctaatgagtaaccaagacatttggacaaagcttctcccttggtctggctttccctctgctaatccatcaaggttcctggacaaacgtgtgcacccccagactctggcgcctccttccttcctgttgcagccagggacagttcccgaggaatttgtacagacacaagcccagatcttggtggttctggcagggggatcctttttaaaggatttgcatgcttgacaagggtgcaattacccaagagaagt

SEQ ID NO: 69775 - DNA, 1079 bp, Homo sapiens
aaatgtgtgtaagttgtcccaaagaattattttataaatcataatgtaaatcttccttgcttgttgtagtagcagaaatagcaacaatggcagtaataaaaagtaaaaactaacactgattcactgcttcttataggccagttcctctgacatagattttgtgtgtttataggatcctcataacaacctatgaagaaaaatggtagtgttattcccattttatagatgaggaaactggggctccaagaggtgaaacgccttgcttcgcagctagtggcaggcagggaggactagagctttgttattaatacacgagaatctcattccagtgtaatacccctgcctgttggagaaacagctgtattttcacaggccccaggtcagggctgaggctcccagctgactttgtgttgatagttctttcctttttgttttgcttcctcagggaggaaagcctcttctggggagtcctgtttaccgatggcttagcgagcactgccgagggaaggaaattttgggtctgtagggcctccctgcagaaggggagcccagcgggtgcattgggtgcaccgaggtcactgtacactcacaccacctggcctgtctggacttgaagcctgggttttggcaggcactgcccgctcagccttgcccagtgccctgggcagggctggggagtggcttggttagggaactcccagtgccctttggcctgggaagctgcccaagtttgtctttccctttcattttaggccccagcactggaaagtgcttgtctttgtttctagaatgcttgctcacctgcatacctgggactgtgcttatcaagtgaagaggttctaggcaatgagagagaatatagaatgtattaaaatgagtcctgggctgggcatggtggctcatgcctgtaatcttagtgctttgggaggccgaggtggaaggattgcttgagcccaggagtttgagaccagcctgggcaacagagtgagaccctgtctctacaaaaaatttaaaaaattaaccaggcgtgatggtgcacacacctgtagtctcaactgctcgggaggctgaggcatgag

SEQ ID NO: 69776 - DNA, 754 bp, Homo sapiens
gcgacagagtgagactctgtctcaaaagaaaagaaaaaaagacttggatgagacaggacgctttggcaaccagtagaccaccttcttcttggagaggcgaggtgcctggttactgtcagatttaactcgagaaaggcagtggtaatgcttccaagtcctgccttgatgcagatgtcttaatcacagcccctctgccttcctgtcctttaattcattaaaaggtagggaaggggggcggcggggcaggggagaaggcagcaaaaagcatggaggaatttttggaatgcccagaatgctggctgacctagcagagcaggtgtgagccatcttccctggctttggttggagtctgttgggcatgcctggaggctctctgggtgccatccagttcttgtccctgaggcctgagtcaccccgggaaggtggctgtgctgtgaatccagctgcagcctatagtagaagacgccacctgggtccggagccatgcagcccgcagtcatgtcctggctctgttttctccccagccatgggaatggtttcctgtatccaccccagcatccacacccatggaatgggggtgctgatctctgtctttcagcctggctgggagctcttagcagggtcacacggtggacactgggacaaatggagtgtccgtgcgattctatctgggtgggtggtgatgttaagtaaagcccccactgtgtgcatggagctgtctggagtactgagacattcccagacttttattgat

SEQ ID NO: 69777 - DNA, 1231 bp, Homo sapiens
aaatggtgtagtatttgcatataacctacgcatatcttctcaaatactttaaatcatctctagattacttatgatacctaatccaatgtaagtgttaggtaaggagatgttacactgtattgtttatggaataatgacaaaaaaaaacctctgtacatgttcattacagacacaaccatccattttttaaaaacaatatttttcatccgagcttggttgaatccttggatgtgaaaccgacagatactgagggctgcctgtacagataaataaaaaggagataaaatccataatcccacattctaaagataactggtgctaatattctgggctgtgatttagacttttcatcacactctgcatacatacatattgattgagatttcagctccgtgtcttggggcacatgtagaatgtgggctttatactgaggcggcttatattccaccctggctctgtaaccgcttggctttgtgaccgtagggagatcactacccagtatgaacttcagcttctgctctgtaaaactgggttgctatgaggattaaatgagtgaaggtctgtgcactgtttagagaggggccccttctatggatgctgtaattgataagtagtggatttagacaacaggcttcagagaagaccccctccgccaggcacagccgaggtgggaactgctcagaacggggcttgggccagggagtttgactcacacaaagcactctgggcaaactctcaaaccagtcctgatctttatcactccgggatgcttcctgtccctgctgaggcctgggcattgtccaagttaaagccaccggacagtcccagcaggctgggaggtggcccctgtaaaatgagctcaccaagaacccttccacctcccccgctgacttcagcagtggcttctggaggacaggctcgagacaccaggggagaaggacaaggtcggcccactacctccaagaaggtctgaaagccatgatgtcacctggacactgcaggatcccagaaggccagagagaggaaagggctgggggagccatagggcagggcaggtcatggagcctggttttcagaggggagtttggggttggagacatctgtagggaagtgaagctgtgctgtactagttctgtgaccttgaaccaatacattatacaacctgggccatccttggtttccgtctctataaaatgaggctaatggtagggcttacctaatagggtagatg

SEQ ID NO: 69778 - DNA, 653 bp, Homo sapiens
catgagccaccatgcctggttattgcatataattatttatatatttgtttatctaataatatctgtctctactatggaaatatgaagctccaggagggcagggactttgctccctgccatgtcccaagtacagtttctggcacatagtagggacacttaataaatatttgtcaaatgaatgactaataaggtcctcccaaaaatctgggtgaaaataataatgatgctgaataatagtgatgactgtatattaataataatagtagcaagccggtgctgaatgtgccgtgtagacccgggcctggctctgcccaccctctgcccagctgcacctcctttggtggtttgcacaacgggactttcaccagctctgggaggccctgtcacctggcaggccctcagcaaatgattggctgatttgcaggctctgctccctttcaggaaaggatttatcagccggacttgggtctgggtggggcaggtttgggtgaggcctctcagctgcgtgggagatagaacttctgggtaagctgaggactgaagttcaggtttccagcctgacttttcccagccttgtgacattgggcaggtctcaccccctccatgagctttagtgtgtgatgtgatgatggtgacaggtaccaatgctaccg

SEQ ID NO: 69779 - DNA, 558 bp, Homo sapiens
cactggcccaaggcaagagtgtgggaggagggctgaccctgagccacaggaaagggagagtccctgggtggggaagaaactatttgggatgagttcccaaagcttagcaagagctcaagagcccctttccccaccactccccaagaaaacacgcactattgtcttagctgcaattttggtgccgggagggtgtgcggggtgaatgtccgcccggcaaagggacttctgccaaagggactcttgtttatttgagatttgaacaaaaaaaggctgtcctcttaaaaccacagccccagaaaccttgttgggttttgggatcaaggcagaagatggtagagagctttttctagctctttgttaaacattaaaaacatattcttttgatagaacattatgagcaccagacggcaggaaaaggaatattcagaagcccatcatcattggggaagcacaatgaaattttggcaaggtgatttattttttatttttttatttttttagacagagtcttgctcttgtcacccaggctggagtgagttggtgtgatctcagctcgct

SEQ ID NO: 69780 - DNA, 1235 bp, Homo sapiens
ctggggttcaagcgattctcctgcctcagcctcccgagtagctgggactacaggcacgtgccaccacgcccggctaatttttttttttttttttttagtagagacagggttttaccgtgttagccaggatggtcacgatctcctgacctcgtgatccgcctgcctcagcctcccaaagtgctgggattgcaggtgtgagccactgtgcctggcccagtttcctcctttctgacgtggggagaataataatccccatagtcactgagtaattgcgagggatcatggccataatctccattcagagtttattttagagccggggatgagtgtaaataagcgtggcgtgtgtgcttgttttcttgtttgagttgttatttcctctggtgtggggaggttggggactgggctttgctctgtcccctccggtctcttcccatcccctccttggcacagccacatcagcattttgggcctgggacacccctcctcccatttacagagcgggcaggacatgactcatgcctacactggcagacaccgcccttggcataactggctgcgcctgaagctaatgtcctaagagattgtctctggggcttagggattttccttcgggtaattgggacggaggatggagtttggaccctgtaggagcagagttaccctaaagagctggattcctttaggatgtccatgcctagggctctggcaggagacaggagtcttaactttcagggttcacatggtgactggtaggctccgggcttttactgggggacagggtctcagatggagggaatgtacttaccgtgtgcctgtaaaattttgtctctctttgccattcctgacttctgtaaacattggatttcttcccctgcctgactgaacactggccctgtcttgttcacacctgtatctctggctcctagtacagtgcctggcacatagtaggagactggtaaaagtttgatcaataaatgaacaatggccaggcgtggtggctcactcctgtaatcccagcactttgggaggctgaggtgggcggatcacttgaggtcaggagttcgagaccagcttggccaacatggtgaaaccccctctctactaaaaatacaaaaattaggcgggtgtggtggtgcatgcctatagtcccagctactcaggagactgaggcaggagaattgcttgaacccgggaggcggaggttgcagtgagccaagatcacgccattgcac

SEQ ID NO: 69781 - DNA, 4479 bp, Homo sapiens
atcctgtatccaaaaaaagaagaagagagacagggagagaaagagaatgaatagctgtaaggactgggaatacatagaaaagaaagagatctgttggccatattgccagagagtcctttgtgataaactttctcaagtgaggccctttgaccagtgtctagaaaacaaatatttgttcaaaactgaagtgaggtggtggtggaaaggacataggatgcattctgagcgacctgggtttcaattgtgtacttggtgtccgaacaataaatatttacagagccctgactctgggccaggtaccatgtcagacctgggaaaacctggggtgggagcagctctggtgcatgcctggtgacatccttgctgtgtgaccttgggcaagtgaatctatgtctctgaatctgcatttccttgtctgtaaaagtagtggggttggggggacatggatccctgctagaaggagaaacctcctttaacaggtgtgcctgacctccaggatccagctgctgcccacccccttctaacaacccctgacatgtttgggatctccaggcagaggacagaaaacctgcatgggtcagatgagcggggcctggccgaggacagtgggtgttagggtctagtcgtacccccaacccctagtactccagccctgtaagggttaaaacccagggagctcacgtgacctagtgtaaaccatgaatcattcccattgctcccagtgctgagcctgctgcccaggacagggcagatgctgtgccccgggttgccatggcaactccgcctgtactgaaatacagccctccccagtccttcctgggggacctcagaggctgtctcacctggatcagtgttgccttccagagagggagggagagacagctgaaaaggagagagagaggagagacgcttagagacaagcaagtggaagttgagacacagggagagggaggagagcgaggctgagaaatcaacagagaaacagaccacgagagggagacagactgacagccgaccagaggtcccaagacgctgcctgtaaccttagaggcagaagccgtttcccagcagtgctaaccttcccggggctgccagatcgccgacatacacgcacacacacacagagtgcacacacatgcacacacgtgcagccgcatttcctggtgcgcttgctgtgagggcacaggggtgggtaggctggcaggcacgtgaagttgccatcagccccgagggaccgtgagcgagttgggacttgggggagaaaaaaatgggggcggacgtcagctccctgggcggccgccgccaccgcctccgcctccccgaggcccctcctgcattcctgggcagcgaagcccctcgctaagacgggggctgatgtcatcccgggctgctcagccaggggacccgggggccctggtggctgcctccggaagtgagctagccgcctgccggccgacaggtttggaatctccagccagaggacagaaaacctgcatgggtcaggtgagcggggtctggccgagggcagccgggcagggggcagcagggtgcggcagcttgcccaccggaacctcccagggtgcacctcaggggggctgcctacctgaagggaagtgaggacgagggtgcccaaaggccgccccctccacccccacccccatccccatcccccgcctttcgggaccgtcacgccctggagtgagtgcagccggcttgttcctcaaagctccttgtctcggccgatcagctgggtgagccctggaactggaacctggactgcccagtgtgttgactttataactccgctggggtggactcccagcctggcacttagctgcctcttaattctgagcggcacccgtggatgcagccggctcctggctcagggatgtttacttacccttggtttgcctgaagaaagctgctgtttttaattttttttcctccaagcaagcccaaaacttccatgagcaaaagagtccaaagaggcaagaggacactggcgttttaattgctctctccctccctaacttccttcttccctctcctcctggctggccccatggattacctgggagataaactcacagtggcccagacccacatgacccagtggatgggcaccgtgaggaggtccttccaggaagccctcaatttggtgaccaccacggtgggccacgaacggacgagtgcagagtcggccagccggacccccttcaagcgtacttcctccttccgacacctggcttcccggagtcgggaatccttccgccgcttctctgctcgcagccaacagagattttcttcactgaggaaaaggcatacagattcggaaccgccagatattgtaagcttattatgttttaaaaaatattaaaacaacactgaaagctcctcccctccagtcctcccagggagggggtcccagacatcaaaccggggaagttacttcttccagaatagttgtcagtcaaagcccaggcacttcctgtcccctgtacctgggaaagaggcacgtagcaataattcctctctcctgaagtcagtcaggacatttttgctggagtcgacgtctgtgtggacagggccagcacgtgagttgggctgaatttgccagttgatttatgtttaagtgtgaacaccccaacccccgacacgaaagctcatccttctccctatttttagggtggattagtggcacctgcctcatctcctctcaccctcctaggaagcacaagtggcggtgtcatgtgcacgctgagttgtagcttttgtcgttccaccgagctttcattggattgccaaggaaagggtcttaggagaccgaggtgtggtgggcgagtttgcccgctggccgtgaaccttgggtttggtgtgagtgggccagggagggaggccttgatttcttactcaggcaggctcgggagggcttggattgggacagcagggtggaatgacagctaatgattaaaaccttggcctgtgtcctgctaggcgacagtgcagaaacaatcgtaaggtccttctgatgatttggagaggtgggactgggcccagaaagcgaaagtgcctactgtgggggaagcacagtgagtgagtggcagagccaggtcccgaaccccaggctctgacctccccattcacggctctttgcagtccagctcccagcagatgttctccccagaccctcccaattaattcagggctgcccaggtcactgaccagacctgagcctaaagagagggcctgccattttcacataggagacttctgccacctgactgtgttggcccagtttatgggagcacttgaggacaggcgaagggctaagccagcccctttttctgggttcctcctagccaggagtgctatagtcattaagggacccagcatttagggaggagccctgagctggccctccctacactcgaggtggcagggctcacagctgccctgccaggtgcaggggctcagtatcccctctgctgacccagaggtgtgactcaccccaggtcacgcagcagccagagcaggcagttgcaaatgcaaggcaggagccgagcacttgggcatgacacgtgtctcgttcacaggacgtctccttcacagtgggtctgtgcttctttgtggcccagaacaaattagtggggcttggatttatgagacagattccccaacctctggaaggtgtgacttgccacagggaaagaaggcccctcattcattctgtctccctctgtgtgtatctctgtctctgtgatgtgtctttctgccttgctctgtctctgtttgtttctctgtcactcctgttctctctcagggtatggggttggtgacaggcaggctctgttggcatccctctttccccaccctggggagtggtgtgaccatgggcattggcatgaatcccctaggcgtcttaccctgtgttacaggttggtgccactggcaggagtggcctctccagctggttgaataaatgaagttgggtggtgcagagaaccattccgtgttgcgtcgagatgccaccaagagtgtaaatacatgctaaatacattcaagcttcaggctccttcccatgtagccaccctactgggtggtaggcaccagctggccttggccttgacagcttgaatcagactcctggctgaggagccctgacccattcttaagcctcagtttcttcctgtgtccaatgaggagaaccaaggccttggtatgagattgaagcaagcccccagcacagtgccaggcacacagaatctgcacacttgtgaatgctctctctctgttgcttgcctagatactctgcctgagcaggataaaggcagagttaggataggaacatgtgcagtgttgcagataagtcaacgaaacgcaaggccagggaccccctgcctaggggttgagtcctggctctgccgcttcccagctgtgtgatcttggacagactccttccctctctgtgccttgatttcc

SEQ ID NO: 69782 - DNA, 1989 bp, Homo sapiens
atttttaattgagtacctgttttgtaccagatactgtgctcagtagaggagaaaacaggcagggtctttgccctcatgggactcataggagcagggagacacattaaacaattaagtaaaccaatgaatgaacaaagaaagtactctcagataatggtgagggctctgaagaaaatgtaacagggcatggggacccatgggagtgtattttaggaacagtggtcaggaaagtcttctcaggaggtgacattggagcagagacctgcatgagtgaggggatgagccccagaaagtttggagggacattgggacagcaggaaaggcagtgcaaaggccctgaggcaggttcgtgcctggtgtgtttgaggagcagcaaggagcccagagtgactggagcagcacaagtcagtgggagaggtgagctcagagaggtgggccaggggccaggccggatagggccagggagggggattctgataggatgtcagattttagcattggagggtactgagcaagggagagctatatctgtgcctctgtgtggagtgttggaagagaagaacagaataacaactctagctaccacttcttgagtgcctgctgtgtgccaggcacaggttgttactaatacatttctcctggagatctgggcttcaaagaactggggtccagctgctgtgtgcccttcccccatctcccactgcctgtgccaactgccaactgccacctgctacgtcatgtctagagccctgccaggtgccctggtctcgggctgcaccttggggtttggattcaaggggttagacttaaagccagccccaaaggccagcatgatgtcacttcattctctgctacagtgtcgccaggcaggcaggacaggctgctttctttttggctggcctcacccaatttcaggtctcctttcaccctcctggcagcagaatgatgtcacccagagaacaatggttcctttatagatctagcctgggccaaagtctgggtctcagagtaggagcctctgggagagacctggagtgaatggaggggcagaacagagggcttgggtgctccacagggatctgcttttgttaagtaatgttaatctcctttcctgtctccccaaccaacaaaatacggtgtgctcaatgtattcttggaacatatagaaaaatgtaaagaaaacaaagcccacccattctcctaacatcacattgatgaaaaccactcctagcattggaatgcatttccttcttgtctttttcccccctcttccaaacaaaattgccaaccctctttctctttatatcctttaaaaaatgtgaaagttttgtatgtctttatgacacttttaatgcccttgcaacatttgtgtgctccataatttattaacctgtctggctggacatttgggtaatttcccgttctgggctaccaggagtgaccctgcaggggcggggcctgcatgtgtacttcttcatctggatttctgagaggtccccgaggtttaagtaagctcacgttgctttctgtgatcagaaggcccctttgttactctcacttttctctccctctccctgcgttttctaatctcagatgttttgttcagacaaatgcttcttgcttcctcatcaggaagtcagaaatttcaggaaggaaatctggattgatacgcatcacagggagtgttacgttttcggatttcatgaagaatggagtctttagttggccgggcgcggtggctcacgcctgtagtcccagcactttgggaggccgaggcgggcggatcacaaggtcaggagattgagaccatcctggctaacacggtgaaaacctatctctactaaaaatacaaaaaattagctgggcaaggtggtgggcgcctgtagtcccagctgctcgggaggctgaggcaggagaagggcatgaacctggggggcggagcctgcagtgagccaagatcacgccactgcactccagcctgggcgacag

SEQ ID NO: 69783 - DNA, 1649 bp, Homo sapiens
gcaaagagaaagagatttgtcatactctgaaaacttaattaaacactttgaaaagattccatacaggcaaattgctaaaaaaagaagtcccatcctgtgaggggcgggggacactgtcaaagacaagggtgaggaatcgtaaacatctagatgagttctacactccctgcttccttggtgtctgggcctccactcggagctgtgcctttcccggcacctgcagcacaggtgacccagcctctgggtggagagctcctctccccactgccctcgaagcctgtccctcctggggaaatagcacagcttagaggcttagagtcccatgcctgaatgtcaggggcaaggcatgggtgaccaggaagacagaggtaagattccagggccccacctcccataacttacccaccacaccccaaaccaaggttgctccttgaggtttttaatatattggactaatatgattttgcttaaagagattttttttctaaagctcaaaaatggaaaagaaagtagaaaaccagtgatgtggtgctggtcaccacccccagtcagaaatgaggagactttcaaacagggtgggggccttgcccagtgacacacagggattgctctggaagagactgggcttccaactcagagttcttagcatttcgtatggtgatttccatgcagtgatgaggagggtgccatctgggtgttttccagccctggagagctgaggccatgctcagggaacacacctacagcctgcgaaggtcccttttccctccctgcccccatggtaccctctgcagaactggagttttgcacaggtttggggcttaggatgcacaaagtgcccggcacgtgcctggtacctcttcagctcacaggtagtgcccacacccatgggcctagcaaggtccctgctgcttctaaggggactagggtctttggctcaggttttctccctctggggcctggcaggtggcacggggctgctcatccctgagggaaagttagggatgaagtcacccttcaggtccctggcctggtcaggcgcacaggccatttgcatgggctcaggctgatgtcaccctgggaagccattcaacactgggggccaccttcagccctggctgcccgcctgcctgttgcatgtgtcctgttttgtttgtcgtgtggggcagggtcagggaggagccctgtggtggagacagttttctgtgctgtctgagaacagggtgatgccatccttcttctcactgaagcatctcaggttgggagcaggctggttccctgttcagatcccagctctgccatctgccggctgggtggctgtgggcaggttactttgccccttggtgcctcactgtcttcccctctgaaggggatggccggggcataaccgcatagagttgtaagattgacacgagttgatgggtgtgaaactctttagcgcagcattggccattaggaacacctgttagccattgttgttgtgattatggtggtggtgatggctgtggtaattgtctgggagatgtttatgagtgctgttatattattcccagaattgattgaagtcacacttttcaaagaaaacagacacatttgtcccttcttggatccccacttgttttaaatcaatgcaacttaacaagacacat

SEQ ID NO: 69784 - DNA, 1638 bp, Homo sapiens
gcctgggatttctgggcagtaccctgctgggatttctgtggcagtacccagaaaatcctgcccgtttttgcctccatttgtcccatttgtaccacagggacgtggtctcccaggtttctgagcctcttctgcatgtcagcatttcgtgtatattctgattatagccaaagatgcttgtctgtgtatcctggaggagatggagcttggggcagagctatagacctttgagaggatccctggagtaggtgaatgtagcacatcatgcctctcaaggcagaacttagaccaataatggtttttttctttaaaaaccaaagagaaacttttccctagttgggggatagacaagtagtgagtttcccattaaaagggtacatttttgaggcattcagaatgatacggatacttcaggcattaggaaatgtgaaatagtgaggtttagcaagtagaggctgggcactctagatgcaaatacctttcagctccgcaatcctattattctgttcaaagataaccaggtggtgagcctatagcagggtaccaagtggctttccctatatttgctaactctaaatgactgggagtcgctgcctggggtgcagtgttagggattctctgagattatctaagctcacttctgtaattgattattgatgtctgccatgggcaagggagtgttactgactttctgatttcatctttgctgttttcaaaagggtacccctttgtgtttccaacacgaaattgttactttttttttcaatcagggaacaggaggacatggatgtcagcaagaataggaatagcagtcaccaaatcccacagcccgaattctcttcctatgttaccaggcctgtggtaacacctctctgtaaaggtcagaggctaaatttaggaaagtgtcatggaatcatggaatggttattattcatgatgactgtcctttgtttccctcagttcgggagaattacataatggccaataattgatgttaaaaaacaggtgataaacaagaacatttgagattaatctcttgtttcttaaagaggcacttttgtatacctgcctgattttcaaagctgtccccgattgttaggtaaactggacatgtgctgaggaatcgaatggggcacagtttaccaacttctataagtgtgtttttcactttctgctcaatcactgttatttaccattgtgtcctcatcaagtgattttctttcaaaccaaaataaaagttgcccaaccctttctgggagagtttgtcctcctgccagtacctgcctgcagctgggaaagtttccagtaagtaaacagtttacagtggaggagattgaggcccagagaggttaagtgacttaggcctaacatgtcacacagtcaaagagtggcagagctggaattagaaccgaggcctgtttatctcaaaagttcctccacttaaatatgccaagtgaatggctgtcctgcagtagattctcagtgtacaatgactcatttttcttgtgcttgtctaaaaattgtttgcctctgtatctgtcaggatcagctaggttgtgctgcagtgacaaatggccctcaaaacttcagtggcttaaaacagaaaaataggttttgtttttattttttgagcattctaaa

SEQ ID NO: 69785 - DNA, 392 bp, Homo sapiens
aggaagggcagtccatgcaggaagttcacagcagtgggcaactgtagggcttatcagggaacagcactctgtcctttctcgctgaagcaggacatgagtagggaggagcatcttgtgatgggcctggtgcagagccaaggagcttgaactttatccaactggcaccacgagggacgtcagcctgggagcttccagctcacctggaatttttgcccttcagagccttgcaaaggcttgggatgttagaagggctcagctgaggtttctcacccaggattctcctgccctgaccttgagtcttatttgcatctcgctcccgtaagtgctctggtctacccttcagagaatgaacagtgtttactgcaagggctttattttccagaagcggaggg

SEQ ID NO: 69786 - DNA, 5953 bp, Homo sapiens
aaaaaagagagagagttgcaggcgtgtgtgtgtgtgtgtgtgtgtgtgtgtgtgtgtgtgtgtgtgtctgtggttgattttgaggcctcgtagctctggggctaagctcaagtgttgatttgaagtcccgccaagttctggtagaatgatgaggcatgaataacttgtaatgcacaaggttaccaggatactaactagagaaagtgctgattaacagcttgctttcttaaactgcatttacaagatgaattcccttaggtaaccctagcccctgcatgactccaaatttgacagtctgtgttaaagagcagagaatgcagttatattcaccataacctgctttgattgaacattgagacacagagaagtagctcgtccaaggtcacatagctactatgtggtggtctctggattcaagtccaggtgttctggctctggaagcagtgtttgttcagggaagactgctgagaaactggtaaatgataattattatactgtggaaagttctacagcagtgctgtacactacagctttctacagtgatagaaatgtattctccatgctgttcagcatggtgggtggctgtggagctcttgaaatatggctagtgccacaggggaactgaattcttagtattagttaatgtcaatttaaattaaattcaaatagtcataagtggctagtggctactgtatcagatggcacagatgtagagacctgaggtctaggggacaatgggagcctggggcctcctgagccagccctcagggtaggacggtgggaaagttctgggaaggcttcctggccatcaaagttgaaatctgaatggtaacttggaggtggtggctgctccaccaggcctggaggtgagagggaggaatgtgaggggagggaaatggggctggaggagccagtgggagggactggggggtgagaggaggggtatgggaggagggaagcaacactgaaggagctgctgagcccaccaggccccgcacccatgcaggtcccgcaggccgtaaccctttccctaaccccagcccttacccggagggacgtggggggctgtggaagggctttgagcagggacctattcagttttggaaagtagaatgagaagcacatacagggcgaaggatgccaggggaggtccctcggaagctgccgccgtgggtgaacagatagctggtcatagctggaaggaatgttgttcgagaaagagactttgaaggactgaggatcgatgcagtatggcagtgaaggagagagaggagggagcagcgctggcctcaggaccctcagtctggcattaggcggtggagggagaaaacccatccatccctgactcttggagagttcagatccctgaacctgaatcccaaacctctgtgggggagggcacacagatggttgtataaagggaagccaccatgttttggttggacaccatttatccccagggccatccgcaagaggtctggaaactgcccccctgccgcctgccctggtttcaccctcagcaatggacttgaccttttggtttctagggggcccctgcaaattccttcttccatcactcagccctgagggggatccccctctctcagggattttaagaaccttttgccaaggctccattcccctgcctgactccaaagagggcctgaaaattgctgtcatcatgacggttcccatctcctgggtacccatttatgtgccaggcagtgagcttaacactttctgaagattatctgttgatacctcaaaacagtccttgtttttccagtgtgaaaactgaggcttggatgggtggggtcacttagccaggccacacagctgggcagagcagagacagcaagccctgccctgcgtccccaccctcgctataagctgtcactcctctgcctcccgctgagcttagcatacacaggcacaagcccagcatccaccttgcagcctcgggacaacaagctgcttgggacaacgatgtcttgtcctccaccagaaacaacccctaagtccccagcatctggcctctgaatctgacctctgaagggcattaagttagggaatggccagttccatcacatctttgaaaacagtaaggagctgggagcgggctcagatgaccacttctagccctgcgtcccagggagaattctgtcgatggtgctgtgcctctgagtatatcaggtgaccttgccttgcaaggcaaaaacataacactccccagcagggcctgagtgcatccctacagcgtgctaacagctatccctatgtgctgcccgtaggcttggaagttaggcagcctcttccaaagctggcttgctcatctggatcccaaagccctttgacctggtgactctatacctagtaatttctcttacgggaataattgcagagatgtgttgatttagcctcaggggtgttcgtcatattattgattatagtggtgaagaaaatcctcagcaaccaaaagtcccagcacttggggactggttaattggaagatgctgcatccgaaaagtgaaatattcttcagccagtaaaatggtgatgtaggtgaattgatcctgagaaaattccgggcaggactatgagagaatactgtctttgggtgataagttcttttaaaatgtattctttgtgattttccgttactcctaaatgttttacagtgagtaaggtgttatgttgtaactagagacagaaaagcttctacagacagtagaattaagagtggacagcagctcttatttgggtctatgagtgtagccatttagcaggggtgactgagggatttattctgaattcccgtccttgtatacacctcattcacagtattcccacgaacatcatggggtacatgagtatctctaaaaggcaagagaaagagaatggaaaggaggtgaccatttatgggatgtttcctgagtgctgggccctgttctaggagctgtcaagtttgcgcctgtgccctgggggtgaccattattttctcactgaattcttgtaacttctctgcaattcagagagggaagccagagccctgaggccacacagcaggcttttccccaggtgcccactcattctgcaggaccacatggaccacaagtgctgtctcggctcagtgtggttccagagaacctgagaagaggctggctcccctgcctgggaagaagataaactgctgaggaacaatcagcccacctccgttaactaagcacctactgcgtgccaggcaggctccaagaggggaacagaaacattggagcatcccagtcttaaagggcacatctgatgagttgcagaatcctagagcctgcgtctgtgccgtgacctcccacgcccagttccccggtgcctagcatgtagtaggagctcagtaaatatctgttgtgtaatataaattatgtgtcacgttctgcctggtacaattgataagtcatccagggtatacagtggtggctcacgcctggaatcccagcactgcgggaggccgaggtgggcggatcacctgaggccaggagttcgtgaccagcctgggcaatgtggtgaaaccctgtctccactaaaaatacaaacaaattagccaggcatggtggtgtgtgcctgtaatcccagctactaaggaggctgaggcaagaaaatcacttgaacctgggaggcggaggttgcggtgagccaagattgcaccactgcactccagcctgggagacagggtgggactccatctagggaaaaaaaaaaaagtttagggaggagatatcaccatgggttgcaatagctttgtttaagaaggatggatagggaggtggaatgatacaaacaaggctgcagaggccaggagtgtgtgaggcttgtgtgggtatggtatgtagtaagccaaagagtgtgggatagagagtttgtttggagcaagggtaggggatgggatcagacaggaaatgtgggggctcactttcaaggggccttggatttctacgtgaggacaatagggaaccccggaaggtttttgagcaggagatgatatgaagcatattccagcagaatgtgcctcctgatctcaaatggaacagaacgtaaggagtaaagatgagccccgtttgtctttctgggccagtcttatgccctaacccccatctccaaattcctcatcaaaagacagtgactggggctgggcgtggtgcctcaccatgcaatgtaattgcaatgctttgagaggctgaggcaggaggatttcttgagcccaggagattaagaccagcctgggcaacatgacgagaccccatctctacaaaaaaatttttttaaatagctgggtgtggtagtgtatacctatactcccagctacttgggagtctcaggcaggaggattacttgagccccagaggccaaggctggagtgagctgtgattgcaccactgtactccagcctaggtgacagagtaagaccttgtctcaaaaaaaaaaaaaaaaaaaaaggtgactgagagcgtcattcaaagcttcaaagctcaggcagccaaggccgtctgagtcatcagtgtgccaacggcccatccaaggattggacttttggttttgtcttgagggcaccagcttctccccactcaacaaagcacaagcctaagtggcagccacttcagtggccacatcacagggaatgggcttttaatttgcgaagcagacaaatgagggaagacagcagttcagtcatttaatggggatttatggcctttccaccgtgtgccaggcttggccctgtggtcagttctgtgctaatcagcacccttgctccctgcgtgccctctctgagtgcccaggccgagggccgagaccagcaacagaccgggttgcaacagcccaagggattgatgttgcctgaagcgcagtggtttggacctgggggttgaattccacttcgctggctgtttactggctatttgatttggggcgtgtaatttcatgttttttgtttgagatggagtgtctctctgtcgcccaggctggagtggtgcaatcttggctcattgcaagctccgcctcccgagttcacgccgttctcctgcctcagcctcccaagtagctggaactataggcgcctgccaccacacccagctaattttttatatttttagtagagatgaggtttcaccatgttagccaggatggtctcgatctcctgacctcgtgatccgcccacctcggcctcccaaagtactgggattacaagagtgagccaccatgcccggccgtaatttcatgtttttaagcctcaattttatcatctgtaaaatggggatcgtaataagatccaccccatgggattgtcgagggactgtagttcaaccaggtgatctcatgtcaagagctcagcccaatgcctgtcccaagttcggtgctccatggatgttctgtctggtgatgcggttgggaaacacggtggtggtaggaacctgggcaagcgggtgcatggagcttcccccagccagatccatgagtctgagtaacactgaagatgagagaagtgtgcccaggctgtactgtgaggaggagagagggccattgaggtgggggccaggcgatgccctgcagggctccacatgccaggtagggtgaccacttcatcccagttggcccacttttagcactgaaagtcctgtatcctgtgatatcttggtaaaccaggacgattggtcacgctagtgcccagccaagatgtctggccccacttaggaaggcagcgggttgctgggatgggtttgagctgggggccatgcgatctgatttgtgtgtcagccgggacgggggttctgagtacatttcctggtagaaatctcacatctggcttgtctttgcaggaccagctgaagcagtgtttctcccggcagcccactgaacccaaggacactgacaccctcgtgcacgaagccggcagccagtatgggac

SEQ ID NO: 69787 - DNA, 914 bp, Homo sapiens
ctttcaccagtggccctgtgttgcttaatctccactttctgactctcctccgcccccaaacctgctgctctggtgtcatagctaagccttggtttgcttatctgtaaagtgggctgagaatccaactggtgacgctcaccagtgctgaacatcagggaagcaggagtgaacaaacccaggctcctgaagcccttgaggaatccggtctgctgtggaaggcaggcacagaaaatgatcatttcagtaccagatgacacaggaagccagtgctggaaccaagtcccagtctcccaaattgcaccagaatgccaactgtattatgcaatgctgagggaaaggctgagctgcctccctcctccccacgtccagctctcacaagtgtctctcatagtcctggaaccaaatggcacttaatttgggtgaggaaagaggcccttttgcccccctgtttcagacatcatgtgcttgcaaactcactttatgctccagcaaccttgcaaaaggtagctcttcgttccccttttattgaagaagaaatgaaggcagacaagcctgaattgttggtggaatttctcaactctgtgtatgccatgcaggccacacaatccccatgtgggagcgccgtgactctgttgctcctttagtagacggaagttttgcttttctgtcatttcttccacgaatagaaaatcagtcagtagtggatgcgtgcttgtgtctgtaattgattttacaggcccttacagtgtgaacatctttcagtcactagaactaggttagaggttttctgactttctttccctccctccctccctccctccctccctccctccctctcttccttccttcctttctctttctccttccttccttccttccttgttctctccttccttccttccttcttctttttt

SEQ ID NO: 69788 - DNA, 703 bp, Homo sapiens
atccttccttccttccttccctcattttctttcttgccacaaagcaaatgatcttataaggtagcctaacgcaggaggcagacagccacaggccctgggtgtaggtgagatggaggccctggggctcccatgtggatgcaccgagtaactgctgaggcagatcttgggattccagaacacagctccagtccactgtgctctgtgaaaacggggctctggccattcattcatcagtgttagcttaaacttcaatctctaccacagcagtgctaggcgattattaacaaccaggggaggttgcagggcttgtcctggaaagaaccctggagttgggctgcgggcagacccggtgtgaatcccagttcataaaagctgtgtgacttcgggctagacctttgagctttgggctctctcgccctgtaaaatggggaaagccaggatctgccctaaaagaatcatacacacatggaacgaactcacatttgtcatatttcttgagcctggtagagcaaaagtgatgggtgatcagtgcacagaagctatcagtggacaatggtaatgactgctgttgctgggggctgacccaacacggcctgggagagagaagccacttgccaccactcacacctcaggtcccgcaagggaactttatgcacaccattgtattccattcccaacatgccctccaaaaatgggtggatat

SEQ ID NO: 69789 - DNA, 702 bp, Homo sapiens
ggtaccgcctctccatctgggttaatagaggggtacatcccaggcaagaaatgaaaggtgcccacattttgctctgggatgaactaggggaggggagtgataattaactcagtaattacatttgccctcgggctaatgctaaaattagcgtgcattagagtttctttcctgagcagacacaggagggagctgggcagcaggagtggcttgggcaaggtggcacaaagggcacctccagagccctccacaaatgtcagcaaaacccacaaatgtcaaggccggctccaccgcacccagcagatgaattcacttccacagcctgagactgccagctcatcaggggctacttaaaatccagccctctgacacctgttggatatcaccacttaccatccccagttcaagagatcaaagggtggaacctgataggatggctctgaagttcaccacaaaagcgtaaacatgcaagaagagccaacacatcttttgaaaaggacagtgaggtgggaatttgcacaactgatctcaaaatatggtctgatgcttcagagatggagacagcagcactccagtataggcagtggagcacagggaagggtctggaatcaggacccaggtgtctgtggacactacacataaaagagcagcattttcaatgaatggacaggttggatcatcccaccaaggtgttggacaactccc

SEQ ID NO: 69790 - DNA, 592 bp, Homo sapiens
atgaggaaactcaggctgagggccggcacacagctctccagagctgaagagaatgcagagagcagctggagccagccagtgggtccctggcgccagctcgtagcaagccacagccgcctccgcccttcatgcttgggttgcgctgccccaggacagccttccagggtggcctggcatggagcccagaccctgctgcttcctgaacaaataagtgaacgaggccaccaagccaaggggctggatgcagccccagctcctgccagggcctccccaacagactccctgtttggagagcgcattgtctccaaggcctcaaaccacaaatgtccggctgtctcacagcttctgtaacctgaacttggccctcaccctgccctcccagggctcctctcagggcccaggcccctcctctcagaggccaacactgactacccagctcattctcatcacctggctcattcctgaacctcactcagcaggagagtctcaggccagatcctcccaccagccacctccaccaggacgcatgagccctgttcatgctggctgggagacacaaccaaccaatatcaatccaatcagtggatgaact

SEQ ID NO: 69791 - DNA, 4038 bp, Homo sapiens
tactttaattttatatcatgtaagtttcacctcaattaaaaaaaaaagatcaacttgacacttttcacctaggaaaggtctggcttcagctttcatttcctatcagtcctgcctaaagccttccagtagcttccactgccttctggatcacagtgagactccacagcatgatctggcctctaaggacctctcacaggacgccccgagggtgaaggagcacccctgggcccatctctgcatagctgcacagcttgtttcccttcctcccctctacacgggaagccctgcctacagcggaggggccttatttgccattctatcacattcaaccccagcacttcacacagtagcagacaccaaagcgaaacagcaacagcattacactgggccaggtgcacgttcactcactgaattcatggtaggaaggattcttatccccattttacagctgagaaaactgaggcacacaaaggtagcgtcagcttctcaagcttcccagcacagcaagcggccaggctgggatcagactctggacacaggggctctgtccacagtgctaactactcctgccccccagggctgcagcagtgagtgagtgaggtggtcagtggactggatgtccaaggtcacacagactattgtaataacagcctctagaccggccagggccagaaagatcaaggactcctacatacaactgccactgcagcactgccgctgccagtccccagcctgggccagggatggggctaaaggtctcacacagggcactaagggcttcccaaggcctgggagaggagcgaggcaagatgacagaaactaggtatggtgcccaaagtcaaacagctactgagcatgtaaatccaggtgggtctgaccccaaaaccccctatcagccctgcaacccgttgctgcaagggagaaagcaactcggaggcctcacctgcctgcaccttcaccccccatctctgtgtgtgagttctactaaatgcctgagcagtgacacagtgccgctgaaattaaacggattccaaaaacgacaggaagcacgaggtggatctccccagaaaagtgctgaacaaatgttggctcgggttcacccgggaatttcttggaactgaacaagggaagttcaacgccaaggggccctgctttagaggggactctctcagggtgccccacacagcccttagttaaccccactcagccctgctggccttggccttgggcatctacaggaggaaactccagggtgaaagggggtgcctagacaggcgggtcctggaataagcacttgggccccgaggagagaggcctagggcttggaagctggggaggttctcagcactgggaccactagaacaaagccatttccgtgggttcacagcttccaattgcaacaggaagcaatcaggaaaaataattagctgcccacttactggcttcgctgaagtccgaggcatgtatctcacacagaaaatcagggacataacatcaaaaccgttcctccttttccttttattttaggactggatcaccacatttgctggggctcccaggccttgctgcctaatgttaaaataatcaactctatttttgcctcacatacaactgaactccacagctgtagttctttctccttaggggctccaaccacatgaacgacagacatttgattccagcaacatcacctaaaacgtgcacaaaacccaaactgcaatgaggtgaaaggcaaacgtggtcagcctagaaactccccctttaaaacaaacagcttcctcaaaaccccttttgcctccttgacccacgcatttccggaaaaaggaacggtgctggcctgtactccccagatactgtcgctgttttgtcttcaccttgttttgctagctcccgacaaggccccaaaatgtaaacacgctcctgagagaggcaaatttggggtgaaactgtccacagaatctctaggtttgggtcagaggtaggaggacttgaaacaaaggccaagctcctcctgttccccgctgccccctacacctccagaagagaggctgcagcccaggggaacagactacacggccacccccctgcaccatccacactggaaatattcaaggagacagctgtttgccttaaggaggcacagacaaaggggcccaagatcctcccagctaaactgccacaaacagaacaggagcccaggcgtgcacaggcacttgcgggccgtgccacttggctggccatactccagaaaagcaaaacacgcacatccgaagagaatgatttaggcagcaagaggcttgcttcaaaaaccacatggccatctccaaattaaaagaacatgtgtagcgtttcacaaactgcttaagtgtcctgagtcctcctgacctcaactccaccccttgggaaacaccaaaagttggagacaaagttgcccggccttactctctccccactggagagtacaactgaggcacgaacctgcctcccctactgtcccgcgctctgggaccatgtcaccaccccccccgcccccctccgggcagccgacccggggagggacaccatctgggaccccggcggccacaaggggcattcgggtcgccccggcacctggcatgtgtcagtccgcttggaaacccacagccacggctcacaggggcagcgccaccggccaggcagccccgcacccgggctcagaactttctcgctgcaacctcagccggtcctcggagcacgcgggccggccgcgcggccgctggaaacagagtcgcgaaccggcttcccgggccaggcccgcctccgggccccaagtcccaacttggtgcccggcccgggccacacgggcccagcgcgggctcggctcctggcttcctacgggcgcgggcaggtgaggaccggccggcgccgcccgcgcgccctcctcaccggcccgggacgcggcgtccccggggatggcccgggcagggacggcggggggatccccggtgcgcgccccaactcgcccccaactcgcttccaaggcggcggtggcgcccgtgcacttggtcgcggggccgcccgggccattgtactagcagcccgcggtcccgggtcggcccgcgcccacctacctgcggcgggggccgggcagccgcacagcgccagcagcagcggccacggcggcccgggcagtgcagcctccatgttgtccagcggccggacgggctggcgccgcgctcactcgggctccacagcgcggcggcggcggctgcggcggctcctcgcgcgtgtccctgcatcttcgtcttccccgttgggcgccgcggaccaggacgactgggaggagggagcagggcgcgcgtgagcggaagcagcgccgcgtctccgccccccgctgacgcagccgcccgcgccccagggagccggccggcggccgggcgggccccacggccccagcggcccgggtccccgcggcccctccccgcgctcctcgccctgccctgggggcgccgccgggaggctcggcgcggggctggggcgcggggtttccgccccgcggggcccgggggcagatctgggccaggagcccggtgtgttacctgtggagcctctatgagtggggaaactgaggcacggggcggggctgcccaagggcacacagcgaggcagtttcagggcaggaagcctggggtcccatggtgcggccctgacacttgttctcacctgtggagggcagaggaggggacagggagagaactgcatgaagctggccagctgggagtggaggtgggtttgaatttttactttaaactaaatgtgtactctctaccttaattatgaattatgagacacgaagactgcgaaacagacacgctcctctaaaagtgcctctaggctgacaggggaaaagtcccgccaggcttccagacgccacctttgagtccttcaacaagcaggccaaggcctcttgcccaccggtgtcagctcagccactgaaccctcgaggaagaagaggtgctcgaaggggaagaatctcacccaggcacagcctggaagggg

SEQ ID NO: 69792 - DNA, 1416 bp, Homo sapiens
cttacttatcctgaatacatatgcacccaacagtggagcagccagattcgcaggtacttgaaagctgagatgggaggatcacttgggtccgggaggttgaggctgcagtgaactgtgattgcaccactgcacttcatcctgggggacagagtgagaccctgtccaaaaaaaaaagggagcttcacagggggaggtccacatgcataggttggggagttcctgctccctggtgtcccacaaggcacccttctaccctacctgacctgggcttatgctgaccatgaggtgaatcatcctgcactgtgcactgtgactggcagggggcgctgaaaccgccttttctgccccacatggtgcgcatgcgtgttctcaccgtagacgctgcgtggcgtgcgtggcgtgcgtggcgtgcgtggcgtggagtccagaatgagaagaaggaaagcggggccggttccttcaggacccgcctcagggggcaccgcggcggcttggggaccacttggagccccgtcctggggagaaaacagctcacgtctatggccctgactgcttaggcgggagctgcgtgcagctcagcttctccggggcatttttttctacacggtgagtacagaagtttgtttcctcgaacgttccctttattctcatcttctcactagttttcctctttctcttatagtattttaatatttgttttaccattagttttgttccctgagggcttttgagggtgggaagtgtagcagactgtggtatttttagggtttgaggagttcttctgagggaacctgtcccatatagatggggagagaggaaggggaagcccggcccaggtgggagtgggggccaggtctgggtttttggccgcctcctgtccaggcctcagacggaggaaaaaagatgccagctgcctccaggatttgatgaatttttaaatttgccttcccgccatcgggacaaatcgggactctttcacccccctccaacccccgcccccagggaagcctatgtccccttctgtccctctggtcacgaccacctgaccaggggggagggacaccctagtgcgagcctgacggggacttacccctgatgacggcgatgctgaggacctggttctctccattctgctcagtgttacgtcccctgtgcagaaatgtctattcagggtccctgcccaatttggtgttatcttattgtggttattgctgcttagcgctgttaacgtattgcatatcttttataacaaccccttaggagatatatgcttcccccaaactttctccccatttgtaggattccttttcatttgggtcattgtttcctttctgtacagaagcgttccagttggatgtagccccacatggttgtttttgcttttgttacttgtgattcgctttcccaatttaaaaa

SEQ ID NO: 69793 - DNA, 1103 bp, Homo sapiens
gacctgataataggattctttacactttattatcagagtgatcttgaacccttctggaattgcataatgtcagcccctgcatggtcattcttctgggcatgtatctaagaactggatgcccagaggaacaagcatttgctgcgattgcctataaatactcaacagatttttaaagaatgtttgttaatataattaccgtaggttactgtttagtaattgctgtgttaaatttatctgttgtgatattatataacatacacagattggttacattttattatttaaaaatattatttttgactttgatagcctttctcaaagcaagctgtagaacacgtacaaagtcatttatccaagaaacaagtgacatcaactctttttcaggtaagataaaattattccaaaataaatagataatatttgcttaacacttggccttggtgacattctttttgcatgtgcaattacactagaggacttgctttgtaaagactgtgttctattctggagctttgtctgggactatttgagtttattatcgcttatcttcccattgcaaagtgtccttctaccaacgtgcttcctaaagccttttctgaaaaaggtcattagagctttgtcgtaacattatgttctagaaatcagtcaagataagacatcagagaagcaagtttttgcccatttgacattccagcacctgtgatgagcaatgactctacaagatttattttgtagtgccaggctgttgatacttgctgtgattatcctctaggggaaatacaatttattttcaagattcaggagcaaatgtttgagtgatctttgagtcatgggaaattgtattttaccttggctgttcatatcttgaacacaataccgtcatacaggtttaaatgacaagacttggaaaatcagattcccaactaataggcctatgtatttggcattccttagatgaggtggtttcacttcctcccaaaagccttttccatcctgtgttttttatagaggtggcagtggtttacaaggacagtcagattctccaatgaacaaagtgcttttcatgtttctataaattacaagaaataggaaagaatgtcatt

SEQ ID NO: 69794 - DNA, 1642 bp, Homo sapiens
ggtaagtaagtgcataggtccattggtggcgggcttgggaggggccctagcttgtgcttgagtgcttctaaaatgcactgtgccctgagctcggctctcagtattctgaatcttaccgaattctcacgacagccttacaatttagatacgactgttctcttttacagattaagggaactgaggatcagagagggaaagtagtctgctcctcatctcactgttgaactctggctttcatactccttagcaagcctgttgcggttctttctgttgaaaagtggcagcatggtagattctacgtagtcttaggaattcccagtgacactcatcttttactttattagcagaaagtagggatgtttgataaaatatgaaagaaaaatattaattgacataatagcttttataaatagaaaaatctgtgatctataaatgtagccttttcttagatctttggacatttgaatctatttcgtctcttgactcttttgaacctcttgagacttgtcgaggacttggctaagatagatgttgtgtgtttcctggaatcaggatttcagagctggaaggaacttcagagagagataatttagcttcctctttcaccacaaaggggacaaagtccatatggttttcgcaactagctccagtgccttccccaggacagggatagttctgcaagttggggtagactggctcaccccccaccaccgccccctatcccgcgttgcccgccaggctagcgtcctttctgcttgcaggaagcaaggctcccagaaggactgcagctgcctcccagcccatgtttggttcctgtggcttctgcagacttcctattctcatcacttggtttgtactgttccatgatgtagtttttcttttattttgttttgtaaactttcaggatgatctatgaagacataaaaaaaaggttaaatttggatcattcaatgagctgagggtgccaaaatgtttcccaaaactatctaattgactctgggctgaactgtgaaatattgtctctttatatttttatagttcttgattttaaaagttcataacatggaaaaggaaagctgatgctgtttattcagtaatgggtaaagtggcatgaagttgaagtagatggtagttgttctccatgaggggaagagcactgtgcatgtgaaccaggagccctcgccttaaccccagtttagccatggaccttctcagagaccttgggagtgcacctgcctgcagtttggtagccttacctgtaagatgaggagtgggattggatcaactctcccctgtggttttctctatgactctaagagatagaaaatcaataaataaaatagctaattaaaaaaaatttcacttcatggacctattagctttgagtttttaaaactcagtgcagattacagatgcttttattagcttacaagttgtgccacataacttgtggggcccagtgcaacgtgaaaacgcagggctcctcatacaaaaatgattaagaatttcaaaatggcaacaacagagctttaaacccagcaccaggcttttctgagtcacacttccatgaagcgagccctgctcctgtaagaagtgtctgtgacttgccaggagtcatattaggtagtaggaatatagtggc

SEQ ID NO: 69795 - DNA, 989 bp, Homo sapiens
agcaagtattcactgaccatgtacgatgtgccaggctttgtgttaaactgtttcctcagtactttacattataattttagggtttgtctatcttaacatctctttgaccttcaatttctcagcttcaatagagtctaaaatatacactgaggaacctcaattttaaaaagtatcttattgagagacctttgctaataatgcaaacttgactataatttatctgattcatttgcttggattttggaaacatgtctcccaaagcaggacaagcctgtacttgattcttcatgtaggagtagaatttaaggacataggtcaatgtctgtttatgatcgtgtacatcattaaatacctaataaatatgtcccttggttactcaaactatagatctactggtcaattcttcagttttttgagtatgtctctgtgacaatgcaccactgaaattggaccctctaaaacagaatctgcattgacactgactttatcagcttggctaatttctagacaatatacgtgatgataatatctcatgctagagctttctgcagctgctcagtaattgcactttaagaacaaatgctactttactgtagttttcttcaccacatattcacagaactaaagcaattaaaaagaaagttgtgttgcaattctattggagttcaagaggtaattttatcctggagcagagtcaatatgttgggaaactaatattcttacagacgattgtacttttctgagtaatagcaggaactttgccaaaaagcgccagcatcaaagggagagggtgggctgctggctcagggctgagttgcagccaagtcctgggccatctccatggctgttggtcctaaaatctgacctttcccaactcttgggtaaacctaacttttgtgtgatccttaagggagaagggagagaggggaaggtaattgaaagtggggaagaggttctcccatggatattttataactttgccatgcatc

SEQ ID NO: 69796 - DNA, 2128 bp, Homo sapiens
aacagagtgagactccgcttcaaaaaaagaaagaaagaaaataaaaaaagaaaattagccctttgatggagcactcaatccctaaaatcagtcaggggaacctgttaccaaaagtctaaccagcttcttgcttcatggtggccgggaaacactaggttggaaatggcaaatacttggcacaggttccatccctagccattcctatacccgtgccagacattgctagtcaatcacagcatgctgtcttgttcagcccaggcacagctcagaatgtttctcaatacaacactctgggcagcccccaactacagatcagttggtgctggcaggtgaaagaaacattattggccatcctggcactcagccacgaggcccatctgtgaggtccagcatctcatcagcctgtaggagtggcctgatgactcaccgggtggccaggagtgtgtggccagcctaggtcagtggagcaaccatgatacagagaggggagagccaatgggctggaggagctgagattttttttttctaatttctcatagaaacacccactgcatgatttagcaatggaggctggcagggtggggtgaggctactggctggtcagccactgatatgcaaagcatttgaagattttaatctgcctgggactgaatctgagtcaaccggggacatagctgctgccaaggacatggtaataacgtcagaaatggctcacaggcctacggagcatctagtactcaaaccgctccgtgaagtgggtgagaaaaactgcatccccatttgacagacagaggagttggtgacctgagaggtttgacaacaggcatagtgaggcccactcttagatctaagacttccagggctgctgtggacccatggaaatgcaggaagcctgctgtgtgtaccctcatcaaccctttgcagagtgaaatgtccacttctgcggcagaaggcaggttagagaagtcccaggagactgagcattgttctgaagaaactaggagccatgtcccctgagaaaaggctgaaggtgacagatgagaaaactgggggcggattccatcatttcagttggaaaaggggttaacctcgttgtctgttgttccagagagtggaactgaggccactgtgtgactgtcctggggaggtagctctctgagaaggaagaaaaagcatcagactttactcattgggacatgaggaccttagttctgctattgtcgctgtaggacctcgagaaagtcacttcccttccctggtctatggatgccaggatataggagaagtaggttttgtggcttctgagggcctttcggagctctggttccaaggaagaaacacaattagagcagactccaaatgtcctatgtattagtgacctccctgtcaatggacatgaccaagagggaactcattgactgtctatcctggaaattccttgtgaagtgagctgggtctctggggtttctccatgtgtaaaggccccaggttctgatgctgaggggcatttctggcagccttcacacctgctgctccctgcccgccattcttcttcatctcaccaccccatctgcttttctcttccttcctccctccctcttcaacatttcattttccctccatcaaccttcctgcccttgcttctcactcatccctctccctttctcaccttcatgtgtattgttgtgagcacggtctgaatccctggctatagctggctgtgagccacccttgccctgattagggagaggatctgtgtgctgggcaaagtcccttttcattattgcctggctctttggccatcaaactccaggcttgggtgaagtaggctggactttgtatggaatcatgagtctcttttgtccatttagcctgtggatggcaatagatagcacttatgccccattccctctttccacgcccagggcagacattaataaacaatcagagcacccttcttccactcagcccagataaaagctcacagtccttcccatgtaacccacgaggcagccactatccgtctatcaggattgatatgtgaattaaaacctacttccctactgactgtatcagtcaagggcccactagaaaacagcaccctcaactggtatcctggagagccttt

SEQ ID NO: 69797 - DNA, 683 bp, Homo sapiens
taataaaaataaagttacaactttggctgggaagtaacaggtgtaaataaacaaggaaatatagtaattgtatggagatatggcaagtaaaaacaatgcttgctaaacactctttttttgatggtttcatactgttactgcgaattggaggtactctaatttatttgacattctctagttatcggacttcatgtctgctctttcaatgctacagtcaacatggtgatgaaattttctggtttaggattacttcctcaaacttgtttcccagaaaagggctttctgggtcaaaagttatcaaaattttctaaggctctcaatatgatgacaaatgatttctccaagcgtgggacagattgagagctacagtttcctgcccttacctcatcttccaactatggaaccaagtattcccttcacaaagaaaacccatgattcatggtgttagaagtcagaatagtggtttcctggctgggcgtggtggctcatgcctgtaattccagcactttgggaggctgaagcaggcggatcatgaggtcaggagttcgagtccagcctggccaatatgatgaaaacccttctctacccaaaatataaaaaattagccgggtgtggtggcatacacctgtaatcccagctactcgggtggctgaggcagaattgctggaactggggaggtggag

SEQ ID NO: 69798 - DNA, 436 bp, Homo sapiens
ggagacagagcaagattctgtctcaaataataataataataataataataataataataataataataataataatgacaattgctgctacgaggatgtgtatacccgttgggctgtgcaaatcttcttaaacgttaggatcagatgggacttcgccaccctaatttcctgttccacattgattttgtcacagttagcacgagcaccacaaaaaaatccagctttgcaatgatgagtcatcaccaaaacaaaggtgacgtgatctaatgttgaaacggtgaactatcttgagctggtagttcacaagggtccaacacatcattgtgtttcctcagaacttttttttttttttgagacggagtctggctctgttgcccaggccgatgtgcagtggcgcaatcttagcccactgcaagctccacctcccgggttcacg

SEQ ID NO: 69799 - DNA, 1894 bp, Homo sapiens
taaaatctgcgttccagattttacatctgcctcccactcgctagtctggataacgctctgcaggaaaacacaaaacaaggtctaattcttccatgtgacaacctcttggtcacttcaaaactattgtctaattcttactgtcactttctccaagcttaatgctttagcaacatggtctcaaatgtttgctcaccattctgcaatctgtgggtacacaatacagtttgttaaaagtctctagagacgacccccattgaatatttgacggcctgtaaaatctctatctcttctcagctctagatattttggattgggcctccacaggaccacactcattgtattctatggagcatatttgggtgcctgtggagggggtatctctgttactggaaccaaggacagcagcctaaaactccccatcccttgttcccagaggactgggccctacactaccgaggtcctctcttatctctgaaaggtccagaagagaccaataatggccctggagtaggaagagacgtcggaacatgagcagaaaaggatctggtagcctgggaagtaatagtaacaacgcggggctggggctggtgatactgctgtgggaaggggcctcagtggggcagcagggctggaaaacggacgctaatggctggaaaagggccaggaagctgctgggcgcagcccccggggcgcaggcagcgactggtaacagcactagggctgtgcggtgtctggccccagctctacgggactgggaaatggtgggcgaacgcctaaggattaggcggggtcgggtcacgctctaagctgggggcccgcccctcggtatccccgcgctccgagcgccgcccacccaccggagtagccaggcatcccagtgctcggggttcgggactctggaccagaaatgtgggcagcagctgggtacctgcgacttctgccccgtacctgcgcgcgcggcagagaggccttaggtcacgcgccgccccgcctacctccccctccagctcctggcaagccggcgcgcggcgatgacgtgccgagtgcgccgcacgccgctgacgtcagagaccaatggctgcggccgcagctgcggcgctggaatcctggcaggcggcggctccgcggaagaggcgctccgcggctcgacggccgcggcggagggaggcggcgccccgggggagagaggcggcgccccgggggagagaggcggcgccccggggccccgaggcggagttcgagtctgacagcggagtcgtgcttcgtcgcatctgggaggctgagtgagtgcaggctcggccctgatggaatctttgcgcccatgggcaattctgagccacagtctccccatctgtagagtggagatataatgcacaccctttaaggagttattgtgaagagttaacgtaggtaacgagctcattaaagatgtggattatagtaagcgctcagttaaaggtcgtctttccttttattacggttacagctgcgtgaccttggacaatttataatctctgtgcctcagttttctcatctgtgagatggggatgaaaatagtacatacgtaggtttgttttgaggattcaatgaattagtaaacggaaaccattttctggcacgtggtaagcactgtgccagtgtttgctattaatattatgccgatgttgatattattggtggtggtgacacgagggaagcaacatgaacacgtgactgctatcatcaggcagctgctatgtgcctgacattagcttaatcattctacacactttatgttaaacattgcaggcatactaggaccctggtagctcactgattctcaaagagacaaagaaaatgtgtggaaccagatttcaaacccaggtctttgtgacaaaaaccagtgcttccagct

SEQ ID NO: 69800 - DNA, 1941 bp, Homo sapiens
acaatcatcattattattatgggactagggagtaaacttagcaaagtgactgtaaaatcaggcaggctaaaatcgaagcctgagttcaaattcaactctatcagatacccagtgtatgagaattaaatatgcacgtgaagcgccaagcatggtgcactacacaataatacactccataggtgacagcaattgtgattcttgtcttgctgaaagcggccttaaggcacacggagttcactacttccacaggcagtgtcaaactctggtcacctctggcaaaacgttatctctgccttcttctactcactggtgcaccggttgggtgcaacgggtcccaacctcttccaggagtgtttaggacagaaggattttcagaaaagacggggaatctcaaatacataaagttaaataataccactgcctgcgtgggcatagtaaatggtaataagccccgagtagtcacaagttatgaagcctttatcagtagatgctaggtacatgctggtcgcttgagaccgattatcaactgtctgcatcaagacacttctgcaaggtaggtaccgttagttttcatgcttcagataagaaaaaggaggttcagagaagttagtaacttaccctaggttccactgctcatagggctcaaactcaggagtgctagaagtcaggcctcgggcttgtctctctcttgctgtctaggtttggtgaaggaagctcaggttcttaaatgaatccaagccctaaatcccagttgaccccaagcagcaccgcccctctccgtgcctcggcagagctgtctacgaaatggattcccctccccacaccccaacggcttggaccgaagctcgccttccctgagccttcgtccctactctcactggcgctgagtccccttgtggccagccgtgctcacctgtccgagggtccagcgtaccaaattcagcttcaccatccgcgcgagaagacgccgctcctacaccagaacccggaagcaccgtggccggcgcgccggaaatgacgttagtcgacagcggatgtcctgctggctgccagggcagcgtgggacgctacggcggatatggctgcagagcggccggctgggatcttagataggaggggtggatttgcaaggcctagaatagctggggagtggtttccccgcggaatcggcctccctgccgctcctgctttgtactgtgacgctcagcctgtgatgactggtgtggaatccgctgagccaccttggcctaaggagactttaccactctgagattgtaaatctgtaaaatagagatgtaggattagcccatacggtagttgtggtaaatactgtgagacaataaggggcctgggacacagcattcaaatgggaataatgaaggtcaagactgtgattcctgtatctttgacgctctcggtataagcaccgtcgtgggcacagggcagtggcctttatgcaggagtttaagagggaatgaaggaatgaatgggcaaactctggagttcccaagtattctctccaggagctgtttccattcttttcgtttccagcaggttggtaaattcattaatttattcattgatctaattaaaatatactaagtgcccctcacctgtgctaggccaatgtgatacaatgagcagaacagtcatgggccctccctgggaagccctcactagcccaaggactccttgtagacatttaagtgtccacaggctctggagttccaaccttgagtgcaatttagcagctgtggaccttgggcaagtcattacatctaagcctgttttctcttctgcaaaatggttaaggattcaataagataaaactgtaggcaatgaaaaccgtacctggtaacagtaggtgctgaagaagtgttagctattaatttttgcttaatttttctctctctgctctatgtgatgaaaagattcaagagg

SEQ ID NO: 69801 - DNA, 1743 bp, Homo sapiens
caccatgttggccaggatggtcttgatctcttgacctcgtgatggacccgcctcggcctcccaaagtgctgggattgcaggggtgagccaccgtgcccggctgcgcctggcccatttttgcaatatcttattggttacacattcagccctatatagggttgccagatgtagtaaataaaaatacaggatgcccaattaaacttgaagtttagataaaacaatgaataatagtatatgtatgtctcgtaaaatattgcgaaatactaaaaaattatctgaaattcaaatttaaccaccatcctgtatggaaccctaaccctattcagtgcacaaaggaaaaacatgccaaagtgggtgtgaataccaggaggccaggttcactgggggccatcttggaagctggcttctacaaccttaacatgctgggcatggtagactatggggataaatggtaaacaatgaaaaataatgattcctgttctcatgcagtttgtagcctgttgaataaaatcaacttgaatcaacccagcaggaaaataaatacaaaaccttaacgattataaaagtgcttcagagagaaatagctgatgcttgggacagtgatggggtcctcatcaaaatagccacttttttttttttttttttttttttgagacagggtcttgctctgtctcccaggctggagtgcagtggcataatcatagctcactgcagcctcaacctcctgggctcaagtaatcctcctgcctcagcctttcgagtagcttggactacaggctgcagtagccaaactcagctaattttttaagatctttttgtagcgatgagggctcactatgttgcccaggctggtcttgaactcctggcttcaagtgatccaccttggcctcccaaagtgttgggattataggcgtgagacacctcacctagcccacttttgctttatagatttgagtttttacatgtgatttgatttgtctctatgggcgtataaggagtatatggagggatctgttgctaaaacaaggaaataaaaccctgaaatgcaaggttttgaatcttagcaaaatccgtaagcacacacaaatgaatgcacataaacatggcgaaaactgaataaggtctgtagtccagttaacagtttttactaatgctaatttcctggttttgctattgcactacagttgcatcagatatcagcattgggggaagccaggtgaaggacacatggaaccctttgcaccactttttccacttcacatgagtctacaattatttcaaaataaaaagttaataaacaacccatttaaaaaaaagcagctgttgtttggaaatggaaacaaggttagatcaaaataatccagacttggcggggtgcggtggctcatgcctgtaatcccagcactttgggaggccgaggtgggtggatcacctgcggtcaggagttcaagaccagcctgaccaatatggcaaaaccccatctctaccaaaaatacaaaaattaactgggcgtcgtggcatgtgcctgtagtcccagctccttggggggctgagactggtaagttgcttgaatccaggaggcggcggttgcagtgacccgagatctcgccaccgcactccagccatgatagagcaagactcagtatcaaaaaaaaaaaaaaaaaaaaaaatccaaattcatgaaaggactggaggagggcctgatgtggtggagccagggattctgtctgaagaaaaagaatt

SEQ ID NO: 69802 - DNA, 2406 bp, Homo sapiens
tggataaatgtgcacttaaaatcattcactaaaagcaaacctgggaggaattctgtcccttggtggctgtgtagccttgggcaagtcaaagcccttccttctctgtgctttggttttctcttctgtaaaatggaatgatcatgtcatccgcctcccaaggatgctgagggttaaatgagtaacacaggaccagtacctggcccaacggccatgggggttattcttagaacagaacgacttgtgactgttattagaacattaattgctctggcccaacgctgatgctgtttttagaagccagactggcagacagcattctgtgcaaaaatggttccagaatctccccctcccccatcatagtggtgcttcctgccctgtccccagtgtcagacaaacctttttctggttggttcagcgttaatccctctccctgtccttgatccagagctagaaaactaagccttgattctataaatagcacccccagtctgtcaccatggaaacctctgatggggctgggtcagcccaccctagtggacatgtctaccccagggaggctctggaaggacagaaaagtggcttttcagaaaagtggctccggggccacccagaagcagcgggaacccccagtgaagtccacaggcttacctggaaatcacgagcttcctaagtgggaggaggtgctgttctggttcacctggagaaagacaatacacagaagaaggggtcacggccaggtgagggatgccttgctgtattgagggtcacccctcagcatcactgagtcatgcacatgcttattcacgtagtatttactgtacatctactatgtgccaggtgctgggatagcgtggtgagcgggacagacccaaacctaggatcacggaacttacgttcgagttgaagaaaaagcctactgaacacgcacagatgcaagaaaatgtcaaacttgggcaatatgacaggctgctatgagtgatcagtatctgtgctacttcaaaaacggtggccaggaaaggactctacaagatggcatttcagctgtggtataataataaatatttgttcattgtccccagttcctggcacatagctccccaaactcttggaatctctgaaggaataagggtatcttggccgggcgccatggctcatggctgtaatcccagcgctttgggaggccgaggagggtggatcacctgaggtcaggagtttgagaccagcctggccaacatggcaaaactctgtctctactaaaatacaaaaattagccgggtgtggtggcgggcacctgtaatcctagctactcaggaggctgaggcaggagaatcgcttgaacccgggaggcagaggttgcagtgagccaagatcatgccactgcactccagcctgggtgacagagggagactaggtatcaaaaaaacaaaaacaaaaacaaaaaaaaaacaaaacgtatcttttgcatgctaatgacatgactaatggctgggggtccctagatagcttcaggattaggggaaggggtctcagaaagaccaaggcatgattagagggttggaactttttttgttgtttgagacggagtctcactgtgttgcccaggctggatggagtgcggtggtgcaatcttggttcactgcaacctccgcgtcctgagctcaagcaattctcctgcctcagccttccaagtagctgggactacagacgtgtgccaccacgaatggctaatattttttgtatttttagtagagacagggtttcaccatgttggcccggctggttttgaactgctgacctcaagtgatctgcctgcctcagcctcccaaagtgctaggattacaggcatgagccaccacacccagccagaaggttggaactttaagccccacctgccttctcccctccctgacctcctgggaggggagaggggagagggtctaggggctaggagctggagattgggcaatcacccatgacccatgatttaatcagtcatgcctctatgatgaaatctctaaatgacagaatttggaaagcttcctggttggtaaacacattgagaggctgggagggtgtcatgccgggaaagggcatggatgttctgtgacccatcccccatacctcaccctacgcttcttgcatttgactgtacctgagttgtattcttttttatgagacagggtctcactctgccacccaggccagagtgcagtggcacgaacatgtgccacatgtgccatacccagctaaggctttctcttttttgtagggagatggggtctcactgtgttggccttgaatttaaaaaaaaaaaattaatgcgatctgagagctagggaccatggcttttgagcatttcctggttgtttggggagaggtcccactccctttgtgggaatcagagat

SEQ ID NO: 69803 - DNA, 2136 bp, Homo sapiens
gagaccatcctggctaacacggtgaaacccccctctctactaaaaaaaaaaaaaaaaaaaaattagccgggtgtgggggatcgcgcttgggagctcccagctactcaggaggctaaggcaggagaattgcttgaacctgagaggcagaggttgcagtgagccgagatcatgccactgcacttcagcctgggtgatggagcaagactccatctcaaaaaaaaaaacaaaaaaaacaaatgggcagcaggagaccatgggaggaaactttgctccctctttccattgaccctgaaatgtccctggaagggaggggctaatcaatctaagagatccccttagactcagattcattcattccaccaatgtttactgagcaagtaccatgtgcggggccctgctcaagatactgggatacatcaagggcaacagacaaaggttcctgccttcatagagctgacattccagtggggagccaagaaaccagtatgtgagacaatgacaccagtgataaaggctcagaagcaaatgcccatgatgagaggtggaggcattccccaggggttaaagaaggaaagaagggagtgacatttgcattgagaccacactgaattttggctcaaatctataggaactttctaaatcatcatttctccaagctcagcagatcaggaggttcccaagagaaaagcggcaggggggcagggaggggacaacagcggggagctggcagtgcacaaagccagctcaggaggtcactgcacttacagagtggccctggagcagggcccagtgcccacgtgctcaggctcagccatcagccctgcaattcctccccatgggaaccagctcccaacattccattgccatggctattcccaaccctaccagaccacgctgaccacaccaactcccacccaccacgcctcaaccttctgcagagctggggagacgcaggtctcttgggcagggtccctgggaatcagggacctctgacctattgcggggggaagccagccaagaaagccctccagattccaatggggtgtgagtaagggaaaaataattctgaagctctggacactgcttgagcataaaaagcatgaagagtggttcaagagggaaaaagggcagggaggctggcatgcagccttaaaaatattagctcaggccaggcacagtggctcacgccaggcatggtggctcatgcctataatcccggcactttgggaggctgagggggatggattgctacagcaaaggagtttgcgaccagcctggaaaataagacaaaaccctctctttacaaaaattagctgggcttgatgataatacacccatagtcccagctacttgggaggctgaagtgggaggatggcttgagcctgggaggcagaggttgcagtgagccaagatcacaccactgcactccaatctgggtgacagggagagattctgcctaaaaaacaaacaaacaaacaaacaaaaaaacattagttcagacttagagcccttattatataccaggcactgaactaagggttttacatatatcattgcattttgtcttaaccattgaccctatttgaccctcccttattaaccatccatttcctggggctcagagacgtaaaggaacctgccgaaggccatgcagctgggaggcaggggagctagaaggaaaactcaagtctctctctttccagagcctgtgttctcctccctgtcttgctttgcatttttttttacctaaaaccatcaaagcagggtcccacacactgtcccagtctcccgttcagaggcccagttcagcactctgttagggactagccaggggtggggactgatgaggctgggggtcacatcctggctcccccactcaaaggctgggtgtcctgggtcaatcttgggcagctctctgagcctcagtgttctcatctgagaaatgggaataacacctggaagagtgtcatgggaactatgtaacttccatcaagccaggcagagccagcataagaaaactattaccatttaattcttttccttttcttttctttttctttttttttttttttttttttttgagacagtttcttgctctgttgctcaggctagaatacagcggtgcaatcatggctc

SEQ ID NO: 69804 - DNA, 765 bp, Homo sapiens
acaaaatctatggctgttagggccagggagccatggtcctgcctcaggagtctagattcaccttccttcccattcctgcccgtttcctcgccccaccatcaaacacaagagcagtagggatttgcaccagaaacacttgatggcatattgtggagcatggtttgcatgttctgattttattttaagaagtaaaagtggccaggagcagcggctcatgcctgtgatcccagctgctcacaaagctgaggcaggaagacagcttgagcccaggaatttgagacccagcctgcggctatcaacatagcaagccccaaatataagtaggtaggagatggcaactgttataaaagaaccatggctcctctccacgctggcatcacacactggcatgtgaccttggctactaagttagcagtgtgaaggccaacagggaccaaagtgggggtgaccctggcagaggcactgtacacatggccctgagggaaagcaaacatccgcagtggatgaggggaggcacaggcaggtggtcagagtcccatgctgccagccagactgggcgtgcacctgcatctaccccagacccttggcagcatcacctccactctctgggcctgagtttcctcatctgtaaaatgggcccaataattcttactagcgatgctgctgtgaggattaagtgagataggggcttaataagggaaagaccagaggggtgtggctaatgccttgcagctcttcaataactgtgagtcccatctgaatcta

SEQ ID NO: 69805 - DNA, 676 bp, Homo sapiens
acaatttttttattagaaaaaaaagatattgcatgtgaagcacttagttccacacctagcaaacagcaggtgctctaggtcttatcatcattattactattattagtatctggaatctagcatctcacggagagtcctttgtaggacatggaatgctatcccagcaggcacaggaaggaaaatttaggcttaggtactagggagccatggcagatgtttgagcagtgggtgagcagcatgactttgaagctgcatagggctggccgccagtccagtacccacctacagggaacatctttgccaaggtccttcctcgcaggctccaaatccctggcagtcctcccagtgctgctgggcaaagccagagcacaactcccacaggctacaccccgtgacatttccagccttgtttgcttcctgggtgccagccgggctggtgaacaccaagcagtcaacaagctgggggacttgaagcagcccacacagcctcaatccacagatacaaagaccaggaggcccagcggcccggcgggggccacagggtggcagaggagaaactgtccttattttggagtcatgaaggcaagcctagctcctcctttgctgtgtgaccttgggagagtccctttccctctctgagctccagtctgcccatatgcgagaaggacttatctgc

SEQ ID NO: 69806 - DNA, 1876 bp, Homo sapiens
ctgcttgagggggcttctgtaggataagtaggagttcaacagcccgcctcctcaacatccccaaggacattaagtcaggaggcctgtgagtgagtttcagctctgccacatcctagctgtgaatcctagggtcacgggcaggtgacctctccaagcctcagtctccccatctgtaaaaggggaagggggcaagaggttaggcacggttctttctaatgactctgctgaggtggatggttccttccctagggaacgggcctttgagtgggaatgccagacctcgacctctgtcccatctaacaacgactctgccaggtcaggcgtgctcagcctctgagcccatgctcccagtcccctgctaccagtcccagtcccggctttccgggcacctcccatccagctcacaccgagaagcggagtttacggagggaggttgggggttggggtgggatcctcgggtcaaattcctctccactcctcaccagtgacctccaagttcactagggctccccaacccagtgctcccagcgcccacctccccagccgacgatttccgcccccaacgcctccacttctgacgctcctcgcaactccacggctgctgcaagttaacttccacgcgccctggcgcccgcctgggggtccccgcgcgcctgggcgaggttggggactccggaggcggggacgcgccgccctcccccccagtccccccgccaacagacgctgagcgtctcccaggcgctgggtccgaagcgggaagcgtggtaacgggggcccggtggatgccgcaccccgcggaaagcgctcgggacgccgagcgggtgcggatcccagaaccgcgcgcccgcgccgcctgcctgcctcccagatcccagctcccagccccggagcccgagcagtcgcgccgggcccggaggcagccgccaggacggagggctgccaggcgcccgaggccgacccgcacggcccccagcccgcgcccccggttgcaacccgaggccaccccctgccgccccagggccacctaccgtggcgagacgcggcgaggcagccccacgcacccagcgactcccggctctccagccgccccagccggggaagggggaggtgcccgcgcgggggcggggccgcggcgacgtgacgtacgggggcgggcccgatacgcggccccgccccgccccgccccatcccctccactgcgcctcgggaccgcgaggtgagcagaggctggtcgggaagtttcccggaggctcgccccgggaaccccgccccgccgccctggaagcccctgtctgctcgctggcttacccctaggacgggcagctcaccacttctcccggtcagttctgtttaagagaagttcctttctgcctgtaagcaatgaagtggaatgatcaccaaaaagtggtgtaagaaaagaaaagtagacccgcagcggggtgtattcgtgctactgtttgtgtaaaacacagaaaaaagaaaggggtggtctgatgtatagtcatacacaccagtggttttggagggagtttttgtggatataccacattctctccatttatcagggattttgccctgacatccctccaccaccacgacatttggcaatctctgaagacatttttggttgtcataactggggaagtggagaggcgatactggcatctagtgagtagaggcctggaatgctgctaaacattctgcggtgcataggacaccctttccacccccagccctgccactacccccccaaaaaaaaccctgcaaaaaatgccgaatagcgtaaaggttgtgaagccctgatatacacaaatgaaacaaaactcctgactgataaatcttagcacagtctaagttctataacctttcagtgctt

SEQ ID NO: 69807 - DNA, 1524 bp, Homo sapiens
caggggatggccctattaacaagactcagaggaggaagaggtggtcctgtggatgtgggaggctggactctgagtatgacatctctcctatgtgcagaagtctggttgccactgggagtaggtgggaccagggaaatctctgggacgtgagtgtggaggcctgttggtctagactctagactgtggagctctgagcttttgtgtcctctggaaggaagctggggaagaatcctctccattgttaagtgacggggatagaagctgtcctgcacaggaagtcacgaggggggcgtatcccacgaggaaggcaggagggggcgtgcccctcaccggaaattagcagaggggcgtgtcccacaccggaagtcagaaagcggagcctttcttacaccggaagtcaatgaagcgggtctttcctacgctaaaaaccactgagtggagtatttagtacacaggaagtcggccagagaaacatttctcatatttgaaggccggaaagagggacatttctgacaccggaagtcagtgagaggactctttcccacacaggaagtcagctagagagccgtctcccctctctggagccgagagaggccggtttcccccaccgtaagtagacgtggggccgtgaccggaagtccttgggaaagatccgtcccattcccggaagctagagggcgttagttgtcgggttgaaaaggggtgtggggaggggaagcagctttaccccgggctcggagtttgcaggagagagaagtggggagcaagaagtgaacctcaggggctcacagggttcccgcagatgctcaggccggccaggaatgcatctctggctctctgttcccacggacgtcactgcctcagccagcctcccccagagcccgccagccgctaagccggggccacacctgggggtgatttcatgcctcacctccagtaggcaccttggtttctttgggctaatctctggctcccttgcgctaactcttgctctcacccagctaatccctgcctcaccctgactgccccaggggctgaccactaacaaccaacctggccctgtctgggggttccaggctcctggcctggccctgaccggttcttaattaacctttccttcaccttgactaactcctgccttcctggtctgttcctttcagcagaaactaatggtttgtggatttttttctgactaacaacaggtctaacattcctcgttactgttaacagcttggatgtcggcatggctgggaaggggctaacacagctttgaacttggctaacacaggtttgaacttggctaacacaggtttgaacttgactaacacagggaaaagcatagctaacaattttgggcgtggtggctgctctgagtcagaacaatcagaagtcggtaaagatggtagttttctaaaggaggtgccagggctctggtgtggaccaggcctgatggagcagtggtacccaccaaggtggggtcagaagtatagccagtcttgcaaggttttggccattgggcatatc

SEQ ID NO: 69808 - DNA, 761 bp, Homo sapiens
tgtaagttgcacccttaggaactgggcgttttcagccaccacggcgaacatgaatcctatatataacggcgaacacgaatcctatatataacgtaaccttgcttggccttgtttgtagcccagtcggtgcactttatcaggccgggtggggcggggagccctgtggagagcagatagctggcggtactgccagcagcggaccctcagaagaaagcgcatgacatcagactgcttctttctccatagctccaggatgtacttgtatgcacccatcttggcttatctgatggctgccgccagaccggagtctaattctttacttattcttctagaccacattgaaatgtcctctcacatcagaaggtttctattttgagccctccagggagaggtcagcaattattcatgcattccaatgccgcatttgtggaatgctttactatgtgccagatgtgggggataaagagtgaacaaaaagagacacagtctctaacttcatggagtttatatcctgttcaaaacagagagttaatcaaatacagacacaattgagtatgtatttagaaatctaaattagtgcccctaatgaaacaagttgtagcagaatgcttaacaagggatctgactaaattggtgtattggaagaggcttccctaaagaagggatgctgaagcttcaggtccaattagacaggtgagtgcggagtagggagggcagcatgtgcaaaggttctgtggcaggaatgatggtgtatggtgact

SEQ ID NO: 69809 - DNA, 1422 bp, Homo sapiens
gggattataggtgtgagccaccatgcccagcctattattattattattattttattttggctaccattaactgagaaaacaaaatccatgataaaggccctggcctatgctttccctggctgcttctgccctgtgtaacgtgttacgccccctcctcttgggaactgtgagtaataaactatcttttcaatagcagtcgtcttcctgctgtgtgggtctcacctaaataaaaacaaaatcctgtgtgcaaaatagaaaagagtataggaaacaagagaagagaatagaagaaggaagagaaaaatgaaagaaaagaaagaagagagggagatggagagagaaataagagagaaaagggaacgggagaaaaaagtttgaaagaaggagagagaagactggagaaaatgaagagggagagagatgagaaaagggaaaaatcaatgtggaaaggaaggaaagggagagggagaagaaagagatgggggagaagtggaggaagaaggggaagactggagggaagtttgcatgtgaaagttatatatgaaaccaacatttttttttccattgcttggagtgtttacttttcagtgaaatccagtgtctgggttcatttacccacagctgactcacttgaccctgggcaacttcagaacagacaccacgaatcaatgactcagaataggctctcagaaaatatttttaactggctccacagtgtgaatcaagaaaaataaagcacgattaaatacaaacgtgaaactccacagaaagagaagagtttcagcttcaaagcaatgacttcttagctctgttcttagcaattagacaggaagagactgcagtggctgaactgggcctcctttttccttggcttagacttggaaggaattatcggttcagaatgcatgctgccaggagagagggcagctgctggaggaatgtgtggcccagtaacagtcagaggtagtaaaactccgtgcctcagaatgtaggcctggagtctcagctccactacttattagctgtgtgaccttgggcaagtcacatttctgaaatcataattttctcatctcaaggttgatgtgctagtgggctttgctgagctttataacaaaatcaagtctataaagaattatgggccaggcactgtggctcacacctgtaatactacactttgggaagccaaggtggggggatcgcttgaggccaggagtttgaaaccagcctgggcagcatagtgagactcccatctctacaaaaactagaaaaactagctgggtgtggtgacgagcacctgtagtgccagacacttgggaggctgagggggaagatctcttgagcccaggagttggaggctgcagtgagctctgactgaaccattgcactccaacctgggtggcagagtgagacctttactctcca

SEQ ID NO: 69810 - DNA, 1897 bp, Homo sapiens
gaacatggcttactgaatggagaggtcatgagttaggggaggtcatgagttaggggccgaggctagggcagctccagggtcagcctcaaggcctttaatctgggcaaatctgacctcgtaaaacaactcctaagatactctctccaatagcaataatcctaaatggcatttactgaacacctactgtatacagaacattgttctttccatatgttatctcattgaatcctacagcgagctttcaagaggtgaatcctgttatccagctctggatgaggaaagagactcagattcaaagaacatcgtgccatgttatgcaaggtcacatgactgataagaagcaggattaggattggaactcaggatttagagcccatagttatctccaaaatttagcacatcaaaattccttggaagcttttctagcccattgattcttagtgagtaagatccccaggtgatcctgatgcaggtgttttgcagaccacactctgacaaactccacctgaaccttgctgagacatgtttggggggacttttatttttgcagcatcctttggttgatcattgtccttaggaatgtgacagtgctcagagaagaatcaacatggggctgggggagtgccagggtagcagttacttacacatgaactttttgtttgcgaaagtttcaggttttattttcaagggcatgacttcatcttctataaatgtgggatagactggggtctgtcattttcttactgaggaccaaatctctgcacagatccagaacccagattttgatttctagttaaatgctctgtccagggtgagtcatttcctgaaagcctaccacgtggcagatactttgctggatactggggatgcagaaatgaatccaccaagatctttagcctccaggagctcaatgtcaaaaccacattcacctctctgttctgcgtctgttgggctgacactctataaagcattaatcatcttgttcaactgtctcctcttttctaccttctcttattgcagacttctgcctgtgtaaactttgctgagaatttgagcagaaatagtaaataatgaagctccagagggttgcactaatttcccagacatttaatcaatacggagctgccctgttcattacagctgtcagaaatatgcaaaatcgtccatctggtcctctcaggtacagagctctgagctggagtcaccagttgcctgcttaattaccacgccccattttccctcattctgcggcctctccattaaccaccagctaccagctcaagtataaaggcaaacaataaatatttgaaatggcattacctagtctggggtctttaacactggttgagttgggtctctagatgaggaatacaggtggagttttgtggaagagcagcctcccccagcttctcccttgcaccacgactttgcccagtctgcaacctccttccttctgaggccactccctgcccctcaaatatttagacctgttaaaaaccattggggggaaaaatgatctatacaaaagctttgcataaaaaagtgatcaatgcaaattcctctgaagaaattgcttcaacagatggaaacggcccatttgcaacaaatgcctctggctgtgcagatggtaattatgggatgtatgtaaacatgcaagctctggcaagcagagcaaactgcactgctgaacttagcctgcatcagggctgcctgccctggcactgccccttccctgactggcccataggccaggagttcaagaggatggatggtggtttggaattccaggacctattaacctctatttaattacaggtctttctgaaaaggtccctgtgaggcaatccatacattctctaatctctgggtggacccaggctatggcatggccccttgg

SEQ ID NO: 69811 - DNA, 8167 bp, Homo sapiens
gctgcatcctagtggctataagcttaagctctagtttcaaattgcctgggttcaaatcctggctctgtcacttactagctaagtgaccttggacgtgggattcagcttttttccccaagcctcagtttgctcacttgtgaaataggggtcattatagtctctctcactgtgagaactaaatgaactgatgtcaggaaatgtttagaataccccctggctcctgttcagctgttgatcatcacccatttgccacattcttgttaaatgccctttatgggttaagcttgtgcttggcattaaggtttctgccacaagcaaagtggggcccactcccacaaagactttcttactaaattctcaaagtaaccccattgtacagatgcaaaaactgcgggtcagggagggaaagtgactttcctgaggtcacacagctggtcagtgtctgagatgggattccaatcaagtacatctgtccttcctaccagaacccatgcttcttctgggcgcagagagatggaaaggatccctcttttcccaaggcttcccttgacaggcaaggagttggcctccgtttctgcaagagtccctcagacagctctgatcattttcaagtggacccaaaaagagaagggctggcatgtgctcatgatcccaagcctgggagcttggcacagcacaggcccttcttactgggcatggaaccaaaattcttagaagcttctgacttgttttctcctttggatgaaggcatagtgcatgttcgctgtgtgcctccatgcatgcctcgtaacagagaatggtcacacacatagggagtccacagctgagggtcatgtaccttaccttccaaagccccagccctctgcagggtgctgtcttgccacctttccaggaaccgtgacctctgggttagttggcagccaacatttactgagcagttaatgcacatcagactctattcaaagaactttacattaacagactcagtctgcacaatcatccccagagaggtagatgctatggtacttccatttgacagatgaggacactgaggcccaaaaagcagaagtaacttgcttaaggtcatgatgcaactcaatgttagataaagccaaatgtcaaaatatgagttctcagaggtctctgggttagagaatggtctttctggctggtggcacttttatgatgtgcctcaatatgtctgggacaaagtggcattcaattaacccagctccatccacccatctgtccacacacttatgagtcgtatgatcctgggttcatcagttcacctttgggacactcacttctaaactgcaggccaaaatgccagtactcacccttgcaggaacgaggaccagaacacctgaatgggtagttacctgctttgggaaagtgacatgctgggtaggcagaaggaagtgttcacaccagtatccctcatctccatcaggcttggctctgagcccaggtcaggcttgagcacagccaatcagtgactcatccttgctgggggcatagtctgctgttgtgttagaaaagctagaccacaatgattaattcaagcatgataagaacgtctgggctctaaccatctgctactgtgtgacctggggtaagtcccttccctctctgggcctcagcatctccaggtacttagaccctatgaactctaggaacattttaggctcagacaattgatggaaaattgcaaagactccacggggggggggtctccctcaactagtttctctttgccctcatgtctggaaatctagtggcaaaaatgcttgctctcctaactaatttgtatccacctctggcacaaagaaacctcaggactagttttctgttcccgcaattaataatattattgttgttgtcgttgttaatattcactgcattaactgaactcaatgtgctgagtcttttacacccattgtctctttgaatcctcaaactaatctcttgggctagatactatgatccctttctcttaacagataaggaaagtgaagctcccaagacttgattaagtagctcaaggtcatcctcagtgccaggatcagaagctgcaatttgaactggggaactctggtctagcctttcagctctcagccatgagacggcacacccagccctgcagatcaaaaaacaaacttgcccttcctcgcctgaaaacgctccctcaccttggccacccggcatgaaaacattctgaatccagactgccaagaaagaagaatcaagaaaaaaggaagaaaagaaaaatgaagaacgctttgttccttgaactgttctccacaagcatagtctccgccaggtacattacttaactgcggaggtgacccccgacaccccccccccgcccccaccctggctgcctcgagctcccttggcagccgggtagtcacgtgatgcccagacagccctggctgctattcaagcgtgtccatgtgaagcagctctagcgagcatcgctcccagagggggaaggcgggggcccgagtcagccttggacaaggcccctcagccccgcgccagagaagcccctgtcagtgcccactgccctttcaaagacactgcacgctgggcctgctccctgcacccttccttgcccaggaagcagcagcgcaggccagatgaaatggcggccacaaggtagcatcgctgaggggcttctgttcatcagagttcagcctggtctcccggcttcactcattcattaactcactcactcatttgttcattcaatcactcattcattcatgcattcattcattcactcactcagtcactcattcactcatttattccttcatttactccaaacttcactcaatcattcactcacccaattattcacatgttccttcactcactcactaatatattcacaaattacttcacttactcattcatttatccattcattcaatcatgtattagtccattttcatgctgcagataaagacatgcctgagactgggtaatttataaagaaaaaggagtttaatggactctcagttccatgtggctggggaggcctcataatcatggaaaaaggcaaaaggcacgttttacatggtggcaggcaagaaagagtgagagccaagtgaaagggaaaaccccttataaaaccatcagctctcatgagacttattcactaccatgagaacagtatgggggaaaccacccccatgattctattatctcccaccgggtccctcctatgtcacatgggaattgtgggagctacaattcaagatgagatttgtgtggggacacagtcaaatgatatcaattcgaacacaacatatcatccactcttctctgcactggggacataacagtgagcaaaatagatgagatctttttggagcctcagtctagcagggtagataaccattaaacaataaacacttaattattcaattgcaaacatgctaagttttagaaaggaagaataaagcgtatgatcatatataataggggcccagccttttcagacacccaattacaaaagcatagctcaactccctttcactccccatattgcaaagcagatatctacaagatatctacaagaatcatgaaggcctaaaaatatgtcagtgttggaagaaacatcaatgattatctggctcttggtggcaaaaggcagtgacatggtatggtcaagggctcagacctttgagttgatttctgggtttgaatccagctctgctatcaactgcatgcccttgaatgagctattgaaacaattggacttggtagagtgagaacaaacagagtactagagctgtgggggaagattaaatgagagccctatgcaaatcatttagcatgggcctgcccctgggcagcaaacagtgcatgctaccctcgatcatgctctactttcattgagcattggaggagggaaccacatgccttaggatgatccagtaggagcctgcacttgaacccaggcctctgggctcccagtccagtgctttttccaagcacagaagaacctttgatatacaatggaagaaccgccattctcctgtctccacctgctgttcaccagcctctgtcataaatgtcccagaatcctcacccaagatcaagtcctgacatccaagtgtcccccaccccaggtggctgcacagctgtcttccggggcatcttggttggtgggaggggagagagaagaaggcatctaacacacagcttctatttgccatgtcaggagcagtaacttctcctaattatttcctggctcctggattcattagccaccccagtattaattcagatcactgcatttatccccatctgtcctagattcgtcaccaagacactgacgatgctaatgtggtggtttcagcaatgaaagagcactgcagagttcaaattgttgttcagaagggggaagggctctagcaatttttggtttagaacaagcaacgagagtcccccaccaaacacacacacaccacccccaagcccccaataccccaaaccaggcagcccaacggcccacgggcagataaccttctgccctggcctcagcatcagagaaattccttttaaatgactccacagacttccccacccactgagttcccctctttggctaacagatgggctcagctaaccattcccagctttccgataaagcagtgtcaggcagtgaggccccctcggaaaggcatgcttggataataaattccaaggcacccctgccatctgcaggctgccaatcatgggggcgctgggcacactagggctcccagtctgctgctggtagggagctggggtgggacctctgcgtgtggggaggcagcctgcccctgccgccccatcctgctcagcctgtgacctgtcccttttgacacggtaggggccagtcctgctgcaacccctctgtctactcacaaccctccctgtcatgcgagaaccagcacacaggcagcactgtaatggaggcaataatcgtgaaccacaaaggccgatagtcagatctgctgccacattttggctcagtcacattccagtgcttgacctcaggccagtggcttccccataagagcctcagtttccccatctgtaaaatgacagttaaagacactccctccctggtagattttgtgtgaagatgtaagcaaaatgcgtggcacaatgcttggcccatggatataagtggcagctgtcattatcaccatcatcattattgttaatattattcgtgtggttgttatcatttaaaataccaattaggtgcatggtggtgcactcctgtagttccagccactcaggaggctcaggcgggaggatggtgtcagccctaggagttcaaggctgcggtgagctgtgatcgatcgtgccactgcactccagtttgggtgaaggagcaagacccagtatctaaaaaatagtaaagtgaaataaaagggcagttagccggaaaaattgactttatgatacttgcttcatatgatacttatcttggaggtgtgataaaatatatgagctgtcttaacccagcacagaatgagccttcaggaaatgttaattgcccctgtcaatctcaaattctttcatctattcattcattcatacaagagacattcactaaacattgtgccagcccttgggttagacctgaagagagaaagaacaaccaaaaaaaaaaaaaaaaagcaatttttacctttaaatcactcacagtcaagggagcaaatagagcagtccctgcaaagacacaggtttccacagtgttagagtgtgtttggaaagaggccaggcttcccagatgacccctccctctatctcccaaataataatagaggctttttgtaccacattgcttgaactccttctgactgctgaggtttcctgaggtcagggatgtacaatgtgcagtataggtactgttgtctcccatcctgggccaaggcagacatcactaatcaatcacagctgtctttctcattgaaggaagaagacaggactcagtcactaggaagattccttcctcctggaagtcacggtcagctgataagagctggcacccaagttttaagcaaatataatcccaggcttagattagggtttagacatgtccagctatgtctggcccagagcttgtttttgtaaataaagttttatcgaaacacagtcacacccatttctttacatattgtctatggctgcttttgcactatatgggtataggatgaatagctttgacaaagaccatatttcccacaaaagacaaagtattgatcctctggccctttacagaaaacagttgtctttgctgcagagggtttactgtaagaacttgcagtaaagtgtgatgaggcatcgtgaactgaaaccgtaagcatctcgcccatattctgtccactctcatactcaagcctgcttactgtgcacacctgtgactccctgcttctagatgttgttctggccttgggagcctactcttctgtgcagagggcaggttggaagcagcagtgttattgcccctgaaagcagtcctcaaccaagaggacggtgaggtgggtaaacaccctagcccctggactctcaggtgagagaacaccaaggtgggtcacactgccttctggaggctcccagcaggacaaaactctacttactcaccatagataataaaattccacctctcactcttaagatagtctttcctaggaatccttgcctcagagttggcttctgagagaaccagacaaagaagctgttgtttctctctctgccccagctcttccaagtctagaatgtgctatgtgttttcaggggactgaatcagtgactcatcccactgggatgttgcaatagctgtggtgaccacgtctcagtgtgcatctcacacgcagacttcctgagagagggaggcattgattatgccacttgtcaccagctgatgtagcaggattttgtgccaaaccatcagagaaggagtttccatctctcgctccagcctcccagtggctgcaactgcacagggttctgacagtgaagctcttagtctagtccacaaaagcagattcccatcctgaaatgccctacttccctgctctaggcagacatcacgaatcaatcacagcctgacttcctcttgcatctttttcagtcaagcactccaggcaggtgctatcagtggttgggaactggcacacaagattaaacatattctatgggggaatgcctaggacagaaggctgcatgaaaggtatcacaataggaagtatggcatgaaatagttcttcaaaagagaaacaaaacaggcaagtacaaatgataaatgtaggaaagtgatgtctcacagtcatgtgtgtgagtgtgtgtgagggagggagggaaagagagagagagaaagagagacagagagagaaagagagacagagagggaaattgcaattgtttttctttttctgctttgttttgtctctacactgagtgtctacttacttgaggcatgttcacattgagcacctattatgtgccaggccctgtgttaggggtacaatgacaatcaggactaacatgtaattgcctaatggaaaagataactacaactcagtgtggtaaggcaaaggcagaatctgtgggaatcttcacagattgggccgcagagcacctgagtttctcctttatgacaatgagaatcacaattagacaactagaatcacaactagaatgctgcagttatttgtgagattgtgtgctaagcctccctctcactctgtccccctctctctcacttagactacaaactcccagagggtaggcactgcatcttgtttgctccttgccccatacactgggcctagatcggtgcctggcacagggcaggtgcgcataatcagtccctctggcttcattaaaaagtggagctgggggccgggtgcagtggctcacgcctgtaatcccagcacttgggaagccgaggtgggcagatcacgaggtcaggagatagagaccatcctggttaacatagtgaaaccccgtctctactaaaaaaaaccaaaaaaattagccagacgtggtggcgggcacctgtagtcccagctacttgggaggctgaggcaggagaatggcgtgaacctgggaggcagaacttgcagtgagccgagattgcgccactgcactccag

SEQ ID NO: 69812 - DNA, 3342 bp, Homo sapiens
gtcaggagttcaagaccagcctgatcaacatggcgaaaccccatttccactaaaaatacaaaagtggtggcatgcgcctgtagtcccagctacccaggaggctgaaacaggagaattgcttgaacctgggggacagaggctgcagtgagccaagattgcgccactgcactccagcctgggcgacagagcaagactccatctcaaaaaaaaaaaaagtgggagggcgggtatggtgagagtagactctgatgactctgatgaaagatgaaggtggaaggggcaggtcgtgtaaaccatatgaaggagtttcaatgtaacaaaataaaaggaaaacaacaaaaagtttagtctttgtaaataaacacaaaatgaacccctatactagtacccagttattaacaactctgttctgaacagagtttaatttttctgttcactcataggctcaggtctctgagatctttagttgagagcacaggtatcagcaaccgggacttaggctattgatggacaggtttgcgctcctggagtgtcaatatataacacgcaatttgtctttcagccgcaaggtcaccttgattgctcttctttcagttaggggaaagtattttctacacactgaggttttggatccccagagttccagaggcagctagcggagagacaaagcataactttctactttctgcctttgatgcataggttactgagccctttggaaccttagttttctcctctgtacagtggggccaataatgatgacttgcccagagcagttgtggagtccagtgtctgacacatactaagcgctcattatcaaaggctgtactcatgagggagatgatgatggtgaagatgatgataagatattggagcaggcagaggcccagttttgcagagcaggagggaaactgaggcctagaggttggaagtgactggaccaagttcacctgaggaatcacttacagagctagaatccaatggaagatcctaagagccaattcatatgctctttcctcttgaattgcaattcccaaactgtgtgtcaaggcaccctggggtgcctgggcagactcacaggaacattgcaaggtattataaattgtcaaggtaaacacagcgatattggacatctgttaaatgccatgagaatgactagcttgaggtcattcacaattccagcattagatcacccaacattccttttgatgatgtcgtatcttcgtgaccctgggtttttggtggctgctgtgataaaaagcaagaactatgccaaagtcaatgtggaacaggaaatgagggtgacaaagtccgatctgatttcaaggtttcagaagccatgcagtgcccaaccggtgcacacatttcaataggaagtgattgtgcttacaatattattttttgattaacttgtgtgtattatttttttcaaatggctgctaagttgttaggatgtaaatgcttattacgttgtttgcacttgaagacccaataagcaggactggcagaaccattaaggatttattttgctgaaataattcctgaacactaagggtgccatgtactgggaaagtttgggaacttctgctccatatactaggcacccccctacccccgtctgggaaggaggcaggaagctctgagcctccagccaagactgaggcatgtgggagaatggttaaatgccttgcaaacaagagggacatgaacagtaaacctgatttctcagttgctgccaagtcattgtttatttagaaacagcagtgtgggcacatcagaaaccatgtcctccttgttgctcagcaagatgggcaacttatccattcagctaacatacaactggcatttactctatgtctgcactgtcctggtacagtggtaaatgaggcagtctctatcttcaaaggtaggaaaggaggaaggatgggaagttatatggtttggctgtgtccccacataaatctcatcttgaattatagctcccataattcccacatgttgtgggaggtaattgaatcatggggatgggtctttcccatgcctttctcatagtagtgaataagtctcatgagatctgatggttttttgaagagaaattcccctgcacatgctctcttgcctgctgccatgtaagacgtgactttgctcctccttcaccttccaccatgattgtgaggcctccccagccatatggaactatgagctctttcttttataaattacccagtctcaggtatgtatttattagcagtgtgagaacagactaatacaggagagaaggaagaagaagagactattctttttactaataaaactctgagaaacacaggctcagagaggctaagtacactacccagaatcacacagaataaaaaaagttggataatttacagctaagagaatgccctataccactcatcttgagcacttatggtctaatctgagagatcgacacaagcatataagtaatatttggagggaaaatttgacctcactcaagaatgggtatggatatcatggtgctggcataaggacggacatataaatcagtggaatcaaattgagggtctagaaataaaccagacctctctgggtaactgatttctgacaaggatgccaagattctttaatgggggaaaaatagtctttcaacaaatagtggtagagacaaatgaatatccatatgagaaagaacaaaactcaaaatggatcatagagctaaacataagagctaaaattataaaactcctagaagaaaatttaggagtaactgttcataactttgggttaggcaattgtttcttagatatgataccaaaagcacaaaagacaaaaaaaaatacaaattagatttgatcaacattagaaacatttgtgctataaataagatcataaagaaagtgaaaagataacccacagaatggaagaaaatatttgcaaatcatacatctaataaggaatttgtatctagaatatataaagaatgcttaagactcagtaaccaaaagacaaaaataacccaattcaaacataagaaaaggatttgaataggcatttccccaaagcaaatgtacaaatggccaataaggacatgaaaagatactcagcattattgagcattaggaaaattctcattaaaagcaccaggagatagcactttgatgcctactaagatagctataatcgaaaaggcagacaataacaactgttggcaaggatacggagaaattgaaaccttcatacattgctggtgggaatattaaatggcacagcccttgtaaagaattctggcagttcctcaagatgtcaaccatagagttaccatgtgacccagcaattcca

SEQ ID NO: 69813 - DNA, 347 bp, Homo sapiens
cttacgggatcaggaattttatacaagtttcttatagataccatctcatgtgtacttactaaaggccttgcacattctgactcattcaaatctcacaacaatgtcatgaagttgttgctatgattaacatcaccattttacagacagaaaaattgaagcacagagaggttgagtaattcggcttaggttgcacaaccaggaaatagcagagagggatttgagtcaagcactctgcctgcagagtcctggctcctaaccactgtgcaggatcctcccttgttctttggggtgcatcctgcagaagtgccaactaggggtgtgcaggccaaaggtggccccaagtgctt

SEQ ID NO: 69814 - DNA, 2569 bp, Homo sapiens
attgaattataatgactagtttccatagcaattactgcatcaccttgtacattaccagaaagatctactgcactattttccagtcatccttgtaaacatttctacttttttacgatgttctaggggaaaacacaagccctttcggcttggcagcaattggagagcatatttcaggagattaataaagccggctggggtgtttttattttctaagttcggcagttggttttccatcttcgccctcaccagcttcttgtcaggcagacaaagaggaaaagaggcgagcaggagagaacagaggtgaagggggaggtatgcagtcaccagggagggcagaggggatggggcaagagcatgcctcaggggttcatgtctgtgagtctgctgattctggaatcgtttggagagcaacgccctcgggaacagccttcttcccaccctaggtttggaggaggatcgggggtgtctataagctcacaaaatatcagccatggaacacacagatatatcttgtctatagcttcaaacctgtgtctccaggctccgactgtgtcctgggtccctggaaggggatgggaagatgggaatgtgggcattccccgcacctccccatagaatgcccacttccagcccagctttctttaatgggcttttcctattggctttccacatggtattttatttccaaaaggccgctgcagctgatggatatttgaagatacatgttttcagttgagaaataagggaagtaacacccggagaggaatgagtcagctacagtgagtaagaggtgtggtcaggcctgggacccacccagctttctgatgtctgacttgtcccattgcaccctgtggaagggctgagctttgggtaggtaaaagaagtcacagtcacagggtctggtagatagaaagaccctgaactgggctgggggaaccccatgcaggggttttggagtttccaaccagagagtggggcaatgaccccatcatgagccctcaacaccttcagttcatttggtaatggggcctgtttcaccgccatttgtgcatcagctcactgcctctgcggggaaagatacctaggcattgtggagaggacttgctattgggagcttgggccccaaagtcagaatgcccgggctccaatctctgggctgtgcctgtgctgagctgtgtgggggtgagtgacttcccctgctctgcctcagtttcctctgctctaaaatgagtccaatggtagaatccacctctgaggcatttgtgagggtcaacagagatggtgtgggttagggttaagtgctcgcacttacaaggggcttcattgtttccagcgggcgttcatggactcgcttgtagctgcagtgaggccttgaatgagttaattaaattcagggagtcctggcttttccagctgtaaaatgagaaatgtatgctggctggtctagaaagttactgctggctctgaaattcaagagttgttggattgtaacagtatagttggaaaaaggaaaggagggagaaaaagagagagagagagaagagaggggagagaaagaagagaggaagagagaaaagagagggaaagagagagaagaaagagaatgagatagaaaagagagtgagaagaagggggagagggagaaagagaagggaagggggagggagggagagacactgtgtaagagcagatgccttaagcagaaggaaaaagtccctaagtgacaagaagctctgagttcaccaaaatgcttaaccaagataagaaggatgtaactgatgttggaaagattgttatgagattaataaaagtgattaagggattaagacttctcaaaagagatagtgaagggacctccaatgggaaaatcctccctcaccctctgtacccagcctctcttctcggtttttaagtcctcagtcatgtaggcatctaacaaaatcgtctcagcagatgctcaaatagaataaatagaatcctggcttaagcccatcttagacattgggagaggtcccctgtgacacacacacacacagtcaaataactggatttatttctgggaatgtctggaggaatttaaggtatgccttgagtcatgggtccagggtcaaggttaatctgtggggctgttctactgagcacataagtcctagatagacacgcctgtaggggaacatagatatgaactaggcatcaggagggagcctgggtaggttgggggcagaaggtgtacttagaactgggagatcctggggatgtcaatctcagttttgacatatggcaggtactcaaaagaagaaaaatgccatccccttccactgcttcaaccctatcctcagttttcccacctgcaacctcggaacaaggatacttctccaagacacaatgggtgggaaagcactttacaaaggaatcactggcattccttcccaaagggttttccagcacccttgttggaagattcttgacttttctgttgttctagaataacaaacagaaacccggacccactgtcctgctcttccagcaattttcccacagcagggggtagggtggtcagctccagagt

SEQ ID NO: 69815 - DNA, 865 bp, Homo sapiens
ggcgcttaataaaactgtgaactaccgaagtgatgtagccttggaccagccacagggatggaggatgtggctgctggaggaagcctccaggccagtctgatgtggtgaggatagcatggctcagagaggggaatgcactgccccaacgtcacccagcaagtctaagcgagatccagccccagaaatctaggctttcctctctactcatggccgcatgcccttgggcatagctcttcccctctgggcccttgttacatctgtgtaatgggcctggggttgcagcagggatagggaggttagacacaggtcggtccccagcccccaagtttgccccatggtgacatgggtggccacttggtggcactgtggagtcaccaccgactggcagccacccgaggagccccagtccagtgcagcttggccaggagacctcagagggtgctctgcgctgacctccttccaggtggggaaactgaggcccagaaaggggcagccatgcctttaccaaagtcatgcagctagtctaagaagactttaaaaggtagtttattgaacacctactatgtgccaagtttgcaactgtatcatccagtttccacaacaacccaaaggcaggagatagtctttccatattccagatgaggaaactgaggcaccaagagcttaagtggaaatatgggagcaatgacaatcatgacagtagtggttaatattgagtaagtgcaacacatgtaaacaatggcaatgagtcaggccagtcccacaaccaatccaagacttggacaccagtactgacccattttacagagatggaaactgaggctcagaaagatgaaaccatttgcagagatcacacagccaggaa

SEQ ID NO: 69816 - DNA, 2935 bp, Homo sapiens
cagcagggtgtgatgggacaggctccagaaaagagtgcttccttcagctcccttgcagcctgtctctaactcccaggcattggggcctgctttacctgcccagccctctcccccctcctcttcacctggggccagtcccaacacggggtgcctcttcctgtctgcagacaacaccaacccccaagccaggtgctccctcaggtatctcttccctaagtgggctgggctcctccgatggaaaatatcctcagggcttcaggctggaaggagtgagatgactcagggccaggtgggagaagctcagggagaaggaggctgggggcgcagatggagggagttctttgtaaatgagtcagaaaaagaagcctctctccggataataccaagaatctattggcccgaactcaagtatgcaggacatgaatgttagtttcctgtaactgaacttgcagcaccgtagcctcactagctaagttctgatcccacctgccgttcacctggcctcttagagcgactgtgacacgcagcctccttctgtgccttcctctgcctgcccctcctgggaagtctgtctctggttcagaggtgggagaggggtctctcatccccggttcttccccgcctgttgtttatatccaagcttctgctttttgaagttgattattccctcctcgaggtgataaatgcaaactacttcccgccctgatggggggaaggacaggggttatataggaaggaacaactttgcttcatgtttcaaggattcttcaaggagaattcccttcctgattggggtgtgggttgccccaaagcacatcctgcaaaaagaactgcagtgtgtggggaggtgagagggtgagggagtgaagcccggaagggaagcttcattagcaagcaaggttccaatgtgggcagctggggcacctgagtccagggcctcatatgactatgtcccagttcctggggttgaattgaatgccaggaacccctttctccttgacctgttcctcaaagggcttcatctgcctctctgtgccctctctcgcctgcgagcaggaatgagttttaaactcacaagcggcccggcacagcagctcacacctgtaatcctggcactttaggaggtggaggtgggccaatcacgaggtcaggagatcaaaaccatcctggctaacacagtgaaaccctgtctctcctctgggagccaacatgggacatggctgggagttgtctcacccaaggatcaaaggagctggggtgtttatcctgcagcccccgtaggctctgccatgggctgaggggtactgcccggggcattaactccctggcacttcattgtgttggaagccatggagtgggcccacatggggatggtgagagcccaggaggaatgggtgggcaccaacagcctctgctacattcacatgtgtaatatgggggtacaaatattctcatttgcatatgggggtagttcatatgctcatgtatgctagcagcatgacctgcacacaccagtgctacccccatcttacaaatgaggcagttgaggcctcgcttacgtaagtgcctcactgataaaggcagagagggtcagagatccaggtctttggcatctatatctaagagaacctgctctgtgtgatctcaggcccagagtccaaaccctcgcctgcctcctctcggctttatttttctgggctgtagatttcacttccttttagcctcattgttttcctccgcaaagtggggacaggatcgtcccccctcgcaaggctgatgcgaagatacaagataatgcgtgcacacgtgttgtggaccgggcctagcacactttatgtgctccataatcattcccctcccaccctcttctcggcctcattctgccaccaagtccctctgggactttgggccagtcctctgttcaattcagtgaacattttcagagcctctgaatgttccatggttgtggctgcatgtgagtcaggctggccacatccaagtcagcagtgaatcacctgagacgggaggtggggcgaggccccatggcgttgtcccgtgggaaggtcagagacagcagacagaagcagggacgacagacacagtccggagggctgtaagctaggggtggtgggatcaggtttctgaaacttcctccactgccgtgtggatgcaaggcagaagctggcccaggagggtcacttagaaggccacctcttaaaacagagatgagcaaagacaacggctgacctggggcaggggaattaggggtgggggaaggggagaggagatgctgcctgggctgggggctgtctttcatgaggcagccagaggagccaaggatggcctctgaatgggaggctggggctgagtccagccatcccaggacctccggtgtgtgactcctggacataccagtctttgccatcctagcccaggctgtccccacatccaaagctccccctgtggtcccacccctgctgcccttcagagctgcgaccatggccctcaggcctgtccaccgccctcggcaacatcatggctaacctgggctccacacatttcttccatcagcagacagtgcccctccgggggaagctctgagacccagcacctatcgggaaaaactcaaaggtccaggcgctgaatctaagccaggtaaaaatatagataaagagtgctgggaaggagcttttttgaaaacacacccacccagcccctggggttgaattcaatgccaggagccactttctccttgacctgatcctcaaagggcttcatctgcctctctgtgccctctcttgcctgtgggcagggatgagttttaaactcacaagcagccgggcacggtctctcatgcctgtaatcccagcactttgggaggccgaggcgggtggatcacgaggtcaggagatcaagaccatcctcgctaacacag

SEQ ID NO: 69817 - DNA, 2600 bp, Homo sapiens
cgtgctctcggtcacagggggccacctcctctgcaactccatccatcaccaccctcccccaacatgcgcctccccccctcactggaccccggagattatctgattatttctctaagtgggagactttggggtggtccaagtggtctggaggggaaaggtaccaaatttcccctctgagtggcagggcctgggcagagccacgagccccgaggaggtcaggttaaacggcactgtttactttagccctctccaaagtgtgttttggtggtgagagagagttatgaataagctcttaattccagcaagggcgtgggtcagctctccgaccgcagtgtttattgacacacgcgtctgctcccttgcccagcgccccgagtctgaggggcccgtctatgtgcaggggctggtggccccggctcacctgggtgggggccgggcctacctgcagcctctctccaaatgcaccacagcatcagtttttccattggtgctggtgggggccagggagggtgggagggggtgcatctgggaaaactgtcatgagcagggagggacccagaccccacccctggcggggggggtgcccagaagccagatgccacccaagaaacgaggtgggtgggaggtccgtggggctgtttggagttctgtcacctggttaggctgtttgtttgtgtttttcctgggctgatggcatccttggggcctgagttgggagcaagctcatgagctcacttgctatgtggcttgagaccagttgggttcccctgctgggtgggcctcagtttccccatctgcattacagccattctgttctacaggcagagatgaaagcacagcagactgtgtcctcatacaggatcatggtttttggaagaaggatatttgagaacacgttctcaaatggaaatcacaagttcagaaaggtccatttatatacatctgcccaggagccgccctgatggaagccaggagccaggacaagaaggtccagataaatatacgtgccaagagccacacggtgacgctgctgtgaggctgccagtgcaccagtctcaaaatgacaagacggcagagatggagaacagattagcggtcgcctggggataggagcaggatgggagagggacgcaattctaaaggggcagcacaaggaagctcttctagggtgatgaagtcattctgtatcttgactgtggtggtggtcacaggaatccatacatggcaccaagttgcacagaactacacacacacacactgaattcatgtaaaaactgatgaaaatataatatagtccatgatctagttaacagtagaaaaccagtgtcaatttcctgattctgaggtcatactacagtcatataagctgttgccattggaggaagcgggggggcgggggagagagtacacaggactttgtactttttttccagggccctgtgagtctgtaatataattgcaaaattaaaagttgttttttttaagagctcgggaaggttattcatgtgcccaaggtcacacagcaaattgagaactaagctaggcttaatccccagggatattgatagccatgttttttccactctaccgtagaaagacagagcaagagaggcattctataaaataatcctagatgagtaatagtgaaggcatgagagtagtaatagtggaagtaatagtaattctttttttctttttcttttttttttttttgagatgaggtctcactctgtcacccaggctggagtgcagtggcacaatcatggctccctgcagcctcgacctccctagctaaagcaatcctccagccttggcctcccaaagtgctgggactacagccgtgaatcactgtgcttggctgctagtaataatcattgtagtaattgtagcagtgacattagcaataatcatgacagcttttgtttattgaggactggcctcaagccaggcaccttgtgtctgctttatatatattactcctgctcttccccacagcccccaaggttgtatagatgggaaactgaggcacagttcccagatcacacagaagatagtaaaggttgaatctaagcctttcactccatctttcgattcaggtgtccaccataagcctttgtccttagcccgtgtccccatctgaaaccccccaacgaaattatgccagctaggctgaaattccagcctggtgtccaggatccaccccttggtcatgtctactgtctgagagaggtcctggctggcacaaaggggccacccacaaatgggtcagtgggaggatcaattaccttgcttgggaatctaggcaagtggccagagatggttttggcactgagcggcccctcccactttacatctaccctgaagccatcctgacagaggtcatgggccaggacaaggaggtgtccaaataaataaacaagcccgtagccaggaggtgcagctgctaggtggctataaacagggagcatattgggaggctgaggcaggcagatcacaaggtcaggagattgagaccatcctggctaacacagtgaaaccccgtctctactaaaaatacaaaaaaattagccgggcatggtggtgggcgcctgtagtcccag

SEQ ID NO: 69818 - DNA, 656 bp, Homo sapiens
aactcctgcgctcaagtgatcctccctccccagcttccatagtagctgggactataggcatgcaccaccatacccagctaatttttttaaactttgtgtagagataaaattttaattttgtgtagaggggcatctcaccatgttgtccaggctggtctcaaggcagaatcctggtggctcaaaaatcttgatgatcccagaattacagaactcttgggctcaagggatagccccacctctgtccccaaaagctctgggattacaggtatgagccaccatgcctagccttgggtttttacgggaaagataacaaggtctggagtctgcaacctggactttgcacactgtgtgaacctgagtgggtcacttcagctctggcttctttttctgaacagacacgaggtgataactcatgcctatgtcaccagggcctgtgagggttaaccagcgtaaggagtgttgatgggttttgtaaacagtgctgtacggatactggttttgtggcccggtcggggcctcttgggaaacagtgtagtatgctgctggtgagagtgtgaattatgacaaccacttggaaaagaatttggcaatgtagcctcatgtggaagatgcacataccctctgactcagcaatttcacccctaagaagacgccca

SEQ ID NO: 69819 - DNA, 897 bp, Homo sapiens
ctcagcctcccaaatagctggtattacagatgcccgtcaccacgcccaactaatttttgtatttttagtagagatgaggtttcaccgtgtcaccaggctggtcttgaactcctgacctcaagtgatccacctgcttcggcctcccaaagtgctgggattataggcatgagccaccgtgtctggcccattgtactcatttttgaagacactttctgctggcggacaccgatattggtttctcattattttcagcaatatatagcttccttttaaaaatatatttgtgtgttttaaagtgagtctacttaaagaaaaatatgaagtaaagaacacaggcagtacatggttatgccaaaaaatccatagcactcacctcccacctgtcttatcagttcactatgtgttagtcccaggccctgcctcgtccctggggcaaagtccagaaagcgggaatttttgcctgcttagttcatgggtttatcccaagtagcccaaaacagtgcctagcacatagcaggtgctttacaacagtaaagagttgttaaatgaaggtggtggcaatctaggaacggcatattgaaaacttgcagagccagctccaaggaagtcagtgattctgaactcctattctccagacattctattgttttccaagattcaataagccttaattttaaagttctagagagcttagctctcataattcctgacactgtggtcctctgattccattcttctctgtttcagaggccctctgcagctcagatgccatataggggcactctaagattctaagaatgtggtgtaattatgttattttctgggaagccaggaccaaccaagactgcagaatcagatcctccatctagtgctgagcaaacaagaaggagaagaagg

SEQ ID NO: 69820 - DNA, 1777 bp, Homo sapiens
gccggtgccggcccccgagccgaggacgcagaggggctgcgaggcggcaggcgccgggggctggagccgagggtcggggaaaggcgcggctcctctgctcggcagcgggtgcgctgcgttcggcgcgcagcttcgcggccacgtccgccgcctgccgcttctgttctccgccgttgggtgtctgagttcgccggagtctccgcgcaccgttgcaggcgcgggagggcagcgagacgaggggttgggtcgctccaaggctccggttccctgcctccgcgctgaggtgcttcgcgagtccctctcggacctgagggaggggggcgtacgcgggtcggggggccacgccgggcgagcaggctaaggcgttcccgctgcgctctcagagcccggaatggggggaggggggcgcgggggcagctctggggggtctgcgcacccctctcccgactagcgggggggctctgcgtggggcgttccgagggtctcggctcccctctctgtgtctgcctctcgcccagcgccgggagaagcagcaacaagttttgcatttcagcaatcaatttcagccattacatttgcaccaatcagcgccgcccaagttccgggctcggggcggggctcgctcttaaggtggtccggggtcctggctgccgaagcccccgccacgaacccgcactaccccagctctggggtcccctgcgcccgcctctcctcggggtccggcgtcagtgcgctgggggcgcgccccggcctccgggcgcatcgagctggagagggtgcaggcggaggagaatggcgggagcttggctttgttcacccccttcccattcacactgttcccaactccccacccccaactggagcgagacccaccgggtgggcagggggcggggaggtgggcggtgagcggtacggggcgctcagacaatgaggtcgccaggcaaagaccctagactcgccacggaaagtcgctaagtgtctactgcacttcggctccggggtgaacactccgttctccgctagcggcgcccaagttagccggccctgggattttcttggagggtaaagcagacggggaacctcgaagttagggttctcctcgagagacctgggcgcttgctcactcctccgtcactagggcgttcacaattgttccccttccccactgcctggggttcccggttctcaccggccggcgtgggctccaaggagtcacagtcactcagccactttatgggggagcacatcggttgagcccagtaaccggagcgacttgcgaggcggctgggaaccccgagaagacacgcacgaagagggcgcacccgccgggccgcacaccttgccctgggccacccggtccaagacccagaccctctgcgggtgcgaagttggcctccttaagagatcaattaaactgaagaggccgaggaatggaattgggctgtgatactaaaatcaataggagtaatttaatatctgccctgctctttatgaaatatttatcccaataatcttagttaaaatgtttagatcgtcctgatccccacagaggctgaaatctatcttgcaattagaagttggaagttagaggtgatggaggatagaggtgtttattctgtgcgcctgtgtgcgtgtgctcgcgcctgcgtgcgtgtgtttgtgcatgcgtgtgtgtgtgtgtgtgtgttcctccctaaagtgtgtgtagggaaggaggggggagaaggcctttaattttccttgccataaaatagcacgaggcgattttgctagcaga

SEQ ID NO: 69821 - DNA, 493 bp, Homo sapiens
gccaaggccctgccagcaaggaaaaggagcgctgagtagagagaggactcaccccgggttctctgggccaggccccagctgtgcaggccccaccctctcttggccacctccaccccagctgaggcttagccgccagcctccgacatttgccacccggccacctggtgagctccaggcaggctgcaggcgccagctgcccccacctctggctccgatgagctcatctgggtttccaaacttccaaagcggccaggaatgtttgctcaaatgttccgagcccagagagcgttaagagcaaaccagtgccctccgccccccttccctgagcagaaagcaatctgctataactcagacaggccggcctcaccaagcccaggagatggatgcagcgttttggaatctatatcacccaaaaggaaaatgcctcttaaatcacagggagctgggagagagcgggagcaggaggcaccgggacccagtgatgttccagagg

SEQ ID NO: 69822 - DNA, 1577 bp, Homo sapiens
ttccaattaacccatgaaatttacacatttggttcaaaaagactactctgtagatttgtggaaatcataattccatttaattatcattgtgtccagcaaaattaaacaaacaaaaaaaaactttccctgtgaaatgaaaaataatctcctaggcaaaggtgtcatgatctagtagaaactaaaaaaatgcggtgtgtatgacctaatccaacacattcctgctgggcctgatttatttttacctttttctaaatgtcaatgagcaaaggtcaactagatttcttctgctataaaactatatattgtcattcttaacattcactatgaggtggaatacaataatgcattgaaagaaaagagtcctgggttcttttattaaattaagaatcattacaaactctcccttaatttttctacacaacatgttgctgccactattataaatatatttaaaaaccatgtatataattagcggtttcaattgatggattatttaagttttattcagctttcccaagaagagagaaaagtgcatggaacagtaagtacttctggacaatattcaacttaaaaatcttcttccatgaatagaaaggactttatcaattacatatgtgacttctatttatcagaactggattgttaatctatgattatgatccgagaggaaggaagaatgccaatatttacagaatgctgactgtaagcaggcccatgaataatcaaagtttccagcactttgagatccttgtcttataaaatactacagcagctatagtttaaaaatagaaaagttatgatgaaacagacataactaattgtggagatctgagatataatgagggcttctttataataataacagaataaatattcgccctacaggaaaagtaaacaccaaggaaatgtttcaacattcctaggtagtaacaaccgtgtgcatttataaaattccaattctcccctcctcctagatctaactgcccatgttactttcactttaataaagaagacataaaaaagaaacaagtagaatctggatcctcagattgtgtaccttagttcacagtgtgcccatttttcagtaaagacctctaaagaagacatcccctgtgacagcacaaggcacacatacatattctgagagatatggagggtagggggaagggtccagctgagatggggcaggggagtccttcagcaggctgggcccgctctctccctccagtcaggatcagaacaccaggtcctcttggggacgtgctgtatggggaaagggttctctacagaagcgctgggcaaaccataaggtaagcactttgaacaaaaagctgctgtgcttgtctccaaagaaagtcccttaaaacctctgctgccatctgtctttgctgctttgaggtataaagaagggctgaaatgaattatgtagggacaataattttcatatcataaaggaggaaaaaaagtaataacagagaagatatcccattaatagctagctccgatctcatcctaaatctaagtcaccacattttgagcagattttaccttttgaatgaagttttctactttgcttt

SEQ ID NO: 69823 - DNA, 1459 bp, Homo sapiens
cccaaacctaacattttcctcctctaaggcaaaacagttaactctttgctaatctgcgagtaaataaaatgattttgctaataaattgagttttacataaagcatgaaaatttaaaaggacaacttaaaaaggtaaagaatggttgattacaaagagaacaatcaaaagttctacaagatgaacgtcatgggctaacaagaacctcaaattatgactcattgctacgtaatttaaatttcatctgtaatacagtaagcactagttgtgaaatgtttccaaaattgtatttaaatagtttgtatattcactgaattccttacatttcatgtttctaactgtaaatgaaactcccaagcctgagtcatgtttttaatttaacaacacatattaggttactctaaggtatgtggatgaggtcttagggggagtaatgtatactagaggcacacaatgtaactaaacaaaacacagtgtgtttaactggaggagtgagcaatcagtacatgttatccacaagaactagtttctcgaatctgtgacaaacaaatataaacaaacgtaaaagagatttaacattttttaaaaagaatccaaaggcattctggaaatgtattttctaaaaatacagtcccttcagtttcatgagacttgtcaagtttacacatactttttcctatttaaaactgtgttgggatgaagatggaataggtatgtgctacactgaaccagagttaacgctttgcaaagacacagcagtttctgtaaggctcataactgtcttcatattttcatttttcaattttaggcaatgtgaatgcttaatttcagctgctgattctgtgatgttaagtttccaacccagatttcaccaagaaagttaaaaataaatgcactgctgggagtgctgccagtgtgtgtgcatcagtaaatatcaacacaagattacgaaatatatgtgacgtctatgtactgaaatttcaagcagaaccccattccccaactcagctattctctctatttaggtaacctaaactttatttaggtaaccatttattttagtagccatttggacagacctaaattggacattatatttctgtaaatacatgggaagtccaatatttgatttttatttggtttaaggtagttaacttgaatctagcaaatacttacaagcccctactatgagcaaacctccctgcttggcactgacccatatcaaggtaagtcagacacaaagcctaccgtttaaaattcagtgtgaacaacaggagatggaggaggtggggggaaggaagacagggggaatacataaaccaccaccctgacccaagacacactgggagccatgagaaggtcatcggcaagactctagtggcattcaaaggtggggaagtcccatctggtggggtaaatggaaaatattaaatggaagaagtaaacatgagattaaatgtg

SEQ ID NO: 69824 - DNA, 1499 bp, Homo sapiens
aattatcaaattctggcaaataccatgaatagggcatcacacaattgccaatgatgcaacagggcataaaaggtacagaacggtgatctaggagtcactggattaagagttaaaatctgctacatctccataccttacacactgctgtaactaccaccgaatcaggtgttccagaaatggcagacattctgctgtttctcctacaactattacatgtgtttctctgcccaagtttctcaactatataaaataaagcagctgaacttacaccacaggaaggttgtaaagattaaatgtaaccttgtatagtacctggtaccaaggaaaagtttctttacccctagtcagtctggtgcagacaggaagtaaatactgcaataattcagagggaaaataccaccatcagacaagtaaggaaaagtttcaaagaaatcataggatttgcatttagctttgaatagactttggaatctgtactggtaaggcaggtttctgctgaagggtatgtgtgggatggttcacagaggccttttgagagagagactgtggaactaccaggcagctcttctataagaacattcttcaacactaccctggttaagtgggtccacaataagatttcttcttcctttcagccataattatcatgtttgttccctatttcttccttgcatttcagaagtataaaaatttccaactattatcgttccccagtgctaccctcagtgcctccaccaggacagtaattggcaaagagggcctgctgaacatgtttacagaagacactggtaagatcaagtccaaaggttcctattttcctgtatgccatattatcagctatcttcttacgctttatttccctccacagcagcaagtggatggcttaattattatcagttattcttgactgcactagttatttctgagatcacagtaattcacagaaattcagtcaggcagtagctgaatttataagagtagctggatacaccatcatctggataaaatgaacaatcaacaggcaaatgggcagaaacaaccagcaccctatcagcctaataagttactgtttaacacaggggggaaaatggaaaaaaactgcagttctgcaatctgcagaaatacaaaattcacattatttctaagaactaaacctattctagaatttcaatcattagtcaataataaaagacaaagcaatatcagttacaaatcaggccagacatggtatatattccaagttcctaaaaagttagaaatcagtacaagtcatagtatcaaactacttttgctgcctgttataaaatcaggagttcctataggaaggatctgagcccaaacataaagcccaccacataatgtagcattgtcttttaatgtttatacttgaaaagctaataatttcaagaaaatacaatatttaattcacctctgggtctcaacctcatgcccctttactccctgtaaaagtattgtcagctagagctactactcactgg

SEQ ID NO: 69825 - DNA, 945 bp, Homo sapiens
aaggacgcttccctcttaaaggatataacaacttaataacacttcactacaatgtcactttctcttgaaacaggaaatccgtttcctatggtaggtacattctgaagggacaaaagatactaagtgaggacattatgcagaaatcccagactacttggcttctttcatcaggaagtgatgtagcttctagaaaattacagagaacagtggctaaagcaatagtcatatacagacttcccacaagtcatcaacaaaaagtcttaatgacccatatatttaaatacatatgatttttgtagcaaactactctgtgaccctaggtcacactgacagatttttaaaacaaatccttgttcctagagttattgtgatgatgtcaccctccaattatgtaaacatgtcaaagcatccactcaagtattcagttatgccatgagtcaaatcccatctcttctctgcatggtgaagtatagttcataaacactaccaaagacagcaaatctacaagagtggtatacaagccacctgacaacctagctgagagagttaaatcttaagagtaatcaacaatcactctgaattaaaatatttggggctgcatttgtattacattcacctgcagtgacagaaagcccccaccaggtggagtttcaaattcttggtttcttgcactcccaactatttcatgtttgtcctgactctgaggacttcactcaaatttaataatgcagctgttttctttctttttaaaagcaagtaatatgaaagaaactcaaccatttaactttttttttaattagctcactcaagaaaaaccagaagtcattaaatacagaatgaaaaatcactgattaaatcagactgagacaaaaatctccaggagtcaaggtgccacaagtacaaactttgaggatcactataccttcagaaggtcttcctaatttt

SEQ ID NO: 69826 - DNA, 539 bp, Homo sapiens
catttcatttctacagattgaaaaactccctatataatgtcaaaggtggaaatatccctaaaattgaaacaacttcgaatcacagcaaaactaaaatttaagaacttctagaacaaaagtcccttatcagtgctcacacttctaagcaggaagggggccctagcagagttggcccagcctggcactgggtcactgctggcagtctcaaccccagtgacatctgagaaaaggtcggggacctttgttcaggcaagtttacctttaaatttcaacagcaaaaccagacatttagcgtttgacttatttctgtttcacttacaacactgctcaagttcagggaataagcaccaaaaatagaaatggaaagggacgcctactgaacataccgtgcttgaccacgacaaaacaaagggtaccactcttattccaaagctttagctctctagattagaggaagaggaccagtgcttgtatttacacatgctgtgtaaaaccaaagcagcacttagcacactataaagtaagaaccacattaatat

SEQ ID NO: 69827 - DNA, 2125 bp, Homo sapiens
gacctccctagctgcccaaaggatgctgacgacacgaaccagctgtgacagacgaacattcagaggcaagcagatttccgtaatgtttacagtccttgccagtaggaaaagccgtgacttttcaacaaaatcacttggccagtcggatgcacctcgaaatccctccatttgacagagcacgtgttaacttctaagaaagtaggtggggcccgggatgtcacctcatcttaaaacatgcggaaaccaaaaagagaaaaggctctcccgtcaagtcagcggagctgcccaggagagcggaggctttccggaatcccggctccaccacgaacttcaaggcgccagcgtcccaccgcgagtcctgacacgagggctgccttcaaccggcaagcccatctcccgctggttaccaggggactccaccccggacgacaaatcacagtcagaaccaacgtgtctctcccaccctcggactgcggctccttcccaccggcgggcctgggggtgggcccagacccagcctgggggtggggggttggggagaaggcgggtcccagcggaaactcccggccgcgccttcccgagccatgcgctcgggccgggacccagccgccttcgccccggggaagggagagggcgtgttaccacggcaatgcctggagggccgaggggcgcactcgctgaggggcttcgaaggggccgggggagggagggggcgcccgcagggaggggctgacacagggctgactccgatttaggaatatcctaccacttctccatcaacaaatctcccatcactgccgtcccacggcctcgctcgcgcccacagacccactcacaattccttgatcagcaccatcttcccggaaccccctcacagctgccgccgataccaccgccgccgccgccgctaccgcctctcacagcgcctgcgcggccccgcctccctgcccccccgagccaccatcgcgcctgcgtgcttacacccttccgccgcgaccagtcgcgtcagcgcgcgagggggcctagctccgcccagtttcgtgccccaccccgggcacacgaggcctccactgcggttgcgcagcctgccgaagagcgtgcggcttctactgcggctgcgcaagctcgacgcgcgcactcttgtctgcttacgagggctcctcccttcagctttggtccctcggggcgtctgggcagcctacgctttccggtgagttttccagttggttctttggaagccgttttgcggtgactggttttctgctctctctcactgctccgagtcagggcccacctccttgaccgacacctcacctccatagtccacataaaagactcctgacaggttctggaggcagccgacgccagcttctgttcccctccccagcccttggcagctcaggttccgcgggaggacgttcacctgcttcgcggtctcgtggaggtccaccgcggcggagaatcctaaacctcacctgtgactcggcaggatgagcggccagcactcccgacggaggccctctgggagaaaagaggcccttggcctcgagacccaggaaagcgggctgttcaggagttggttcgcgcagttacaccgaaagcgccgtgggcctcaaagccgcagcccggaggtcgctggcttgctctgtgtcagacacggttctaggcagtggggatgcatctagaagcagacacagtccctgttctcaagaagctcacagtctagaggagacaactcacttggaaagaaagcagggagaatttggggtggtggggaagtgctatgctatgaatacagtggagtactgggagaagcagaggactcaagacaagggctgtcttaggaggcggtgtttgagcctagcctgttaggatgtgagaggggcattccagttggagggaaatatgacccgaggatggagtaagcctagggtgttcaaggatcagctagagggcagatgtggccagaacatcctaagtgagggtgggaaatgagctgggaccaactggattactaggccatagtaaagaatttgtcttctaagaaccatgagaacctgttgaaaggctattaagacgattaaaatatcacgaaaacatttttgtataaacatctggtgtatct

SEQ ID NO: 69828 - DNA, 2744 bp, Homo sapiens
ggggtatggattactccacatccttgccaacacttatttctgtttttttgatagtagccataccagtggttgtgaggtagcatctctcatagttttgatttgcatttctgaaatgaacagtgatattgagcatcttttcattgctttttggccatttgcttatctttggagaaatgtgcattcaagacctttgcccatttttagtcaagttttttttttaattgtggaattctctattctggatattgttcccttatcagatatattataaatattttctgccattctgttgcatttttactgtattgtagtttttaaattttataaaatccagtatgtttcttttttgtttcattgcctgtgcctttggcatcatatccaataagttattgccaaatccagcgtcgtcacacatgtaggcaattatacatttcaggttttgtttgtttttttgtttgtttttgttttttttttgagacggagtcttgctctgtcacccaggctggagtgcagtggcgcaatcttggctcactgcaacctccgcctcccaggttcaagcaattctcctggctcagcctcccgagtagctgggactacaagtgtgtgccaccatgcctggctaatttttttttatttttaggagagacggggtttcaccatgttagccgggatggtattgatctcctgacctcgtgatccacccgcctcagcctcccaaagtgctgggattacaagcgtgagccaccacacctggccgttttgtttgtttttttttaagagatggggtctcaccctgtcacccaggctggagtatagtggtgcaattatagctcactgtaatttgaactcctggactaaagtgatcctcttgcctcagcctccaaaatagctgggactgtatttgggactacaggcgtttgccactatacccagttaattgtttttgttgttgttttgtttgttttgtttgctttttgtagagccaggatcttgtattgcccagtattgccttgaactcctggcctcaagcaattctcccatgtcagcctcccaaagcactggaattataggcatgagtcatggtgcctgtctcattttaacttaatttttgtatagggtattaggtaaggatccagcttcatttttcacctgtggatatccagttttcccaatgccatttgttgaaaattctgtcttttcctcattgaatggtattagataaaaattatttgaccatacaggcaagagtgtatttctgggcattctgttgtgtatatgcagtgtgatttaaattgtctcctgttggtacccacttaggctatattcaatagttgctattatcagagtcctgcagtaaatactcgtttacatagatcatttcatgtaatgtataagtgtaactataagagaaatttctgaaagtggaattgttaaagggtaagtttaacatattgcagtttttacatattttgtctagttttcctttaaactgtaccagtatacacttccacacacaatgtatgagagtacccatttccccaaactcttcaacatcgtattttcaaacattgcttaaaaccttttggttgtatgatatagtactgtaagaaacacactcacccatccaaacccgaagaatggacttagaggcacgaagaacagcgaaagtgagactttaataacgatcttgcaaggtcgggtgtctgagcaggtacatccagggaagtcacaacaggtaatttatctcctagcacacaagtccctccacgagttctgcattggttgagtactatggggttacaatcttccaagacgttgcctaagtttcattatcccccttataaggttatatcccgtccctttccctgcttaagtttcgatttcctgataacgaaactttctttccttttacgggctgaaccctcctctacattctgtttgcttattgtgacctaggtgcattagccaggcattttgtcacatttgcaggctagctgccaatacttagatttatcatgccttgaaaattgaccatttaaaatattttcttactgtacaaatacaaaaaagttacataaaacaaattagttactgtagggagatcaatagttgttacctccaccaggtcaagaaatagacctttgccagtctttccataagtccttcatgtactctgttctagtcacaattccctcttctctaaaagtaactgcctagccaggcatggtagctcatgtctgtaatcccggaactttgggaggccaaagagggaggatcacttgagcccagaagttcaagactagcctgggcaacatagtgggaccccatctctacaaaaaaataaaaaaaaattatctgggtgtggtggcatatgcctgtagtatcaggcacctgagacaggaggatggcttgagcccaggaggtccaggctgcagtaagcagtgatggcggccactgcactccagcctgggtggcagagtgagactctgtctcaaaaagtaactgccttcttgactttcatgggaatcacttccttcatgcttttgatcaccctactgtgtagctcctaaactctatagtttcttttttgtttcttttaacctacatgtaaacctgttctttcaccccactctcccacctaccatacaacttgttgaggaaattgaattgtttgatagaattctctgcactctggattttgctgctgttagatcttattatggtttggctgtgtcccaactaaa

SEQ ID NO: 69829 - DNA, 698 bp, Homo sapiens
ttttctgttttcacttgtgtagagtcttctcacatattatctgttagagataagacttggtgctagagggaatattttggcaaactggagtagtacagtgacttttaagttctttccttgccattcataataaataaagttttctggtttctctgctagtttttcttaacattcacttctcataagcttaaggagtagcactgagaggttccaggatatatgctattttgaaacagtgtcaaaaatttgaaagatttgtcattaagttacgcaaagtggttaggaggcagtcaataaataatcattaagcctgtattgcaacaccagtgtaccttgatagcacagctactacgttaaacaaaaaacagggtgggggaagaggaaaaaactatgtaatcttttgtcattggttatacaaaatcatagccaatgaaaatatgttctattttacaaaactggatacatagtaaaggtgttgctattgtatacatgaacaatgaacttatgacatgtattctttatcctttcacgtgttttaatattttccattggatttctacgtctttatttctgtgactggtctatagcaagactaatattaatagatgaaaatgttttgaggttgattgtataacctttaagcttcccgcatcagtttaccttaagacagatcttaattcacatatccttattagtag

SEQ ID NO: 69830 - DNA, 1115 bp, Homo sapiens
tcaagtcaggtataaagtgtctgctttatatgaactgtggaaactaggccagcaaatctcaagttagggaaccaggaatagtctggatctttctgtaagtcacactgaatgttcttgtctgcaaactattctgtgatattctctgaaagggattctaagcttatttggaaaatagaagtaaggaaatatttatctgttaaccatattcaaatcctgatgaattaaaaaaactacctttctatgtgagatatatagttcagcttcattttcagaaaatggaaagtacggatactatttattggcatttagccctttaaaaaaactttttaatacaagattagcaagatattagaaccgtggtaattggatgtctttcagggtaataaaccattaaagtttatgagtcatgttaacagaaagccttctcagttccaccatttcccttgatcagttcattctccaataaacataaaatcctcctcctggagttcagagcacagcaagggagaagagaaaaagctaaaacaaaatccagaaagcagtaattgggaaatgttagtaacctcctgaaccttgggctcgtgacaaatgtccaggactcagggcactgctggcaccagcaggatttggctgcgggaagtcttcttcacaagaacttagtccctggtttgtggtctcaagatttttggagacaatccagatgtgttttcttgaagtcatcccaaagccgccttagtagttaaaaaataataataatgattaaaaatagtaacagagcaacattaagggctctggtcctttgtgtgggaggagtcagttgacagttccttgatgtctgggacagctgctggaagcctctattgtgtagacagagcagggtgtgggccccaggccgagtctctgagcacagagaatggatgccacttgtggctggtgtggactcagagctcgccagcaagaagagtgccacgctctgccgccaacatcatccctcctcaggggtgccttggatgcacgctgggggagcagctgtgtgtttgataatggaacacagtctgataaaaaaaccctagtgtaagtaactcagttactgtcttcctttgccctttcaatac

SEQ ID NO: 69831 - DNA, 657 bp, Homo sapiens
ccaaccatatttttaacagccttcggccagcagattataagaaaaagaaagaaagagagaaagaagagagtttagactcaagcacaggctgttatgcaacatgagctgatcactgtttaggaagcgccacaccaggcccgcggctctgactgggaggggagaggagcaagagtcagcaggggacacacaggagaacggacagccacacccaggccagccgcgtgcggatccaggggctcaggggcagcatcagccaggcctcccttcccagccagtagaggctcgggagggaaagagcacagcgggcgtttgtagccagctcaggaaaccaaagtccctggttcctgagtgagccaggaaaggtccaccagctgccaccactgggggcagcctcgggacatgtccctagggcccaacagcgtatcaggcagaaagtccctgtgctcccatcaaaagcaagaaattaagcaactggctttttggcctctcagcacagccttgcaaatggagtataattttggctttcagattttgtagaacacagacctctagaccgcctgggttcaggatgctttaatatgcagtgttctggaagtgtcttcctgatgctattcaacgagcaggcgttaatacacttattacaaaatgagcagggac

SEQ ID NO: 69832 - DNA, 1107 bp, Homo sapiens
aggactgttttacccctgacatatgctgctcaacctaattatttacattacaaaatatattcaaataacagcaacaatatttttaaacaccatgcacccaaggtctaataaccatttggatatgaactatggcttatctttcatcaaagcaagcaaaatcaggaaaggcatttataaatttcatatagaagccctaagaatgtgaaaaatattcacaactatgactaatgcagacaaataataaactcagagaggttaagtggtttgtccaagatcacatagctatttggtagcaaaacttatttatcattattatccaatgttcttcccattattccacattgctcccctctgctaataggtcaggaaagatactacttaaaatagtaatgctgggcatcagataaacagtctaaaagaaaaacttgactttggggaaatagaatttctaaagagtgacacatcaaagaatgaagtatgtgtgtaatttggtgattacattttccaggaactggcagaagagattgcactagttcaaagaaagccaaagccaaaggttacactctccgttagaaaataagagcgatttcactagtattgaaaggcccaatctgacaactggtagtaaaagcaatctgtccactggctgtctgttcatactgggccacatagctcaacttgtaaaggttgtaattctgagtaatcagtttgtggatgtaagccttaagcaaagcccaaagcagcagcccagatcatttcctctgtccccctccccaacccctttttaatgaagccacaaattcagtggagtctggagatttaaattctaatcattttccctttgccctttaacattggtgctcccaagggaacctttacttccaagcattactattctaggaccctgaatcaataacccacagctctaaaaggcaagaatgccaagtaaatgctgttttcttcctccctccccatcccaattaaggaaaatgaaatttataaggctgtggaagagtctccaatagagacactataataataaaaccactcagaatttctccaaccagactaaacaaaatgctgcattcaacttgcacacagcaacca

SEQ ID NO: 69833 - DNA, 892 bp, Homo sapiens
acaaaggtttcctataaatcctgaaaatgtcagttaaatgatataattcttacagctttcaataaaatgacatggttttagcacatcaataaaagcaaagtcttaaagctgagacatacattgttattaatgatataatgaattcactgtagaagctaaagctgacagggccagccgggatttcaggttttccacagcatgtcatcactgtgactgactagcaaaatgaaggtggctgctggcgccctttcttgaagttgggccaattaaactctgtagcctcttacactggcaatgtttactggctagctcctgaatagtaaaggtgccaactcagatttcttcatcactgacttccttcacttcttgtcaagtctatcaactattcccatcttctcaaatgttcctggaagtagttttctatagatgaccattccctaccaattttacagaatcaaaaatatttaggactaaaaggagtaaagatttagtctggtggtttacaaccatggcactcctgcactgatatcacatgatcagttgtgagctgtgtcacaaataactgtaactttcccatctcctccccctgtttttaattgaaaggaagttcacataacatagaattaaccatttaaaatattaaattcagtggcgtttagtacatgcacaatattacacaaccaccacctcataactgtgactttaattttaataggtgcatagttaagattatccctttaatgagtcaccctcgttactaatgaataagtcaccctcacttatattcaatattgcatttctgagaggttgataaatggatagagataaatttgcaagcttagcatttctaataactggccggtcagaagatcttgccaactgactgaagatc

SEQ ID NO: 69834 - DNA, 2220 bp, Homo sapiens
tcacacatgatttctatttcagttctgatataaaacacagtatcacacatcgtgccacaaagaaaagagtcagtttagctagttcaagtaaaaaccaggcagcggctaacagagacaggtcaaggctggagaggaccacagcacattcagtttgctatgttttccttcagaagaatgtcaataaaaaccacggccaaatgaggtatttgaagtttaaaaaaaaaaaaaaaaaaaggcctgttatgcagtgaacaactgggttcgcctaacagttaggggcagtcagacaagttggcaaaaaggagccctagccaaatgtacagcggccaacaacttgaagaaagctgtctttctccctcgacgtcctagggtagggaccagtcccacatttagaaacgttatttctgggaccaatagcaatttattttgatagaaccgctggatttttttttttcttgagttctcaacaaaggagccatattaggaaataatctcgcaaaaagcaaagtgccccctcccccttttccccatgatcgattcacacacgctggtgcacgctgacacgcacagacacacgcccgtgcacaatggccagcgcaggcaatcgcacgggcccacgaggcctcaggagccccgcaggctgaaggcccggctatggccagccccaggcgctcaggcaggaggcctctcggcccgccgccccggaaccagctgctgggctggtgtgctggggctgctcgccccccagcggggccctggggaaacggctgccagcggctcagagccttttaaccccttggggaaataggtgttataacaccacctgcggggcctgtgtcaggggtgcagcctcaaatccactcccgccccacgccccgccatggggcaacacctagtaggtcttggctggctcctgcaaagctaatcgtgtcgctgtctgcacaggacttctaaagcaaacgggtgcttccgagctgtcacccctggggctccaggcatatcatgaaggaaaaacttaaagggcagtggatgcagaccagatttggtaactcgtccctaagggactgatgcaagtcccaaaggaaccagggctgtttggaccagctggcccagcaaactacggaaggggtggagagacctgaaggtaaccgccccgtgttacccttccccgggttgggctttggggccccattcccctctccaggacacttaccttcttccggggctgccatttcatcatatttgtaaagccgatacgtggaacatcaagatgttggctgggggctgggggcagatgcagggcagcgacgactgcaagtcatgctgcctccctcccaccccctaattctttcccatattcactgcgaagggaaaagccccaggagagtccagtcttttcgccttcagttcaatgaaaagtatccccaaaccacgaacacacttcccaccaggctaggaagtcccagcagccaccggcgtactcctgccagagcggggcattttcccggccggcgcctgcaaaaggagcctgtagcagggggtctccaagctggctgcagagaccctccctcagagaagagactgagaacgcgggctgctacagaatcccagccgggcttctaccatccaaaccccttttggcgaattctcctcttctcaaaaaagattagacaagcaatcaaaccctcacgcgcagcctggagcaattcccacaattctgggtgtatttctcgtttgtaaaatttagcaaagaaaattccaaagatctgtaatcagagcttctttacgctgttttcgcttccttcttggataacttgggaaaaggatctgcccttctcgaaatgcctaccttccctgaacactgtaaataggaaaacttggtttgtgtgtttagatttttttttttttaattcccaagaaccttagtggggaaaggctggaaggaaatcctgcaagaacccaactccacagctcagtctgcactaatgacttccttcccttcagtgcgagcacagccagcccagcttcagccacacagagcaaacggtttctgggtcttagtgccacgacatctgctccaacacaaaaagtaaagcatgcagtttcagaggcacccaacggctcctaaggaatcaaagccaaaaacacctaagcggtcaggaaatcatttcaaaagacatacttagacttgtaaggcagttatatctagagaaaaaaaag

SEQ ID NO: 69835 - DNA, 533 bp, Homo sapiens
ccgggctgcgccgacacctgtctcaccgcgggtgccgcttaccgctccggtggactccagtccccagattccgccccacgggggctgggggaaaaggggaggcgctgggcgcattaggcgctgactgtataccgacaccccccaccccggtgtgcgcaggccaacacccatacacaccctcacacacccacacacatccacacacactctcgcggaaactgagccaggcaggcggcggaccaggtcccgccgcctcacggctcgcggctgggatcgaacccggactgcgagacgccttccgcctcgcaggcgctcctctgccgctgaggcccggcccggctcccaccgccggagtttcacaaagaaagtctcccggcccgagcccctcacgcactcaccggcgccgacgccggcggcgactctggctcccgccgccttcggctccttgcgggggtcggcccttgggtcggctcgggcgccggcggcggcgactgctccatccccacggggcccgggccgcgtccgcctcgagc

SEQ ID NO: 69836 - DNA, 1124 bp, Homo sapiens
aagtaaaagtttctagattaatcaaagatgccccaaaattttccatgttctttgatactcacaaattcatccatctaagcagggggttattcctgagtttaaaaatcatcaatctaagattattttgggaagttatgaagacgtgttaataaaaggtgatcagccttttattggtacttactgcctctcttgctgaaccaatagcaaacttccttttgctgatgatctttatggctactttcttacatgttttcctctcgaaagccagctttacctctccacaggcaccactagagggaaaaacaaagatagtgattgtctgaatgtttttaattatgagacctaccactcctgggtccacttcaagtattagaatttacagacattccatataacagcctttccattgtccctgtttgcagaggacacagtgaaacttcaccagtgtaaaatgtcaagggcttaacagccaaaaacactaagtcagctccaaattccatttctgagcccagcaatacaaacatgggtcttactgtagccctggattgtgaaattcccagaaagatactaagagaaaaatgagagagaaactacgtatccgagaggtcagaaaaacattaactagaaacagtcctccctggtcaaaaataagtgcccaaaacaaacaaataacggtaaacagaatctgcaaatgaataactttaatggataaatttctttccttcttattctccatcttcaaaggaagtgcataagcagttgatgacataagttgcaccctaaatcaaatcagattacctaagaaaccaaacgtattacacaatcagcctactttcagcaacctctcacagagatttgcagttaaatgggatactactcatggaggaggaatgctctccaagccattacccagaacacagttaatcctgagtaggatctgtcctccaaagcttgggtcagcccaagataatggctactagggcatcaattacccattatgaagtagactattataactattgtgggttttgaaggggtgagttgaggggcttaccaagacatcttttttattgtgttaaatatacataacacaaaatttaccactgtaatcattttaaagtgta

SEQ ID NO: 69837 - DNA, 1366 bp, Homo sapiens
cctgtttcagcttgcaagtaatacgggaagtgaacttcacctcgaggatgatctactgaaaaggaagagagtcgcccacacactcccccttcagctcaaaactacagacaaagcgaagctcaggagactccgttcgcacaaaacgcttaagatgggattcgaaccaccaaacacccaacagaagttccccatatgactcaccgcgtgagcccacctggagccgcacactctccgcagcctcagccagcagagtggcgctaaacctgcagatacaaactccaccctcagccaatcaaaaccccctcccctgccgccggaccaatgaggagcagcagatgtggccgtcaggcgccgcctcaatgcctcctgggagttgtagtttagaagggagagcggaacttagaacccgggttcccctcgggtgatcccgccccctcgactccccagccaatcagcaacattagtctggttagacgctctctttgcttttccccacgagtgaccacggctagataggccgccggccagatgtggcgggggagagccggggctttgctccgggtgtgggggttttggccgacaggggttcccagaaggagaccgctaagctgcgatgctgcgtcgcaggcgggaagcaattatccccgctgttggaactgcggcggcccatggggccccgggcgggaggacaggttcttctgcccacagtgccgagcgctgcaggcacctgaccccactcgagactacttcagccttatggactggtacgagcgacggtttcgggaaacgggcccgggcgagagacacgtcgaggtctggcctgcgagaggggaggacggatctggctggcggaagagaaggcgggactgatgggggggcggaggtctagagagcaggcgtgagagaagtgtcttgatttctcaggaggaaattgagaggcggggactgagggaagcaacgttgaggtgtggagaagggagacgaacgggactggaggggcgggcgctgaagttagaggaaataggggggccgaggctagaggggagggagatttgaggggcggtacctacgggaaagggaaggagaagtcgaggggcggaacttgaggaaagggtacttgaggggcagggcctgggagactggaagacttgaatgaatagggtgagtaaggtttaaagttgggttgatgtatttaagaaaggactgcagaagtgtgatccgagattagggagtaaagcatgaaaagcttaatattgtgggcgaggcctgagggaaaagtgagaattggagggagagggtccaataaatggtttttccccctgagactgaggttcttggagagacggggcagtgtggatagagctga

SEQ ID NO: 69838 - DNA, 708 bp, Homo sapiens
gcacttaatgcctctacttgattggatgaggcccacccacattatatagagtaacatctgttacttaaagtcaactgattataaatgttaatcacatctacgaatactttcacaggatcatctaaactagttggtttttgttttttttgagacatggtctcactctgtcacccaggctggagcgcagtgttgcaatcacagctcactgcagccttgacccatgggctcaaacagtcctctcaccttagcctcttggatagctgggactacaggcatgcatcaccatgcctggctaattttttctgtcttttatacagatggggtttcaccatgttgcccaggctggcttcaaactcctaggttcaaagcaatccaccttcctcagtctcccaaagtgctgggattacaggtgtgactcaatgtgcctggcatagattagtgtttgatcaagcaactgggcaccatagcctagccaagttgacgcataaaattaaccattccacatagaaaagattccaaggttctccgttagactatattcagttatgtactttcacaaatatttgtagtgtacctacaaatatcaagcactgtgcatgacactgaggatacagcacggaacaagaaagactgtgccttcttggagtttatatatgtcaactgtacccaaaatggaattcccaagtgtctcccctccccacctttccc

SEQ ID NO: 69839 - DNA, 1885 bp, Homo sapiens
aaggcaccaccaacttcatttgtattaaaattgttacatttttattaatagagtcacatatgaataactgataatgagcgtgtattgtatgtcaggcactgctttaagggctctagattgtttttgttttgagacagggtctcccgggctcaagagatcctcccgcctccaccttccaaattgctgggattacacgagtgagccaccgccctgccctggctctagatgtttaaattcatgtactccgcacatcaactctatgattatatgtactattattatctcattttactactgtggaaactgagatacgaaacttgcggagtgaggatttgaacctaggtcatactcttggccagccagagacaccctaagccccagctaagaggtcgagaagcagccattttgcttgtagtccggaaggactgcaaatcccggcatccctcgcggcagcggccctctacacacaacaaatcccggcatgcccccgagcggcctgaggtggagggttctagaaggcgtgacgtggggtcgagagcgggatccgaggctggcgggttttggcagtagctgtggctgcggctgccgggcctggggacgcgggcggccgaggccgccgtcgcagcctcctcgtctcgccggctatggctgcgctcggccggcccttcagcggcctccctctgagcggcggctcggacttcctgcagccgccgcagccggccttccccggccgggccttcccgccgggggctgacggcgccgagttggccccgcggccgggacctcgcgcagtccctagcagtcccgctgggagtgcggcgcgcggacggtgaggagcccgtcgggcgcagggcgcagggcgggcgggcgggcgggcaggctgggcgcccctcgcggcgggcgcgggcaggggcgcgggctccgcgccggggctttttgactccctccccacggccctccgcgggagcttcgcagcccagtttacagatgaagaaactgatccccggagacgttaactgtaagtcgccgggggtcacatagcccaggagtccggtccgaacctcagctcgactgcggcccggagaagtgagactttcccagttggaacctgggcgactcggtctgggtgccccctcggcgcggccgctgttagtgacaactttcagtgtctcatctgcaaagtatgccaagcatgggacagaaatgggtcctcttagtgagattatttaaataaagtgcttaacacagcgcctgccccgaggacgtttccctggtttggtcctccctaatctgtcttccattacgttgataaaaggacaagttgagatttcactgtccagttctgtcggggcaatccaccgttacccgactgacctgtgatttgtacccatcccactaggctcagaaagggacgtttggtatgtggggatgagcaagattattggagcaagaaagaggatactgaaaccacaagctcgagtacatttcttaattgactgatttttgtttgtttcaacagtgtttctgttcactgtaaaaagaaacacaagcgagaggaggaggaggatgatgagtaagtttcagtggttgtttattcactctgtggtcaccgttagttgaacccctgttatagtctaaattacttaagtgaaaaggtgaaacattagatgagtgtctctggaaagagacacagaaattagtgacattggttgtcttttagagaaagtaacagtggcaggcagacaggtcagagggaaacttttcgctctataacaagttgtaatatttggattttgagccatgttaatattacatgcacaaagtaaaataatttaaaggatacatattgaaaagttttgtttttgtttttttttttttttgggac

SEQ ID NO: 69840 - DNA, 4837 bp, Homo sapiens
acgttggtcaggctggtctcgaactcctgatctcaagttatctacccaccttggcctcccaaagtgctgggattacaggtgtgagccccggtgcccagcaaactttttttttttttcttgagacagagtctcactctgttgcccaggctggagtgcagtggtgcgatctcagctcactgcaacctccctctcccaggttcaaacaatcctcccacctcaacctcccgagtagctgggactacaggcactcacgcttggccttttttttttttttttttttggtatatttttgggtagagacgggattttaccatgttggctaggctggtctcaaactgctggcttcaagtgatctgcccaactcaggctcccaaagtgctgggattacaggcatgagccaccatgcccagcctagtttaacttttaatcatatattcaattgtattctaataggggctgaaacaacttgggatgggaagcaaatatcagaacattcaccaaggaagggtatacaatggataaaagagtttgaccttaagtagttttacctcttcttctaaatctaccacttgctgttccagctcactcattcgagccttctttcgatctctggcagtctgagctgctactctgtttttcagtttcctaggaagagaaggaacataccacactgagtcatatcaaaccttatttatgtctttatttgaaaactttaccagctggtgctttcatttttatttacagtataagacagactaatgataaaatacacttcaggctcctcccctcaataaaacaaaataaaaaatacagtcttctgtcaatctagctcgaagacctgctttattctctcctatattgcatcatccgtccacctcagactcatccccgtcacagcactggggctggacacacacactattcatcttgcatcataaggaactttcctctttccccatctattcccccgctgcttcctgtctccagttctcttaaacaggatccaacctggcctcattaatctagtgaaggctgcaatcttgctatgacatcaaccctccgtcccccagtccaatttagaaaagggagaggctgatgccactccctgatctctagtgttgagatcctaggcagtgacctgctgatgggtccgtgtctgttggaggagacacttttttttttaaaagaattaactcagaagagacacttcataaatcacagaaggcacaatgatcacaaaagagtgaacatttacggaggactaagtgctaggcacattatatccaagtctcaatctccccaaagacctcatgaagtaggttccattttaagaacgcagatactgagctagaccagtgagcctcgcagaattcccagccctttcaacagctctgttatttcagctccgcgcctctccagaaatagcagtaaaccaaaacagattattcgacctcatgtccgagttaagaggctgaaccaccagtctgcggccacacagcaagagggcctggaagacaggtgcccgcatccccagctctggtcatctctaacgagagagttaaaaagtacagaaaagagccctgggccgccctaggttcccagcgtggcggatccggtcagtccgggcttcctgccccgccccgcgccacgctggcaccgacccgccaggccaaaggcgacggagccctgcggggcggccagtgctgggtccccgctcccagcccctgcccctgcccctgtccctagtcccggcttcagatctggccccagaccccggcccctcgcccacctcctcagcgccttctcctcggggctcaggtgcgtgaggcgctgtcgcttgcgcgcctggggcagccccccgctcgctgcctccgggctggcccctctctgggctggcaccatgagcggcagggcctggccggccggggctccggcggcggaggcgggctgccccgacagaagcagaactttaggggtcccgtcggccgggttcggcgcggctgccaccaccaccatagctccagactacgcaccgcgcaccgcgcgccgcagccgcccagcgcccagcctcgccgcgcccggcctttctacggtcgtggccctccgcgattggccagcgtcgcgtgacgcacggccgagctcggcgtccattggtccggcctgcccggcggggcgtttcaggaccgtggctatggagtccggcgtggcagcggcaatccctggccaaaggtacttggggtcattttccgcggggggttacgtgcgggagcgtgtcctccacaaacggattttccccccttaagcggacttatttccatccggagtgacagaatttaattccaaaccgagagctttccagactgacgaatttttaccgggactaacagagaattacctcagcctgacaacattttatctcgtgcgccacttcgggatccgagtggagccgaaagtcgagatagagcgcagttgggccttgggttcgaaaagactggacagaggtttcagtgagccgagatcgcgccactgcaccccggcctgggcgacagagcgagactccgtctcaaaaaaagaaaaagaaaaaagcctggaaagaaattctgcggaatagaagtctttaagaaatgagatcgtgccctttaaaactaagtttaacaatagtgagggcttaataaacgataggtgttatctctgggttggaggggaataccttcaattttagtttttcgttccatttctaaagtttgtactatgagcgtgcatttttttaaatttagttttattttattttttaaatagaaacgaggtctcactgtgttgcccaggctgatctcgaacttctgagctcaagtgaacctcccgcttcggcctctattatttttattttatttttttttcttattttttgagacggagtcaggctctgtcaccaggctggagtgcagtggcgagatctcagctcactgcaaccttcgcctccgggttcaagcaattctcctgcctcagcctcccgagtagctgggactacaggcgcccgccaccacacccggctaattttttgtagtttagtagaggcggggtttcaccgtgttggccaggatggtctccatctcctgacctcgtgatcgcccgcctcggcctcccaaagtgctgggattacaggcgtaagccactgcgcccagcctcttgttattttaaatgaggggacaggaaaacgtcacatgtagagactgagaccccggggttgaccctgagccccctctccgaggggaggtcgaggttcctgcctggccattgtggcgtgagggtggccaggtgtttgtgaaagaggggcccccagagagcagcacgggagcgatttatacacacgaatattaacatggagaagtccgagaaacccccgtaaatatgcctgtccactttttttaaagcaaattacaaaatgtgaaattccccagaaatgcacagcaataccttctctaacaagtaattattgcttcctcctctgcgggcagcactattccaggttctaggggtgcaaacagtagtaagactgctacctggtatttggaggatatgcaaaaagtgaaatgttaagatagcaggttcctaagtaattctttagtgttattaagtcggattagctggtcaattttattttggtagggagggaacaggatgggaaaaagaactaaaagcaagtccatctcttgatatctaagccctctaaagggacatagttttggtttttgccaggactgggccacgagtctcctaacgtgttttctccctcttcgttgggagggaaatcaatgatttttttttttttaactgggctgtcccaactccagagcctcctgagcacgtgctgtcctgtgggttggaaaagaggtgggggtgattggagtctctgccggaccaagaaaccaacttcctgtttaactctcatcagcttgggccacctgggttctgatgtgccttcagatgtggggagacttactccgggcctctgaaatgttttgggagaagtctggaggtgtcttctagccgagacctatagcttcatattaaaagaccttggaaagctgtaagaggctgttagaaaagtcatgtcatgtcatgccacctgttacgttttattttttgatgccttttttttccttttttttttttttgagactgggtttcgccacgttgcctaggctggaactcctaggctcaagcgatcctcttgccttggcctcccaaactgctgggattgcaggcaggaaccacagagcccggccctttttatttattaagtgaacatttattaatgccaagagaatgtctttcactgtgtaagaaagaaaatgctggaggacccttttagtccagcagggtgtagtgagtaactgagtagagaaagcacagggtgcgggatggggaaaaaaggttgatgaattgcactttgatcttagttaatgcgatattgaaattcacttccccagcttgttttcaaaacttttatatttttgacaaacactttaaatcatactaaaaacaataatttgacccactacagattgctgtccatgcagtcttgaacatgtgagtccaaacccttggacagtttcatatcctctctataaaatgaacctggtaattcttgcatcaggtgccataagtgtttaaaaatatttactagacacctgtgataagagctataaaatatataaattacaaagttctcggtctttgaggccaaacgcggtggctcacccctgtaatcccagcactttgggaggccgaggtgggcagatcacctgagatcaggagttcgagaccagcctggcca

SEQ ID NO: 69841 - DNA, 1501 bp, Homo sapiens
agaaaaatttcttttcttttgagacgcagtcttgctctgtcacccaggctggagtgcagtggcacaatcccagctcactgcaacctcctagtagagatgagggttcaccatgttggccaggctggtcttgaactcctgacctcatgtgatccacccgcctcggcctcccaaagtgctgggattataggcatgagctcagccaaatgtacagaaatgtttcaaagctagcacagataattctcaggcacgccctcacccggttccggtttcccctaatgttaacagcttacaccactgtggcacatttgtcaaaactgagaaaccaacactgacacattgctaggaactaaactctagtctttatttggatttcaccagtttttcctttaatgacctttttctgttccggggtcctgcattgatgttaattacttggcttccggatagtacacctacttttgcagaatgtttcatgtttaatttcagcaaaccgtatttatctgaagagcttaatttactcaagttcagtcttctcagacacacaccctggggctttgactgcaaaatggtaacaactgatccctccctccccctttggtgaggtggcttaggctttaggtgatgctgagaatttgtgcatgatctggcttgtaggagactgaatttcctgagaatgaattagggactctcagcattttaaaaaatatcctgtttttgttttgttgttttgttttgagacaaagtctcactctatcacccaggcaggagtgcagtagcgcaatctcagctcaccacaacctctgcctcctgggttcaagtgattctcctgggtcagcctcctgagtagctgagactacaggcacctgccaccatgcccggctaattttttttttttttttagtatttttagtagagacggggtttcgctatgttggccaggctgatcttgaactcctgaccttaagtgatcagcccgcctaggcctccctaagcactgggattacaggcgtgagccaatgtgcctggccaaaatatcctcttatttatagctgactttgcacatctgatattcatgtgggataagatagcaagctgtactttttctgttctttcttttttttttttccatgaaaacaaccaggatttatgtggttccaagagccagctggataaaatatagacccattctgttttgttgaataaaggtgatatgagaagaaaaaacctccaggaacagaggaagaagtataattatgtttgcctcagagaaaaccgggagagaaaccattcatcttccattcattcgtcttccattcccagaccttggaagagtagtcactgtaacatgggggctagaagcattggcttatgaaatagacaggcataagtaggttttcagctccaccacctagctaggtaaccttggacaagttgcttaacctctttgagcctcagtttccttgtctccaaaatgagggctgagctttgaataagatcctgt

SEQ ID NO: 69842 - DNA, 1181 bp, Homo sapiens
cctattattatttccaaagacagtccaccctaattaccaacaggcattcccaaactcttcttagtctatcattaatctcatcctttcttctatctttagatatttggtagccaagggctgggcgcagtggctcacgcctgtaatcccagcactttgggaggctgaggcgggtgaattacttgaggtcaggagttggagaccatcctggccaacatggtgaaaccccgtctctactaaaaatacaaaaattagctgggcatggtgtcgtgcacctgtaatcccagctattcgggagactgagttaggagaatcatttgaacctgaggaggcagagtttgcagtgagctgagatcgcaccactgcattccagcctgggtaacagagtgagtgagactctgtctaaaaaaaaaagaaaaaaggaatttggtaggaaagaagtttgacagttcccagaggtctacgtgaaacagtagggtactcatgtcttcaaaatatgtctaagtatgtataaaatttgatcactggtcacaagcagaaatggggtccacaaagcaggaaaaatgtcacagcgatgaaccttggataagctttctccagttgctccctcctccaaactggaaagaaaatttccatctgaccaatgagtgggctggacctggtcacaggctgccaagtatctgccctgttagtgtgacctggaacaaaattcccagcagaggacagcaaacatttgctgagcacacagacctgtgaccctcctacatgaaattctaggggcagggtttgaattacgccataactggggcttggtggcttatggggaagtgctctatactaaacaaagtgtgtgaggcagtcaggcctgggaaagaagaggttggcatctacaatttgaaaatgtgactctgctgttttatttttattttcagagacactgtcttgctctgttgcctggactggagtgcaatgctgcaatcatagttcaccataacctcaaactcctgggctcaagtgatcctcccaccacagccttccaagcacactgccatgcccagctaattaaaaacaatttttttttttttggtagagatgggagtcttgctatgttgcccaggctggtcatgatttcctgatccctagtgatcctcctgcctcagcctcccaaacacaccaccacacct

SEQ ID NO: 69843 - DNA, 2476 bp, Homo sapiens
ctcccttaatatttctcttttaaccaactttttttttttttgagatggagtctcgctctgttgcccaggctgtagtgcagtggtgtgatctcagctcactgcaacctccgcctcccaggctcaagcgattcttgtgcctcagcctcccgagtagctgggattacaggcgcccaccaccacgcccgcctaatttttgtacttttagtagagacggggtttcaccgtgttggcaactctggtctcgaactcctgacctcaggtgatctgcctgccttggcctcccaaagtgctgggattacaggcgtgagtcacctcacctgaccttaataaacaacttgttttaaaaatgggaggcaggatgtgtgtatgtgtgtgtgtgtgtgtgtgtgagagagagagagaaagagagagagagagagaaagaatatccttcccccacctctgcaattggccttaaattttacacactcaccacccctacttccctgctttgatgctgtccctaaagcagtgggaaagagcttcaggtctctgagcttgaccagtgtttcagctctcccttggagtcccgggaaacgtatctcttgggatcaggagctgggatggaacccagggctcctgagatgggacaaagctatgctctgtgcacctgtcttgcctcctcactttgtacaatgaggtaggcaaccttttgtatttcctcttgttttctttcctcaccccacttggcgtggcagccataaatccagtttcctccttggcatttcttaaatgtgttctgcctgaattaaaaactgaaaggggggaggcccagtagaccttgaaatgttcagcttgctttctgtccttggccactggcttgacaggtcccacaagctctcctgggagagtgagcagctgacgaaatcccagaggccctgaaacctcccttccagtaagtgcccatgtttgcatatcctggttcaagaataggaactgcttgatggaaactgatcagggagctaaaattactgattaagtggatttgcttccagctgcaggcagtggccttcctgagaaagagggaatctgtagggctgtttttacagattaagatctgccttgtttgttcactttctatttctaaaagttcttggaacccttttctaggaagaagccaggtaaagtcagagtagggaaaaacagtaagccttgtttttgtcctctatactttaaagcttcctttattttcaaagagacatacatgagatatctgaaataagtcagctttaggaaggatagctaacgaatgttggatgtatgctaggcactgtgtgagcacttggcatccattctctctttggttcccgcaagttaggaattggccccttttctcagaggagaatgaggccctgtgaggttaagctgatgaccatgaaattgtcagtggtggaactgggatcttattattattattattttgagacaaggtctcactctgtcgcccaggctggagtgcagtggtgtgatcacagctcactgcagcctctacttcccaggctcacgtgatcttcccacctcagcctcccaggcagctgggactacaggtgtaaaccaccatgccctgctaatggaactgggattcaaatctagattccttgccccgtgtcctggaggttgcccaggcatggaaaagatccaggcctggtccactgcttttagacacttctcaggcaaccccctctttcagtaatttgcgtttgattagatagaaactgaaaactcatgtcaaggtgtctgaaaccagcaaaagaatgttttttcatctttgtccccattccttggttggagggggtgctgggtgacatttgctgtgcaaacaatagcccagaagccgggcagagtccacacctagctgagtaaatagcacctgaaggccctggcagggcatgcaagctccccaggggtgccttgctttgagagacaaccatgagaatgtgcccttggactggaagccaggaatccagagctgtagtcctagttctactgttattaacacttgcacctctctgttcctcatctttgaagtgaagaaaaccaagttgatgatgtttgaggcctgaggctgcaggggtcagtttgacttaggcagtgcagcctggtggttaggcacacacagagtagaatccagttgcctggggtccagtatgagcttcatggctggacaaggtggctcatacctgtaatcccagcacttttggaggtcaaagtggaagaccagagtggacaacagagcaaaacctcatttctacaaaaaataaataattagctgggcagggtggtgtgcacttgtagtcccagctacttgggaggctgaagtgggatgggaggattacttgagcccaggagttcaagactacagtgagctatgatcacaccactgcactccagcctgagtgacagagcaaggtcccgtctctttttaaaatttttttct

SEQ ID NO: 69844 - DNA, 1098 bp, Homo sapiens
gtcctgagtcccttgggggcctctgtattagacgtggcatcacatgcccccagctagtgttcatcattatctctcatgtgtggtttctccttccccttcccatcaagaccttccatggggaccaattggcctgtgtgcccaggactgaggggtttcctgggatgggggattttcagtgcttaaactgggacagttccagcaaagcaggatggtttgtcacctgattagagaaaaaagcagggactggaattttttttttcttttttctttctttcttttttttttttgagacaggatctcattctcgcctatgctggagtgcagtggtgtgatcatggctcactgcagcctccacctctcaggctcatatgatcctcctgcctcagcctcccaagtagctgggacaacagacatgtaccaccatgcccagctaatagggactgtatcttatgtatgaacctttgtaactctcaagccacttgatagccctcagtaactattattggccaaatttgtcctttttggcagagcacctggcagggactcagtacatccctaatcagttgctcatctgaggcacagaaaggttaaaagtgatgcagccaggacctgctggcaaatccccatggctccagcaccaggcctgtctggctcctgaacctctgacctactgctgctcatccatatctatctcctgagacctcgagacatgaatccaccttgggtaacctgtaaagacttatttgcctaaaacctgcccaggagtcttaatgtccccatcccgttttaatagatgaacactttgcttttggaaactttctgttccttggatattgatggtcatattgcttctggaatcattacagtgtgccttcagccaaaagcagaactggaaacatcctaagtgggccggtaacgaggctagctctgtcgactagttcaagacccctgagcgctttgggcctgaggttcctcagcttccaagtgaaaggcttcgacttggcattctaagagacaatctctgtgaccatcagtttcctcatctgtaaaactggcatcatgataactttgaaggtaattgtgaagattaaagggagt

SEQ ID NO: 69845 - DNA, 465 bp, Homo sapiens
tcaacattgccactgaattgtgctttgttgacagaaattaaacactgctcacgtagatagcatcagggcagccttcaagactggtttgaacaggaaccttctgcccaagatgaagagtagactctatcttggggttaggaatgttttccttctttgtggcttgatcatctggccaaattttactttacctagtgctgcttttgttcccctggctttccttccttggagcccttttaaaataatccttctctgcttgtgggattttaccagacagtaaagaactgatgaaccataaaaagaaaaggttagacagacagcagattagtggttgccaggtgctgggggtggggagaatgctgagtgcttcacaggaatgaggactcctttgcgggtaatgaaaatgttttggaactagacagaagtggtggttgtgccgaattgcaaatgtactaaatgccaccgaat

SEQ ID NO: 69846 - DNA, 1054 bp, Homo sapiens
atttttgtatttttagtagagatggggtttcatcatgctggccaggctggtctcgaactcccaatttcaggcaatctgcccgccccggcctcccaaagtgttcggattacaggcgtcagccaccgtgcctggccttggatccactttttatgagaagctggtatttttaccaatcccaggtttttgcaattcacaatcccactttttaaaagtggggaggggaaatgtgtccaaagctaggtcaatttttgccaagaaagaatatttggcgagaagcgatcatctattaccattcaaaagagtaggaagaacatgatctcagaatattggatggacttttaaatttagtacattacgttttttgaaaaatgccctacattgtgcttatttttctcatttgtctgttttcatgtggtttggcccctgggagccaagaggccaatgcggttggcgatggcaccgcaaagagctgcagggccatctagtggccaattgtcttcactgcacatgcgatgatggttctattcagcagttccccaaaacaaaaccccgtaacccacacccaggttgatcccagtgaggatcaacttttgccactttcaaacatttgtaaaatgtttgacatttgttttgtaaacattccttcagctttgcacttaaaaggattgcctcactataaatctgaagattagctttccagccattgaacggtgattttgagccactgtttgccaaatcagacaggcctgagttagtgcttgctgttgggtgactgggcaagttacataatcttcctgactttccatttcctcttgtgtagcaaagacaggactgttctgaagatgaaggcaagtgtgcatgtcatgtatgtgctactgttcctgacaaataagtgtttgctactgatttaacacctctagaaacaaagtccagtcaagggacagaaacctaatcaaacaggctgaagcgaaggcttgctatacgaaacctgagcagccgagtgcagtgactgacgcctgtaatccaaacactttgggaggccaacacagaaggt

SEQ ID NO: 69847 - DNA, 499 bp, Homo sapiens
tttctttagaaagaagaaagaaagaagaaagatagtgatggcggtaaggacaacagggccctcgggggcacatggctatgctgtggcctggagagaggcagactcttctcagaggaggctaagggcctctggctagagcatggctacaagcaaggtggctaacatgaagagaccatggtgcagaggcagatgccagcaggctaaaggacaattctggaatggggcagtgggaggggtcctgtgtctttgggcttctttgatccctgagacactttggacgggacagagccttggccaccaacggggtcatgtctgtttaaacaaaatttaacacaggaggtaaatcattaactcactgaagaaacaaacaggagtgcaggccatatctctagcaccaggattcaagagccacggggatgttaagaactcctgaatatcagaagtggctgccactcatggcttctgtaagtgagtgaaagcatttggtgagcaccttcta
